United States Patent Application Publication US 2011/0183924 A1 - sequence listing, part 229

SEQ ID NO: 605711 - DNA, 926 bp, Homo sapiens
atcaatggatgaaagtggattaccacagctgaccagttatgattgtgaagttaatgctcctatacaaggcagcagaaacctactgcagggtgaagaattactcagagctttggatcaagttaactgagctttttcttaatttcattcctttttttggacactggtggctcactacctaaagcagtctatttatattttctacatctaattttagaagcctggctacaatactgcacaaacttggttagttcagtctatttatattttctacatctaattttagaagcctggctacaatactgcacaaacttggttagttcaatttttgatcccctttctacttaatttacattaatgctcttttttagtatgttctttaatgctggatcacagacagctcattttctcagtttttggtatttaaaccattgcattgcagtagcatcattttaaaaaatgcacctttttatttatttattttggctagggagtttatccctttttcgaattatttttaagaagatgccaatataattttgtaagaaggcagtaacctttcatcatgatcataggcagttgaaaatttttacaccttttttttcacatttacataaatatatgcttgccacagtactgtagccacaattgcacaatatattttcttaaaaatacagcagttacctcattggactattttctgggtttataaacctggcttctcgcagacatttctctggccagtaaatgttaccctgggaatgacctgttcccttatatgatcctacagcggaagggtcacttactgggagcctcttatttagatgttttcagcgtgggttggaatctagcaaacatggttaatgtcgcaaaacactctggatatgcgtataacacgcctacacacgacgccacaggactagaagacc

SEQ ID NO: 605712 - DNA, 275 bp, Homo sapiens
gtcccctttacgtcgggtgcagcgcgatcggcgcgcgtctcgatcagcagcgccagcccgggcgacgccgacggcgcccacaggcgaaagcgcgtgcggccgtcgggcagcggcagggcgccgaaggtgaagggttcgggccaggcggtcatggcgtttgtccggcgatgtgggtggcgctgagcagcaccaggctgtggccctggaccgccgcctcgttcgcgccgaccggcgccgccgcgaccggcgcggaggtgtccagctcgcggatccag

SEQ ID NO: 605713 - DNA, 109 bp, Homo sapiens
cttcgatagcttcactatcctcatctaggacgtgagtctccaggaagtcacagacattggggtccgtgcgggcagaacctcaggccatgcaagatcccccaagggcctg

SEQ ID NO: 605714 - DNA, 370 bp, Homo sapiens
  misc_feature (221)..(221): n is a, c, g, or t
ggtaaaatagcgagggtggttatcccaggctctccttggttctaggcagctgtcttctccttctgtcttcacagggcctttccgggtgaatcctcatcctaatcccctcttcttacagtcttactggttagggcccaccccccgggacctcatttaaccttaacttcctctttaaagaccatgtctccaaatacagtcacatttggaggtatttggggtgnggacttgcacataagaattttgaagggttgtaattcagcccaaagaagtgggtaaccacctactttgcctgaggttaaaactggtgccttggacatcagtcctgtaaactctgtatctcccttgaacttgaattcagatggaggcagtg

SEQ ID NO: 605715 - DNA, 95 bp, Homo sapiens
acggccgtgtattactgtgcgagactatcaattactatggttcggggagttatcaacccatactggttcgacccctggggccagggaaccctggt

SEQ ID NO: 605716 - DNA, 158 bp, Homo sapiens
gctctagaggatcctgaggtctcttcctcaacccagagcaaattgagcagaaggttctcaagagatgtcccatatacccactacccctacacactcacagcctcccccatgatcaacaccatccaccagagtgacacatttgctattgaggaagagga

SEQ ID NO: 605717 - DNA, 213 bp, Homo sapiens
cacgagggtgaccttatacatgttggggtttgctcgtaaatacgagatcaggaaaaaaggttggtttcacaaaccaagagggtcagcagtggacgcctagattttgtcacggactccacatagctgagcttttgcgcagactctgagaattagcactgcatgtcttcacagaacataacacgatttaagtttcactttaaaaattgcacatga

SEQ ID NO: 605718 - DNA, 274 bp, Homo sapiens
ccatgacgggcctacatgggtagctctgttgcaaagaagcaagctttgggattcattgattgtatctagttttgtttggtataggcatggaagatccccagtgaattggctcaggtgagagggcagggctaagggtggggcgggggatcagggattagcctaagagagtcttcctaaaggcacctccgtagaaccggcataaagctccgtcaggtctaggtcgtagttcagtatcgtccagtggctcatggtacacgttctcaaccactcaggg

SEQ ID NO: 605719 - DNA, 374 bp, Homo sapiens
gggggcccctagcacgaattgaggcctctctgtcagtgcagatgtcccgtagggtccgggccctgtttggagccatgaacttttgggccatcatcatggacaaccttgtgagcctgaacagcctcaaattcacagaggtggttgcccggggcctgttactcacagggttcccccagaccacgctgtccatcctgtttgtcccctactggggggtccagctggtaaaggggggggagcgacccttggccctggggggggggcagaagcggggcaaagagaagccggggtagggggggggggggagggggatgggctctggtcagctatttttgggccagaggggggctggccgatagaataaaaggcttttttcc

SEQ ID NO: 605720 - DNA, 258 bp, Homo sapiens
gaatgtctcgaccttgttcatgtccttcctgaagcagtagagcagccctgtagttcttgagcagtgtgtcatggttatgcgagttagtagtcaaacgtgctgtaggtctgctataggatctgcccagtccggcgtatgcgatataccagcctccccatcagggttggcattccttcctctaggtcctttaggatgtgcatagtcatcgcttgtcgaggagtcctacaccagtgttgtaggagaaaaatactcctaagg

SEQ ID NO: 605721 - DNA, 534 bp, Homo sapiens
  misc_feature (335)..(335): n is a, c, g, or t
gaggcaagcaagtgctgtgaaataacatcatcttagtccctggtgtgtggggtttgtttttttttttaatatttgtggagaaataaaacttcatataaaattgccaaaaaaaaaaaaaaaaaaaaaaaaaaaaaattttgtgggcgcggcccggcggccccggaaaaactttttaaaaccctcgcggtgtggggcgcggcggggccccatagtggagtataagggacgactgctgcgcaatacgacgtgtctcaccaagaggagaagaccccggggcgacagatagacgaaacaagcggcgcgtggtgattctctctcccccacaaaatataaanaaaaaaagcgcgccccggggcgaggagaaaccacccagcagccggcgtgttctcgtgagaaacacaacaactctcgccaggagatagaggggacgctctagaaagcgagcgcgcaaatacagcgggggggtcctcaataacaacaccgggagcggctccaaagcgaagaggcgcccaatattacaaaaaataacgcccg

SEQ ID NO: 605722 - DNA, 1307 bp, Homo sapiens
  misc_feature (238)..(238): n is a, c, g, or t
  misc_feature (242)..(242): n is a, c, g, or t
gtctctctctcctcccggcgcgcaagatgccgaagggaagagaaggtgagagggtaagagtagatggtcggtcatcgcggatccctaggctgttcgatgtaaagaggtcaggagtgctacagacaagttaggtgaaatgccccgtgtgtgtgagacgaaaggggtctatggaaatttagtatgcgcaatatgggacgagggcacgatcgcgtacgctccaaatagaggatcatcatcnaacncagcggtagtgcgcagaacatgaggcccccggatctatatatcataggttgcgccacgcggggccgaggagaagccccaatccctcgtagtagaggccgggccttgcaaaaggtggcccagtcccgtgacggaagtgtaaagcgcacgatatgcaacgcacaaaggacacccatgggaacccggcccaaaagaccaggcgttacgtccaaggcgtggcgcttacacggcctgggaccgcgaacagaggctaccacgaagcccaaggacgcacccaaaaagtcaacgaacgtaaagacaagccaggaaggaacctgtggttacggggcacccgggagcccgacagacacggaacacgcggcctggccctgggcggccaacaacaccgcggagcggcaccgatccacccaatagcgcacaacggaacggaagcccaagcactttgtatcccgtagtccggaacgccaatggggacggctctaaagccatcacgggttcagcgcgagcgccataggcgcctggccgcacgcaacagccaaaacagtagaaaaagcgccttccaaggacatcggcggatgggcgtcggaactaccggcacccaaaccggaaaccgggatggcgaacttccccccaaatcccggacagacctggagcccgggcccccagccactcagcgccccttgggcccccctgggacgggatcaggtcaaacacaccctcgcgggccggcttcccaccctgcgcacccagccgacaccgactccaaaactgcggaaacaaaacggccaacacgacacctcgcgccaaacacgggtcccccaagagctcaccccaacaacaggcggacaacgggaaacccccggaggccaccaacagcagggggggactccggcgcccctctcccacacccaccaccggcggcggagcaaacaccccgcccgcacaaagcgcaccaccacaagcaggcacgccccccatgggaggcccaaaaaacgaccctggcggcggatggcaaccacccgcgccatatccaccgccgccaccacaccagcatcacccaacggcaa

SEQ ID NO: 605723 - DNA, 571 bp, Homo sapiens
ggtttgttacttttgatttccgcccccagcttttgccagggttaacccggcctcctcctgtgggccgccgcgaaaccccctggtttttatatcgagggggccccatctgcccgaaccatattggctgttggggaccataaacaccgcggggttgccccgtctcctatgccccatgaaccatttgggcgccgcgcttttgccctggacgcggtgtccccagccgtccttgtgagtacgccacctattcaatactctctccccttgggttgccatgtcggccctgttaccccacccggcaggcacacccatggtggttgatatttaatgctccacgagcacccgtcggctttggtgaagcgttccggctccataggccccgctgttgtgccgtggcctctggaggcccccctccccccgtgcgcgtgctctttttaacccacgattagggcaagcaggggtccctcaatagtcatcacccctttgctgtgcccgcctcccgtgaaggcccctttttcacctggggggggggaagggattcttttttcccaaaaaaaaatccaccccgtccaca

SEQ ID NO: 605724 - DNA, 445 bp, Homo sapiens
  misc_feature (4)..(4): n is a, c, g, or t
  misc_feature (31)..(31): n is a, c, g, or t
  misc_feature (109)..(109): n is a, c, g, or t
  misc_feature (135)..(135): n is a, c, g, or t
  misc_feature (428)..(428): n is a, c, g, or t
  misc_feature (431)..(432): n is a, c, g, or t
  misc_feature (435)..(436): n is a, c, g, or t
tctnccctccccaataggcccccccggaaangggaagggaaaataccccccgggtttctccccctgggaattcccgtggttaaggtcccaagatgccaccaggaaaagnccctccctgagggccccttttccccngggaatttttatccatcccaagtcaggaaagatattggacagatccctcttggccccagcctttggagggggagtctgttgggggggtgtttttctgcctgggattccttcccaccttgggaaggtttgtaggtttctggttaacagcagagttttcacttccagtggctggagcctgtgattcaaagaagtcacaagtcacagagacaaacttttcccagtgtgttcgagtcagagaacctttgcaaagaccaacaggcacagagtcggaggactgaagtgaacagctgctntcnnaanntttagtaca

SEQ ID NO: 605725 - DNA, 546 bp, Homo sapiens
  misc_feature (53)..(53): n is a, c, g, or t
  misc_feature (161)..(161): n is a, c, g, or t
  misc_feature (170)..(170): n is a, c, g, or t
  misc_feature (172)..(172): n is a, c, g, or t
  misc_feature (176)..(176): n is a, c, g, or t
  misc_feature (223)..(223): n is a, c, g, or t
  misc_feature (225)..(225): n is a, c, g, or t
  misc_feature (227)..(227): n is a, c, g, or t
  misc_feature (233)..(233): n is a, c, g, or t
  misc_feature (250)..(250): n is a, c, g, or t
  misc_feature (260)..(260): n is a, c, g, or t
  misc_feature (264)..(264): n is a, c, g, or t
  misc_feature (276)..(277): n is a, c, g, or t
  misc_feature (286)..(287): n is a, c, g, or t
  misc_feature (289)..(290): n is a, c, g, or t
  misc_feature (299)..(299): n is a, c, g, or t
  misc_feature (318)..(318): n is a, c, g, or t
  misc_feature (324)..(324): n is a, c, g, or t
  misc_feature (332)..(334): n is a, c, g, or t
  misc_feature (338)..(338): n is a, c, g, or t
  misc_feature (340)..(340): n is a, c, g, or t
  misc_feature (351)..(351): n is a, c, g, or t
  misc_feature (358)..(358): n is a, c, g, or t
  misc_feature (360)..(360): n is a, c, g, or t
  misc_feature (367)..(367): n is a, c, g, or t
  misc_feature (371)..(372): n is a, c, g, or t
  misc_feature (374)..(377): n is a, c, g, or t
  misc_feature (391)..(392): n is a, c, g, or t
  misc_feature (454)..(454): n is a, c, g, or t
  misc_feature (466)..(466): n is a, c, g, or t
  misc_feature (473)..(473): n is a, c, g, or t
  misc_feature (484)..(484): n is a, c, g, or t
  misc_feature (528)..(528): n is a, c, g, or t
cactggggagctctgggttcttgcccagaacaaggggctgagaacatccagtnaggatgcaaggccaccacaggctgaggggactggcactggggatatggcagggtttcgccttcaagcacagccaagacaccctcctttgcccttggagtctcctcctnaagagcatngntgtnttccccatggagaaaatgaggtctccagaggtttcctgccttgcccnananccaccnaccccctcagaatctanaccccccctntctnttcctcacctcnnccaggatcnngnnacacccccnttttgcagagtcagccccncccccncctcagcnnncccnancacactcctanaacctantnactaaantctnnannnnataaattctatcannttctccaactgctcctccaggcgctgttcaactccatggttttcgatgacccagttaaagtncccgaagttgtncaggccncattctgactnagcatcgtccacccctggcgtgaacacccagccccgctgctgtnggctctgctccaacgcta

SEQ ID NO: 605726 - DNA, 214 bp, Homo sapiens
acttttttttaaaaacttagttttagactatgtggtaaaaatgggaagggtgtaaactatgttgtaaaaataggaaatggggcttaaaaaaaaacccttaaattgtttccgggttttgtcagggtttaaaaaacccatgttcttctttggttttaaaaacatgatttaaattttgtttaaaattttaaaaaaaacccccggggtttttccttta

SEQ ID NO: 605727 - DNA, 224 bp, Homo sapiens
agtgagcgagatcgtgcactgtacccagctgggggacaagagcgagacttcatctcaaaaaaaaaaaaaaatcagttggggcttgttgttgcacttctattagtcccagctatgttgggaggctgaaacaggaagatggttttaccccaggatttcaaatttacaggaagttaggatcacacaattgcactccagcctgggttgacagcatgagacagtgtctc

SEQ ID NO: 605728 - DNA, 1243 bp, Homo sapiens
tatcttcttctacttcaaatggcacagactaccacccaaacatctggttggcaagtatgatactcagtgttcactggcaggcagtcgcgaattgcagcatgggcgcattggccaggaagctctggcgccatgcagcaacacggcgcatcgttcttcattcattggcaatacaccacaacacacatcgacacgtgactatggcgacgttaccccacatatcttgccacacaggtacagcggattcacagcatctaccacgccccagttctagtgcccaggtgctcgaacacctcacgctctcccgttgcgctacaatcacacgcacaccactactttctacacggcacgcaaaaccgcaatattcatgatactctcccagcctaccgtcaaacacgctgcgaccccagctcccatcaggcccaacagcctgacagaaacgcttccacaaagcgtcacagcgtcaaccatgccacagggcacactacccacgagtccttcttccttcctcacattcagctcgacaggcgacagcgcagcacagcaaaaagtgcgaggtagggccccagcttatctggcaattgccctcatgccttccctttatacaaatcggaccgtggccagcgcgccaaattcaccacaaccccgaaccgcaccagacacccccagcccgccaatcgcgcccgccaacggcacaacgacgttcaacccccccgcccaacacggcaggagcacgcacccaagcacaccccccagcaccagcctccacccaccggaacactaccacaaagctatacacaacaccacgactaacgatccccaccacgccaaacctacactccaaactaccctaccacctaaccccacccccccgccacaccacctttacattcgctctacgggagcacaaacaacattaattatagcataataaatcccactactacatcacacgcagcgaaagacgcgacatcccctccactgcggaccaaccgcgacgtgcctcctgggatacagcacaaaaactaacaatgggaaacacgaacacaccggatatgaccaacgacaacacgacaacacgccagcgaggccacaccaacaacggcaactaccgcccgcaatacggaaaacgccattggacagcaatgccaaccaggccctgtcgacgcagacgaacacacagcgacaactcacaaccacaaagagccgcacgacacacgaatcatgcgacgcccacaacgccaca

SEQ ID NO: 605729 - DNA, 891 bp, Homo sapiens
gcggctgcctccttgtgtccgctgcatccaggacttcctcacgcggtggctggaggctgcgcatctggggctttaaacatacaaagggattggcaggactgcggcggcggcggcgggggggggctggggcgccgggggccggaccatgagccgctgagccgggaaaccccaggccacgagccagcggaccctcggagcgcaccctgcgccgcggacacgctccaaccaggcgggaggcggcaacgcaccgagccaggacccccgtggcgacgcgcggggccaggagcgctaagatggaggcgctaatggcccggggcgcgctcacgggtccctgagggcgctctgtctcctgggtgcctgctgagcacgccgcgcgcgccgtcgccattatcaagttccccggcgatgtcgccccaaaatggacaagagttgggagtgcaataactgaacaccttctatggctgcaccaggaagagctgcaactgtttgtggtgtcaggacacatttaaagaagatgcaccaagttcttggtgactgccccagacaggtgatcttgaccagaataccatcgataactatgcggaacgctacgctgtgtgagacccagatgtggccaattacaattcttccctcgcaaggcccccggttggacaagacacagatttacttacaggatcatggctaccacaacctgatctggaccagagacagtggctgatgctttgtcgtgctatccaagtctgaaggatgtgacccccaatgcggtttatcgacttcctgatgcgcacggcacacttcatgatcacttggcgccgggagcttggctgctggatccccttgaggtagcaggatctggtaggcttcgcccgcgagggtcgggagatcccatta

SEQ ID NO: 605730 - DNA, 1116 bp, Homo sapiens
gatccagtgtcctgctatcacgcgtgcggggcctgggcgtggcgatcgcgaagaacatcatccttgtgggggtcgagggtgttaccctacgtgaccaggctgctgttcgcagctggagctgatctttcctcgcagcttctacctgcgggaggaggacatcggggaaaacaccgtggccggagagttatcacaggcactccgtgctacgccttgggtctcgaaacagtctcatgatgcctgtcgattgcactcagcaatgcgaccctggtcgtatgagggatctatagcgtataatggtttatccaaggtggtgtgtagcctaccaccaactggcgcaactctgggaggaccatactgtcgaggtggggtcgagtgtctgttcatcaaaacgtgggaattaattgctggtgtgtggcaggacaacgctgggggctgtttatggagccacgtgtctttctggttggatctttcgcgagatggacaattagaatccatccaacagagtttcccagattggtgcgaaggcaagacctacttctacgttggcataatagaggttctcttactggggtataacgcgaaaggtaccacaattgcacactggttgattggtttacccgtgactcgtgggattgaaggcaccggatgactggagttggagggaggctagtgcgcacttgtgctctcgctttattgcaaggaatacgttacaaggtcccttggtttgaaacctcccaggcgggagaaatcgaggtccattggcagatcgcaaagtcgcgtggggtccattagtacgcgtaaaagcgatcttgtgacactcttccaattatcgtcgcagactaacagtgcgtggcagtgcattttgtcgcgatcacgtgcaaaaagataccctgaacgaagattcatcgttcaccagtcctttggatggccgtctgcatggagagtaaacctgaacgtttgtgggatgaacggcacgttcgaccaaagttgtcataggccctggcctagcatgctagaattgtttttccagggtccctgtagccagtttctggtggctcagtaattggccggttcacctcggtcccgtgaatggtgaggatgcaggaataaactggt

SEQ ID NO: 605731 - DNA, 990 bp, Homo sapiens
gagcactgcctggctcccacgtgcctcctggatctcagtagtggcgctgtcctgtggttcgttacagtcctgagcctcctacctctgctggaagtccgcagatcgcccattgtgtgtccaatcctattagccgggtgcccaatcaggcaagcgaccacccgtggacctcaagagttcacgtgagacaacgctggttctggagtagtcgtcactcggacctttcgtacacaccgaggagatacacactaaggtcggctgtcaggagagtcctaaggcaatccttcttttaccttctagcctccacaagcaaacgatcacgtaggacgaccgtatctttctcagaagaagctaccaagatcaccagactagggaacacagggtgacagttcttattcatcagtccatcctatccctgatatgttcgctatgcggcgaatacaaatggagaatcctaatcctctccaggaattaccgggtcgtgagcaaggggccaatacgtatgccagtattttccgacgtgcaaactttaggcatggcaattcactttccacggtggtatccaactccaaatggaacacgtaaccaatagcatttcgaccttttctatggaatcggttcggaagagcaggcattctggatgggcaaaacgagaacatccgtgggggacgggcgaccttcggttacctggagtcctttaactttggttcataggtaaccttaattggcccctaaaggaaagtagctgggaagcccaagaatcgcgatacgcctacacatttgggggagtccaggcaaggttgtcccttaacggggcaatatggcttccttcctgtggaaccttgggcattcttggcccagccccagtttacccacttggatggaaggttccaaaaggcaagtgggcttcccgattgggttaaacgcaactctgggcagtttgcggcggtcgcgtctagagacacgcggtcaagtcaacaggattgggttcga

SEQ ID NO: 605732 - DNA, 170 bp, Homo sapiens
gtgtgattcactccattccatacgtcctatataggcctactaaccaccacaccactgtccaaaaggcctctggtacggggttattcctatttattacctgcagaggttttttctccgcaggattttcctgagccgttaccacttcagcctagcccaacgcccaaataagg

SEQ ID NO: 605733 - DNA, 129 bp, Homo sapiens
ctccagtcaaattctcttctttaaggacacggtcaattagattagggctcactctgaacacctcattttaacataatcgccggtcatctcgtgaccggcgatatagctagtgactgacggatggactac

SEQ ID NO: 605734 - DNA, 274 bp, Homo sapiens
gcgccaacccctcgcacccccgcgcccccagtccctcgcgtcccggcgccgtcggcccggagcgtgcccggaagtctcggttccgccgccggcgctcgccatgtggtgaagcccaggggccgccctgggacctcggcccgttcctccggacccgagatggcctgcctgcacgggctgccgcgtccaagatgctgctgctgcccagcccgcaggcacaccacacaaccactcggatccatcctctaccgggagtgccagtggagccgcaaaccga

SEQ ID NO: 605735 - DNA, 459 bp, Homo sapiens
  misc_feature (12)..(12): n is a, c, g, or t
taaaaagcttanatctgaaaaatatttagaagatatatacaagtgtctatttgttagatagtgaaaactagtaaggttttggagtgaaaaagtttagagatggttacaccttttttttctaaagttgcttaaggtttttggaattgcttccctttccccacaagaacaaagcactggccgggtaaggtggctcatgcctgtaatcccagcactttgggaagctgaggcaggtggatcacgaggtcaggagatcgagaccatcctggccaacatggtgaaaccccatctcaactaaaaaaatacaaaaattagctgggcgtggtggtgtgctcccgtagtcccaagctacttgggaggctgaggcaaaagaatcacttgaacccgggaggtggaggcggcagtgagccaatatcacgccactgcatacaagcctgggggacagagtgagactctgtctca

SEQ ID NO: 605736 - DNA, 339 bp, Homo sapiens
tatttccacagggggatccttctcaaaataatgttcatggaggcataaaatacataaaacaaattatttttaagtaattatcaaagtattaaaaacaaatttataatacaaatgcctataaattacatctattggtaactctaacaactgccataattttgaagtaatgctgaatttagatggattttaagatatttcaatatttgtaatataatttttactaggacagtcccaggtattttatactgttgtgttttgttgcctacattcataattgaaggaaattctaaatttcagctagggggtaatgtttttcccatccaagttcacaaattttaa

SEQ ID NO: 605737 - DNA, 492 bp, Homo sapiens
tcccccacactgggttcgagttcgggagacacctagtttatagtttttttggtatagctcttccccaaactcaactgcggtcgttaagctaatgagagaccacccggcgaggaggatgagaagagcctgaattctgctgagatgtagactaaacgattaccagccattattccagaggtcacaagatttgcaaccccccaataactcctacagataacatcactattacagaaactaagattggccttttgagataaggtttgaggtttgtgcatttctgacaaccaacggctccacctggacccgccaaactccctctggccccacccagaagtgaactcggcagacaaggaccatttttcacacccctatgattgcatccccaaccagttagcagcacccctaccctagccccctgcccaccaaattatcattacctctgaattctcagggagatcaagttgagtaataataaaactccagtctctcatt

SEQ ID NO: 605738 - DNA, 263 bp, Homo sapiens
gtcgacgcaggcatagggagatattgcctgtgaagaaacggctgatgaatcagcatttccacttgttgagcttaacggataactgtgcctattaacggagtccaaaatcaaggctttttgagtcctagatttagatgcctttgaattttttcttcttaaactctgaaagcattcttctactgttgagtattctgattcagaagcagtgtctatcaaaaaattgtttttgtcctctcgaggtatccaaatatcttccaccttgt

SEQ ID NO: 605739 - DNA, 422 bp, Homo sapiens
cctccctccctcccttcctcttaaagggacaaagcaaatgtgcctctgaaaccagggtttgtttcccccacgggaatcctgcaagctggaggcagggggggtaggacagggcagaactaggagaccagcctggcctgttagacagcagggccagcggagtgggggcagagaggtgctaagtgtccccagagctaatgggcagctgcagggctgtgacagagccactcactagctgtcaaccttgggccagtgacttctctctaagcctcagtgtcctcatctttaagatgagggtaagggtagttagttctttccccccaggatatcattatcagaatgaaataagataacagatgtgaagtgcctggcacagcactcaaaagcagcagaggcttaatgaatgttcccacccacttcccctg

SEQ ID NO: 605740 - DNA, 161 bp, Homo sapiens
gtcgacgggcgatctggctgcgacatctgtcaccccattgatcgccagggttgattcggctgatctggctggctaggcgggtgtccccttcctccctcaccgctccatgtgcgtccctcccgaagctgcgcgctcggtcgaagaggacgaccatccccgat

SEQ ID NO: 605741 - DNA, 275 bp, Homo sapiens
gtcgactcttgacgcgactccccgtagagacttcgagctggagaacggtcctgctgtttggtgctgtctagttcacgctgcttggcagccactcctcgaaaaggatcttgtacagagtagaacgccacagtcattgaaaagcacagactcatggccacgaatcattataagattcaggaaaaggaaaaacttcaagaagaacaagaatcgtcacgaccccagaaagttcgctaagtaaccacgttctccctgatcaaatatcactctcctactta

SEQ ID NO: 605742 - DNA, 89 bp, Homo sapiens
catggatttgctggtgcagtacaactaggcttaatagggacatgccactgcactccagcctgggcaacaaaacgagacttcgtctcaaa

SEQ ID NO: 605743 - DNA, 130 bp, Homo sapiens
acccgtgtccatcccccttcctgtgtgagtgtgtgtgtgtgtgtgcgtgtgtgtgtgagacagggactcactctgtcacccaggttggagtgcagtggcgccatcaccactcagtgcaacctctacctcc

SEQ ID NO: 605744 - DNA, 1034 bp, Homo sapiens
agaaatgaggaaactatttgagaaatatggaataggccgggcgaagttcttattcatcaggatacaaaggatctggcgtttatccgctttggaaatcccgaggaccctagcggagattgccaaagtggagctggacaatgatgccactccgtgggagaaagcaggctggcgtgtgcgcttcgccgtgcgcatacgtgcatcccttacagttcgaaaccttcctcagtatgtgtccagagcgaactgctggacagagagcctttgcatgtgtgtggcccaggtagagagggctgtcagtctatctgtggatgatcgaggcaaggtcctctaggaagaaaggcattgttgagttcctcagggaagccagcatgctcggaaagctctggactgatgccgtgagaggcttgccttcccatggcgtaaccgacatttccctcgtcctgtgactgtggagccctatggaccaggttatatgatgaagagggacttccagataagcgggttctaaatagccagcaatgtcacatggaacgatgagcacgccgacccagatttgcacagtctgggctcctttgagtatgactatgccatgcgctggaaggcactcatttgagatggagaagcagcagcaggatcaagtgggccgcaaggatcgaggaggctcgtgagaagctggagatggagatggaagctgcgcgatgagcaccaggtcatggtaaatgagacaggacctgatggaggggcccagaagaaacttcggacgatgcagagcggcaatccagagggtgcacaaaggaaggccactgggagccagggaggcggaaactgacagcgcccgaaaagaatgcggtggacgagacatgctggggccgcgcacggtccggacctccgcccgaaaacgggcacctgggcacgctggcgggcggcgtaacaagaacccctccgtgcggccacctcgagcacaaaggcgaagtgaccacacgctgcgccgcggagcggccaccgacgaccaaaatgtaacaccaatcccggac

SEQ ID NO: 605745 - DNA, 396 bp, Homo sapiens
gaaataagtagtaatatataccttagattgttatttaaatttttgttcctctgtgaactaatagaacacgaagtaattgttcacaattactgttgtttaactgccatatatgggtaaattagggaaaattgtgcttaatatttagaccttttgagatggatcgaatatttgaattttggtgtacgtgtatactgggtagtcacaagtcttataaacactttagaggaaagatggatttcagtctgtatttttaaacatcatttattttaaatctggtgctgtttagaaagaaatttaactgcattctgctgctcttctttagaagcatttctgcgttactggtgttatactgtcatgcatagagtcttctttcttgacgttcctttttgtggcggg

SEQ ID NO: 605746 - DNA, 183 bp, Homo sapiens
tgaacgtttgcaaaggtttattaactgtcattgactgatacatgggaatcggatgaggggagtccatgctgaacaggaaacagagtgaggggggcttgaccagttcgcatggcaatggataaaagcagatgggagatgcttatactggttcttggtgtgagtgtgtgcgtgtgtggtgagtgt

SEQ ID NO: 605747 - DNA, 164 bp, Homo sapiens
aatcagattttgaatttctttttaaaaaaaagtatagattatattttttatgcagtcaattgccttttaaatgtaacgttggttttttttggcctaaaaaaatgcctcattgatttgtattaaattcaacccccattcaaaagggaattaaacattttcatgta

SEQ ID NO: 605748 - DNA, 853 bp, Homo sapiens
tggtccgcagcaagatggggacgagaaggacagggaagggcctgggatacaacagtgatgagataaggcctcggacttaactgatcgaacatctaatggaacggtggcaagacagagaccatcacacaatgacgggtgtaatgggcgaccaccaggagataatcgtagcagaatttcacaaaaaattcaaaagaggcattctgaagtctttgaccatgagtcgacataatacaagtggctgtgagacagtctcactctattgcccaggacaggagccgcagtgggcagtgatctcggcttcagtgaaagcctacaacctcctgggttcaacgcggattctcatgcctacagcctcccaagtaccaggacatactgagataccagaggacggattgcaaaaatctatcacggtcattaggatgctgtcctaacgagaagggagagctgcatgatctgatggcagagatacagaccaatttccagaagatgtcttcttcgacgctttggcggtaagatcagctaaactgtgggttcttaactaaggaccgagctggatcaagtatatgcatggacgaagaaggagttcgctcagatcgcccagggttgactttgcagtggcgtgatactggctcggtgaaacctccacctcccggttcacgagattctcctggcttagcttctgagacagctgggattcacgcgctcaaccaccccggcatggggtaattctggcatttagaaacacagggttcacatgttctgtggctctgtatcgaaatcggacacaagtgactatcgctaagctccaagttggataaagataacaacgacacgtgtctaactagaccccggt

SEQ ID NO: 605749 - DNA, 1399 bp, Homo sapiens
  misc_feature (48)..(48): n is a, c, g, or t
  misc_feature (545)..(545): n is a, c, g, or t
cacgaggaatttacccaccaaaatgaagattttttccaaaatcagtangcttcacaagttcatttggccttagactgtgtattggtccttaaatgtttcttaatgcctgcctcctcctacccttttctacctcctttttaaaaaaataaataaataaataaatgttaggagagaaacattaggatttgtctgtgatagacatgctgcagcttccactagacatgaattcccaacacaagcatagaaagaggtattctcgttctaaagagacatgtaaatgttttctgggttgaatatttgattttcaatcacattggcactgtccaagttcttggcatattatagttcagttatgattttcatggtagagttacaatacttgtttttgccctaaagaagtcattcacatggtttacaaatgttaaggcaatgagataggacagtgagtaggaaatccagggatagcagattctagtccttaattctcagctaacattttgggtaatactcacagaaaagttacttttctgtgaagtgtgtgcatntgtgcatgtatgtgtgcgtttgcatgcatgtgtgtgtgtgtgtgtgttggttagagttggaggcagggatgggaaggaagaaggggaaaggtatgagtgttcaattaggtcagtttctggttttggaagaacaactcaaatgtatgacctactgatgacatacagtgagtgtagtcatccttgggtaggaacaccagtacattttccagaagtagctagtacaaatgattgtataataatattgattgtaaattgccatactcttggttgctaaaggtagattaaaattcaatttgtgtatatgtaaaataatcttatatataattcttaaatagaaagtaattgattttacatagttcttcctgaactttttggaactgaaattctgccaaacattatcaaaataagcttccttagcttaccaagtattcacaaggaaattctcttgtacctctttttggttggctaggggaagcatgctgtgaagcagctattcctacttatagttgtctttggcttggctttgacttctgccatggtttggacaggatgccatggtaggtgtgggaagtatcagggcctcccatcttcccatactcaccttccagagctgttgatggaaatgagctcttgggggagcctagagattcttttttcagtggtcctgtaagcattcaaggttgagcttcagaaagatgagggaggagtcatagctacagtaaagaaaagaatagattttatctgttgcctgtatacagtctcatagaattctttatttttcataattgtgcattttaattgatagtcatatggtattcttgttaataacaggcaaagcattaatcagtaccatt

SEQ ID NO: 605750 - DNA, 388 bp, Homo sapiens
  misc_feature (210)..(210): n is a, c, g, or t
  misc_feature (295)..(295): n is a, c, g, or t
gattgcaggcatgaaccactgcgcccagtcgagtggtaatattttgaaaggaaacctttttctgagcaggtctcaaaagagaggttaaaatactgagtagaccatgctgtaaacagatgtgctgttattcgggctttgatattccatttataaagcacaggcagagctcagagtagatttaatgtaactctgaagggcactaggattttnagaatggtaaataagcattggcttcaacttaaattcaaatctgcattggcttgtaataagagactagcttgttactgaagctttnaagccagttgttttctcctatctagctaggaaagtcctagatggtatctacttccaataaaaggctgttctggccaggcgcggtggctcacgc

SEQ ID NO: 605751 - DNA, 291 bp, Homo sapiens
ttacagtgactggtggttacgtgtcccttccccattcagtgacttgtcctctcggcttggtgtaaaccattcttgggaggacactttggccattgaactctttctccagctgattagtgtctaaggattgatccattattgttgcccttttccttgattattacactgcctggaggatagcagagaagcctgtctgtacttcatttcaaaaagccaaaattagagagttatcagtcctagagaattcctctattggttcagattcctctagagttcgaccgggttaccgag

SEQ ID NO: 605752 - DNA, 214 bp, Homo sapiens
  misc_feature (70)..(71): n is a, c, g, or t
  misc_feature (214)..(214): n is a, c, g, or t
gcccaaacccactccaccttactaccagacaaccttagccaaaccatttacccaaataaagtataggccnnagaaattgaaaccctgcgcaatagatatagtaccccaacggctaaagatgaaaaattattaacctagcataatatagctaggacttaccccatatacctactgcataatgaattaactggaatacctccgcaaggagaccaan

SEQ ID NO: 605753 - DNA, 957 bp, Homo sapiens
  misc_feature (376)..(376): n is a, c, g, or t
gatgcgagatcgcccgagtgttatgatgaggcgggtgacagtcatggcgtctctgctaaggcctctctcgcatcaatcatcctgtggccatgacagacgagggaacaccccttgtctctggtagataggagtggcagatgcgaccatgcaggcagcgagcacgcagcagtgtagcacgctcattcctagtgtccatgaatgcggaatcctggaccctagaggactcctgccgctgaacagaccatgaggagcctctgtgcatggctgtacggaactctactcgccgtttcgttgcacccaatgtaaccctactcaggcttaaagaacttgaattttgattgtgggcgttgaatcatatatccttgttagcctttgnaatgggaaccattccatttttgataacagcacactaggtccccaaggaaggatcagacgggcagagcatgtgacctttgaatctgaatttcaccacggggacaacgcagccggtgtgtggacagtattaaaaggacttggtgcgtggaccacaataactggtccagagagaacaacagttgacatgctttcgcgagggctttagcgatggcgtaaattgctcattcaagggggccgccctaaaatcagctaccctggtagagacaaggtaccatccgttgcttttttggagagacacatctgatcgcaaaaacgttatcaatttggtccttggtcgtggacttctacatttaattcatggcagcgaggcaccatatcgggtggcacgaggactgcaagataagcaccagacccccttgtagcgactttttcccttgggacagccatcccgatttcctccaacttatcgcccgagacgtcctccaccggcttcttgaattattgcgatcaagttcaacttggaaattccctccgggtgaaatttgggtaataacaaggaccattgctggacactcaaacatt

SEQ ID NO: 605754 - DNA, 236 bp, Homo sapiens
tcggtatactgcactgacacaatacccaaacatcagaattcagaagggcatcaaaccaggggctttatcaggctgaaaaatatcctagacttcagcacagaataccaatcaaatcattgcacattcctttgttcaaaacacaaagatgttttgtctttacatgggagtttttttacagcttttcttcttttttaaaaacaacaaacacaagacaagttaagggccaaacgggcaaa

SEQ ID NO: 605755 - DNA, 411 bp, Homo sapiens
tatctcggtgccgttgttgaccgtagttcccgtcgtgtggtctttatggcctccaccgaagcggcgtggaaatcgaaaaagtggcggaagaaactccgcacctgatccataaagttgcgcttgatccgctgactggcccgatgccgtatcagggacgcgagctggcgttcaaactgggtctggaaggtaaactggttcagcagttcaccaaaatcttcatgggcctggcgaccattttcctggagcgcgacctggcgttgatcgaaatcaacccgctggtcatcaccaaacagggcgatctgatttgcctcgacggcaaactgggcgctgacggcaacgaactgttccgcagcctgattctgcgcgaaatgcgtgaccagtcgcaggaaagatccgcgttgatgacaggtt

SEQ ID NO: 605756 - DNA, 106 bp, Homo sapiens
gccggagaagacgcacgcagctgactttgtcttcttccgcacgacttttacagaggtctccagagccttctttttcctgtccaaaatggcaaccttttagggaaaa

SEQ ID NO: 605757 - DNA, 334 bp, Homo sapiens
  misc_feature (51)..(51): n is a, c, g, or t
aggtatccataagaagagtaattttgtaaaccatacagtcacatggaagtnatacagtacgctcctgaatgaatgactagtcttagtatcaatgaagatactaagatggaaattgaaaaatttcatgaaacaaatggtaatgaagacacaatataccaaaacttatgatatgccaaaaacagtacaaaggaagagattcatagctgtaagtgcctaccatccaaacagaagaaaaacttcaaataaaccatacatcttaaagaactagtaaagtaagaacaaactaaacccaaaataagaaaagaaataataaagatcatagcagaaataaaat

SEQ ID NO: 605758 - DNA, 926 bp, Homo sapiens
ggccgggcgcggtggctcacgcctgtaatcccagctctcagggaggctaagaggcgggaggatagcttgagcccaggagttcgagacctgcctgggcaatatagcgagaccccgttctccagaaaaaggaaaaaaaaaacaaaggacaaaaaaaacaaacacaaaaacaaaaacaaaaaactggttggggcgccgcgctgggcccccaaaaaaagcttcttaaacccacttcgtgtggggcgcgcgcgcgggcgccccagttatggtaatgtgacacacctgtcgctcaaacggcgttggtccccacagagaaaccccccggcgcccactgcggcacagcgggtcggtggtttcttccccccaaaaaaaaaaaaaccgcgccggggcgggaacacccgtgtgtttttgggaacaactccagagaggtggggtggcgagaggcccaagagagggctgctctcatacaccagagggggggtctccaagaggcaagcccccggatctattaagaaaattacgccccgccgcggggggagaaggagacaccacagaatacgacacacgaacaataacacacgagacaaaaacacacgagaaaaccaagaatgaggaaaccacacacacaacgcagcgcgcaccaccaccaagaacaaaagacccacacaaagccagaccgacaggaagagacaacacaccgcgacacgaacccacgaccacccgaaacaacaaccacacacaacagcacagaacacacaaacaccaaacagaaaaaggcgagccacatctcgcaacgagacagaacgaaaaatcgcgacgacccgcgacagcagcggacaggacaaacagcgagaataaaacaacacatagacacatcacagatcacgagacgcagctcaaacacaagacacgacaccaccaaacacatc

SEQ ID NO: 605759 - DNA, 374 bp, Homo sapiens
  misc_feature (26)..(26): n is a, c, g, or t
  misc_feature (63)..(63): n is a, c, g, or t
  misc_feature (112)..(112): n is a, c, g, or t
  misc_feature (137)..(137): n is a, c, g, or t
  misc_feature (219)..(219): n is a, c, g, or t
  misc_feature (228)..(228): n is a, c, g, or t
  misc_feature (335)..(335): n is a, c, g, or t
aacgaaagtgtttctttcaaagaggngggggggattgctcattcaagatgctggattaatggntttataaagtatgtgccgtggatgttttattagccattatcttcatgcnggattctaatattctttttaatggngatctgttcaatgacagaaacttatagagagaaaattccttctcaatttataaacaaaaattttaaaagcagcatttttgangtggtaggnagatatttatgacaaaagcagctactgccctaaactggcaaaaacaacaaaagaacaaattgttatttaacctttaaataacgagtgtctatttgctataatatctnctaatattttaaatatatttcctcctgactgcaattaaa

SEQ ID NO: 605760 - DNA, 1261 bp, Homo sapiens
catcattcttctatcaattttaaacggctgcctaccacctggttgtgcccccgggtggggtccctctttttgcacaccgctgtgagtttgtcgccccccgagggaatgttatgatgctacacagactgcggaaattgtccccaaaaggttgaactgtattcttcggggaaaaagcaccccttggggaaacaaaaggtagtgtcgtagccctagagatatcactggggcttacataggggtttaatctgggtggcacccacgcagaaatgttcaggttaggtaatagccgtgtgagaaacctcgggcaagtatttgcgaaccttctcgggttccccgatgattcctgcgcgtattcgcctccaacggcggttcacaaaaaattttaacctggacctcctccacaacttccaccggggacccaaaaatggaaaaagaatactcggctgccagaagctttctgggagcccctttaggggatatcaataccgtttccgttgtttccacccgcttagagtgggccctcgacatgggccaatggtgaatttacccccaaacgtgctatcccacttgtagggaccatcttgtgactaacaccgagacaacacggtatactaacgcttggttatgctcaactgttcccaccaaaatggggccctcaatccacataagggaagccccgtaaattttgcgcactccactaagggaaggctttcacattccaccgtgaatgttccccctcagattgttccacagggtaacacccccctatggcgccaaacctataccgcccaaaatccacattgtcacctatatcaaaaatgtcacttccggcgcgtaaaatctaaaactgtgttttcgccacacaaacaacacgttgtttcgggcgctaattccgggaatgcccccgcaacgttatactcggagactatccccgaaggcaataacacccaccactggaaacactcctattcaatctgtaagggtcacatgtcaatgtttttctaaacacgcacgtaaataataaataaattttcaatgagtttgagaagccttcgcttccgaagcgagaaagtcctaaatagtagagagaaccctccactaaaacctggaggtgagactaataatggagtgccccccacccctagccacacaacacatttgagagaaacccgtataacataaaatttagaccaaaaaggaaggaatcgaacccccccaagctggtttcaagccaaccccatggcctccatgactttttcca

SEQ ID NO: 605761 - DNA, 479 bp, Homo sapiens
  misc_feature (438)..(438): n is a, c, g, or t
  misc_feature (459)..(459): n is a, c, g, or t
acaaatggcaaaattaaagaatagttcatattgatgttatatagaaacagccccctaaagtataaattactcttggaggagtaagcaagagtattccttgggggaaacccagtagaaaatgggcaaaggacaagggcagttcacagagaaaggaacacaaatggcttttatacatatgaaaaatgtactgtctcactcatgacaagagaaatgcaaatttaaactgcacacctaccatattggctaaaatctaagtcctggacaacacatattggggtaagggcctctaatgtatttgctaacaaaagtacaaaattatgcaactcctatccaaatatgcttccaaattataagtggtatttactcctttaagcctagcagtcccacttctggaaacctaatccctacacatcacctgcacacatattgtcctagtcnggtttggtgctgccataccgnatatctgagactgggtagtt

SEQ ID NO: 605762 - DNA, 589 bp, Homo sapiens
atgaaaaccagcagtctaaggaacatctctataatttagtcgtagcatatgcataacaagtgtccttcatggataaacgtatattctctattcgtatggagctaagtaaaacttgtgtagacctgtagctgcattatattcaggcttttgaacagtattatggtatgtgctgtgaaagcatggaaatctgtagagtctgtggacgattgttaatccgtgcaacaactagaaaggagcaatgaagtctatttcagttgtatttttccctaagcacaatctgcaatagtttatgtatgacagagataattcaaaaaggaaaactatatataaaagtggtatataaagtttgtctctgaaatatttctttgaagtttttaaaaaatttgactcagtgtttaaaaacaagaaagcacatattcagagcatggacttttttaacttgttttcatctgtttatcatgacttttttatttctggtgtagagtccacattatttagttggttgtacttttaaatttcaaagttcaaatctgaaggaagttagcgtttgtgatttcgggataccatgcagtggttttaatcccaggaa

SEQ ID NO: 605763 - DNA, 535 bp, Homo sapiens
gttcaccaagctcccacccttcatgcttggagccttggtccccagtattagcaccagattttcggtcagggcatcatttgggacatccacagctttgtccagtggggagtggagctgggaaaccagctggcttagaaaatagagcctgagcttgatggcagtggtccagtgacctctccccacgcttttaccaatggggtcatcaacttcatccagcagcaggggagggcaaaggcccataaacttggggtcatttgcagcctcctctgggactcccctttttttttttgtccctcctccccggagccggccctggatgtttctgggccccccccagagccccctctggttgtggggttgggccccgagccctttgcagggaagggtggtttcccccagcctaaccccccgcccctccatgtttatggtccctctgggttagaattgggtgaagtggttttgggcagctggcttttttggcccctgttcccgttggtcccctcccctgtagaaaaataaagatgccccgggggga

SEQ ID NO: 605764 - DNA, 708 bp, Homo sapiens
agagcgagtttgatggcctcttcaccacccacaagggtaacttccagctgttgctgtaccagaatgatggctgcctgtggtggagcccctgtcacccccttcacggaggacctcacctgcttccctgagaagtcctctcaagcgctgctgggggacgatgctagtgcgagatggacgccaggtggtacatgatgtatgagggccccctgtctggagtcctagttgggcatgtgagctattgccgcaggtatacgctagtctggattgcttggactaaattggtatgcttgcacccgtgaacaccgagcctatgtgaagtgtactctcgccagcgcgactcgttgagttggccacggtgttagcgagcgagtacggtggtcgcaatgcgtagtagaaaggtcgctcaatggaaacgggcgatattcgcattcgcattgccgtccaatccttggcgtttcctggggcgccttcggtaattgcccgcctaaggtcccccaggaggcgggatcgccttcgttgcttttgtccctaaggctcttgtctgcaggggttatcggaccggtaattcccctttagggaacccccctgggggcgatcccacaatcgctgtccgtttggccggtgtccccaaggtggggagcgccctgtgggtggccccccgttcgaaggaccttggcccccacccgtacccccttgggaagccccggg

SEQ ID NO: 605765 - DNA, 897 bp, Homo sapiens
tgattgattctcaagattttgcacagaaaactctttgggggctagaacagcagtaattgcatcacactggtttcaagacttcaagtttcaaaagcaaatcattaaaaaaaatacacgtcctgatttgagttagatacaggggacaaaaaagtagcacatacttggaggttacgtggtctacaaaagggggtaatatttaccttgggagagtagttctggtggtgtttattttttaaatacctcgagagggtaaacctcacaacattgattatcccaagcgaaacgggtgtcacactttataaagaatattcacaagaaccctttctgtacctaacaggggggaagaagacgatagactcgtccccgcacaaaggaattgttatctacaccaggggcgtgggtagatgtgaggcaccaaaaaagtagccgcgacgcagcacgtaaaccataaatcgagagggggtgctgacacccggggctcctgggcgaagactttcgttaacccctgttgtggagtacggcagtctcgagagcgggagagagagagtagcattgaagggacagagacccgctcacgggctatgctatctcggcaccattactgtagagcgccggaagaagtgttggttatcagtgcgattgcgaactgcgtgagttgccgcggtggccagtaaagcaaagacaacgggaagcgagtgactctcggcacagactgaagtagcccgtgcgaagtagacaattgtaatatgttttcacagtgttagaacggtcggccgccgaccgcgtattgcggagaatcgttgagactgcgcgatcttatgggcagtgagtttgaggagggcgcaagccgaccaatttcgaataagggagatgaaggagtttgcataaagtagatag

SEQ ID NO: 605766 - DNA, 262 bp, Homo sapiens
atgcaatgtgtcacctctaggtcaccaaactgcgatgatctagtagaaatcttgactgatttcccttgcaggcaagggaaaagtagaggaacaggagttattatgtaattcacttatgagtgatacaggggatactgaatgatatatgaatgtcctcaccagtactgggaaattcagaatcagaatttatatacccattgctgtttatgatctccataaaaatcaaagcagatatttccacttgtggctaagatgaatgggg

SEQ ID NO: 605767 - DNA, 696 bp, Homo sapiens
atatctaagttagatgagattaatacatatttatatcctgaatgtagtatatatcctagaggttgaagtgtgattaaggtagccctaggtaagggtgacatctgggatagtaccgagattcgtgttcttgatagctctacatttactatgagattgtcgtagtaaatcaatggtaatggacgtgatggcgactggtgagtatgttgttctatgttattggctgtccgcttactatagtattcgaggtaacgttaaaggacttacatgaggatcatcacacggtcttacgtacatgttatgaacttaatagtcgtaaatgagatcgtagctttgaacagtggtttagctatactgagcacttgtattggtatcacttgacttccatgaatgtaacatgtaagtctatgagagtaactcgatcgtatagtgatctgtaggtgcttgcagagaatccatagtgcatttagagtcagaatggagcgatttagtagtaacagtaccagctgctacgaaaccggtctaagacggcttttgtatgtgactcccctggatcgagtcactgagttgtggcaggtgagctgcatgacgatggaggagagactctgctggcttccgctatggggttctgaatcctgtgcgcaagtctgccattagtgaccagctcaagtccaaagactcaataccaagcaggaaggc

SEQ ID NO: 605768 - DNA, 100 bp, Homo sapiens
gcggcctactactactactactgctcgaattcaagcttctaacgatgtacggggacatgaactatatagcgaatgaaaaatagccgccaggaggaaaaaa

SEQ ID NO: 605769 - DNA, 419 bp, Homo sapiens
agctgtatgctgctggtgactctatgacggatcccccctgttcctgcttcttgaaatgggagaagcgttagtgctgcctacctgagcgaggccgagtccaatcctcacccacactagcatcacccgtctgtctgagcagatagctgttgctgcatgtggtgtctcagaactgtgacgggctccacctgaggagtgtgctgacgcgcacggccatctccgatctccacggtgaacatgttcattgaagtctgtacctcctgcgttccctacagtggaagtacgtgcgggtgttcgatgtgacggatcgcactgccctccacagacaccagtacaggccggatctgtcacaagtgtgggacccagctgtggcactccattgtgctacttggggagagggcgacgttggggcagtctctgaa

SEQ ID NO: 605770 - DNA, 832 bp, Homo sapiens
cagcaagggaggagactgtgctggcaacatgtgccatggctctgcagacagcattcgccagcctgatcccagacaggctgagctgaggatgcatcgtggaggagattgaggaccttgtttgatctgccctggatgagctcgggggtcgtgtatctccagtattgacagaatggactggaaacaagagcgttatatgtggctgccacctacgaagctacatggatcatgtggtgactgagccatccatttagatggagtgatcatgtgtcatccaagcttgatgatagtgctgatcttcagcgaacgaagaactttgagtccctctcctgacagccttcagcgtggcctcatgcaagcttgctgtgctctcgcaattaatctgcgtacacacagtgccagttgtggtatgtgcctagagggctctgcttccgacactcatgaacaggctatcttgcggttgcaagtcacgcaatgttgctggtctcgagcctgcgtgaactcagggctcaattgtgtaagaaactaggaacgatggcgtaggagatcgttgttgcttccgattggagccacttgtgcctccaaggacagacatccgttgcaacccccgtgtaggggatgtccctgtgaactaacacttttcagttgaactgtcaagagttttccaggctggttataaagtgacttccttgtcgaagtttgacggttgacaagccaggtatattgcaacatagcgtatacgctcagaagtcaaggatctccacttgaagtcgggatcgcaaatgtggatctttcccaccggggagtacagggtcagagcgttgcccccaaaaac

SEQ ID NO: 605771 - DNA, 341 bp, Homo sapiens
atgcatgcttgcgcattttttgttaaagcatctttattgagttataatttctataccacataatttaccgatgttaaatatacaattcattttttgtatcacattattgttattattattttgagacagagtttcactcttgttgcccaggatggagtgcagtggtttgatcttggctcactgcgacctccgcctccccagttcaagcaattctcctgcctcagcctcccgagaagctgggactacagccctgcatcaccacgcccagttaacttttgtactttcagtagagacggggtttcaccatgttggccaggctggtaccaaattcctgacctcaa

SEQ ID NO: 605772 - DNA, 211 bp, Homo sapiens
gactgcatccacgcccgctgactgctcacgccgctgagagatgtgcgagcgccggtccgaagggacgggtgatgtgtgccatctctcaggaccgactgacccatgtccaactgctgttcacatggaacctttctccagttcgggctacaaagttctcgttggagtatttgttactaccaccgagatctgcgccagcggcgttggatgcagt

SEQ ID NO: 605773 - DNA, 348 bp, Homo sapiens
gtcggatagtgctttgtcatggcgataacctttattagactgttaatgaagggtaggtcaatcgttacaaagggggcaaattatatcatagaggcctaccccccgaatgactcattaaaaggtgtgaacatttttaaaggctgtggacataatatattgtcaacatgctttccaaaaagtagtagcaattcacactttctccagcaatacagagggttctctgcatctttggaggcattggaaatgcattctataacctgtaagttaaaaatacttccttattttaatttgtgctgaattacttttgatgatagatacacgtaggtaggtaagtaggtagacaaattc

SEQ ID NO: 605774 - DNA, 957 bp, Homo sapiens
  misc_feature (47)..(47): n is a, c, g, or t
  misc_feature (58)..(58): n is a, c, g, or t
  misc_feature (69)..(69): n is a, c, g, or t
  misc_feature (118)..(118): n is a, c, g, or t
  misc_feature (144)..(144): n is a, c, g, or t
  misc_feature (146)..(146): n is a, c, g, or t
  misc_feature (154)..(154): n is a, c, g, or t
  misc_feature (162)..(162): n is a, c, g, or t
  misc_feature (164)..(164): n is a, c, g, or t
  misc_feature (177)..(178): n is a, c, g, or t
  misc_feature (196)..(196): n is a, c, g, or t
  misc_feature (198)..(198): n is a, c, g, or t
  misc_feature (200)..(200): n is a, c, g, or t
  misc_feature (202)..(202): n is a, c, g, or t
  misc_feature (220)..(220): n is a, c, g, or t
  misc_feature (223)..(223): n is a, c, g, or t
  misc_feature (235)..(235): n is a, c, g, or t
  misc_feature (239)..(239): n is a, c, g, or t
  misc_feature (263)..(263): n is a, c, g, or t
  misc_feature (292)..(292): n is a, c, g, or t
  misc_feature (296)..(296): n is a, c, g, or t
  misc_feature (306)..(307): n is a, c, g, or t
  misc_feature (321)..(321): n is a, c, g, or t
  misc_feature (324)..(324): n is a, c, g, or t
  misc_feature (350)..(350): n is a, c, g, or t
  misc_feature (352)..(352): n is a, c, g, or t
  misc_feature (358)..(358): n is a, c, g, or t
  misc_feature (397)..(397): n is a, c, g, or t
  misc_feature (413)..(413): n is a, c, g, or t
  misc_feature (418)..(418): n is a, c, g, or t
  misc_feature (460)..(461): n is a, c, g, or t
  misc_feature (608)..(608): n is a, c, g, or t
  misc_feature (621)..(621): n is a, c, g, or t
  misc_feature (633)..(633): n is a, c, g, or t
  misc_feature (640)..(641): n is a, c, g, or t
  misc_feature (662)..(662): n is a, c, g, or t
gtcaccgttgtcctgctgctgctgctgctcctactgctggccactgncctagtactgncctgcgccgcntcagccgtgactcagggggctactaccacccggccctcctaggttccgngctgtggggcttcactcggctccttntnttgccatncccccagntntcttgctacaatnncgagctgaactggggtcnanananaattaccttgaactacangangatgaacagtanacanactatgaccacgtcgcggatggtngcctgcaggctgaccctggggaaggcgancagnaatgtggaanngcgtcagcccagancangtccccgtgcgggctgaggaagccananacagtnacacggagggcgacctggtcctcggctccccaggaccancgagcgcagggggcantgctnaggccctgctgagtgacctgcacgcctttgctggcagcgcannctgggatgacagcgccagggcagctgggggccagggcctccatgtcaccgcactgtagaggccggtcttggtgtccatccctgtcacagccgctcactccccgtgcctctgcttcccaagatgccatggctggactggacccccagnccacatgaccatncctcagactgtnacccctnncagttcccaagtccatgttanccccgttcaccacgggaacggtcctccaccaaccacaggcatcaggcaacccatttgaaagttagaactccttcaggcctgtgaaagcatcaggcacgtaatactgagtacttacggctcctgaagatcatcaaaagtacagatcatcgagaatgctgtatgtgccagaaagcatgccggagcagaaatcgggaagcatctggttcaggccatcaattagtttacacgggtctttcatacatcgatgcaagctgatcatgattaccgacgcctgtcggggtcaaactagcactca

SEQ ID NO: 605775 - DNA, 198 bp, Homo sapiens
  misc_feature (54)..(54): n is a, c, g, or t
tatggttgaaaatgtttattctcttctttgggagtaagctacatgatgcataanactgtgttgtgttagaaatgttcaggaattaaaaactttatgttacagaattgagctgcagaaagtgcaagacatgtcaattttaagacacacggtcttctaagactgaaggataaatttaaatgcatttcagaaactaaaaca

SEQ ID NO: 605776 - DNA, 702 bp, Homo sapiens
  misc_feature (419)..(419): n is a, c, g, or t
taggtttggagggggaatgctggaaatggtaatggggtatggagactattatcatataagtaatgctagggtgagtggtaggaagtttttccataggaggtgttatgagtgggcccgtagcgggaatcagggggttatgctggtccagaattctataaaacacagggaggttaaaaatgtaagggtctagggtggacaaaattattgttggtgtgtagagtctccagggagagatgtggcgtcataattgttggtctcctagagaagtattgtgtagtgggtggatggtgtgtgttttatttatatatcaatggtgttggtgtgttattccggcttatgagaagaattaagggcgagaagggcgcctggcgggcgtaattccgattgttagaacgcctggagaactagtctcggactcncctcttcggcaaggtccacaagggggtgttccaggtatggggtactcctggctaagtggtggggaagatacatatcctatatatttatgggggccacaggtgtcccatgaagtggccaggagaatatactccagaaggggtggtccctgggtgttgggtgaataagcggggtggagcagggcttacaagggagccccccttttattaggtaagtggtgtggactagttaacacatggattggctaaggggtgaacttccttttgcacattgggtggggggcaa

SEQ ID NO: 605777 - DNA, 92 bp, Homo sapiens
aaaaagcaaccaagcccaaagtgtgactttgttgacattttatgtggctttgtcatatgttcctaacccccaataaaaacaatgttgcatca

SEQ ID NO: 605778 - DNA, 901 bp, Homo sapiens
tataacattcacagccacagaactaatcatattattatatcttcttcgaaaacccacttatccccaccttggatatcatcacccgatgtaggcaacagccagaacgcctgtaacgcaggcgacatacttcctattctacaccctagtaggctcccttccccgtactcatcggcactaatttaacactcagcaatcaccctaggctcgactaaactattctactactgcactctcaacggtgccgcaagaatctagtcaaactcctgagccaagcgaagcttaatatgactagcttatcgacaatagcttttatagtgagaagataccctctttacggagctccacttatgactccctaaagcccatgtcgaagcccccatcgctgggtcgatagtacttgccgcagtactcttgaaactaggcggctatggtataatacgcctcacagtcattctcaagcccctgacaaaacacatagccctaccccttccttgtgctatccctatgaggcatagttataagcaaagctccatctgctacagaggaacagacctaaaatcgctcatgcctactcttcaatcagccacatagccctcgtagtaacagcacattctcatccaaataccctgaagctcacggcgcagtcattctcataatcgccaacggccttacagtcctcattactattctgctagttaactcaactagaaacgcactgaagtcgcatcataatcctctcctagggattaatccaatccactaaagtttgatgactataaaagctcgttaactcgcttaccacatattactaaggagaacatgggtataaccagtcctgggaaatccgccaagggaagacaaagagatatccctatttccacaagggtcccaattaaacccg

SEQ ID NO: 605779 - DNA, 628 bp, Homo sapiens
cttctatgcgcggagccttccccctttcttcccaccaacattcttggctcggtaccaccgggatttccactttccttttctccggaagcctcgccatgaagcccattggttagggtttcaccccaataggggcataggtagccctaggaggccctccaaatggtacccatggtttcgcatttgtgcacgaaccctgtagggcctatagagcccactggggcacagggtcttctcgggttccacgtatagccgcatgaacacccagcccgtcttcagctaacgcttacacccaatgggacctggcctcgaaccaatgcagggctgaacaactaacggagttcagcttggaagaaatttacagccaagcaagaattgagcgcaatcagcccactaaccaggaggaccttttgagaccatctttgaggaaccccgggagtcgcaatgggactactgattttcaccagctcaaggaagctccggacgggtctgtggaatctcgggacagcagccttcctcgatcacgaagaccgtccacgtggggtccgggctgcagggggcaagactgttcactcccaatgtggcccccagccctgatgtgggccacctgctccagcagcggctggaggag

SEQ ID NO: 605780 - DNA, 365 bp, Homo sapiens
tattggcattacaggtgtgaccccgtctctacgaataattttaaaaaaattagctgggtgtggtggtgcatacccgtgtcccagctactagggaggctgaggctggattgcctgagctcaggaggttgaggcttcagtgggctgtgatcgggccaccgcagtgcaggctgggtgacagagtgagattgtctcaaaaaaaaaaaaaaatttcgtctgtgtggtatcatgtttcagattttttttttttgggaaagctgattattttcccggtgtccggcttttttataagggccttggttggattataattgcttgtgtttggaacccattattttgccctgtgaccgtgcattgaacttcttgtg

SEQ ID NO: 605781 - DNA, 595 bp, Homo sapiens
  misc_feature (7)..(7): n is a, c, g, or t
  misc_feature (79)..(79): n is a, c, g, or t
  misc_feature (119)..(120): n is a, c, g, or t
  misc_feature (143)..(143): n is a, c, g, or t
  misc_feature (217)..(217): n is a, c, g, or t
  misc_feature (393)..(393): n is a, c, g, or t
  misc_feature (471)..(471): n is a, c, g, or t
  misc_feature (542)..(542): n is a, c, g, or t
cgacgtngaaccccattggcgtggagctggaggtgctggatggccacgaccccgaccccggcggcatgctgtgcagacnggcacgagcgcatacttcctcccgcccgggtgcgcgcganntgcgcgtgggccgggtgcgaggngcatcattcctgccgccagaacctgggccctttcctgggattgtggacatgttcggaactggaggtggcctgcntggagtatcgggctagtctgctggctgggaagggttttgctgtgatggctctggcttattataactatgaagacctccccaagaccatggagacgctccatctggagtactttgaagaagccatgaactacttgctcagtcatccccgaggtaaaaggtccaggagttgggctgcntggaatttccaaagggggttagctctgcctttccatggcctctttcctgaagggcattacggctgctgtcgtcatcanggctctgtggccatgttgggggacctacgctaaaaggcgagacctgcccctgtgggttcaacagaattgcntaaggtaccaaatggctatcagacattgtgatgtcctgaaagcctttgaaggc

SEQ ID NO: 605782 - DNA, 266 bp, Homo sapiens
ggacctcagttctattcctctacctcatcaccatcctaatagtcctcggcatcatcggcttcttcttcttccaccggggccactttttcctcctcagctacttctactactttgaattcactcccatctgcatagtctgtgtctgctccgccccaccaaacatccgagtcatcctcctccgcatcagcagaatccacattgtcactttattcagccagggggcaacacacaaactctacccctcggaacttgtcaattccgcaggg

SEQ ID NO: 605783 - DNA, 909 bp, Homo sapiens
  misc_feature (458)..(458): n is a, c, g, or t
  misc_feature (672)..(672): n is a, c, g, or t
gtgcctgtgtatcaggcagtcgtgcgtatcactgtggaagtgtgctcctgggcagttgaggaatcctggcactaccgtttcgtgtacttctttgccacatgattatcagagcttaatacaataacttatgaggtattgtcaggaggttccctacaatattgggatgggtctcgtagagtaaacgtaattccaatagcttcaggattggcagacgtagacatatggtgagttatgcaagatgtgcgtatgaggcaggaattgcattgtagcgttcctagaatatgaggtgtgggtgatgacgctggcttcatggcgtagaatctgtatgaaggagaactgcgagagatatcgacgtgtgggagacgcagagatccaataccaagtaagagggccggtcggcttgaatgggtataaatctgactggtgcgatttctaagatcaggcttaaggggtttcangcttgtgaccacgtccgtcagtgtctactttctggtcactcttagataaggccaatcgatttggagttaggcagatgcctctcgagtggtggatgactcgagctcggacatccatgacgcaagggagaatacgcgtcattcacagcccgaggtcaagcggattaactaaagcccagacgaaatggaacgattcctggagtggtagggatgcaancatggggcagataggaagtcgcggtggcaaacgggagacgggagttcggcaagcgaagagcgaatggcccggagcgaccgacacaaccacagggtgtggggggcggccgggaaaaacaagaaccagcggggcggcgcatgccgcgccggacgtcgttcccagaacacgggacccgggggcccaaacaaacacgggcccgcccaacacgggtgggcccgctcaagccggctacccgcg

SEQ ID NO: 605784 - DNA, 882 bp, Homo sapiens
gggggcaggtgccgccgcgtagacgcacccggctgaccccgtgcaacatgtaaacggcgccagcaggcggacgctggcttctccgcctgggacccctccgcccgaccgggccccgcggcctcgatgaggacacaccatgctgaccggggtgaccgaggtattttctgttgcctgctggtgcactgccccccgaagctgtgtggtgccactggagagctggtcgaagtccagcgatggctacacctttgtagagtgtcaagcccggcgctgtgctgcgggtgaagcatgcaggacccgccccagctgtgccccacctccaccatcatccgatcctccggatgcagccaggggacctctccggcttggtccgctgtcagcgcccggatcacctgtgtacccgaatgggcggttgctggtggaaaacctgggccgagcccctcgagcctgactcctacacgggcagaatggtctggggagccgctggccgcctggaggtggagcttggcagatccggcgggcagctgattggccgcttggcccccggcaggcgcaggcaggcggagcggcgcagtggcaggtggtgggcggtggtggcgagcaggcgcccaagaggaccatcatattgactgggagacgcgcatcacttagctgcaaggggccaaggctgactgtggtgtcttgtcatccatggtgtcgcggggtccctggcatctggaaggacccgtggcttcttgtgggctagcatgaggggtggtctgactggcggcgggccggtcgcgccggggcggggtaacctttgggcggtgggctgggccttcggttgccgggagtggccggcccggggccttggtcggcggccgcctcgggtgaggggcacctcct

SEQ ID NO: 605785 - DNA, 452 bp, Homo sapiens
  misc_feature (8)..(8): n is a, c, g, or t
  misc_feature (287)..(287): n is a, c, g, or t
ttctcccnatgaggacttctgccccctgcaagcaaacttttgctttgacaagccccaggcatttcatatatccctctgaaaatcctagggcagaggttccccaaacctcaattccttaacttcctgtgtgtcccacaggctcaacacccatgtggaagcttcccaaggcttggggcttgcactctctaaaccccacagcccgagctttacgttggccccttttcagccatggctggagcggctaggatgcagggcaacaagtccctaggctgcacacagcaggggancctaggccccacccacaaaaccatgttttcctcctaagccccaagccctgtgatgggaggggctgctgtgaaggtctctgacatccctgcagacagaaaactgactaaagaagaaatagaaaatgtgaatagatgtataataaagagattgagttagttttttca

SEQ ID NO: 605786 - DNA, 1060 bp, Homo sapiens
  misc_feature (262)..(262): n is a, c, g, or t
caagacctcaacgtttggcgcaagtggtggccgatgtgctctgcgagttcctggcaggtggctagtgcactcatcatcctactacgtgacgcgagtgtctactcccgtgtgtgcatcattgccagataatcgcaaagaagtacaaggtggccggtccagatgtcctgccacccggagctgaatacagtactatccaggaacacgctggctctgcgtcaacgccactcctggagaatgaatgactgtggacgaactgtggtgngtggtgacttttcggattaacagagcacctgcccaggtggatgaaattcggtctattgaggatcaccacagcctccagctgcatgtccagtcagcgtcagactacgcgtgttgtctcatgtggagcagcatgctcctgggccttcatcgctgaagatcagcgtgatgcgatgccgatcctggaccacaaacccccagggctgtaccttcacagtcctggtggcacacgatgagaagccggcacttcgcaagatggagaagatccaggtcatcaaggatttcccctggatcctggcgggatgagcaggatgtccacatgtcatgagccccgggtgataccattaaaaaacatgacgtcggacattttaacagatgcagtttacgtggcagagcgcgctcgatacggcagctgaggggggcgacttggcaacccagtgatgccaaatgtcagactttgggggatccgcgctaggcagtggtgcatgggtgcgccgaatccagaggtcttataggcccgtgtgttggaaggcccgaccaacccggggcgatcagggctgtaggaggaaggcttcacaggagggggtacaggatgaccggaactcgacatcacagccccgggggtcccccgcacaacggtggtgccacaacgagcgcggcggtcacaaagggcccagcgtgtgcgaacacacaaaaaaagggggggcagaactcacagggcgcacacaccccgtctgacgaggccacgggaaaaaaagagcagggagcaacagcaggatgcacagaacacctgcgagacgac

SEQ ID NO: 605787 - DNA, 198 bp, Homo sapiens
tgagtatgaatgtcgggtcgaagagcgtatgatgggcagtgaggggcgcaatgatcaggcatatatcgagaagtagcgtacgtaaacgtactctagaatatagtagatgcgaataaaggtgatatgatggcgagattgtatgatgtattgattggtcatatatgggcgggtataatacctcagtcgcgtccatggcat

SEQ ID NO: 605788 - DNA, 139 bp, Homo sapiens
gggaccggtaatgtagctgtactgatgggagactttcaatcatttggagactatttggcgtgttagcccaggtcttcctggctacccagaacttgtaccttggatttttcaagtttcttttgaatttcgatcacttcta

SEQ ID NO: 605789 - DNA, 205 bp, Homo sapiens
aaccccccccccgccagcttcccctgcctcctacatccagtttgtttttgttcaaagtaaaaatcctgtgttcccccttcagtgacccctaaattgtttgttgttgtttttttttttaattgtcttcaaaaaggaagggccccattaaagggtgaccttgtaataaattggaatttcaaataaccctcatgtacttgtgtttata

SEQ ID NO: 605790 - DNA, 176 bp, Homo sapiens
tgtgatatccccgggtaggatcatctacaggctatagtatcatcctacaggtgatggtacatgctacgaggtgatggtacatgctacaggtgatggtacagctatcacgtgatgtacagctatcaggtgatagtacagctatcaggtgatgtacagctacgaggtgatgtacagct

SEQ ID NO: 605791 - DNA, 760 bp, Homo sapiens
cgtaacgtcatcaacactgaattcgcgtacatactgccaacaatgagcatcatggtctgagtgccacctgtcaaccgctgctatcatgagtatgtcgcatgatctgcgaagaccttactgttgcgcaagatgcgagtcgtagatgcacaggagcatagtggaagaccgacgatacatgctgcagaccttgctaaatcgttgtgactccaagaaggcctaccatctcagaggagcacattgaccttctgtgactagccctatatgaacatgtccaggttgtcaccaggcactagcatcttctggacaggagtcactgagtaacgaattcagaggactcacttgaagtgtccctcgctcactccattagggcattacaataatacgctgttataaaatattctctctgcccaattgtcctgcaaacaaattgtacaaataccacatcatactacatagcacccggctgcctgcgcaaacagctcaaagatgccacctctcggggctctgaaccgggcttcctaccttgtagccgacgtaagaccccacaggcctggtttccagaccgttaccccaatcgttgccccacaagtgaagagcgctacagcatggaatggcgcaacttacctaggctaggggcccattcgggcaacaatccaccttcctggcatcctggggcaaccatgcgctgacaccaatcgttagcgtccaacctactgagagacgcgtcccaaaataccgctaatacgacgaaccacctctg

SEQ ID NO: 605792 - DNA, 141 bp, Homo sapiens
  misc_feature (31)..(31): n is a, c, g, or t
  misc_feature (97)..(97): n is a, c, g, or t
  misc_feature (106)..(106): n is a, c, g, or t
cctgggatttaagaggggtgctgatcccggnatgcctgaaccaactgttttgagccttctttggggataaaggattatttggtcttctggatttggnggcaatcancggacagcatggaatatgtgtgctctggctcggat

SEQ ID NO: 605793 - DNA, 148 bp, Homo sapiens
gagaaagccatgtttcagtttcgagcgccaagatcgtgaagcccaattgcgagaagccggacgagttcgagtccgcatctcccaggctcttctgagctgagatgaactcgacctaaaggctaagctaaggagctgaaatattacgaca

SEQ ID NO: 605794 - DNA, 394 bp, Homo sapiens
ctagaggacccaagctctggacaggggcatctctcttgaacccaaatgtctctcttcttattaccaaaaccatggctctatttcttcttcacatccactggctcttcatgtctattcccattcccttcgggccaacagaccggtgggaaaactgagaccggccgttcagagatggaccgagaacttattttggattgtggatttggacttttttgtacataaattagaaaaacccaaatactcccaagatgacttcccctggctcctaatcccagctgacagaggaggatgtaagggcttagccatgatctgcaggggtctggggagtccaggccgggctattgcttgggtctctctctatttatatatctcagttcacagtgtttcttattcc

SEQ ID NO: 605795 - DNA, 563 bp, Homo sapiens
  misc_feature (398)..(398): n is a, c, g, or t
tggagacgggggtctcaccagtgggccacactggtctcgaacttcgggcctcaagtgatctgcctgactcggcctcccaaagagccggcattataggcctgagccatggtgcctggcccctagccccattttctacggggacatgggacttacggatgtgtaaggattctgggtatatgaaggaatttacctttggtgtttccctagcaactaatgataagcatttggcaggtgtgtattcttttttgaggggagagggagtctggctcggtcacccaggcgggggtgcaggggtgtgatctgggctcattgcaagctccgccttcggggttcacgccattctcttgcctcagcctccggggtagcgggaattagagagtgcccgccaccaggcgggnttcattggtgggtatataaagaagagagggagttgcatggtgtaagccgggagggtctcaatctcgtgacgggatgacccaccggtttgggcctcccaaggtgtggggattacgggcttgagccaccaggacggggagaagtgggtttcttatcaggacggcatt

SEQ ID NO: 605796 - DNA, 234 bp, Homo sapiens
gcaggagaatcacttcaacctgggagctggaggttgcagtgagccaagatcgcaccattacactccagcctgggcgacaagagcgaaattccatctcaaaaaaaaaaaaaaaaaaaaaaaagggggggccttttccccccgccttggagggcccttttacacgggggaaaaaaggaaaaactgggcttgggggggggcgtttggttttaaaaaaccaaaatgaagccgcctccg

SEQ ID NO: 605797 - DNA, 760 bp, Homo sapiens
tgagcgggtggagagttgtgcgccggtccctgtggcctgagctccggctccgtgctggggcgcctgctgatgtctcaagatggctggagctgggcgaattaaagcacatggtgatgagtttccgggtgtctgagctccgggtgcttcttggctttgctggccggaacaagagtggacggaagcactgatgctcctggccaatggctctgcacactcctgaagtccagctgtgcccctagtgtccagatgaagatcaaagagctttaccaatgacgctttccccggaagaccctggggcacctctgatctctcccttctctctttgccccctggcacctctcctgtaggctcccctggtcctctagctcaccatttccaccaacgcatgtaggacactggacacacctgatgggccaacaagcgtgaggtggacatgcagcacccatcctgccccagagtctgtgcaccactgatgtcaccatgaaaccatttgcccttctattgaagtctatggggagctcattcgtgcacaaccagcattgacatcacttctaggccagcggctatgacgaaggcgcaccttaacctttatgcgagctcaagaacaccaagagaaagttgcagtagaattacttacatcccaagagaaatgttactggccaggaaacccaacgtgtgactaataccgatacaggtgcggcgtcaggatcctgactctgtcagaacaacgctggcccccaggacggcatatcatcccacc

SEQ ID NO: 605798 - DNA, 569 bp, Homo sapiens
  misc_feature (20)..(20): n is a, c, g, or t
  misc_feature (65)..(65): n is a, c, g, or t
  misc_feature (69)..(69): n is a, c, g, or t
  misc_feature (73)..(74): n is a, c, g, or t
  misc_feature (76)..(76): n is a, c, g, or t
  misc_feature (81)..(81): n is a, c, g, or t
  misc_feature (93)..(93): n is a, c, g, or t
  misc_feature (97)..(97): n is a, c, g, or t
  misc_feature (100)..(100): n is a, c, g, or t
  misc_feature (108)..(108): n is a, c, g, or t
  misc_feature (119)..(119): n is a, c, g, or t
  misc_feature (168)..(168): n is a, c, g, or t
  misc_feature (176)..(176): n is a, c, g, or t
  misc_feature (200)..(200): n is a, c, g, or t
  misc_feature (202)..(204): n is a, c, g, or t
  misc_feature (230)..(230): n is a, c, g, or t
  misc_feature (232)..(233): n is a, c, g, or t
  misc_feature (236)..(238): n is a, c, g, or t
  misc_feature (240)..(240): n is a, c, g, or t
  misc_feature (264)..(265): n is a, c, g, or t
  misc_feature (283)..(283): n is a, c, g, or t
  misc_feature (297)..(297): n is a, c, g, or t
  misc_feature (304)..(304): n is a, c, g, or t
  misc_feature (317)..(317): n is a, c, g, or t
  misc_feature (338)..(338): n is a, c, g, or t
  misc_feature (349)..(349): n is a, c, g, or t
  misc_feature (353)..(354): n is a, c, g, or t
  misc_feature (357)..(357): n is a, c, g, or t
  misc_feature (386)..(386): n is a, c, g, or t
  misc_feature (404)..(404): n is a, c, g, or t
  misc_feature (440)..(440): n is a, c, g, or t
  misc_feature (464)..(464): n is a, c, g, or t
  misc_feature (471)..(471): n is a, c, g, or t
agatcgggttaagtacaaantatagtctttaccatacaaaaagatacataatacaaaaacatganaccngccnncntgcgngcccgacggcgnttcnggntgtgatanctctcagacangggtggggttcagtgctctgacactggactgtgtttaaagtgctatggntgagagtnactgaccaagtgctggcagctgcngnnnggggccaatatccctatctcctaacncnnggnnngngggggggtggggggggttttgtgnnggggtgggctctggtttntggtgggggtgttnggggggngtggtgggggggntgggggtcttggtggggggtncctccttgggnttgnngtngcggtggggggggttggtggcggggaccnttttttatggtttttggntttgttttttttttttttgttcattgggggaatctnaaaagttgttaatttttttttgtnttttggnttaaccctagtgggacagtagagcagtttcagcttacatttaagatggctgatggggaggtcaaaaaatttgataggaattaaagtgctaagaacatc

SEQ ID NO: 605799 - DNA, 292 bp, Homo sapiens
gctcgaccggcaaggtcgggctgcggcgttagtctgccttgcggaagttatggaagtgatgcaaaccgccgccggtgaagaagctttcgccggggttggccgagtattgccggctgagggccgcgtcgagcattttcggcaaggagcggtcgctgttttgcgccaggtagtccaccgcccagagggtgatcgggtcctgggcgtcattcgccacttttttcagttcggcgggtgactggttgccataacggtcgtgcagttcggaaatgatctgcaggtagctggtcagcac

SEQ ID NO: 605800 - DNA, 168 bp, Homo sapiens
  misc_feature (76)..(76): n is a, c, g, or t
gtattgagtcagctcccccaagatgagctgatgccccagagagagctctgtacgtcaccaagtaaccaggcccagnctccaggccccaactccgcccagcctctcccgttctggatcctgcactctaacactcgactctgctgctcatgggaagaacagaattgctcc

SEQ ID NO: 605801 - DNA, 632 bp, Homo sapiens
  misc_feature (247)..(247): n is a, c, g, or t
  misc_feature (484)..(484): n is a, c, g, or t
  misc_feature (496)..(496): n is a, c, g, or t
  misc_feature (509)..(510): n is a, c, g, or t
  misc_feature (572)..(572): n is a, c, g, or t
aaaaaaccctgtttttaaaaaaaaaattggggggccccccacccaaaaaaaccgcccctgttaataatggcgaggggggcctcccccccaaatttgtttttccataaaaaaccgggggcccacataaacccccttttagaagggaaaatttggggccaaaaaaagtttcctcccttttaaccccgggggtggaaaaaaaaatgtggcccccctttttttattaagggccccaatttttaatattttngggtttttaaagaaaaaattttcccggagaaattttttggggggcccctacaaaaagggaacagagtttccggggaaacctttattgcccccggagattgggcctccccccttacccggaaccttccaaaaaagggagaggcttggcctaagagtttgagagtggacgcccctgggaattctaccaggggggaagttttacgaggttcctcacaaggaaagagttgggcccaccttntgcccacacaancaccagacctggnnctggctcaccaaccgaatatccagctaaaaggcggattggtgtggtgacgttctcaacccanttcagtgaaaatgtgagagatagtctttgcgcatgatgtaactacaagccaaaaaacctt

SEQ ID NO: 605802 - DNA, 663 bp, Homo sapiens
  misc_feature (487)..(487): n is a, c, g, or t
  misc_feature (526)..(526): n is a, c, g, or t
  misc_feature (570)..(570): n is a, c, g, or t
  misc_feature (607)..(607): n is a, c, g, or t
  misc_feature (610)..(610): n is a, c, g, or t
  misc_feature (663)..(663): n is a, c, g, or t
tgcagtggttcaagcccgtttatcccagcgctttgggaggcataagcgggcggatcacgtggttaggagatcgagaccatcctggctaacacagtgaaaccccgtctctactaaaaatacaaaaaaattagccgggagcggtggcaggtgcctgtagtccctgctactcaggaggctgagacaggagaatcacttgaacccgggaggcagaggtgcagtgagccgagatcactccattgcactccagcctgggcaacaggagcaaaactctgtctcaaagaaacgaaacaaaacaagaaaacacatttgataccaactcataaccaagtctggattacttctgtagctcattatcactgataaccaagagttgattaatcaaagtagactacctgtcagtctatgtacagaactaaagataatccttattcttggttgtcgagtacagttttaggaaatggatcatcttaaaatagggtaatacggncttgtgcagtggctcacgcctataatcccagcactttgngaggccggcggtggatcacctgaggtcaggagttcgagaccagnctgaccaacatgggagaaccccatctctactatacanaantagccaggcgtcgtgtcacatgtcctgtcctagctactggggaggctgaggcn

SEQ ID NO: 605803 - DNA, 263 bp, Homo sapiens
ggcgcggttccgctcgacgtatctgggaatctgatccatagctctgcgtatcccgacactcatcacaacatcatatgatcagctttgttcactagcacagctatcgcgctagatactgtagacagcgcgctctgctgtgaactagcttgatcatcatactatcgcttagtctcggggtattggccgagctgtggcatcgtattcccagaattcgaggtagttcggattcaccgctctggtcagcggtgctgtcgtaaacatct

SEQ ID NO: 605804 - DNA, 315 bp, Homo sapiens
  misc_feature (76)..(76): n is a, c, g, or t
  misc_feature (277)..(277): n is a, c, g, or t
taaatatgtttattcttagtttttgtctttattattattattaattttggatagcatctcactctctgccaggtgnagtgagcggtgcatctaggctcactgcaactctgcctccccggtcccaatcaattctcctgcctcagtctcccgagtagccaagactacaggcatgagccaccttgcgcggctaatctttgcattttaagtagtaggggtttctccatgctggtcaggctggtcccaaactcctgacctcaggtgatccgcctgtctcggnctcccaaagtgctgggattacaggcgtgagctgccgtg

SEQ ID NO: 605805 - DNA, 208 bp, Homo sapiens
agtgtcatcttcacagtgaacactcaggggcccagggctttttataggcacaccttcctatggttggtcaccaagctaggtgctattggtcatctgctctggttcacaccagagaaccaggctacaagagaaaaagcagaggccaagagttggagggagaaatagtcggtgaagaacccggtattccattaaagacccgtcataatga

SEQ ID NO: 605806 - DNA, 153 bp, Homo sapiens
ctacccccattatacaagctccagttacaacagctccagatacaacagctccagttacaacagtcttccagttacaacagcgtccagtttacaacaagcttgcatgtggtatttatcaacgttgacctgactctatttcattctagcaattgt

SEQ ID NO: 605807 - DNA, 410 bp, Homo sapiens
  misc_feature (280)..(280): n is a, c, g, or t
  misc_feature (392)..(392): n is a, c, g, or t
cgatccttctgcctcagcctcccgagtagctgggactgcaggtgcatgccattgcacctggcataatttttaaaaatttttgtagagatggtgtctctctgtgttgcccaggctggtatggaactcctggccatcaagtgattcgcctgccttggtttcccagaattttgggattataggccaccatgcctggccaaaacagctttattgagaaataattcacaaaccatacaatttagccattttatttatttatttatttattttttccagacggagntcaactctgttgccgaggctggagtgcagtggcgtgatctcggctcactgcgacctctgcctcccgggttcaagcgattctcctgcctcagcctccctagtagttgggattncgggcgcccgccaccatg

SEQ ID NO: 605808 - DNA, 675 bp, Homo sapiens
cgtggtggctcacgcctgtcatcccagcacttgggaggctgaggcgggtggatcacaaggtcaggagatcgagaccatcctggctaacatgatgaaaccccgtctctactaaaagtacaaaaaaaattagctgggtgtggtggcgggcgcctgtagtcccagctactcaggaggctgaggcaggagaatggcgtgaacgcgggaggcggagcttgcagtgagccaagatcgtgccactgcactccagcctgggcgacagagcaagaccccatatcaaaacaaacaaaactgtgatgataaaaagcggccataaacactaatatcaaaccatgctactcgtgtcttaaattttcaaatagcttgtgcacctgaaatacaaaattaagttgtggaaaaacagtttttaacgtgtgtggctcacaagctaattaacgtgtataaggttctggccatgtgaaaggttacaaacataccagttcattttgaagaaaaaaataaacagaaaaaaaaagaaaaaacattgtgtgggcggctggtggcgccctgggaagaggttttttgtaacaccacttggttggggggcgggggcccatgttgggtaagtggacgtgtggccatgagcggatccaaaaggagatccgggcgaagaaagggggggggttttcaccaattaag

SEQ ID NO: 605809 - DNA, 232 bp, Homo sapiens
tcagagaccgtgtttatgacccgctcagaactgatgagatcaagggaatgtacaagcgaaacgccgagcaggactggaccttccatgatgtgccagcttcctgggatctcactgcagcagagcgctgagcgccagcagcacaatcagcagctggggtgccgcagcgcaacatatgcacacgtggcagctggggtaggtaactatcttgtccggagaattctacacgctaaag

SEQ ID NO: 605810 - DNA, 970 bp, Homo sapiens
cgccctctccctcttgccaatacggtccgggctgccccggtgtgtctccgttgagtcgatgtcgttgcagtcctcctggcatgggtctggtccccttctcccgcgctgtaggccgcgcctccctacctgaccaggggttcattgtggcccgtctttactgaggctggcgatttgggccgatatgacaccccgacatggggtttcggaacagcgcccccccacttggtcgagtgccccagatctagcgaacaaggtcttcgggagagtaaaaccaggcaatgccaggggacccactacgtccctgagtgtttcccgggagttccctggtcgttcctcgacgcacgccgttggccccctggttacgggcccgccaattgtgtgaggaccccagaggggccacggccccaaattctttgggacaccaaggtgcccagcaccacgtgtgactctggtaggaatttgaagaatctgttgagtcacccccataaagcgagtccgggaggtcttaatcccctagtctgggcaacctcctctgtgggaggacacgcgacctcccccacacaatgtgcgtttacttggctggcgtcttgtgtaaagcgcaccttcttccagagtagtatagaacaccccacgcttttttcccaaattgttcccccaaacatgttaagcaggagaaagcccccgcttatgaaatctaataaatggtgggacaccccgagctaatcaataatctagataatagaatatcacgcctcgtcatcttcccttatatgagccttcttgaggttcccacaactctcaccctaaacgccgcctcctaattctcacgcccccacttatgaaagtggttactattcaccagtgagcacccactcaagcgacttttcatccccctgtcatatttaaagcggggggttctcaccccccccacaaacaccacgcggaaacccgcccctcgaaaaacaaaaca

SEQ ID NO: 605811 - DNA, 153 bp, Homo sapiens
  misc_feature (6)..(6): n is a, c, g, or t
tgcagngagagagaactgatttatcaaaggcagagagctggggagtcagtgtgtctgagtaggggacaggtggtgtgtgtggggaggcacaatggaggatgaagctgctgaggtaggccagggtgagcttacgtggggcaagcgttcagtttt

SEQ ID NO: 605812 - DNA, 141 bp, Homo sapiens
tcgatttagaggatcccggccttccacttggtgctgcgtctgtccatccagcatttggtgcccattactgtgtccatcaatgctgagctgcgaccgtactgccttgctcggcaggaacaaaagtaccacgcaggctcctga

SEQ ID NO: 605813 - DNA, 736 bp, Homo sapiens
agcgggcgcgtgttgcgggagaggctgggcttgcaaggcgcgatccaagagggatttaagtcagcccacgagctccatgagaaaaagagagcgagagagaaccacagacagtagacggcttaagcgtttacccgaattaatatatatattttgtgaaaacagaactgtgtgtgttttactcgattgttcgttaatgtgaccgtgcgtcagcgctgtaactgcatggatggggaagcagaatagcaaactggcccctgaagtgatggaggacctggtgaagagccacagagtgtaatgagcatgaactctaagcagtggtacccaaggatttctcgaaggactgtccaagtgggacggctaaatctccgaggaactttcagcgagactctatgtgaagttctttcctttatggagacgcctccaagtttgcccagcatgccttccgaaccttcgactagaatggggacgggtgcattgacttcccgagagttcatcgtgcgctctgtccatcaggctccagggggcagcttggagcatgaagctagaactgggccttcaatatgtatgacctggatggtcgatggccatgatcgacccgagtggagatgctaggtagatcatcgaggctatctaccaataatggtaggcaccgtgatcctgactgatcatgaatgacgatggctgactgcctgagcaagggagtaaacaagatttgcgagcagatggcatgagaccg

SEQ ID NO: 605814 - DNA, 198 bp, Homo sapiens
gtgtgagagagagtgtgtgtgcgcctcagtgtgtctctgtgtgtctgtgggtgtctgactgtatgtttctgtgtgtgtgtgtgtctgtgtatctctgtgtgtctctgtgagtgtgtgtctctgtgtgtgtgtgtctatgtgagtgtgtgtctctgtgtctctgagtgtgtgtctctctgtgtctgtgtgtgtctctct

SEQ ID NO: 605815 - DNA, 278 bp, Homo sapiens
cgacatctaaagagaccccatccatttaatcaagcagtcggaatggataggaaaatgtgtatttagaatatacaatggaatactatattagattcagaagagaaggaaatcttgtcattcgcaaccagcgtgaagaaacctggaagatactatgttaagcaacaataagccaggcacagaaagacaaataccacatgatctcaccttacgtcgacactctaaaaaagttgaattcctagaagcagagggtcgactgcttggattacaaggagggtacc

SEQ ID NO: 605816 - DNA, 634 bp, Homo sapiens
tcacctgaagtcaggagttcaagatcagcctggctaacgtggtgaaaccctgtctctactaaaaatacaaaaattagccgggcatggtgacgggtgcctgtaatcccagctactcgggaggctgaggcaggagaatggcttggacccaggagatggaggttgcagggagccaagagcgtgccactgcactccagcctggtcgacaagagagaaactccatctcaaaaaaaaaaaaattctgtagccttccggggtctcagggtcctcatctgtgaaagggggctaagcattaggaaccacctcagtggaatcggggggatatgatatggctgaagagccgggtccagagtaagtgagtgccccatttttaactccctttccctcacctttgagcttctatggcaattatggtccgaaaattctattgggcaatcatgaccatctcttctatgctatccaggatggtcacattatcttagattcaccatggttatcagaagttatctgtgtccattcatttattcaacaaacttttacctagtgtgggttttaagctggggcgaatggggggtgtggtggtgctgatgaccacagcaggggacgataaggggctgcaggtgctggtggaaggtgt

SEQ ID NO: 605817 - DNA, 395 bp, Homo sapiens
aaccgtgaaagagtgacagggacagcctataggaaaaccaataccacttaaaacaatctcctctctctctctctctctctctctatctctctctctatctcctctctctctcctctcctatctctcctctctctctctcctatactaactggtgtcaaattggaagtaatgatatgtattgcccacggaggatttttgtggggaaatatctaatataccttcagtcaactttaccacgaggtcctgggttcccacgatccgcgtctgaaagtgcgcgacaccgtttgcccctgaaactgcgcgcacatgcactcttccaccgctgagagtcgaagagcttttctttctgcaatgggagtcgggagcgatgcgctcgatcctgcccccagggcccc

SEQ ID NO: 605818 - DNA, 359 bp, Homo sapiens
  misc_feature (21)..(21): n is a, c, g, or t
tttttttgagacggagctacntctgctgcccaggctggagtgcagtggcaatcttggctcactgtaacctccacctcccgggttcaagcgattctcctgcctcagcctcctgagaagctgggattacaggcgcacatcaccacattcagctgatttttgtattttttattagagacagggtttcacatgctggccaggctgttctcaaactcttgacctcaagtgatcctcctgacctcaagtgatccaccaagtgaagtcacttgacctcaagtgatcctcgactcccaaagtgctgggattacaggtgtgagccaccatgcctgggcaaaggtagctatttctacaaagcagccact

SEQ ID NO: 605819 - DNA, 445 bp, Homo sapiens
  misc_feature (39)..(39): n is a, c, g, or t
tcaactgtctactagcatgtggcgacttcattacaagantgtgatggctatacaattatggctaagtatccacgcatcgatttctattttcactttgcaggcacatggtatttccagtgcgcactgcctagtcccgtagtaaagaacatttctcccaactctaaaaatatggtttaaaaaaaaatgtgtccagacccaggcggagcacggtggctcacgcttgtaatcccaacactttgggaggccgaggcaggtgggtcactagaggtcaagagctcgagaccagcctggcggaaatggtgacatcccatctctactaaaaaaaaaaataagcccagagtttagcggggagcgggggaaggcgcctgtaagcccaagcaagtgaggaggcggaggtctggaaatcacttgaagcggggaggcgggagtggccgtgagccaagat

SEQ ID NO: 605820 - DNA, 740 bp, Homo sapiens
gacagctacagcgagggcctcggccatccaagggtctcccaggtggcccacaccttccaccagcagaagccaatgagccgcgcagggagctgctgacacagccctgcaggcagaaggatcccgcaaacgtggcattacgaggatctcttcctctaccccaatgcaggggcctgaggaagctgcctgcccggtgtctgcccctgaggaggcctccccaaagcccagtccgttgtgtcaccaatcaaaggaaaggaagccgtccagcaagagatgacccagaataaccaccaaggaaagccatttcctccctgcccccgaaaatcccctctgtgagagaccgccagaaaactctggaggagcctcaaaaatgctccccgagagaggccagagggtcggcaaggcagttaaaaaagccaccttcgccaactgtgaactgtgtcgtcacctctgtggattgtccggagatccacgggtgatcctcaaggcccgtgggaccggcaaaaggcagcaaggatcactcaggggatcccacctcggggggaccagaggctacacggatccctgtggtggccaacatctctcaaagagcccctcagagccaaggcaccaaacgacaggaagggtcccccaccaggaaggcgagaggcgggcagtgcattgagggaccccaggcgccaggagtgtggcccaaatgtagggagagcctatcttccaaggggccaggcagaagcacagggtgg

SEQ ID NO: 605821 - DNA, 437 bp, Homo sapiens
  misc_feature (221)..(221): n is a, c, g, or t
agatttcccatctgacatggcagctcctgtgctctgggtgacttagctccgggttaacttccatcaggcccagtcctctcctccccagcagtgagactctagaggaagcccctcgtctgggacagtccttcctgcctacccgccacagggccgacctgaggcctcgtgcttgtctggggaggtccccgactgcacttgatgggcacgagggcaacacgacnacaagagaatgcgagctccctgaagctgccgcgtgacagtcaattggccaaaaaaaaaaaaaaaaccatcaatgcataaacccattacccaagtcctcctaaggaatgtgatttccatatattaaccaattttgtggcattaaccttttccaaagcctccgccaaaggtttaaatattaaagccatggggttttttccctccccacaatacaaaaa

SEQ ID NO: 605822 - DNA, 681 bp, Homo sapiens
  misc_feature (65)..(65): n is a, c, g, or t
  misc_feature (83)..(83): n is a, c, g, or t
  misc_feature (87)..(87): n is a, c, g, or t
  misc_feature (96)..(97): n is a, c, g, or t
  misc_feature (101)..(101): n is a, c, g, or t
  misc_feature (105)..(106): n is a, c, g, or t
  misc_feature (113)..(113): n is a, c, g, or t
  misc_feature (124)..(124): n is a, c, g, or t
  misc_feature (130)..(130): n is a, c, g, or t
  misc_feature (134)..(134): n is a, c, g, or t
  misc_feature (142)..(142): n is a, c, g, or t
  misc_feature (315)..(315): n is a, c, g, or t
  misc_feature (323)..(323): n is a, c, g, or t
  misc_feature (328)..(328): n is a, c, g, or t
  misc_feature (331)..(331): n is a, c, g, or t
  misc_feature (335)..(335): n is a, c, g, or t
  misc_feature (343)..(343): n is a, c, g, or t
  misc_feature (369)..(371): n is a, c, g, or t
  misc_feature (384)..(384): n is a, c, g, or t
  misc_feature (422)..(422): n is a, c, g, or t
  misc_feature (442)..(442): n is a, c, g, or t
  misc_feature (448)..(448): n is a, c, g, or t
  misc_feature (488)..(488): n is a, c, g, or t
  misc_feature (507)..(507): n is a, c, g, or t
  misc_feature (515)..(515): n is a, c, g, or t
  misc_feature (517)..(517): n is a, c, g, or t
  misc_feature (519)..(519): n is a, c, g, or t
  misc_feature (521)..(521): n is a, c, g, or t
  misc_feature (543)..(543): n is a, c, g, or t
  misc_feature (551)..(551): n is a, c, g, or t
  misc_feature (594)..(595): n is a, c, g, or t
  misc_feature (600)..(600): n is a, c, g, or t
  misc_feature (612)..(612): n is a, c, g, or t
  misc_feature (675)..(675): n is a, c, g, or t
attaagatcttatagcttatgcagttaaagaaaaactgattgagctacaggtttcctgtacctanactcaagacactctgtgnagancttccccannctgntggnngctgggngactgctaggnaggggnaggncccagagngggaagcatggtacctcctaggggcctcagagtgggtagcgggcttcaagacagccctcagggtgaacagagaggtcaggagtgtcggcttaagccagggcccaggggctacattccctgagatgagtcaagcccagccctctctggggtttccagaacaaaggctaggtgtngggagcancactnaanaaanggcagggngcatgtctctaggcattgctggaacnnnaggagactgtcanagtggtttgggtaatggttgtataatctgtggcaactnggccttcttgcatgaaagtngaaggntgaggatcccttatggaagaatcatgcaccatgactggantggactaaccagctccagnagctcttntntntnactaaagtaggcaaggaaagcncacttgtntcccacaccccactttcatcaactctgttcatgcaggacaaannaaggntctgcccaacanggatggggttatttctcagggcctaggtattgatgttaccttaattctttagtctggaagaanttggtt

SEQ ID NO: 605823 - DNA, 141 bp, Homo sapiens
catggagagagaggccaactcccgaacactctagtggtctgtggacagctctactagtggcaatggctcctaggctcctggacgtcctgctcctggctgggcctctgctctcctattggtgatcgtctagtagtctgacct

SEQ ID NO: 605824 - DNA, 125 bp, Homo sapiens
cagtgatctccgctcagctctgagactaggatacagatacatgccacttgcctggtaatttttttatctttattttgtgtagagatggggtgtcactatattgtccaggctagtttcaactcttt

SEQ ID NO: 605825 - DNA, 490 bp, Homo sapiens
tctagaggatctccattagagaatcacaatcaggattagtgggctcaatccaattctataacttttccctatacagagatgcccctaccgtatggtaattagccccttcaagatcatcttgtcaagctgcttgccagaaactaacccaacttctagaaagctccaactattagcaacatctacaggtcaaaacctgcctggtgactttcagatgccctcactcatgactgtattattcaccacctgttaattctcacttggccagcaatctctacacattcaggcacggaccttcgaggtgatatatctgtgactcctggccccctctgctggacatcctgagagaaacagcccaatcgccggccttcctgtgtcagtggggacttgccatagccacaaggccaggcaggcagagaaggaccgcaggaacaaaggcttagtttatgaaggccccacctcatccttctggagcagtgagaggcagagatta

SEQ ID NO: 605826 - DNA, 563 bp, Homo sapiens
  misc_feature (278)..(278): n is a, c, g, or t
tccagtgaatgtctggcacatggcaaccctcaaacatgtggttactcttggtggtatgggcataactcaggtgactggtacatttcagcaatagcattggaccaagtttaactcagcaagcaatatttccagttaataaggttctcaaaaactcagtgtaagggattataaactgtgcgtgaaagtgtaagaaatgtgacaccctcaaagtctcaccgtgggtagccttttagtatacagtgtgctatattgtgggtattatagtttatagaatgtgncatagccacgtgcatgtgtgtgcgtggtgcattattctcgtgatttttatttaaaatttaacaaagttgtgaaccgtgcaaacaaaaaaaacaaaacaaaaaaaaaaaaaacaaaaaaaaaagaaaaaaaaaaaaaaaaacaaaaaaacaacaaacaacaaacaaaaaaaaacagaggggagggggggggccgccgccacaaaaatatctctccccgcggggggggcgccgcccaagagtgcacggaccccgccaaggatgttatgctaataaaagagaggcccc

SEQ ID NO: 605827 - DNA, 338 bp, Homo sapiens
gctcgacctggaggtttagcctgattttgaagggtacttaagaacagagggctccagaccaggtgtggtggctcacatctgtaatcccagcactttgggaagcagaagttggcggatcgcctgagattaggagttcgagaacaagcttgcccaaatggtgaaaccctgtctctactaaaaatacaaaaattagccgggcgtagtgacacacgcctgtaatcccagctgctcgggaggcagaggcaggagaatggcgtgaacccgggaggcggaggttgcagtgagccgagatcacgccactgcactccagcctgggtaacagagcaagactctgtctc

SEQ ID NO: 605828 - DNA, 124 bp, Homo sapiens
gatcaccacccaacactgacgtaagttaaataacctcaaaactaaatgataaccatacacaacacataatatggacgaagcctaatctcttatactagtatccttaatcagtttttatggtgga

SEQ ID NO: 605829 - DNA, 892 bp, Homo sapiens
ggttattcaatactgcatagtacctacttactatcgactatcactgcaatacaagcgtaatcgagacatgcccagaggtctgcagaggtctctggtgcatctacagccattagggatgatcacacaagcgctcatccccggcccccaggtacctgatccgtactcataggacaatcatctttacagtatgctggtgtaattgctccagcttcctgctgtagaggaagacagcagccttcccagaaagagataggccttccagactctggtgttcaaagcttacagggtctctttttcattgctcagtcctatgtggcatggtgttagaagtggagcgaagcccttgtcctgtatgacagagtcctgatatatgcaaatgaaagtaaattctgatgctggcgccttcaagaacagcctacaaggactctgcctgatgagcaagagctcatcactcaagtgcggtcagagaagtgctccctgcaggccgcagccatcccattgatgcaaatcgacgctcatcaaacagagacctcctcctcccaagttcaaggacaataagcctctggttgaacggtttgagacattctgcctggacccttcccttgtcaccatgcaagccaaccttgtgcacttcccacgcaggactgtccagcgccattccctgcaagcctttgttctcctgaccgtggcctctcaaccatgatggctggtgtcaccaccccgttgaggtacaagctggcacagatagaccaagagtggcctcactggatacatcaagggcctcctatggatttcaggagctaaccaggctcttcctctgagggtctggggagattctgactcttaatctgtattgtgagaaaatcccaatcaaaatccatgatattatcag

SEQ ID NO: 605830 - DNA, 247 bp, Homo sapiens
catgagataaaccccccatctgaccagaaacatgccaatcctgagaataacctcccctccagccagagatattccaactctgcaataaaactctccttcacacagaaacattcgcagcctgcggtaggctcccccttcctaaacccttaaatgcccttagtctgtaagagaatgtccctgaccgaaatcggccagaagcccctctcaggtttattcccaaaataaacctgtctctgttgagccaaaa

SEQ ID NO: 605831 - DNA, 378 bp, Homo sapiens
gcgcttagacattgctgaaaatttagaagcatcaagacgatccaggaaaacatgacctcaccaaaccaatgaagtaaggcactagtgaccaaacatgaagagacaaagccatgtgacttttcagaaattcaaaacagctgttttgagaaatctcaactaaactgaagataaacagaggaagttcagaatcctatcagataaatttaacaaagagattaaaacaatggtgaaatatcaaagagaaattctggagttagaaatgtaattgacaacctggagaatgcatcagaggctctcaacagcagaattgatcaagcagaagaaagaattagcatgaagacatgatatatgaaaatatacagagttgacaaaaaaaaa

SEQ ID NO: 605832 - DNA, 236 bp, Homo sapiens
gtagataatatgctggtcagggctggtcttgaactcctgagctcaagtgatcttcctgccttggcacccaaagtgttgagatttacaggtgtgagccaccacaccaggccagagctatatttccaaagtctgctggccccaggcacactcctcatcaatttctcaggctgcaggcacaccctccccgttagctctcagtagtctcacgccgccccagagtggacatggtatgctct

SEQ ID NO: 605833 - DNA, 643 bp, Homo sapiens
  misc_feature (498)..(498): n is a, c, g, or t
  misc_feature (500)..(500): n is a, c, g, or t
  misc_feature (513)..(513): n is a, c, g, or t
  misc_feature (602)..(602): n is a, c, g, or t
  misc_feature (612)..(612): n is a, c, g, or t
tccctttgtttttctttttaacttggttttttccagggggggtttttgtcaaaatggcccacaaaggggggggtctcttcggtttaaagattttgggggaaaaaaaattttaaaccccccgggggggatagcccttttctccaaaattttccaagggcgccctttttgggaaacttgggaaaatggggggggggggagcttttttttttcaaaaaaaattgtttgtttggtggggggcccccaaatatttgtggaaaaaaattctcttcttttcttttttttgggaagaaaaaaaaacgcgcccgccccctttttttttttaaaaaaaaaggaagggagagggggcgggggggtgtgggggggcaaaacaacccagggggagggggtgttttttttttttttttaaataaaaaaaaaaaaaaaaaccccccccccccccccgttcccttaaaaaaaaaaaaaaagaagggggccccccgtctcttcttttttcttttncnaaaaaaaaaaaanaaaaaaaaaattttttttttttggggggggggggggggggtttttttttcttttcccccccccttttttttttttttcttatttttttnaagccccccncccccccccacggagggggggggggcgcgcc

SEQ ID NO: 605834 - DNA, 649 bp, Homo sapiens
  misc_feature (2)..(2): n is a, c, g, or t
  misc_feature (14)..(14): n is a, c, g, or t
  misc_feature (24)..(24): n is a, c, g, or t
  misc_feature (42)..(42): n is a, c, g, or t
  misc_feature (52)..(52): n is a, c, g, or t
  misc_feature (60)..(60): n is a, c, g, or t
  misc_feature (113)..(113): n is a, c, g, or t
  misc_feature (120)..(120): n is a, c, g, or t
  misc_feature (146)..(146): n is a, c, g, or t
  misc_feature (158)..(158): n is a, c, g, or t
  misc_feature (221)..(221): n is a, c, g, or t
  misc_feature (230)..(230): n is a, c, g, or t
  misc_feature (250)..(250): n is a, c, g, or t
  misc_feature (275)..(275): n is a, c, g, or t
  misc_feature (277)..(277): n is a, c, g, or t
  misc_feature (287)..(287): n is a, c, g, or t
  misc_feature (289)..(289): n is a, c, g, or t
  misc_feature (300)..(300): n is a, c, g, or t
  misc_feature (307)..(307): n is a, c, g, or t
  misc_feature (313)..(314): n is a, c, g, or t
  misc_feature (334)..(334): n is a, c, g, or t
  misc_feature (340)..(341): n is a, c, g, or t
  misc_feature (362)..(362): n is a, c, g, or t
  misc_feature (399)..(399): n is a, c, g, or t
  misc_feature (421)..(421): n is a, c, g, or t
  misc_feature (423)..(423): n is a, c, g, or t
  misc_feature (440)..(441): n is a, c, g, or t
  misc_feature (483)..(483): n is a, c, g, or t
  misc_feature (489)..(489): n is a, c, g, or t
  misc_feature (496)..(496): n is a, c, g, or t
  misc_feature (504)..(504): n is a, c, g, or t
  misc_feature (506)..(506): n is a, c, g, or t
  misc_feature (508)..(508): n is a, c, g, or t
  misc_feature (510)..(510): n is a, c, g, or t
  misc_feature (515)..(515): n is a, c, g, or t
  misc_feature (525)..(525): n is a, c, g, or t
  misc_feature (527)..(527): n is a, c, g, or t
  misc_feature (531)..(531): n is a, c, g, or t
  misc_feature (536)..(536): n is a, c, g, or t
  misc_feature (543)..(543): n is a, c, g, or t
  misc_feature (565)..(565): n is a, c, g, or t
  misc_feature (626)..(626): n is a, c, g, or t
tnggtttgtccaanagagtataancaagggttttttttcaanattaatcaanaaattccnccatctgcaaaagtaagcctatgccattaaatacagccaagatcataaaaaanaaatgtnattaggtctactgaatcttgagattnattcactagaanacacagggaaaaggaaaaagtttgcccttgtgaaaggggtgttttattttttagaagagcttntgaaagccncaaacatctgtgagtttccnaagagccgttacaaaggtattttananaatctatgcngngtcagccaggngtaagcngggggnnggatgcagagggtaaaacanaccccnncagacctgttgttattaaggntgacctttggaagtctcaaactgtaaccacaaagggngtcccccctgcattcatactananacacacatacctgaacnncctttctaccagtaacatttaaaataagcacacttaatactnccagtnacatgtngtagagtntncncnctttnactttttttngnaaanccaanaaatccnaccattccaataaaaaaaaggnaagggaatagctttaacacaccatttatgtttgctattacacttttccagtggaagaaaanaaagcccatataaaatttaaaga

SEQ ID NO: 605835 - DNA, 211 bp, Homo sapiens
cctgcctggaaatgtccttgcatttgtggcctccttcacagcctcctcctcaaaaaagcctttgcgagtgcacaaggagtgtgtgcaaccttgtgaaaggctgggaccacttgcccaaaatggggcccctcaggcacaggggtggggtcctactaacctgtttccccagctcccacacaaaaagcatttaaaataaacacacgtggatgga

SEQ ID NO: 605836 - DNA, 566 bp, Homo sapiens
ctagcttacaggaaatacgtataccaggagacaccgtatactgtgtaaaacgtattatggtggtcacagccttgaacgtgagagtgctgttggcacatagtgggtgtgaagcagaggtgcagctcaatatcctacaatgcgcaggacggcccccccacaacaaagaaggatctagccggaaacgtctgtagtgccgaggcgggggaaacactttgctggttgtgaaatcatccctggcatggacggcttctgttctccccagattgaggcttcatcttctcagaggtcctgctggctggggaaggactccccggcagcggagcctacccagatctggtggtgtcttttttttttttcttggttggtttttggaaacggagtttggctcttcttgcccaggccggagtgcaatggcttgatctcggctcaccacaacctcacctcctgggttcacgcgattctcccgcctcagcctcctgtgtagcagggactacaggcgtgcttcaccacacccagccattttggtattgtaagtagagatggggttcaccatgtagcacggctgc

SEQ ID NO: 605837 - DNA, 245 bp, Homo sapiens
tttagtattctcagtagagacagggtttcaccttgttggctggctggcttgaaactcctgactcatgatccgaccacctcgggctcccagtgcacactattttgtagtaagttttgaagctaggaagtcggggtcctccaactttgcttttcttctggaaaattttttactatttgggaccccattgcagttcccatatgaatttaaagatcagtttttcccataatttggcaaaaagaaccatt

SEQ ID NO: 605838 - DNA, 144 bp, Homo sapiens
acagaattacgcgtctcctgatccatgggccacagaatgaatactgctatctgtcatgaaaacggctattaatctcagagcgaggcatggtagctcatgcctgtaatcccagacactttgggaacgctgaggcaggcaaatccc

SEQ ID NO: 605839 - DNA, 918 bp, Homo sapiens
aggttgggccggcagtggtggtgccagagggctctgtgctctaggagctaagccagcagcccccgagaggggacttggctgggcctttcctatgggcaaggcccatgtgctcttcctgcccatcacagggaccatggagcagtggctgccctatggggctatgatccctaggcctgggcctgggcctgcctgtggcccagagctaccctgggagtgtcagtgctagcagcacagcatacctctggtggcaggagaagagaggcccagcagagcagcaggccaggccttcctgtccaggtctgcagtggagcactcggtgacccagagcagggacgggaggcatgcccgcagtgcctgccccaggccacaggaggacaggccgggacaggcctcagccaaggccagggctgggatcagccaatcatgcatgagctgaggccctggggccgtagcctgcccttctcaggtgccatataccggaccccagatcctgctcgcttggcctcactttttcccagtcatataatgtggggttcaccagccgcgctgcgggaatactttcccgcttctaaagtgggacttgctgttacctcaggaggctcctgtaggtgcaaagtatgagcctggtcagggctttgccaccgttgaagccctgcagaaggtgcaggtgttggggttctggggccacaggaggagagggcacttcccagcaggacccgcatgatgaagtctaggcctttagggggtcccgtccttcttcttccagtctgggggactgcactggtcttccaggccctgttttggagggtaacctgggttctggaagggtgcccttaactttcttccattgcctgttgccatggagcaggagggttccggtaaaaatttgccggggggggcagcccccaaagggggcgg

SEQ ID NO: 605840 - DNA, 163 bp, Homo sapiens
  misc_feature (163)..(163): n is a, c, g, or t
gagctcttaggagcccgtatggatgcgctctactagcgcttgaatactgactccctaaactgggactcctcaggcgtactctgagtggacacaacgatcctgggttatatctctctcccaattcattgttgagcgttacgaggtatccgagctcggaattcgn

SEQ ID NO: 605841 - DNA, 149 bp, Homo sapiens
agagtgaaactctgtctcaaaaaaaaaaaggatcaccagaaaatttcccatgggcagagttcatacccttgggcagagttaccacacagagttgccctgtcccaatgattcatgacagaattcccaatgtgacttggcctctcaccacc

SEQ ID NO: 605842 - DNA, 419 bp, Homo sapiens
gtcgacgagaaaataagggagtaagtgggaaggcaagggattgagaaggaaacagcagagagaggagcaggaggaggagcaggagcaggggcaggaggaggagcagaagcaggaggaggagcaggagcaggaggaggagcaggaggagcaggagcaggaggaggagcaggagcaggagcaggaggaggagcaggagcaggagaagaagcaggaggaggagcaggagcaggaggaggagcaggaggaggagcaggagcaggggcaggaggaggagcaggagcaggaggaggagcaggagcaggaggaggagcaggaggagcaggaggaggagcaggagcaggagcaggaggaggagcaggaggaggaggagcaggagcaggaggaggagcaggaggaggagcagacatccagagtcgacg

SEQ ID NO: 605843 - DNA, 402 bp, Homo sapiens
ctactactactaaataagcggcagtgcgacaggggccacagcacagcctgctggactcgggactgtcctgtcaactccagacaactgaataaacaggccgggtacagtggctcgcacctgtaatcctagcactttgggaggccgaagcgggtggaccacttgacgtccgtagttcgagaccagcctggccaacatggtgaaacccatctctactaaaaatacaaaaattagccaggtgtggtggcgcacatctgtagtcccagctacttgggaggctgaggcaggagaactgtttgaacctgggagacagaggttgcggtgaaccgagatcgtgccactgtactccagcctgggtgacagagtgagactccgtctcaaaaaaataaaagtcgacgcggccgc

SEQ ID NO: 605844 - DNA, 124 bp, Homo sapiens
cgacgtgacttttctggaacgctacggactactctggaacgacgctggacgacttactgggacacgggggactcctctacgacgtcgaccctgacggactgaacgcttggaccgtggccgatcg

SEQ ID NO: 605845 - DNA, 465 bp, Homo sapiens
aggatatcagacagctctggatataaagaagaagataggacaaaaactggaagattggttgaaagtatcttcatgttatatgccaagtccatgcagctaaacaactgtcctctcctgctggaggctacaggtttattctctggagtgtaaaatagaggatctctgggctggtagacagcaggcacagatcgaggtaaggaatcacatcagttcctgccacttccctccaaaaaaagataaaaatattgacaccaggacttcccccaatgaaatggcccagacagaatatcaagcggtaaagccaccaaccaactactcctctccatttttagtgtcctattcttaactatgagaaaacaaccaagggtcacaaagcatcaaagaaagagacaaaaacaaacaaatagataaaagcagcttttatgcaacagaggctatgcaagtagaagaaaactttaaaaaaaa

SEQ ID NO: 605846 - DNA, 1640 bp, Homo sapiens
  misc_feature (597)..(597): n is a, c, g, or t
  misc_feature (1110)..(1110): n is a, c, g, or t
actcctgtctgtgttgtatctcacttcgtcggagcatcctatttgtaagtcactacgtcttttcagatcgatccgacgcgggagcgacttgtgttgttcggctgcgcctctttttttgtgcgagaaccgtcgccgtggtgtggtttttagtggtgctcatacgttgtcttccacgacgaggggtgcggttgtcttctcccccccgcgaggggttgtatagcgtccacatagggctgcgttttttttctctcctcgccttgggtgccgccagctggacttcttcctccgctgagtgtggcgcacagcaggctactccttggtggtcggacaaatttgggcccacatgctgtttgtgaggagttctcctctctcctacccaccgtgttgggccgaacgatgcgcgtcccagattgtttaaatgggctcgtccccgctgagtttggccccttcttttgttgtatgccctccccccttttggggtccccgcaaactggtgggggtgcccctacaataggggagtgaattttcttcggccgtgtttaattattctatttcttgggggcgccccccccagagttttttgtgcgcgcgtccccncttgtatatgggctcctaacataggtcgtagtttttacttgctccgcaaggcgtttcccaaagtgggacgtgcctcctcttcctaatggatgaagtggtcaattgctttgtaatcacacggggggtgtttctatacgccacatttgcaaattgtgtccgaaagacaccaaaacgtgggcctttttaaccgtcagggtaagggttttccaacaatgggaatcctcttctcttgtgtcaatacacccccttggggccaagataagaaaaatctcgtgggggggggcccaacaattgtcgccgctgtcaatattctcctccccttgtggagggggccaaacgaccactccttgtgtggagaacccccctctttatgtggtcccccccttgctcgtggagagcacatttttggacacaagctctccacacacaccttgtccctctgtgggggtttctcacagaggttgtcgccccgcatgtctcgttctcacgagctcgcgagggggggctttgtgnggggagagatcccccacacacacagaggggagaggcgcaccacatcccttctacaccccacggtgtgccacacaccacgagccctcccacacccccgtggagatttctccctttgtcccctctcacttccctctgagcgcgttttgcgcccttctcccacagcgtggccttttgagatcttttagagattcctcttgggcttgtaagccaggacccaagattctccccccagagcgcacaccccagattgttggggggacgaccctggtatattttttagacacaacaatctccccatatctccccaccatggtctcctctcccccttctcccaagggtgccaaattttatacccgccaatatgtgactcttgtgcgttgtcatgtttatgttcttgtgtaataaaatggagaatgtttgtggaagatgaccccctcccctgttgcccgcgctggttctcttcttctcccttttccccctggtcacggcgtaactcatggaagccaggacccgtaagggacctttgatta

SEQ ID NO: 605847 - DNA, 200 bp, Homo sapiens
taacacggtgaatttgcccaccaccgcgccgtgctaattttttttttgtattttaagtagagacggggtttcaccgtgtaagccaggatggtctcgaactcccgacctcgtgatccacccgcctacagcctcccaaagtgctggaattgcaggcatgagccaccgcgcccggccttgaacacatctttatctgaaatcta

SEQ ID NO: 605848 - DNA, 507 bp, Homo sapiens
tagcagagtacacaagcactttagcaagcacttattcaactgccccatttaggacttgcctaacattctccattaacagttaaacatagtccaggattaaatggtgtttacttaattttccagaggtgacatactgcctctggtatcaaattggattaaacctgataactttaatgccattggcttctgttggggaggaaaaattttttggtatactctagagaatagattttttactattcactaagggacagaacatttatcaaaatcatctgggtgatttgaaagggagaaatatactactttttccttgccagaagcaggtccagggcattattagcttgtggtaacaattgaataatccagcaatgctgacttatttgagattcagcctttaagcccctgctgtgtggtaagtcctgtccaatctgctggcatgctgaagcagggagcctgcagaggctttggaaggaaaaaccatttaacacgtctcagatactaaagact

SEQ ID NO: 605849 - DNA, 332 bp, Homo sapiens
taggaaagaaaaagaagagagaaagaaagaaagaaagaagaagaaagaaagaaagaaagaaagaaagaaagagcaagcgtgcagacttaaatgtccctgtctgacagctttgaagagagtggtggttctcccagcatgcagtttaagatctgagaacagacagactgcctcctcaagtgggtccctgactgccaagtagcctaactgggaggcacctcccagtaggggcagactgacaccccatatggccaggtgcccctctgagacgaagcttccagaggaagaaccaggcagcaatatttgctgttctgcaatatttgcttgttccgctg

SEQ ID NO: 605850 - DNA, 102 bp, Homo sapiens
caaagttttaagtagcgtgttttagtgacgatcgcatgatgtcgagggccggggccccaggctggtatctgttcacgccgagagggcctgagagtgaaggat

SEQ ID NO: 605851 - DNA, 449 bp, Homo sapiens
tctactcacattgacaaaattatgtgagaatgataaacactgattctcaggaaaaaattattgatgagcacaaaatagattatatgatggattgtttgttagggtgttatttatgatggtgaggaaagttaagttacataccaaacaatagaatgatattaataagtataaatccataatataaaatattatttagatatttaaataatcctataaataaacatatactgccacataaaatgtgtgtagaatattacttaataaagtaatttaaatagataatatattcatctagtaagatcccatttatattaaatgtatgaatgtatatgtatatatgtgcatgtacacatacacatatatacaatcatgcatctattaatgataagggtaagtttggagaaagatgttgttagattatctcatcattgtgtcacatcagagtgcgc

SEQ ID NO: 605852 - DNA, 110 bp, Homo sapiens
cagtctgagtagctgtgattacagatgcacacaccatgcctaggctaattttcgtattttttggtagaaatggggttcaccatgtaggccaggctgctcttgaactccta

SEQ ID NO: 605853 - DNA, 247 bp, Homo sapiens
gtgcacagagatggacagaagttcaaatccgaccatcatgtggatgttggataagagaatacttctgtctccccacctctaagttgcgcgccactcggggtactcgggcgcgaattcgatgtccgcgtcatagctttatcctggccggcgtgcaacagatggacaagttcagaaatctgaccaagcatgtggatgttggataagagaatactctgctcccgctagcctctaagttgcgcgccaatcg

SEQ ID NO: 605854 - DNA, 406 bp, Homo sapiens
  misc_feature (367)..(367): n is a, c, g, or t
tttatgcttattacaggaattagggaccagttgtgataagctgctgcaagatttgatgaattttattaagggacgtagtaaaccttcatgggatgcacagatcaaaagctattggctgatactgggtgcaaaatgtctgtagataacaggtggcaaaagtggcaagacatggcgcttccaattaatgccacataaatataatatcatgttagtgaggctaaactcaaaatgggatctcccgaagactttgtaacactgcttggtgctacagctcttcctagattgacacctccttgtccttgaagaaatgggacactgtgacagtgttacctctcagaagttggagatactcaggtggtggttttanagcatgaaaaggaagatggcgccatttctaccatagtac

SEQ ID NO: 605855 - DNA, 334 bp, Homo sapiens
ccgttgtactttatctgccgccttagcctcccaaagtgctgggattatatggcgtgagccaacacgccctggcacttcttgtctttgccacattttttagatatgtatttgtgttttatggggagcttaatttgctaatggaatctctgttattttcctaacatgcccggctgatttttgtattattagtagagatgggcttacactacgtaggagaggctggtctcggactcctgaactcgtggttcgaccccctcggcctcctagagtgctagggattaccggcatctgtcaccgcactcggcttatacctgtgcaatactatgatagcatg

SEQ ID NO: 605856 - DNA, 167 bp, Homo sapiens
actttctgaggatccccagtcagtttttctagaaggcctcgtaagtcgtcctgtgtgctgggagatcaagttcacagcatcagagttaagttctgtaacatcatgcttccgagatgaggatgacatcaatgatgtgacttctatggcaggggtcaacctatatgaag

SEQ ID NO: 605857 - DNA, 99 bp, Homo sapiens
ccaaccactcacctactccagcaacctaagcaaaccattaccaaataaagtatagcgtagaattgaacctgcgcaatagttatagtccgagggaagtgg

SEQ ID NO: 605858 - DNA, 106 bp, Homo sapiens
aacattccttggaacaatttgagaaatacttagcggttcaaccttatgagtatgaatgctcaggaaatacgcactaggatatgtactgtggcttgatttgtagtag

SEQ ID NO: 605859 - DNA, 164 bp, Homo sapiens
ttgctctttgctgtcaagacagaaaatatcatcataagaaaactacaggccgggcatggtagctcatgcctgtaatccaagcactttgggaggccgaggcaggcagatcacttgaggtcaggagttcgagaccagcctggccaagatggtgaaaccctgtctct

SEQ ID NO: 605860 - DNA, 365 bp, Homo sapiens
ctggcggtgctatttgctgaggaagggtgataatcatgtggcaaactcacatttgcatgactggccgtgtaaaaacatgatagataacttttgtcaacatatctttaagagtttatatcacgcacagtttaaaatcatgatgagatgctgatggttggactatattcatgtctcgtatgtcgcaccatattttggttcacagtttatccatgatttagcatgccaagagaacatctcagtcagtaagagaacatctcagtcagtgtcaccttgagaagagcatcaaaagcagagggagcagaaggaggactgtctgggcttggagactcggcgcacccccacactcccttgcattctcctcagga

SEQ ID NO: 605861 - DNA, 911 bp, Homo sapiens
  misc_feature (589)..(589): n is a, c, g, or t
tcagatagacgtggggcctattgaactcaatttgcttggaaactgcccaggaaaggctgagagcctgaaccccctccttgggagcagctaaagggagtcttcaccatgggtgaggtgacagcagaggaggtagaaaagttcctggattcaaatattggctttgccaaacagtactataactttcactaccgggggaaggtcatctcagacctcctcggggccaaggaggcagccgtggacttcagcaactaccacgatgtgaacagcgtagaggagagtgagatcatctttgacctcctgcgggacgttcaggagaacttacaggctgagaaatgcacattcaatgtcatgaagaagctctgcttcctcctgcgggctgaccgcatgagcctgttcatgtacaggacccgcaacgggatcgccgagttggccactaggctcttcaatgtccacaaggatgccgtcctagaggactgcttggtgatgcccgactccgagattgtcttccctctggacatgggtgtcgtgggccacgtcgcacactccaaaaagattgccaatgtccccaacacagaagaggatgagcatntctgtgacttcgtggacaatctcacagaatatcagaccaaaacatctggcttcccccatcaatggaatggcagaaggatgttggtaagcccataattcattgctggtgaattaaattataattgaacccccctttccccgaagaatacaaaaatcctttcccgagtcccatatctttggaacgcggtcccaagggtttcccgaggtctccggacttgaaatcgcggccaattagcgggcggcacgacgtcggcgacgcagaagagcacaagggcctaaagcggcgttctcgcgcacccggccctacccaacggttctgacgg

SEQ ID NO: 605862 - DNA, 114 bp, Homo sapiens
tatccccaagaactctggcgaaaatcattttaaaagagttatcctaagttaatctaaccttggaggtagaacagttatgaggcttctagcaatcgactaagacagctccatggg

SEQ ID NO: 605863 - DNA, 1170 bp, Homo sapiens
ccggtggttcttttcctagtggtcgtcgcgttctcgcccctgtacgcttctgtggcctgtgcgccgccttccttcgccccccctgtcttctctgttgctcgggggatgtgctccgctactctgctcttcctgtgtctcttctgcctaccataggcctttcgcctttccgtggcgatggtcgcttcttcttctcgtttccactgcgtctctgcgctgcttctgctcctcgcgtcccttctctatcgctcttgcgaagaatttccgcgcgttgctgccccggtgcttctcgttttctgtgtcttcctgttgtcagttgtggtcccttatgtgtctatgatgtcttgcttctgatctctttttccgctctttcctctgttgttgatgtgttatgggcaccttctcttgttgtggcttcgctttttttgtttgtcaacttcattttctagtggtttccttgtatactctttctgtggttgttgttcttttatatctttttttttttcagatgtcacttcacttttatatccgaacaaacacgaatctcagactacctacaattagcttcagagttgatattatatagaaattattccgaaaattattcttgtcacagagtaactactatatcccacatgaaaaagggaagaaatcccacccaatcacgagcaaaaggcatcctctgtatgctttccgctggcaatgcgtagctttatgctattctcaaatatttgtcatggcgttcagttctatccaccgcttcgtccaatggagttcattctagatttcttggagaaccatatgagactaatgacagcatctgggacacacggacgtatcaagttcatggtcggacattcaatattatatataatactcaggtcatgagaattcactgtgctgagaggatcccgaaatgcatttctaacaaagcattagtcatgcctcaaagactgccctttgagttaggctcagtattattatccccattttagacagaacggaaaactgaggcacctgtactagttaagtgacatgcaccagggttacagcacagcaagtgcagtaggacaccagtggttggacgaggccgtggccgtaaccaccagcataacatggcacacctcgcttttttaaccattcatgatgacctatattgagctacacatacat

SEQ ID NO: 605864 - DNA, 612 bp, Homo sapiens
aggagcactggccgacttggagaaaacatggctgacgaaggagcggttatgattaaggaacgttattgagaccaggagcccctctggatcagtagggcaccattgaaggcctgcaacgagccccgtgagtacggtttaatttccgatctgatcgattggaaaagatattgtacctaatcggctggacgagcgtgagaaaagtccttcggagccaaaggttacgccgatcaacgtattagcaccggctccattggaggaaggcgagtttcacatggcccacatggatgtacttacagcgggatcaggacgtgcatcgacgtaaaaggggagcgccactgtacatgtactaaggtaaccgcggaaatacgagaagaatcatttcatgtacgacccggaaacggttgtggcagcacccgttccgaagacccggtgactacatccgcacggcgtcaaagcctaaactcacatcgattataaaagttcaaagcatacacctacttagttggagccgaactcaaggtaaagaaggcggacggaatccgcggttgaccatgatccggatacagtgcattacctgggtaaggttaaattaactgttgatgtttccgacag

SEQ ID NO: 605865 - DNA, 839 bp, Homo sapiens
tcacagaaaatgttctccgctcccagacatggtgtccctcgtgcttcctgcctcgtgaagcgcagcagcatggcatctgtgggaatgtgtgaatgatgcttccctaagtgatgaccctgtccaagcctgtgtccacctcacatgccttcctgtgtgatacaatggcttgtgcatgacttcacatctgtgctgtggaatgtctgacatgtgcctggtgaatccaattcgtgaacaatgaatggatgtgttgtgcttgtcatgtgcgtgtgaccatttgtaggatgacaccacccatggttggtttgttgtggcatatgttgtgtgctacgttgagaaagaccgcctctgatgtgcctcctgtgactctttcacaatgaccttgtcattttgcttgatgcaccactcagttgagttgaattgcacatgatgtgctgtttcgtataatgaactatgtgcaatagaactctacacgacaagacatgtgccttcttagccacatgtacttgcaatggaagagtttgtgccatgtgattgaggtgagttgtgcgaacgaagtgacacgccttggactgaaacgggaacctttcaagcatgacacttgataagaaagtatctttgctcaatgtcagtccctgtcgctccatttggccctcaactacccccaagaatttgcttgccttgcatttaccgtccttgcgggccagtgagcagacattcgacccaaaccattgacttgtgagagtcccatgtgttggaacttggatgggccacttgtgtggccgacgaaacgcctaggaactttgtggccaccgtggataagtggcgtttcacggcactgg

SEQ ID NO: 605866 - DNA, 134 bp, Homo sapiens
ggggaaaaaggggggggggaattttggttggccccgttttaatttttttccaaattttgggggggggggggcttttcccccccggttttttttttggggttttaaaaacccccggcgggcccctttccccccca

SEQ ID NO: 605867 - DNA, 271 bp, Homo sapiens
ctctagaggactcgctgatcgcttagcataagctaaactcacctgagttgtaaaaaactcccagttgacacaaaatagactacgaaagtggctttaacattatctgaacacacaataagctaagaccccaactgggattagatacccccattatgcttaagcctaaaactcaacagttaaatcaacaaaactggtcgcccgaacactacgagcccacagcttaaaacctccaaggacctggcgggtgcttcatatcccttctagggggtta

SEQ ID NO: 605868 - DNA, 1770 bp, Homo sapiens
  misc_feature (376)..(376): n is a, c, g, or t
  misc_feature (488)..(488): n is a, c, g, or t
taaaaggtccagttttttttggaacttgtttataaaagagaggtttagtcaaaaagaaccaagagccccatgttctatctatcagaactccctgcggaattctttcttttcttggtctcccatcttttctttctccctcagctcggggagccagcagccgagggggaggtggggcgaggacacctctcctgttgcgtggtgtgcagccaccgaggtgtggcgtggacagccgaggtctctcccgcggggccctttactgtgtgcagaagtagaggtcctcccaagagtgtgtgtgcacgttgttggccgaggggctcttgtgttgcaaaaacaagagccgcgagagccaccaaaaagagagggtctctccacaaanctgtttatcaccgcgccgtgcgtgtgggcatataatagaagtgaggagaggggcaatttgatgagatctctttataatctctttctcgcaggagagagctgtgttgctccancactctctatctgcgcgctagcgtgctggcaagacaatgtggagggcggccccagaagaagattaagaatagttagcagagagcgagagagccctcgtgaggaggagaacacagagagaagcggcccagaagtagtggcgacgcgcgcgagacagaccagtcatagattgagagcagcaagtaggagcagcgactatacagccacgggagaaaacacgcgccgcgggtcgcaataaaagctctacgacgcccggaggagagttcgcgacagggttgcggagggggggcgctcttcaacaacccccccaaagaaggaacgacaacgacactaataataaaaagtaatcatccccacaccgagagtaatagagagcaccccgaagagcgacccaccccgttgtagtgggggaggccccacagagcacactcaagggcgtcgtcagcagcaaaagtatttcccataaccttccacaaacatcgggcgtacggatagaagcaagggggacaaacaaggagcaacataatacaacgaggaagaatgcaggcatctcccccacccgcagtgacaaagcagcaaacaccacacaacacccccagaggaagaaaagcccccccccgagaggatgtagtagaccacgcaagaagaagaacacgattttcccccccgcgcggggagcaacacccacaagagtgagagacacaccttcttgactttgggggacggagagcaccccacaagagacaagaacacaacagtcgtgtggacgcactctactgctggcggtacacaacaagccggctcggtgggggagacagaacacaacctccgactaaaatagtgtggctacgaaaaccacacacaggaacaggcgtggggcagcgataaaacgagcgacgaaacaacacacgagagaacacgaaccccaagagggagaccccgatgtgacgatcacccactcccaaaagaagatcgttatctcataaaaccgtggtgtgggcgacccagaaaaacacgcagaggctcattcatacactggcggaaaacacaaagacacctctgagtgatccacttactcccaccgacataccagcaagaatgtgggagaaccccaacaaagcaaagtgatgggacgacaacggcaccaaccgaccgcctccaaaccagggagagaccaagcgcgcggatgggtgcagcacacgaacaaccaccaacgagacaacgcactgaaaagagaaagattcgtgacgaacgagaacccgacaaaagagataggtcaaagaa

SEQ ID NO: 605869 - DNA, 1163 bp, Homo sapiens
  misc_feature (235)..(235): n is a, c, g, or t
  misc_feature (498)..(498): n is a, c, g, or t
gacgcgagctgactgagggccggagcggagcgatggcgacgcggggaggggcgaggtgatcgcggccggtgtgctgggtggccacctgctcccctgagcacctggccccctgctcctggtggagcagagtcctggagcgggatcctgctggcccacaggttgcgaggggctggtgttgaagaatgtgtgggcggaacaattccttggtcactttaacctaggaaggaatggtccntccacggagaagcttggcggccttaccagggatcgggcggggggccagcaagcggggctcccgggagtgggatggtgacccgtgataagtactggcaccgctcttacaacagagagtcctcagatccagacagcccaggtgcttcgtgtctcgaccgtgcagctttgactaaggagtgcaggactcatcgtgaggcgtatcacttgctccacatgcgcctggggctgtggtccgcgttcttggttcacaaggaaagtgatccnttccaagcgtgcgagttcaagtactacccaactgtcgtagttgatacccgtaattggagcacaacggtcgtttaagggtgccctctgggaccagggacagacgctgtgtcgatttgagcaggatggattctatgagtggggagcgatgtcaggggaacaaaccagagggagcatactttcatctatgttcctcaaatcaagacggagaaagtcaggtagcattggttggctgcagatagtcctgagcaacctgtgacacaagtcttgggacaactggaaggctggtgccatgtgcgcgatctttgactggtgggagcccacaagggaggacgatgtcatgtttcctatacaatatcacaggggattcctgaagggctgagtgaatccccccaggatggctgcccctaaaggaaggaggcgacaaccggccgcgtgggaaaccaagccaaggagaacaagaataacccccacggagagacatccatacagtgagccccctgggggaagcaatcagagaaaccatagatgctgatgaacggggtacagcgaaacagaggccgcacaagctgtagtggagggccacagaagaagccgaggcagtgacccgcacgaacgtcccaccggacactgaggcagggacccagcagccagaattgtgcctcgcg

SEQ ID NO: 605870 - DNA, 1020 bp, Homo sapiens
  misc_feature (109)..(109): n is a, c, g, or t
  misc_feature (171)..(171): n is a, c, g, or t
  misc_feature (686)..(686): n is a, c, g, or t
  misc_feature (937)..(937): n is a, c, g, or t
  misc_feature (941)..(942): n is a, c, g, or t
  misc_feature (954)..(954): n is a, c, g, or t
  misc_feature (959)..(959): n is a, c, g, or t
  misc_feature (973)..(973): n is a, c, g, or t
atcgctatagttagcacaactgtggaaaccaaggaccctgagaaggaaatcagaccagctttggagctcttggagccaattgaacagaaatttgttagcatcagtgccncctggtaccaaaagacttgggaacagaaagccagatctttatttcccgcacatatgatgccnaccactcatttgagacaacgtgtgatgacattaaaaacatctataagaggatgacaggatcagagtttgactttgaggaaatgaagcgcaagaagaatgacatctatggggaagactaacagcagtacatgttattatgtaattaggacacatttaaaatttggcaaataatgcatataatgaaatcaatattgtaaggcctgcttttgtaatgaaaatggagagaatgaagagcgctgtgccagtaaatactccccttcacctttctaattattaacttgttttcatggagtggctattcagcattggcagttaccacattctgttcaatttaaccaaactggcttttttttttttcctagtgaagttaaacaaacatggggataccgacacagacaacttgagacagtttttcttaatcttttaatcaggtggtagctatgtgtgctgcttgcgtgctcaagagctgggatccattacaggttgggtgttgtcatcttgtgcctcttgaggtntcaggagattctaaattgtgaattatctccagcggtttggggacagcattccggaagttttccccttagtgacttaaatgttttgggtatttagtgctcacaagtgttatgtggcagggcccaaattagcattagccacaagtttgggcttatatggtgggcataaaattctaacacaaacccccagaacattagggagtcatttggagaaaagcctgtatgtggggttttaacctaataaagttgatganacannaggggacaggangcgancataaagcggtcangtgtagggcatcttggaatctcaggcgtggcttcttcaggtggacca

SEQ ID NO: 605871 - DNA, 152 bp, Homo sapiens
atcctgcagttgacctagagatcccactctgaacactgggaacagtgaagtaaaatcttgtcgaacactgcaccatgaaccttagagtgaagctcttcctggaggtacaatgtggagcttctaactgtcatgaatgtgtctgtcaaggatgt

SEQ ID NO: 605872 - DNA, 319 bp, Homo sapiens
ggccctggtgggggaaaaccaccccccccattatgcgggagaacccagagctggtggagggccgtgacctgttgaggtgccccagctttgggcctttgaccctttgagagatgatgtcctgcccaggcccgatggcccctagggccctgcaagcaactttgctttgtggccaggccaggattcctggagctggcctgagaggggtcaatgggccctcgggggcccaagtgggggtttcaaccctttccccccccccccagccccctgccctgaaatgagacttttttttggaatttttaaaaagaacagagaggcccca

SEQ ID NO: 605873 - DNA, 950 bp, Homo sapiens
ctccatttataaccccagcctgacctgagactgtcggagaggctgtctggggcctttatcaaaaaaagactcagccaagacaaggaggtagagaggggactgggggactgggagtcagagccctggctgggttcaggtcccacgtctggccaggcactgccttctcctctctgggcctttgtttccttgttggtcagaggagtgattgaaccagctcatctccaaggatcctctccactccatgtttgcaatgcttttatatggcccagccttgtaaataaccacaaggtccactccctgctccacgaagccttaagccataggcccaggatatttctgagagtgaaaccatgactgtgaccaccttctgtccccagccctgtcctggttccttcctatgcccaggtaccacccttcagaccccagttctaggggagaagagccctggacacccctgctctacccatgagcctgcccgctgcaatgcctagacttcccaacagccttagctgccagtgctggtcactaaccaacaaggttggcaccccagctaccccttctttgcagggctaaggcccccaaacatagcccctgccccggaggaagcttggggaacccatgagttgtcagctttgactttatctcctgctctttctacatgactgggcctcccttgggctggaagaattggggattctctattggaggtgagatcacagcctccagggccccccaaatcccagggaaggacttggagagaatcatgctgttgcatttagaactttctgctttgcacaggaaagagtcacacaattaatcaacatgtatattttctctatacatagagctctatttctctacggttttataaaagccttgggttcaccagcgtagagtgcttctgacgcaagacaacactgaaaaaagttattttacactcaaaaaaaaaa

SEQ ID NO: 605874 - DNA, 959 bp, Homo sapiens
  misc_feature (378)..(379): n is a, c, g, or t
  misc_feature (386)..(386): n is a, c, g, or t
  misc_feature (389)..(389): n is a, c, g, or t
  misc_feature (391)..(391): n is a, c, g, or t
  misc_feature (396)..(397): n is a, c, g, or t
  misc_feature (399)..(399): n is a, c, g, or t
  misc_feature (401)..(403): n is a, c, g, or t
  misc_feature (409)..(410): n is a, c, g, or t
  misc_feature (415)..(415): n is a, c, g, or t
  misc_feature (427)..(428): n is a, c, g, or t
  misc_feature (444)..(446): n is a, c, g, or t
  misc_feature (450)..(450): n is a, c, g, or t
  misc_feature (452)..(453): n is a, c, g, or t
  misc_feature (458)..(458): n is a, c, g, or t
  misc_feature (460)..(461): n is a, c, g, or t
  misc_feature (463)..(463): n is a, c, g, or t
  misc_feature (477)..(477): n is a, c, g, or t
  misc_feature (482)..(482): n is a, c, g, or t
  misc_feature (488)..(489): n is a, c, g, or t
  misc_feature (494)..(495): n is a, c, g, or t
  misc_feature (519)..(519): n is a, c, g, or t
  misc_feature (521)..(521): n is a, c, g, or t
  misc_feature (524)..(524): n is a, c, g, or t
  misc_feature (530)..(531): n is a, c, g, or t
  misc_feature (538)..(538): n is a, c, g, or t
  misc_feature (543)..(543): n is a, c, g, or t
  misc_feature (551)..(551): n is a, c, g, or t
  misc_feature (554)..(554): n is a, c, g, or t
  misc_feature (557)..(559): n is a, c, g, or t
  misc_feature (563)..(563): n is a, c, g, or t
  misc_feature (568)..(568): n is a, c, g, or t
  misc_feature (571)..(571): n is a, c, g, or t
  misc_feature (902)..(902): n is a, c, g, or t
  misc_feature (904)..(904): n is a, c, g, or t
  misc_feature (907)..(907): n is a, c, g, or t
ctccatttataaccccagcctgacctgagactgtcggagaggctgtctggggcctttatcaaaaaaagactcagccaagacaaggaggtagagaggggactgggggactgggagtcagagccctggctgggttcaggtcccacgtctggccaggcactgccttctcctctctgggcctttgtttccttgttggtcagaggagtgattgaaccagctcatctccaaggatcctctccactccatgtttgcaatgcttttatatggcccagccttgtaaataaccacaaggtccactccctgctccacgaagccttaagccataggcccaggatatttctgagagtgaaaccatgactgtgaccaccttctgtccccaannaaatccnagnanattcnnanannnaaatannaaccnaaaaacccaaannataaggaaaaaaaacnnnaaanannccaanannanccaaaaacctaccnacaanaaaacnnaaaanncccaaaaaccttaactgccaatantnatnaataannaaaaaanttaanaccccaanaanccnnnattnacaanganaaagcccccaaacatagcccctgccccggaggaagcttggggaacccatgagttgtcagctttgactttatctcctgctctttctacatgactgggcctcccttgggctggaagaattggggattctctattggaggtgagatcacagcctccagggccccccaaatcccagggaaggacttggagagaatcatgctgttgcatttagaactttctgctttgcacaggaaagagtcacacaattaatcaacatgtatattttctctatacatagagctctatttctctacggttttataaaagccttgggttccaaccaggcagtagatgngnttntgaaccgcaaggagccaaccctgaaataaaatagtttttttttcccccccca

SEQ ID NO: 605875 - DNA, 959 bp, Homo sapiens
  misc_feature (902)..(902): n is a, c, g, or t
  misc_feature (904)..(904): n is a, c, g, or t
  misc_feature (907)..(907): n is a, c, g, or t
ctccatttataaccccagcctgacctgagactgtcggagaggctgtctggggcctttatcaaaaaaagactcagccaagacaaggaggtagagaggggactgggggactgggagtcagagccctggctgggttcaggtcccacgtctggccaggcactgccttctcctctctgggcctttgtttccttgttggtcagaggagtgattgaaccagctcatctccaaggatcctctccactccatgtttgcaatgcttttatatggcccagccttgtaaataaccacaaggtccactccctgctccacgaagccttaagccataggcccaggatatttctgagagtgaaaccatgactgtgaccaccttctgtccccagccctgtcctggttccttcctatgcccaggtaccacccttcagaccccagttctaggggagaagagccctggacacccctgctctacccatgagcctgcccgctgcaatgcctagacttcccaacagccttagctgccagtgctggtcactaaccaacaaggttggcaccccagctaccccttctttgcagggctaaggcccccaaacatagcccctgccccggaggaagcttggggaacccatgagttgtcagctttgactttatctcctgctctttctacatgactgggcctcccttgggctggaagaattggggattctctattggaggtgagatcacagcctccagggccccccaaatcccagggaaggacttggagagaatcatgctgttgcatttagaactttctgctttgcacaggaaagagtcacacaattaatcaacatgtatattttctctatacatagagctctatttctctacggttttataaaagccttgggttccaaccaggcagtagatgngnttntgaaccgcaaggagccaaccctgaaataaaatagtttttttttcccccccca

SEQ ID NO: 605876 - DNA, 101 bp, Homo sapiens
ttgacacccatcgcagtgatggtcttaccagtcagagtcttcacgaagatctgcatcccacctctgaagaagggagcaccagagtgcaaggtggcactctt

SEQ ID NO: 605877 - DNA, 197 bp, Homo sapiens
cacttcctgagtagctcggactacaggctgtaccaccacgcctggctaatttttagattctttttcgtagagataggttcttgttatgttgcccaggctggtctcgaattactggctttgagcagtccaccttccttgtcctccccagtgctgggattgtcagcatgagccaccaagcctggcccagtacgcaatac

SEQ ID NO: 605878 - DNA, 427 bp, Homo sapiens
  misc_feature (91)..(91): n is a, c, g, or t
  misc_feature (121)..(121): n is a, c, g, or t
gccccctttacccccgccaccaccacccctggtggggggtggtttgggggggggggttttattttgtggcgccccccccccctttttaacncccttcttttttttgagggcgcgggggggnaaaaatatattcgcccccccccggggggggcccttggggggggcccccctttttttttaaaaggggggggggcccccccggcccccccccttttttttttttttcgggggagggggggggtttttccccggggggggggaaaaactccccggttttcccgaaaaaccccccggggggggggcccccccccgggctttttttttttttttttttgggggggggggggggacccccttttttttttttccccccccctttttttcccgggggggggggggttttaggtttttgggggttcccccccca

SEQ ID NO: 605879 - DNA, 172 bp, Homo sapiens
  misc_feature (22)..(22): n is a, c, g, or t
  misc_feature (36)..(36): n is a, c, g, or t
  misc_feature (147)..(147): n is a, c, g, or t
  misc_feature (159)..(159): n is a, c, g, or t
atttttacaaacaaaacaaaanaaaattagctggangcggtggcacgtgcctgtagttccagctacttggagggtactgaagtgtgggaggattgcctgagcttagggagtttgaggctgcagtgagccatgatcatgccagtgtantccagcctgganaatgtagtgagac

SEQ ID NO: 605880 - DNA, 894 bp, Homo sapiens
ccagctcctgcctcccggcggcctctgcaggcccaagtcgttctcaagtcggcttccccaggcccagctccggcctcttggcggcctctccgggtgcaaaagttcctcgagtcagcctctccaggcccagctcctcctgcctcccagtggcctctttcggcccagcccagctcatgcctcccggcggccttcccaggccccgcttttgactttcggtggcctctgcaggcctcgacaaggcccggcctcctgcctccagaaggcctgcactaggcccatgtctctgcgctcagcagcggactctccatcgcccatgcctagctctcgccgtcactgtcggcctcccgagtccaacagctcctgcctgctcggccgcttcggcaggcccagctcccgcctgccagtggcctcttgcaggccctatggggctgcattgcctgcacagacagccgtttccaggcccagcttctttcccgtgtcctggcggaccgtctccggtgcccagataacctcgctcgaagtctggcgctctccagaccgcatctatgcagccgtcccggtcatctctctccggagcccagactctgtccctcccgtgctgcgtctaccaggcccgactttcggcctcccaaacaaacgtctttggactcagctcctgcccagcctcccagcggccctggtagggcccacagcttcccgaagccaagctccccaggcccagctcaggcctcacggtggcctctccaggccagctccctgccctctgatggcatctgcaggccccagacggcctccggttggtgggctcctctaggccaggctttgggcctcctggcggcctctgcaggccaacaccgtcctgaaagtcggctctccaggccagctccggcctcc

SEQ ID NO: 605881 - DNA, 141 bp, Homo sapiens
tgattaagacttttgggtgctttcttgtcaacacaatcattaccgatcgtaacgacctacatatggcagatagcgtgtgcatgtctcagtgactctatgcatggggtcaccgaaatgtgacaaatatgctgatgctccttg

SEQ ID NO: 605882 - DNA, 884 bp, Homo sapiens
  misc_feature (619)..(619): n is a, c, g, or t
  misc_feature (642)..(642): n is a, c, g, or t
  misc_feature (644)..(644): n is a, c, g, or t
  misc_feature (699)..(699): n is a, c, g, or t
  misc_feature (709)..(709): n is a, c, g, or t
  misc_feature (714)..(714): n is a, c, g, or t
  misc_feature (716)..(716): n is a, c, g, or t
  misc_feature (835)..(835): n is a, c, g, or t
tgcctggggggcaggattaggaatctcttcactaccctgattcttgattcctgcctctaccctgtctgtccctttgtctttgaccagatctttctcttaccctgcaacgtttatctatctttcccctggacaggcagcctcctttgtgtgtattcagacggcagtgattgagcttgctcgtccagtgcagctccctcctgcgcacagaaatgctcagggtcactgaaccactgcttctcttgtgaaagtagagctagctgccactttcacgtggccctccgacgagtgtactcgctagcctactacgccctgtgtcttcccctgtcctaacagctgatggctcaagacacaggctgggcagatagccctgcccagagaatcatctctggcccagaaaacgcctcttctactccctccctctctcatgaggcacagcccaagccaagcgctcatgttagagccagtgggccagccacagagcaaaagaggcgtttatttgtcagtcccctctctctgggtcagaaccagatgggcatgctgaatgccccctgcttacttgcgtgagggtgccccgcctgagtcagtgctctcagctggcagtgcaatgcttgtagaagtnggaggaaacagttctcactgggnangaagcaagggcaagaacccaagtgcctcacctcgaaggaggccctgttccctggngtcagggtgnactgnanagctttggctgagacctgttttttgtggtgccacaaaccctgctgaacacagtgtctgttcagcatactaaccagcattccctacagcctagggccgacattggtttagaagtctgggnaaaaacaaaaacagaatttgggaaccttggaccactcctgtccctgtgg

SEQ ID NO: 605883 - DNA, 731 bp, Homo sapiens
agcgggctagtgttgccgccgccgccgccgccgccgccactgctgctccatggccgcgcccgccccgcgcccccgccgcgtcccgtcgccgcccgcccgcgtccccgacgaattggacacttgatgaagggacaggacacggagcagatgacaaacgcagactggcatgcagtctgttttcacgggtgggcaagaacaacagtggaatgtccttcacgttcttacaaacatatggtggcagtttgtaactctctgagtttattgtactttggcctacaaagggggtctctttcacggcaaacacagaatggaacccttcagcagacatgtctacagttgtaaaacaatatacggatacgatacggcattcgcggaaggtcgtgcaaatggttcccgctcaaagaacttggcggtaacagttgaccgcaggactcggcattcatgagcacggacttctcatcacgcttctctcatgcagacgttttacggcctattcggcactcgagcgacatgcactttggcacggtaccgtcgagggagcagttcccctcgactggagcgccactcagatggcctgcactcccatgccacttgggctgcatggtactgacgttccattcagcagaaacttcttcgtccaagtttttcataggaacgctgcaggtgaacgtggagtgaaacgacgactgcggattgaagggtgaaccccttccagccccaatcccaatcca

SEQ ID NO: 605884 - DNA, 476 bp, Homo sapiens
cccggggtcggccccttacccgcccgtggggattaagccccaagcatgcgtcagcttacttcagcccgtgctgctgggcccgcacccccctgtcccctgtcactgtggcatcctgcacccctcctcacccctccgttgagcccctcgtgccatgccatggatgggccctcccgtcactctgctggaccggatttattttctgagtccaaaattaattgatatgtaaattttgtccaagaagtattttagctgtgtctgtggtgtgagaaagtcattttctgattttcagccctcctttgcacagaagagttccccgtgacgctggtgtttggttccaaaggcggggtaccctagggaattatcttttttttcacttccccttgcatttgagatcctcctgggaaccaccgcaacccgtatcccctattaggaggttaaatccattaaatggccccatcatttttgttttagctcca

SEQ ID NO: 605885 - DNA, 176 bp, Homo sapiens
ggaagagggacggagatgcggatttcttcacgcctccccttggtgacttcaagagcctcgggcatccctttctgcaaagggcacctgaatgtgtctgcgtcccggttagcataatgtgaggaggtggagagacagcccagccttgtgtccactgtgacccctcttccccagcccag

SEQ ID NO: 605886 - DNA, 408 bp, Homo sapiens
ccacactgtctacgacggctatatacacatccccatctcagagagcaccttgtacatatcttaggcccttaatgcagacctctatgaaaagtccttctaatcagagggactatgcatagtccttattatgtcttgaactgtctctaagttccatccagagacaagaagtgatcacgtgaccacaagccagttcaggcaatcacagagatattgcaacatttgtctccgacttgacatgaacttgggtggattctcactaccaggtctatctaccatcttatttgttaatgaacatatttgtcttcagcacattgtaatcagatacccaatgagtttcagagggtttgaaaatgaacactttagacatgaatagcctatatggtgaacttacagaggcaaagcgactgg

SEQ ID NO: 605887 - DNA, 218 bp, Homo sapiens
  misc_feature (116)..(116): n is a, c, g, or t
  misc_feature (140)..(140): n is a, c, g, or t
  misc_feature (166)..(166): n is a, c, g, or t
  misc_feature (183)..(183): n is a, c, g, or t
ccaaagtgggaggattgcttgagcccaggagttcgagacctgtctgggcaatatggtgagacttcatctctacagaaaaactttaaaattagccaaggtgcggtggtgcaaacctntagtcccaggtgcttgggagtctnaggtgggaggagagcttatgcctggnagggagaggttgcagtnagctgagattgtaccattgcattccagcctgtctc

SEQ ID NO: 605888 - DNA, 706 bp, Homo sapiens
  misc_feature (5)..(5): n is a, c, g, or t
  misc_feature (93)..(93): n is a, c, g, or t
  misc_feature (96)..(96): n is a, c, g, or t
  misc_feature (106)..(106): n is a, c, g, or t
  misc_feature (116)..(116): n is a, c, g, or t
  misc_feature (122)..(123): n is a, c, g, or t
  misc_feature (126)..(126): n is a, c, g, or t
  misc_feature (128)..(128): n is a, c, g, or t
  misc_feature (143)..(143): n is a, c, g, or t
  misc_feature (148)..(148): n is a, c, g, or t
  misc_feature (215)..(215): n is a, c, g, or t
  misc_feature (222)..(222): n is a, c, g, or t
  misc_feature (249)..(249): n is a, c, g, or t
  misc_feature (296)..(296): n is a, c, g, or t
  misc_feature (334)..(335): n is a, c, g, or t
  misc_feature (389)..(389): n is a, c, g, or t
  misc_feature (404)..(404): n is a, c, g, or t
  misc_feature (462)..(462): n is a, c, g, or t
  misc_feature (491)..(491): n is a, c, g, or t
  misc_feature (497)..(497): n is a, c, g, or t
  misc_feature (557)..(557): n is a, c, g, or t
  misc_feature (689)..(689): n is a, c, g, or t
atgtnttcttgagcagtgagtttgtaggctcccacaggtcctcttctcatggtaatagtgtggccctcagtgcaaaggagaatagaacccggnagnccagaatggnccttcccctntcctcnntgnantccagtgctcccaantggtntcaggtaaagaaagattaatttgagtggttgggtaggaagagatgggaaggggcaaatcctaatggngcctganccctagagtggggagatccagggaagnagaaagggtgggcataggcacctcctgggatagaagctttgtagttnatagttcgattagtgtgtgcttaggaaataggtgcagnnataaagattagatgggtgaagaaggcaagtgtttcgacaggggttagttttcancctcagggatggaancattcagggtgaagcctgggatgtgggaaaaggagaatcagggtgatataaaaataanaaaataagtaataaaaaaattataaaaantgttgnttgtgtgaatagatttgaggaaaagtgttgcttttgttaaaatcctggagccgttaagtnctgaatattcttctggacatcattgctggctggagaaaggagccccaggcccggctcggctgacatctgtcaggtttggaagtctcatccagctggctgtgctcctgagagatccttagggctgctgggagnggccgggctggtgatct

SEQ ID NO: 605889 - DNA, 102 bp, Homo sapiens
ttcacgatcgacacctacagcgcacgaaacctgaaaggggtctgcttgaaggcgcaaaaaaaatctaaggaagaccgtcgatgcctaccagacttggacact

SEQ ID NO: 605890 - DNA, 141 bp, Homo sapiens
aaacccctttttaagcggggggggggggggtttccccaaattttttgggggacccccccctttttgggggggaaattttttttgggggtttttttggggccccccttcccctaaaaaaattttttttttttccccccccca

SEQ ID NO: 605891 - DNA, 83 bp, Homo sapiens
gggaagggggattatgaccagatggaaatgaaaggaaacgggagactgtattaataaactagcagctttattgcccttaaaaa

SEQ ID NO: 605892 - DNA, 117 bp, Homo sapiens
tatggtgttgtgggtagcatgcgtgggcagtatctgtgaaaggtgactctattgaaggaagaagggcgccatcttctgcccaccatgctatagacgtgctgctatgcacccagctgt

SEQ ID NO: 605893 - DNA, 182 bp, Homo sapiens
cccaatccagaggattagtgtacaactcctatgtgtagatgggtcgatcgctccttctgggggctagcgcatctcttgcagttacagctcggctgggtatcatcagtggccggcgtcatctacatcaatacccagaccaagtttgatgatcctgtagatcctgtaagcatggtccgagcgga

SEQ ID NO: 605894 - DNA, 133 bp, Homo sapiens
caggatagcagtggtaactgagtgtgtagtgttaggaaatgttggtctgtcagtgtgactggagaatgtaggggtactgaatgagcccagaaagacaggcctggggaatgggagactgtgaacgggagactcc

SEQ ID NO: 605895 - DNA, 149 bp, Homo sapiens
atgcacacccagtgccatgccaccctccctgctcgtgccattggcacgcacgctgcagctcacacgtacacacacacacatgcactgcccacttgcacatgctcacgcacacgttcacacattgcaacacggtctctcagtggtacctg

SEQ ID NO: 605896 - DNA, 179 bp, Homo sapiens
aaaagacaacctgatcctggagaaactaaaaccttctgcacagcaaaggaaacaatcaacagactgaaaagacaacctacagattgagagaaagtctttgcaaactattcatctgacaggggattaacatctagattatatgaggacctcagccacctaccagcaaatgagaccacctg

SEQ ID NO: 605897 - DNA, 312 bp, Homo sapiens
gaaaacttttgggtttttccttttgctaacccagggagggtcctaaaaggaaggggacttttttctgtttgttttaagttgccctgggggatttttgacttgaggcccatttttccacccacccccccccttttttgtaaaattaagtccctttagctggaatggggaagggggccaagggtcatttttttgggtgggggcaaaaatcaaatcagccccaggaaaaagttaggattaatttcttaaaaaagaaatccttactatttcccccaaagggaaacccctataaatgtaataaagtttatgttttga

SEQ ID NO: 605898 - DNA, 464 bp, Homo sapiens
ttccaccaggtaatactgcacttttccccacacacattaccttataaataaacaccaaaatactggttctaccaggactacaatgcttctatgtaatctaaagaggccaaaaaagttattcctttttttaaaaaaaaaggcaaaaagacataccacccatatttatagatctaccttggccggaacccacctcttcttctatctggcacagggctttcggatggaggcctacatccaccatgggggttggccggcccagctgaatcgggccaggggaaaagaaagaaaagggcttagattccgaaacgtgaatattggccctctgggatacgtagccgtccatccactccgaaagtggccccatgaggtaaaaagaataagccggccctccattttaagataaagctaggcaagtccccagggccccgctccggaattctttattttgtcaaactggggttaca

SEQ ID NO: 605899 - DNA, 104 bp, Homo sapiens
  misc_feature (5)..(5): n is a, c, g, or t
ctgtntgggaacacaggagacagcatccggactcgtctcggcagcatctcatgagctctcacggggctcgttacacgctctctgtcattgctgtccaccacgaa

SEQ ID NO: 605900 - DNA, 1020 bp, Homo sapiens
  misc_feature (380)..(380): n is a, c, g, or t
  misc_feature (428)..(428): n is a, c, g, or t
  misc_feature (469)..(469): n is a, c, g, or t
  misc_feature (527)..(527): n is a, c, g, or t
  misc_feature (563)..(563): n is a, c, g, or t
caccattacactccagcctgggcgacaagagcaaaactccatctcaaaaaaaaagggtgaacttgaaggcaggtcctgtgtccatcttttcagattctgtatcccagcacttgggacatagacaaacacgaagatgacaatcaatatttgccaaaatgaaaaaacaaacatgtaacatcatgtaaaagaagctggttagctggagaaatttctttaccatagtcttgcttgtggatccagtagtgacttttacattttatatctaaatagaagctggaggcttggttgggtactcataggcataaaatattatgttatttattatagagttaaatgctacaaagacaaatctaattaataggcctattttcctttttaanttctactcataatttcttcatagtttttatgataaaaggttggatttngattagaactcccatgcttttgtgtcagaattaaaactggnattagaataaataattcaaaagctagagaaagagtacaatgagaagccatgagttgcntttgaattataatattatgtcttacagatttggggnatatgctaaagttaccaaagttgtagaaaataagggccggggcattgtgagtcaccatctggtattccagccactttgggaagccgagggtagacggatctctggaaggtcaggaagtcgagaacaggctgggccacatggtgccactccgccggggaccaatagttccaaaattgggccagagatagaaggggtgcacccgtatgtcctgggaaccccacgaaaaacgcgctggacagagagaaactcgctgggtgtcccacaggagacgcagacagatgcgaagcaacgaccacacaaatgggacacacgagagacacacactcgtggcgtcgagagcggcgacagaagaccaaccacccgagttgaggcaacccaccactgggccaccaaaacaataccaccacgcggtacagacaccaaacaagtaaactatgcgagcgacgcaaaacagagg

SEQ ID NO: 605901 - DNA, 171 bp, Homo sapiens
ctggtctgaacttaggctggtctactacaaatacaaaattcgtgggcgtggtgtgcgcactgtaatcccagtactcaggaggctgaggaggagatcgttgaaccccgaagggcgaggttggggtggagccaggatcgtgccattgcactccagtctgggcaacggagcgag

SEQ ID NO: 605902 - DNA, 429 bp, Homo sapiens
  misc_feature (42)..(42): n is a, c, g, or t
  misc_feature (82)..(82): n is a, c, g, or t
  misc_feature (111)..(111): n is a, c, g, or t
ctgggtaccagccaccattctcagtgtttcacctccatcaantaatgcgtccctcacctcagccctttgaagtgacaggtgntattattttcattacacagatcaaacacntgaggccacactcgtcaagtcacttgctcaaggtcacccagcttacacagcggcagatcgcgggcttgaacccaggtggtcaggctctggagcccacaattgtcttacccactatgcccctctctagtcatggtccccaagaggggcttggagacccccttagcaggtgaaagcaatgccagccttccttatttcattatgcacctaagactcactggcatttgggcatgcacttcccaatatgtgtatatttatttataaatatatacagatactatcctctgcacgctcctaataaagcttacattcctccatctt

SEQ ID NO: 605903 - DNA, 989 bp, Homo sapiens
ggcgggcgcgtggctcacgcctgtaatcccagctctcagggaggctaagaggcgggaggatagcttgagcccaggagttcgagacctgcctgggaatatagcgagaccccgttctccagaaaaagcggaacaacaaaacaaaccaaatgcacaaaacacaaacacaacaaaaaaaaaaaaaaaaattggggggggagcggcccaggacataaaaaaaaggggccccgggaaaaaggtttttaaacacccactcgcgtgttgggcgcggccggggcggcccccaagtgtagtgttaaggtgacacctgggcgccaaagggttgtgacccaaaaggagaaaccggggggccataggaccaagcgggttgggcttttccccacccaaataaaaaaccgccgccggcgggaacaccccggacgcggtgtttcttggacacaacctcccaaagagggggcggtgcggagaaggccaacagcagggcgcgcacaaacacaaggggggcttcccaaggggagcgcccgagaaatttaaaaattaggcccgcggcggctggggacacagcacaagactaacagaaaaacaactgaaacgcgacacgcaggcctgcatgacacccccacaagccagcacgacaacaccagacgaactatccgacaactaacacgcacctgcatgaccgccgcgcaataaaaaacgtggcccgcgatgaaacacaggggcgcaaaaaacggtcgcagtaaggagcaccggcaacaccacacgcgtgtggacacacacccaaccgagaccacgtgaccagcgaacacaatattcaccaaaacagccttcaggcagccacaccacacgtctccaccgaaacagcccaacgctggacatactgttcgcaaaccggcgcgcaaggggggcataagcgagagacacaaacctggattggcgaccagaaccgtccaaggacaattccaaacaacggcgtaacgccaacgcacgaa

SEQ ID NO: 605904 - DNA, 301 bp, Homo sapiens
  misc_feature (124)..(124): n is a, c, g, or t
  misc_feature (170)..(170): n is a, c, g, or t
  misc_feature (234)..(234): n is a, c, g, or t
  misc_feature (284)..(284): n is a, c, g, or t
taacacggagaaaccccgtctctacgaaaaacacacaaaaaattagccgggcgtggtggcgggtgctgtagtcccagcactcgggaggctgacgcaggagaatggcgtgaacctgggaggcggnttggcagtcagcggacatcgtgccactgcgctccagcctgggcgancagaacgagactcagtcaaaaataaaaaagccatgaaggaataaatgtatatgggtgatgacantaaaattcaggttctgtgggatttagattaatttcctaggcaagaggcantttggcatttttaattg

SEQ ID NO: 605905 - DNA, 347 bp, Homo sapiens
agcttaaaacgccgtccacaagaatctgatccttgcccttggctggcccccgggaaaaaacagccggcaagtaagccccttcacctctggctagagtggagcggggtgatcaaaccttactgcagccttgacctgcttggctcaggggatgtacctgagcctaccaatagtggagaccacagttgtgcaccaccatacccggctactttattttaatatatatggggtctcactatgttgtccaggctgggctcatactcctgagctcaagtgagtctcctgccttggccacccagagtgctggtattacaggtgtgagccattgcacctggtctttttgcattttt

SEQ ID NO: 605906 - DNA, 161 bp, Homo sapiens
ttttttttgggggtttaaaaaaatccaaaaacccctgggcttttgggggaaggtttttttttgggggtttttgggaaccgtttttgtttttttacttgggaaaaaggggggtttttccccccccctgttttcccaaaacccaaaaaggggtttccccccca

SEQ ID NO: 605907 - DNA, 123 bp, Homo sapiens
caatatgatctgtctctactgacagcagttgactcatatatatctatcctgactcgcggagctgtagctcctgtagtaacgtgtagtctccgaagagcctcggaacgtccctatgtactcctg

SEQ ID NO: 605908 - DNA, 287 bp, Homo sapiens
tttttttaaaacccccccaaatttttttggggggggggcccccctgaaaaaaatttttttttggggggtttccccccccctttcgggaaagccccgggggtttccctggggggggggggccctttccggggggaattttttccccccccccccggggaaaataagggggggattttttttttcccccttggggggggggggggggggggtttttttcccccccccccccgcccccgggggtttttccttaaaaaaaaaaaaattttttcccgttttttggggggtta

SEQ ID NO: 605909 - DNA, 947 bp, Homo sapiens
gggatccaacaaggagtggagtctgtggctggctatggcagacatgctttctgaggaatgttgacggaattcggacgctcatccctcctagatttctctgatcatgggcccatgtgctggtggtggccgtctactccccagccctaactagacttcacgttcatggtataaggacacctcctacctgttacatactactggccctgatgttgtgaagtctagtctaccaaatggaggatgttacctcagggaggagctcggtggtgctcgaagatgcatgaccactcatgtcaggtgtggccctccagagcttttgaaagagtgatgttgagtgccttgtgtaatctccgggtatttcttcaagcgtaccatgaccctgaagtcgagttacaggacgccggctcccgtccgttgagtgccacgatcccagtgaccgtctggttcctgagcttgagacagtttgtcgccctttggaagtcaatcgaaagcctacaacatggtggacatctataggcaactctgtttgttgaggagcgtgaattgttgtgagatcatgcccagattatgccaagaacatcattgtttggtttggaagaatgaatgggaggacgtgtggaattgttggggaaacaactaaggtgggctcaggatgttggattatattcatctgtgaaaggggctcgttgtgtcagattctgtgaatgcgatgcaatattccagtcatcagttttgtgatgtcctgggcttgctacctggcacgacaggaatacgggggcatcataccggatggtggcaaagttttctaagcatttgatgaggaatggttccaaagttacgagtatcacaaggaaggccttggggggccatgaagtagagattagaccttgggggaacacattggtggcacggagaatgtggttggaaaagcgggggacaattaaggggaa

SEQ ID NO: 605910 - DNA, 100 bp, Homo sapiens
caaagagctggaagatgaccagggcatctgataagtcactgtacaaatgattgactcgagggttaacacccagggagtccatccagttcctaaatgtccg

SEQ ID NO: 605911 - DNA, 418 bp, Homo sapiens
cgcggtggatcacgcctgtaatcccagctctcagggaggctaagaggcgggaggatagcttgagcccaggagttcgagaacctgcctgggtcaagtatagcgaggaccccggtttctccaagaaagaaaagagaaaacaaaaaagaaaagaaaactgtctgtggggggcgccgcacgcacgtggccgcttgcagaaaaagagttttcaatgaagaacaccccttaggtgcaaggaggggcacgcggcgggcccccccgaaagagagtaggtaggcgagtgccacacaacggtggggacacacgaacggggtaccacgaagaagggaaaaacccggaggggcagcagcagcaagcggagggcgagggatgtaccacgccagcaagtgaaaaaaagggcccgcgggggctaccccacggt

SEQ ID NO: 605912 - DNA, 508 bp, Homo sapiens
  misc_feature (434)..(434): n is a, c, g, or t
aaacaggtctctccttaaccactcaaaagagccaagtgagaggaatttgtggataaagacatttaaaggtagtatgaaatctttaatcacgccaaatcaacactcatcaccacgacattctgtcagtgcctccagggattaaggacatatgaatgtctttccctgaaatgtgattgtgacattggacttagctatttgggttttcatgaaacccattgtcaggttaaataatgatagagtagtagatgttctgcacaattgcttttgttataaaacttgaaaaaaagtatattaattttttatgccttgcctttcagtgcattattacttatctttgtgcagagtagattaagtaggtccattgaataagaaagcattaatttggtagattctctgtgttaagatgctcagtattttttatggaataaaggtgnggaaaggtttctactcctggtcaaggagtagaaacaggtagaaaatatttatatttcagccctgcttctccttt

SEQ ID NO: 605913 - DNA, 851 bp, Homo sapiens
  misc_feature (17)..(17): n is a, c, g, or t
  misc_feature (155)..(155): n is a, c, g, or t
  misc_feature (177)..(177): n is a, c, g, or t
  misc_feature (182)..(182): n is a, c, g, or t
  misc_feature (191)..(191): n is a, c, g, or t
  misc_feature (197)..(197): n is a, c, g, or t
  misc_feature (205)..(206): n is a, c, g, or t
  misc_feature (215)..(215): n is a, c, g, or t
  misc_feature (221)..(221): n is a, c, g, or t
  misc_feature (237)..(237): n is a, c, g, or t
  misc_feature (257)..(257): n is a, c, g, or t
  misc_feature (273)..(273): n is a, c, g, or t
  misc_feature (279)..(279): n is a, c, g, or t
  misc_feature (310)..(310): n is a, c, g, or t
  misc_feature (314)..(314): n is a, c, g, or t
  misc_feature (326)..(326): n is a, c, g, or t
  misc_feature (332)..(332): n is a, c, g, or t
  misc_feature (334)..(334): n is a, c, g, or t
  misc_feature (336)..(336): n is a, c, g, or t
  misc_feature (356)..(356): n is a, c, g, or t
  misc_feature (358)..(358): n is a, c, g, or t
  misc_feature (399)..(399): n is a, c, g, or t
  misc_feature (426)..(426): n is a, c, g, or t
  misc_feature (850)..(850): n is a, c, g, or t
gcggcggcgcgtggcangtccggcgggcgccaggcggcggcggaggcccgagcccggcccagcctcgtcccgcccggtgcccgcctggctgctaccccgcccccggctccggtcccgtcctgtcccggcccgccgcggcctcgccccggcccccnctccccgcctcccgacggaccngcgcncccgcgccnccaccncaggcccnnccatgaccnacttcnaattgggtatcgtccngctcggccgggtggccgggnaggtgagcggcgcgcncccgcnacccggcccgtctcgcccgtccaggcctccncccngggccgggggcngttgtncngnccgcggccggggcgggggcncngacccgggatgggccccacccggccggggacgctgcgcggncccggctgctggccccgcgcgggtgcngcttcctctcgccggccggcgggcacgcacccctcggctctcgggtccacctcgccaccctccgccctgccctgccggacgtcgagcccacggccctctccccagccgggtgcggagatgcgtggctcgagcccgagccgcgttctcccggagccctcccagtggtgtcggcgatccggggcctagcgcggcgtccgggctgccagtgcggccacacggtttaaacacagcgccctttccgaggcagcgccacttccacacctctcgccgaggcgggtctggtgtgggctcttctgtgcctcccagttctcagcagggcttcaggctcgttttaacgctgccaggggttggccacgttaggctgagcctcagactcggagcagagaggaagaagcctgggccctgatgctgcagactcagggcnt

SEQ ID NO: 605914 - DNA, 239 bp, Homo sapiens
  misc_feature (22)..(22): n is a, c, g, or t
  misc_feature (24)..(24): n is a, c, g, or t
  misc_feature (27)..(27): n is a, c, g, or t
  misc_feature (36)..(36): n is a, c, g, or t
  misc_feature (40)..(40): n is a, c, g, or t
aagattcccccccttttttccncngangccggcttnctangttttattttaaatcttaggaaaactgaaatttccttactggaacggagaaatagtcgtttccctccctcttttcttccacaggaaaaaaatgttgggtacttacggatgcagttctttggtttgaaatttattgatacggcaaaatgtctaccaaagtttttaagatcccgtaaactattgatgtactgccatgttat

SEQ ID NO: 605915 - DNA, 523 bp, Homo sapiens
  misc_feature (44)..(45): n is a, c, g, or t
  misc_feature (141)..(141): n is a, c, g, or t
  misc_feature (148)..(148): n is a, c, g, or t
  misc_feature (366)..(366): n is a, c, g, or t
  misc_feature (374)..(374): n is a, c, g, or t
  misc_feature (498)..(498): n is a, c, g, or t
tatcttttgtagaatggggcggcgacccggctcatctcaccgtnnagaagctgttggcccttcggagcaagacctcggtcctgtataggtgagatcctggcccgccaggagctcttcctaataatggcctggctgctgcanaggctcnacctgcaggtgcctgatgaggggcagctgccctacctggaaagcatcctaaaggtggcctttctgagcgcctctttcaaagggatgatctaggtgcgccaggcctgaggggaagccctctctaaggcgagcacctaaagggtgggactcacagccccgggtcaccctatgaggtcccacaacacagatttagagatacaaccccggaccctgttgcgncattgttncgtactgccaaaccactctgcgctcttttttaacctgtggcactgccaaagatgagcataaacagcgttgttttttattcagggcggaaaaagaaaaaacagatttttttttaaaggaatgctnttaaaaaggaccttgtcttcccacg

SEQ ID NO: 605916 - DNA, 203 bp, Homo sapiens
aatgtaaatacatgaaactataatatttgctatatatttcaatagactgcaaataaaccaaatctattccaccatttggaatccctttacacttttaattcatatattccactctttctgttacatatatttctatcatgggtcaaggattgaaccatattatttccaatgagttgggatttcctaagagagacctgagctag

SEQ ID NO: 605917 - DNA, 1156 bp, Homo sapiens
  misc_feature (1156)..(1156): n is a, c, g, or t
gccactccggtgcaggaggtggaaggtggcgtacctgacatagaagagcaagagaggcggactcaagaggtcctccacggcagtggtcagaacacaagtgaaacgaggaatcccagctgcctggcaccggtgggccatgatagatgtgcttcagtgctgtgcagacgacgcagaggctgataagacacagaatagcaggctgatgcgtcgggtctgatagaatgagacggatgtagtgttgacaaatagatgtctcagggacctcaaaaatcgtgagccttattaacacaacgggaactcgtgagtggtgcatgacgcaccgccataacaggcttagaaaatagggcttcctctaaggtcatcagaagagtcgataagacgtccaagtgacgcattgtaatcaactttgtcatagcgacgaaacctttagctggaggttacaaattcgacagcgtagatgcgctgatgtgaaaccaagagtctagtccctcgccgtggacatacgcgtgggcaaaacaccgcttaccagatcaggttgaacgcatctggaatgggacagtccgcgcgcgcgccgcttaggcacggaacttgtttcgcaccggcgatcgcaaggcgtcaaccaagagcaccccatggaaatccgcacgaagctaatcctggttgggacagagttcccactggagcgacgcatattgcatggtccggcaatgctgggttaacccccacgtttccacgagggggcagctgcatggtcactaagctgggcaggtctccccttgttgcagccttggacagactgcaagaaaggctctttcgcaatggcggagcccatttacccacgattttgcggtaggtttgcccacgtggcaccaggaacgccttaacgtatgcaagccatacttccaaacgaggaatttggcgaaacgcaagcaaccgttcctgaatcgaaacggccaatttatgcatggcagttatatagcgcacggcgattgttcctagggatggggcaccaaagcgttggtttcattgcccgagtattcgttcgttctcagagaacgcaaaccttggaccccggtgggcacctcttctcattgaaagtggcacttggtactcggatggataatatcgcctaggtcagttcggaagtcaaaaagcn

SEQ ID NO: 605918 - DNA, 157 bp, Homo sapiens
tggctccacttggttgcgggtggttcggggcaggagacgacgcaggcgagcggaaggggcggtaacccaatggccttagttctcatggcgtcctctgtggtgtaacctaaaaaataaagttattgtgtgattagaaggtaatcgggtccgtggtcat

SEQ ID NO: 605919 - DNA, 410 bp, Homo sapiens
cacaatcatggcaagccagcgccacttatccagtgaggggtaggagtcaggtagttagtattacgagggggtgttgttagcggcgtcgtgatcgaaacaggttggacgcgaagcagcctaacactcaggacttgttagttagactttgcgttaacaaaacatccgtacgcgcgagatgatagtctacactactctgactactctatccccctcaacagatcagtggccaagctcagacgcgcactgtaatccacgtgaacgctactatccataaaataaaacctcttaccttacgtctatattacatctcacctataaagatctcacttaacttatacaccattacacagtacagcatgacattaactcattctactgatatcgttctttcgcagacccagattatatcc

SEQ ID NO: 605920 - DNA, 410 bp, Homo sapiens
  misc_feature (14)..(14): n is a, c, g, or t
  misc_feature (81)..(81): n is a, c, g, or t
  misc_feature (120)..(120): n is a, c, g, or t
  misc_feature (126)..(126): n is a, c, g, or t
  misc_feature (156)..(156): n is a, c, g, or t
  misc_feature (241)..(241): n is a, c, g, or t
  misc_feature (246)..(246): n is a, c, g, or t
cgcctgtccatgtnactccacttcctgatcctctatgtcggacccttgccactcatcttccagatcacaccgctgaccgtnacccagtggctgatggtgctgaaaatctccttgcccgtnattctnatggatgagacgctcaagtttgtggcccgnaactacctggaacctgcaatactggagtaaccgcttcctaaaccattttgcagaaatgtaagggtgttcggttgcgtgcatgtangtttntagcaacacatctaccaaccctgtgcatgactgatgttggggaaaagaaagtaaaaacttccaactcactttgtgttatgtgggggaatgtgattccaatggggttgttagcttttaatcaaatactgattacaggtgtacaatttaggttaatcaggaaggct

SEQ ID NO: 605921 - DNA, 239 bp, Homo sapiens
ccggttagcggagagggaggttgagcctgtaagggttggttagtggagagggagggtgagcctggggaagagttggttagtggagagggagggtgagcctggggaagagttggttagtggagagggaggttgagcctgggaagggttagttagtggagagggaggatgagcctgggaggggttggttagtggagagggagggtgagtctgggaagggttggttagtggaaagaggaggg

SEQ ID NO: 605922 - DNA, 134 bp, Homo sapiens
  misc_feature (28)..(28): n is a, c, g, or t
ctcggtacccgtgtcgaagaagatcggngtcattttgcattttttcaggtcggacaatgtgacgcaaccttgacgcgctggcttaatcatatccagcatctggaagagaaaacgatatacacacgtatgcaaaa

SEQ ID NO: 605923 - DNA, 494 bp, Homo sapiens
ggagcacataaggtatgtagccggagtaaagagaaatgatgctagagaggtaagcaaagagctagagcttgaaacactttactaaggagcacatggagaaaaatccactggaggagagtgacatatcaatttggaaattggatttgagaaaaatgactcagtctgcagtatagaagatgtattggagggtggaaaatactgatggcagaaagaatgttaacctgggttactttatggtaactacatatagtaacccaggcaagaagcaatgaaggactaatccgaggcaacatcagtgaggatggaggcatgttaatggatatgggagagtttaaggaggccacggaaggtggtgactggtttgttgagttagagaagatgcacaagtgagtgaaaggagtcatccttgaaatggacaaataagggacctgtgatgccatttaagggaataagaaatatagcaggagttgtgtgtttagccaagaatttagcat

SEQ ID NO: 605924 - DNA, 111 bp, Homo sapiens
ctaagtttgcttcttcgttaacttccaatacttcaagttctttattggtaagtgaagagattttcttttttaaaacgtcaagattgcgcgcattcgaaaaaacaggtgcag

SEQ ID NO: 605925 - DNA, 943 bp, Homo sapiens
agctccgagttggcccagtgtatcaccacaccaagtacagggcagaatagtacaagtcacccgtacaactactactgcttgggaacgcaggcccccaacatcccaggcctcagtcctcagttcattcttgacgttcagagagtctcaagctgagccagcccgcagttcttaggcagttgagcgcagcgacgacagcaccagagccaaggcagtgcactgttcctcctcctggtttggagtcctttccttcccaggcaaatactttcgagaatcaacacctggagacagtccgctcctactgtgaacaagcttgtggcagcttcccagcacgaccattgaaaatatctctgtgtctgtccaccagccacagcccagagacatcaaacttgctaagcggggatacccccagcttctaagatcccagcttctgcagtggaaatgcctggttcagcagatgtcacaggattaaatgtgcagttggggctctggaagagggtcagaaccttctctctctgaattgggctcagctccaagccgtgaaaatagtaatcgagattcccatcagctagtattcgacagtctttaagtgagcctttgaatacatctttatcaatgaacagtgcagtccagaactccacatatacaatttccgtcattaactcctgagtgcggaaagctcacaatgagttctgcagtcagtagcaatggctcctctatgaacagagtcgggctaaaggatccataccgaggcccgtgagcacagagcagccggacacagaggctggcgggggcggcaggcacaaacaccaagaaaggccctgacacgggggaacgacagcagcgaggggggggcaaccgccggggaagctcccatataccacaaaactgagccacggacagggtggacacacagacagaaaccgagcctgctccaactgccttg

SEQ ID NO: 605926 - DNA, 988 bp, Homo sapiens
aaggaggatctcgtgccctggctcccagcacaatgaagatcaagatcattggtcctcctgagcgcaagtactccgtgtggctgcggcggctcctactcctggatcgtcgcgtgttacaccttccagtcagtatgtggatcagcgagcaggagtatgacgagtccggcccctccatcgtccaccgcaaatgcttctaggcggactatgacttagttgcgttacacccgtttcttgacgaaacacctaacttgcgcagaataacaagatgagatggcatggctttattatgttttttttggtttggttataggtgtttatttttgtgttatttgggctagacgtacacggatttaacagcggggaacggtgatggtgacagcagccggtgggagtgagcatcccccagaggttcactaggtggccgaggagcttggatggccatggtggttgttatagatagtcagttccgaagatatgaggatgcacttggtgtactagagaagtcccctgtggccatatcctaaaggccaccccaagtttactctctaaggagaatggcccagtcctctcccaagtccacacaggggaggtgatagcatggcttcgggtaaatttatgtacggcaacactttttttaatcttcgccttaaatactttaattggtaatttggaatgatgagcttggggcccccctttcccctttttgtcccccaacttgagatgttgaagcgtttgggtccccggagtggtgtgaggcagcaagggtttactgtaacctggcttgagaccgttgataaaggggcccccttaaaggagcaaaaaaacaggggcgcgcaaaatctccagggccagttcgcgaccccttttggaaggccaaagggcggaaaacgaggcgcggggtaacacggtggcacgactgcctggagacacttggtgcatggcaccacatagccgaagatgttggacatcgggatgtgatacaaacacg

SEQ ID NO: 605927 - DNA, 834 bp, Homo sapiens
  misc_feature (416)..(416): n is a, c, g, or t
  misc_feature (466)..(466): n is a, c, g, or t
agtcaccgaggatggtcagtattccaaggtcagagacactgcccgggcggggatggtgcatgttccgtggcctcgcccaggccgacggcgccctcatcatcagtgtgtggattctgggattctcactagtctggcatgacgaggtacaaggacagcactcctctgatcccacctcctgcgcaactgtacgcagctgggctccttggaggctgttgtaggtgattgcgtccaaggtaccccagtcagcacctcgccattgctgcgtttgcccagcgagggtgggcaaacgtaggagatgcttgtgacagcactatgaggactctgaccgaagggcctctggaggatagcctcgtgttcagggcccaagaaaccgtgtcgagacattgactggcttggtagcgttgcgcgagttcccnatctgggaagccatgcgtagcagtatcaggttgtctcccacgcgagtcancacgtaacagcctggtgcaccctggcagcagggtataccaaccaggctccggtgtttactgatccagcatcccccctcgatggcgcccggtcccagtcctaagagacgccatcgctatgggagagtaccccaactaaacaagccatgaacctcaactccggggaggcaactccagtggattcgtgggcacaaaactccatgggcagctggcagaaattggaccttcggacaaggcgtctactgggctgtcttgaaggtggctggccaagcaatgtgccgtgggttgagaggccaccctttaaaggagccttataaaacccctggggttggcccagagttctgagaatcaccggggtccaaaacccagg

SEQ ID NO: 605928 - DNA, 798 bp, Homo sapiens
agcggattggcgtttttgctcagaatcgcgactaaggcttttatttttttctccctctgaacggttaggctatggctgcgataaatggccgtcaagctccaaggctgaaggtggcggcgggcccagtgcatgctttgagctgtacagatatattgcgccgccctgagggctgcacggatgtgctgctggaccaacttgggtcctaaaggcaccatgaaaatgcttgttactgggtgcaggtgacatcaaactcaccaaagatgcgcaatgatgcttgctctgatagagatgcaaactcaacatccaatcagcattccttgatatgcaaaagtagcaatcaactcatggatgactgtcacatggagagtggtactacttcaacatgttctaattgattggagagttcattaaacacaagctgacctgtacgattctctgagggccatgcaccctagaaataatagctgaaggatttgaagctgcaaagataaatagcacttgaagttttggaggaagttaaagtgacaagggatgatgaacaagagaaaatcgcgtcttagatgtagctagaacatctttgcaaactaaagttcatgctgaactggtctgatgtcttaacagaggttgtgggggattctgtttgggctgttagaagaccaggttgaccctattgatctcttcagtggtagaaataatgggcgaatgaaggcataagttaggaacagatacaaagttgatccaggattagtgtggggatcatggtgccgtcatccagatttgaagacgcgagttgaagat

SEQ ID NO: 605929 - DNA, 1404 bp, Homo sapiens
gccgaatggaaagaatgccaacgggaagagaaggtggcatcctgtgcgccagttgtccgtgacgaagcagtgaggctcagaacagtgtgtgtagatccctgtctttgagaaacaaggtgcattgcgaacttgttggacgatgtggcagccacgggacgagtccaggcccattgaagcagaggctcatgcgcgcgtttggtgaagatggtcccctgctgatatcaggcgttgcaacggccagagagcgcatgcctctatacaggtccgggacgtagagacacggttgaccgtccgtggccagaatatagaccccacgtttccgagcccaagtggcactcctgtgcacctcaggcccagaagcaatggcgttagcgtccaaggccttgtcgttttagagggcttggtgctcaccaacaacagggtaaccaaggaaccctattgaagaaccaaagaggtccagaaggacgtacacggaaacgccaggaaggaactcgtgttctgggggccccccggtgagccccttggaggggacagggaagatgtgctttgccattgcggaccacattaggggggtggacccgctcctcaaaaacgggatagggaggacgcacccggttgtcctctttcgggacgccaagcgaaggtttcacactcacccgttctacactatccttggtctgagagatgaaccgagagttacaaggccttcaagttcatgagcgtgcgctagccaattggcaactcaccggaaccgtttggaaatccccagattcgaaagcctggcgttggtcctttctatttgccccttgacccccattgtattggatcgggttacaaaaatggggggcggtcccccattttaacgttgcctatttaattccgagcaggcgcgacaagagtgggcccaaaaaaggacactttgtgctggacaccggttcctaaaggtctccccaaaccaatgtgtaatatggaaccctttagcaagcccaaacattggttcctgccccgttttccagcgaaccaagatggtttgaaaaccgttccggcggcaaaacggaccacaaaatggggcctgcctcttttttggggccgttaaaaaggccgctggggatggaggagaacggccttattacaggggaagcgcgcgagaagatttttacccaaacatttggacccacacgaaatttaccctggaatttgaacggaaattccctgagccctggcgtcaaccttttgggtggaggtttggtgccacaatttgggttcccctttgtgcgggttcctcttaagagggttcctttggttggggtcttgcggagtaatttccgaccccaaagggccttcggaaagaaccaaggggggcaacaagcgtggcttaacaaatgtgaaaaccattttggcccg

SEQ ID NO: 605930 - DNA, 153 bp, Homo sapiens
aaaaaaaaaaaaaaaaaaaaagttaaacccatttaccccatctggcccgggggttaaggcccatttttccttgcacgttcccagccccctcttcgggggggggcttctcagtgatccctttgaaagggatcacttcccttccttatatttctc

SEQ ID NO: 605931 - DNA, 250 bp, Homo sapiens
gcctggctattgtatttttagtagaatgaaaggggttgccatgtaggccgggctggtcttgaacacctcaggtgatctgcgtgcctcggccctccaaagtgctgggattacaggcgtgtagccacctcacctggcctcagatgaatttagaaaccactatttattcttgagatggagtcttgctctgttgccccggttggagtgctgtgctgtgatctcaggtcactgcagactctcccgggttcaagca

SEQ ID NO: 605932 - DNA, 263 bp, Homo sapiens
cgagaccctcgccgtgctggacctcgatcatagctatctcttcattcagggcccgccgggtacgggtaaacctataatgccgcgcacgccattgttgctttgttgcgcgctggaaagcgcgtgggtgtttcatcgaactcccataaggcgatcaacaagttgctgggcgaggtagacccacttgcagcaaaggcgagcttccgttttagcggtgtcatcagccccacgatcctctatgcctgactgatccggggtgtcatcag

SEQ ID NO: 605933 - DNA, 216 bp, Homo sapiens
caggggagtgtggtccctcaaactcaagtgtagctctgtgcgcggggtggcttttgcctattagtttcaagcgtaccaatgcgcttctgtccatggcttgtcgaaatgaggtacaatgtgggatgccacaaaggggtgggacttttccactcagaccggagcaagctgcagaagggagggcatgtgatccaaaaccgccgtcgggccggcacaagc

SEQ ID NO: 605934 - DNA, 1361 bp, Homo sapiens
ggcaggcttctccgactagctgctcttgtcaataatcaactccctgtgagtggaagccagatggccagcttgaagattgggctaggcagcattcgatcttcctttcaggctctcctgccatgctggggtccatacctcagcctggatcgtgagctctgtgcccccatccgggttcgttcccatggctgagcaccgaggcttgtggtgcactcaggccttgtgaagaccccgtgtgtccctagcccttgccgtttaaggccccagtgcccacgttcccaagtaagtcatcacttgcgtcagggtccgtcgtgatgtcatccttcttcgcacgtgggccgcaaactagccctggagcctcctctcatccttggcctattcaatgcgcgtgagaggccctcaggaagactccccacacaacctaatgggcgttatgcatgctcctcgcgtattgcgtgtcctcgaggtgccgtttcgccactttctctcacgcctgctcattgtgccagatctccacccctaggcctccagcagggccacggtaacgaaggtcaacaggaccacggggcaagtctgggcgagaccttcccagaggccccttgagggtccaagactgtcggtgcgccccaaaatttgaacacaggccctttaaccaaaagcggttgcttaacccgaggacggacgggcaacaagattcccaacattccccaagccgaggaaaggaacgaacgcggagttggttgtcggcgaaggcaattaacttcccctaatttctacccgttcccttccgttggggacgtccttccacatttggccttggagggccttttggctaggaagggccatttcccacaaaggcgggacaaagcccaatgcccctacccacaagatttggaacgaaagcatttcccattttcacgttcacgtttcagcttgcttcacgattcttccaccctttcacacattaggtcccccttttggcactttcaacacatgtctcattcttatactttaagaactttgggagtgtacggatttccactttccacttcttccactttcttccccaagtggaccaatgtgttttgcgcccacggaagggtcattgagtggccccaaatccccattggggtcttccaatggagacacctctccccaagggcccctggttgggggaaagcaccttgggaggggtgtttaccttgaacttcctccttgaggccacatgtgggaacgtcccagggaaggaattgcttcagattcaccccaaaaaagtgttccccaagaaaaagaaatggagtgcgcctgagagttggagatgactatacccttcaaagagctatcttccacttaaggagtaccca

SEQ ID NO: 605935 - DNA, 464 bp, Homo sapiens
acgtataccaaacaacaaaaatcatctaccatagataacatatgcacctatgtcatcagcacttatcacaataacatggaatcaacctagatgcacatcagtggtgaactggataaagaaaatgtggtatatatacaccacgggatattacacaaacatagaaaggaatgaaatcatgtcctttgcagtaatatggatgcagctggaaaccattatcctaagtgaattaatgcaggaacagaaaaccaaatactgcatcttctcacctataagtgggaactaaacaatgagtacacatggatgcaaagaagggaacaatggccaccaggtcttatttgagaatggaaggtgggaggagggagtgatccatcgtgtaaggtaagaatagagactaagccggcccggcacggtggctcacgcctgtaatcccagaactttgggaggccaaggcgggcagatcaggc

SEQ ID NO: 605936 - DNA, 207 bp, Homo sapiens
gacccgcggtatgtttacgtatatctttatgtacatattttatccctttacacttgtaaggtagtagttttgtaattgttaggttagattactcgttggttattactgcattgtcggaactagaagcacaagcattttactacactctcattaacatctgctaaccatgtgtatgtgacaaatacatttgatttgatttgaaattac

SEQ ID NO: 605937 - DNA, 145 bp, Homo sapiens
tttttccctcaaatcttatttgaggcctaacccccagtacctcagaaggtgagcgtatttggagacagggtattaaagaggtaattatgttaaaatgaggtcctacgtgaggtccctagtccattccaactggaatccttatagg

SEQ ID NO: 605938 - DNA, 365 bp, Homo sapiens
ctgttgaggtatccgcaaattatttcaataaataataacaacgatcgtagcccgcgttagcggacgaagtctatagcgcagcttagaagtaatactgctctgagtgagtaacaagaagcctttctcctcgcacacgcttacatcagtaactaataatatactgatcattaacaaccaataactcaaaacaacactaaaaggttcatgtaagttacacttgtcaacccaacacaggagtgcaccaaggaaagatcagaagaagtaaaaggaactcggcaaacacaaaccccgcctgtttaccaaaaacatcacctctagcattactagtattagaggcaatgcctgcccagtgacaccagtttaac

SEQ ID NO: 605939 - DNA, 1036 bp, Homo sapiens
  misc_feature (87)..(87): n is a, c, g, or t
  misc_feature (89)..(89): n is a, c, g, or t
  misc_feature (115)..(115): n is a, c, g, or t
  misc_feature (737)..(737): n is a, c, g, or t
  misc_feature (780)..(781): n is a, c, g, or t
  misc_feature (827)..(827): n is a, c, g, or t
  misc_feature (936)..(936): n is a, c, g, or t
  misc_feature (953)..(953): n is a, c, g, or t
  misc_feature (990)..(990): n is a, c, g, or t
  misc_feature (1010)..(1010): n is a, c, g, or t
  misc_feature (1036)..(1036): n is a, c, g, or t
ggtggtggttatggagattggtcagtggtttataggtcaccatagttaagagttagttgtgaggcaactgattcttaacttacctgngnacgtaccaaaaaggagcacatctcanctgatacatgtctttagaaactctgagaaaccccagcccagaagacctctttgatgagatttaacagtctcaaaaaatactttggaggttcacgtagactatagccctctagtgcattgtctttaaccgtgagtaaagtgaggaatggtgacgtcgaggagccctgatattcacccgcatcctgacatttttaattgacgtggcggaggggagatcggatgccatgtggcgcaccaatcggctggtcacctcgtggtgcgccggattacggatggttgatcgatggcacaggtgggagtgatgggatgctataaacgttagtcacttcgagggaccgcctgttacagcccagccacatcggccatggtgcctgaggtcgccagcggagggagcgtatatcgctcatgaggtaagatgtcaccaccgaagtatgagtgttaaaacggtgtcaacatgcgccccgcggttgtgggattatgggtggaaggctcgcggggagggcgggttctcatgagttgtgtaagccatggtgttaagcgggtgttctggagacgtaatgcgtcttatgagagtcagtgtgtgaaatcgagttatttgggggttataggtttatatgcgggtnagtgagaggtcagtgaggcagtaggcatattgtaccgtgtggnngcttggcgtagcggtggatggctcggcgtggctctcgggagggcanggtgagaggaaggcggggaggactaggttcatatgccttggcctctaggggggtgggtctatgggtggtgaggagtattgtggcataatagcatgagggtcttgggttntaaagtgctgaggggtnagtgggtgtggtggtcgtaaggtgctaagttagggtnttgtggagatggttgaggcncattggtgtttttagtgtgtgttatn

SEQ ID NO: 605940 - DNA, 121 bp, Homo sapiens
gggagaagagggggctttggaggcagagtccgtaggcgtggacgagggagaggtgcccttctccgccctgtatagaccaaggagcagctggacaaccaattggatgcatatatctcgaaaa

SEQ ID NO: 605941 - DNA, 333 bp, Homo sapiens
taaaaaaaaaccccccccccccccccccccccaaccaaccggggggtttttttttttgggggggggggggggccccccccttttttccttggggggggggggggctttttcccggggcagggggggaccaaaaagttaattttttttttccccccccccttttggggaaggagggggggggggggggggaaattttttgggcccccgggttgggcccgggccctttccccccattttggggggggcaggaactggggggggggggggggggggggggggagggtttccccttttttccttttttttgaaaaaaaagggaaagggtttttggga

SEQ ID NO: 605942 - DNA, 967 bp, Homo sapiens
gaaaaggatgtcgacttgctaatttcttcgaaataatttattcagtttttaaaaagccccttttaaagcgatctacttgaagattggtataagttttcataaaatgtcttttttgttatgtgtcccaaagatatcttagataaagctattttgaagttcagatttcagatgaggcaacattttcttgagataattacccaagtttcatccatgttgaagtggtacaaaatatttctgtgaaactaacaggaagatattgttcaggataactaggataagttgttggttagttacccagcctaattgaagagtggcagaggctagctacaaaaagcaatcttttgcatattcactaaagagtttaaaagctattgtattattaacataagtctttacaatgcttgtttcaaggaaccagcagaaaaaagagctaagaaaactgagaactaacattaaaaatagattagatttagaattaagaatgatttcttgaattgtcctttgtttcttcgggtctagaacatattgaatttttgtaaatatctgattcaatgtgtcttagatcctcattattttaatagggaaacgagaagatttcagtaagttcttaccatgctaatatgtaaagttcatgccatccaggctgtaagagcgatctcatccgcttgagaatatgtatttgaggtccgactattctgtttacagcagtttgaaacacatattttgccaccaatgtcgtattattttagaagatgttacttgctctaaatatgatatgtaatgggcatattaatgtggaagcgcgccgaccatttacaattaccggggaaaaaaaggggggcaaaaaaccacaggggcgataggacaatgtaaagggcaagaggatataaaaaggggtcaaagaagagaggtgttacaatttgatgaaacaaaacagagtatgcacgggtcgaataagatattaacc

SEQ ID NO: 605943 - DNA, 308 bp, Homo sapiens
gagattgagaccatcctggctaacatggtgaaaccccatctctactaaaaaatacaaaaaaattagccgggccttgtggtggacccctgtagtcccatctactcggaaggctgaggcaggagaattggcatgaacccgggcagcggacgtttcagtgagccaagaccacgccactcactctggcctggacgaaagagcgagatccatctcaaaaaaaattaaataaataaaataccaggcatagtttgcatgccttttgtccagctactcaggggctgtggtagaaaatcatttcaccacagttagag

SEQ ID NO: 605944 - DNA, 226 bp, Homo sapiens
  misc_feature (94)..(94): n is a, c, g, or t
caattctagtcataatagtctatatgtactaaattcactatcagagatctgattaaataagaatactaaactcaacagtagtcatgtgattatntgttcattcagaggactatgggtcccactgccgcacacgtgtctctggttctcaacgaagtgtgactgctctctgaagaggtagggtgatggcgactgtgttgtcaagtctgccttcgttgctcccatcttc

SEQ ID NO: 605945 - DNA, 150 bp, Homo sapiens
catgttactaccttctcaggaacataacatacaatagctatttaggctgatgggagcaagatgcggtctgctcccatcaggctcagcatcattcaccatttttctctttttcttctttttcttttttgattctgatgggacgaagatgcg

SEQ ID NO: 605946 - DNA, 114 bp, Homo sapiens
caggtggccaaggcagggggacagcaagggacgctcaggcggggaccatggccggacggcggcctcggagcgggctgtacgggcgcatcgtcaagatgagggtggactaacagc

SEQ ID NO: 605947 - DNA, 425 bp, Homo sapiens
gcctaatattttctcaatccggaaaagttgttgcccgccaatttctcctgtggacccccgggctgccactggtccagacttcccgaatcggtgtgcgcacacctgggttggactcgccggtctggagcgccccccttggtatatactgcctctctccacaggtgttcgctaactctatggagtggctcccccccatagggctataacaccaaaaccccattctcccgggggtcttaccccgcggccctttgtcccgcgtaatcacagccgggggtatactccagggccaaggctttgtcaaacacgttgggccgccaacaccataatttttcatccgccctcgctccgtcagagtgatttccccaaatttttgaaaaggggccctttttcccttttccccccccttccccccttgaggccaaaaa

SEQ ID NO: 605948 - DNA, 383 bp, Homo sapiens
ctgagaagcccaaggttaaatttcagagcactccagccaagcagtcaggtggtaggttgctgttaaaatttgcctccatcctttcctaacagcattgaatttgcaatctgaacccaagtgaaaaaccaaaattgcctgaattgaactgaatgtagctgcactacaacagattcttaccgtctccacaaaggtcagagattgtaaatggccaatactgacttttttttaattcctttgattcaagacagctaacttcattttaagaactgttttaaacctttgagggctggttaatttgcgtagaataaatctctgttttggagtctatatggccatgtttagacgccacggttaagctttctgaagatgaagttcagccattg

SEQ ID NO: 605949 - DNA, 248 bp, Homo sapiens
tggaaacgaaccgtgtcagattgcacatccctgggcccccatgcccccatgccccttttagttacacaggacagaggaggcaaagcttttgccccctgttattttcactttctttgtccagtcttttgtttttaataaacagtgaccctccctacttttttttttaatgatttttgtagttgatttgtttgaactgtggctactgtgcattccttgaataatcccttgtaaaaattgtcagtgcttta

SEQ ID NO: 605950 - DNA, 583 bp, Homo sapiens
tgaggatccccgctgctcacatgtactcactcatgtggggagctaaaaaagtgaatctcaggtcggcagcggtggttcacgcctgtaatcccagcactttgggaggccgaggcaggcagatcactggagcccaggagtttgataccagcctgggcaacatggcaaaaccctgtctctacaaaaaatacaaaaactacccacatatggtggcatgcacctgtagtccccgttacttgggaagctgaggtgggaggatcacttgagcccaggaggcagaggctgcagggagctgagattctgagattgtgccattgcattccagatagggcagcagagcaagaccttgtctggaaaaaaaaaaaaaaaaaagggaatggccgggattcggtagatcacttgggagagcacggccatctaaacaataggagggtcttccattccataaataggggaggtcttcccattaattgagggtcatcttaaatccctatccagcaagtgttgggaagcttttaggtggcacatgtctggtgcggcctgggtaaaaatttatacctaaggcatttattggtttggatgtcat

SEQ ID NO: 605951 - DNA, 697 bp, Homo sapiens
tattaggcataggaggaggtctgagtgttaaatcaggacgaggatctctctgtgagaagctgcatctccccgacacccgctcgtccccttctctttctgacaccctcctttccttcctccctcgctccacatccactccctcacctcttattactacagagaccctcactctttactctccgagattaactgagagccgaccatgacatctccaacaattttcaccctcatatccccacaaccacatacacgagaatggagtcagggtattccggagagaccgaactcggactctcagacacctattcccagccgactgaatagctaaactgaccatcgagaggacgagaggggaaggaggtgcgaacgcccctatacatcaagctaccatacacataccacaaccaacacacctccacattacaaagccggattatgcatccctgggggcgggacaagaccctcgataccacgggggcatggaaataactcatctccaactccattacgacgacttggcaacacccagacatgaagacagattgacgccaaaccacttccactgacgtcccgcatgggccaagcacccactggggacatcataaagaaacagcaggcccccctggcccttggaacaacccaacaacacgagcccgaggcaaggcccaccatgaccgccactgggcctgggccgatt

SEQ ID NO: 605952 - DNA, 184 bp, Homo sapiens
gagcgaattaccggggtcgaggtgagccagggccagggggcccccggtaaagtttagttgaggctggggaaggcccccggagctcgtttccagatcgaggtaaaagggccttttttaaaggcctagtttatgggatggggcggcggagggaattttttgaaaaataaaatgaagctccagggta

SEQ ID NO: 605953 - DNA, 421 bp, Homo sapiens
tacgttggtgaattgtatggtatgtaaattatagttcaataacatagttccaaaagataatcaaaagcatgaaagcactattgatgtggtttggatctgtgtcctcaccgagtctcatgttgaaatgtaagccccctggtgggaggcgatgggattatggggcagagtcctcacaaacggtttagcaccacccgctcagtgctgttctcctgatattgagtcctcatcacatctggttgcttcaaagtgtgtggtgcctcccctctgtctccctcctgctctggccatataagatgtgcctgcttctccttcgccttctaacatgattgtaagtttcctgaggcctccctagaagcaaaagctgctgtgcttcctgtaccatctactggaccgtgagccaattaaacctcttttctttata

SEQ ID NO: 605954 - DNA, 109 bp, Homo sapiens
gatttctgaggtaaaaagctattatgtttcctgggccaggttctactctgtgaaattcagcctggtgatgagactaaaacatgtgtttattatttattccccccacccc

SEQ ID NO: 605955 - DNA, 347 bp, Homo sapiens
ccgagcctagctagctcgtatcctctctgtggctccatatgctagcagagaggttgcactagaggcttgttcatgccgggcaaggccaagtcccctggatggttatccgggctgctttctgcacttgaacataaagtcctcctcaagacagcctgttgtctgcctcttggcaaccaagaagcctgcagtgccatacgagttctgaggcatggactggaggcccaaaggcagcgcacaccctgctcctgaccctgcggcttgtttcctctctgtggctccatttgtagcacagttgttgcactgaggcttgtgcatgccagggaaggccaagctggctcaaagagcaa

SEQ ID NO: 605956 - DNA, 105 bp, Homo sapiens
ataaacctggaatatagtaaaagctcaataaagtgtgagcctttcacaattggtattctcgtaccttaataggtaaccgttctttattccattactacctgtgtt

SEQ ID NO: 605957 - DNA, 1083 bp, Homo sapiens
tctatcacccatgaggctggagcacgcaaccatgatgatgctccatgtgaaccatgtctacttgcccttctcttgcctcatggaggaatccgtgtgtcatgcacgtaggtagctctgggactaactgatgctcatcaggaataatcggcccgagtgacgagctgcaccgatatgcttgcacaccagaagtattagaatgagtaggtctcattgatgggtacgatacatccgggtatcgtcatcacgacgatgttagatgcaccactacgtaagcataacagattgatgcacacatgtaacgggcccacttggccgggtgtacaccgtttaaaagcaaatggggaaaggcacgattgggactagaaagtaaacgggcttgtatgggcacgacttaacagctttcccttgacacttgtcgaaagcgcaaggtacatgatggcggaactggcccacatgaaactccgggccaaaacgccaagtgcacagccggattccttggagttgagacaacccttgtggattcgccaaaaacgggccaacgcctttttcccccattgagtcatagggccttacaaagtattgggttttacccgaaaaccgattaaattcttacaacccaaccaagggttgaccaacggagctcggcattccaaaattggtagagcaagacttggcgcgcttttgccgtttgtaagcgccaatccgtagatcattaaagcacagacaatttcgttccttttccccgttggagaaacgccaacttgtccgacgctagaagaaaatttgccgatgagcccaaacgccgcgaaccagtcgggaaacctaagttttggcgcctcccccttttagcggttgtgttagaagcgaacggcgttccatttaagttgattgcggcgtgtcgcaacaacaacacatagggcccaaggccactttgggcttacgagaacgggacacttcctggaccagcaaacagagggcatatcggattagcaccgtttaacccagtgcacccccggtataggaggcgcttaatgccgtttcacgcaccaaacataggtgttaccgggcacatttaaacttcag

SEQ ID NO: 605958 - DNA, 301 bp, Homo sapiens
ccaacaggcccgggggggacctttcccggacacctggcctcctcggcgaggcaggtggcagaactggttccacgtctgatcttccttagacaaacctgccttcagaggaaattgtgttcaactggagaaactggaaaatgtactagatattggctgatatgaaggatatatgttttaagtatgataattcgattttggctctgtagggaaaggctcttattttaaaaagatgtgcactagagaaaaaggaaacagcatgtagcaaatacatccacggatgtcctcctggtttaaaaaaaaa

SEQ ID NO: 605959 - DNA, 1043 bp, Homo sapiens
ttgctgctcgtgattgagatctagaaccgtagccagacatggagactggaggacgagcaaaagatgcttaccagacatccggcagatccgtgaggaggaggaagcaggcaagaggaggaattcagtggcatcccgctcaacacacagtgacgagcagccacatgcagagccagtctggcagaacatgctgtacaatggcccagagagagcagagctagcagctcctgctgactgcagcagtgatatccatcatcgagtcacactaccagcaagcaggactctgcaccggcacggcagccatcattatgcaccatatccttgccactgcagcaggcgacccaattgcagcatggaacccacagaagcgtcctatcctaacacaccgtctgacacactaacactgctcgctaggcaccattacacttcgaccacccaccaaggactccttcgagtcactcatgcgagcaactcaagcaaatagttggacccatgctactgcgctctatgcgcgcacctggttacccgcatgtaggatctatgctttcactcctctgggtcctaaaccctgggtacacgcctatcacgactgcaaacaccccttcaactgcgcgctttaatgcggcattctccccgcctcgcgctaagccctcctcttactggcttacacgtatacggcaaatctggaactatccacacgtccttaaactcacttaaaaaaaggagtctcattaattggaactcattgcccgcaccacagacagacgcaaacgaaagcaaagcgcgggcaccccacgcacgctacccaccagcaacgagtacataccagcctacaccagggagggccaccacaaacgacgatcaaaggaacggcatcacacccagagccccacacccactagagaacacgaaaagaaagtcgggacgccaccagacaagcggaaggacacactgcgcgaccaaccaagtctacagaagcccaaaacggaccgacaaccggcaaaccccgtcccaccaccccgcccacccacacacacaaccccaac

SEQ ID NO: 605960 - DNA, 1334 bp, Homo sapiens
gaagggtagtctgggccggagcaattgctcctgctgataatgcccagcactttgggatgcctacgcaggtgtatcgcttgcgttgcgtccagataatatcaagaataagtcatggagctaactatggcaaatactagttctacttacggataacataaagtatagtaagcatatatgcgctggaggctgtggtaggcgatgttgcctgttgtcccagcaacttgcgggaagaagctgtaatggtgaggcactaaatgagactatggaagcccctggagacgacgcgggcacggctgagtcacgttgagtctcacatgagtcactgttcacgctggcagctttgcaagactctaggggctgtacctatcaatgcagaatcccctgggacttgttatcaaagggggagctcggggcgagcgagcacggtcccatcgaaaactgttccgcgtgatatgtacaatagcaagcttatctaaaagggagctgaggtgaccttcacggggaacttcgacacacgttgcaccgagctaggatctttcacccggcactgcttgtaacccaggttaagtgaggcatttctaagcaccgtgtacggccacgtgggtggctagtaagaccccaccaagaggctttggacatggcgtgaacctttggacacgtctacaccgcggcgggcaatttggaggaacctcagggcatgagcattgcctttcccaaaaggaagtaccgcttaggggaaagacgtcccccatgtgtaagccaaccaaaggacttgagcgaaaccattcggctgcgttcccatatctgtaacagttggacactcaacgtttccacggggcctgtcgagactacaatgggctatgagcacggtccagcttgtgcaacaacaaggcctgtccccccaggtgaatattggcaatctggcgtagtacggtgcgaccaagggggaacccccatacatattcaacccctctggtgcaaccaccccgctggtacgccccgcgctgttcggagagaactggcctggccatatctggtcaaaacagccgcatgttaatcgtttattgtgaggggaccgccgcctgtacaaacagggggtgcgagtacataaaagagttaaagcagtaactagtgttacaatacccagaaggcattacattacggattaccaaacggtgaacgcgtgtgagcgcactaaccgaacattgcggtttgtcagcctaccttgtcactgtggtgcctcctgtgatcacctgcgcacgtagcataggctatgtcgtagacggcaaggtggtatgcgccgcccttcgacatgtccaacgtctctacagctg

SEQ ID NO: 605961 - DNA, 479 bp, Homo sapiens
tagctttactgagattttgttgcttatcacacaattcaccattgaagtgtcctgggctgatctgatgccgatggctccgagtcaaatgctctctaaaggaaattctcagaagatctccggggaaaagcacacataatttatagaattagaaagcaaaggatttgtaagacatcacaaggaattcagttaccagttaggactggtcacctccaaacttaagtacaaagaacttatttacttcttccaaggaaatttatttgggggattttttatgtggccatgatgatgctgtcagtggccgaagctgcattctggcaactccagatcctgggtgactttgcctagctctgcccggcctggtgttgcaggaaatacgctaattccaggcacggaagctgggagtgcatccggtctggggagactttgcctttctaagaggctctcagtgctgttgatggtgcacattcgacctttgagac

SEQ ID NO: 605962 - DNA, 171 bp, Homo sapiens
tcgataagggccaacgatgaagtgaaaggtatagaatcgtgtgagggtgggactgtctactggagtagcctcctcagattcattgaactaggtctgtcccaatgtctgggatggcggatagtaagttagtaattactgtggcccctcagaatgatatttggccttatcgag

SEQ ID NO: 605963 - DNA, 384 bp, Homo sapiens
cagctgcagcatatcgtgagtgatgagatctgtgtgcaggtgactgacctttacctggcagaaaataataatggggccaccggagccagcgtgaacacacagaactcaaggagcctcctggagtcaacgtatcagcggaaagctgagcagctaatggcagatgagaattgctttaaggtgagagttgggcaggtggtcgaagaccttgctggtgacaatgtcagttgttaggattctctgaaccagaagttaaagccggggtactttgacctgtgattctactcctggaccttttagtgagttcaccagagaactacagagtggaagtaattgtcttcctggacaatgtagtgtgtttctttcctgcctttaaagaaaaaaaaa

SEQ ID NO: 605964 - DNA, 744 bp, Homo sapiens
  misc_feature (68)..(68): n is a, c, g, or t
  misc_feature (105)..(106): n is a, c, g, or t
  misc_feature (109)..(109): n is a, c, g, or t
  misc_feature (160)..(160): n is a, c, g, or t
  misc_feature (162)..(162): n is a, c, g, or t
  misc_feature (167)..(168): n is a, c, g, or t
  misc_feature (172)..(172): n is a, c, g, or t
  misc_feature (184)..(185): n is a, c, g, or t
  misc_feature (216)..(217): n is a, c, g, or t
  misc_feature (219)..(219): n is a, c, g, or t
  misc_feature (230)..(230): n is a, c, g, or t
  misc_feature (234)..(234): n is a, c, g, or t
  misc_feature (238)..(239): n is a, c, g, or t
  misc_feature (241)..(241): n is a, c, g, or t
  misc_feature (284)..(284): n is a, c, g, or t
  misc_feature (298)..(298): n is a, c, g, or t
  misc_feature (336)..(336): n is a, c, g, or t
ggcctcggccgccgaatgcagagagaggagaagcagcttgaggcatcattagatgcactgctgagtcnagtggctgatctgaagaactctctggggagtttcatnngcnagtgggagaacgagtatggccggctgacctggccatctgtcctggacagcntntgccnntgcntttctggacagnntgaacacctctgaacaaggtcttgaagcatnnanaaaacaccgcntgtnccgnnanccaggtcatcattcctctggtgttgtctccagaccgagatgangatctcatgcggcngatggaaggacgggtgcctgttttcagccatgaggtangtccctgaaaccagtctgagaatccggaacgcctgagcctcgtgaaggtggtaaagaaggcaggagatagctaactgtacgatcatgactgctgcgccgcatttggtgcagggatggcggaccacgatagcagagtccacaagcttgatactaacgactgtgttcaaagccttctggtacgaacacagtcagcaagacgacggagcgacgaactcagaggagctggaggtctcgcggctcgaacatagccgtatgctttcaacctctacagtacacgtattgccttggctggcagttgttgccgttcgggcaaggactagtctaatggagaccttccggcgcggtggtcctggcaggcggccagcggagctgggggatcttgtggacctccggttcagcgggatgggg

SEQ ID NO: 605965 - DNA, 124 bp, Homo sapiens
tgtgacctagaggacccacatctctccctctcgacatcctgcggcgcgggtgtggtggtagtagcaaatattcaaacgagaactttgaaggatgtcggagagggagaggatgtcggcgagggag

SEQ ID NO: 605966 - DNA, 661 bp, Homo sapiens
  misc_feature (68)..(68): n is a, c, g, or t
  misc_feature (105)..(106): n is a, c, g, or t
  misc_feature (109)..(109): n is a, c, g, or t
  misc_feature (160)..(160): n is a, c, g, or t
  misc_feature (162)..(162): n is a, c, g, or t
  misc_feature (167)..(168): n is a, c, g, or t
  misc_feature (172)..(172): n is a, c, g, or t
  misc_feature (184)..(185): n is a, c, g, or t
  misc_feature (216)..(217): n is a, c, g, or t
  misc_feature (219)..(219): n is a, c, g, or t
  misc_feature (230)..(230): n is a, c, g, or t
  misc_feature (234)..(234): n is a, c, g, or t
  misc_feature (238)..(239): n is a, c, g, or t
  misc_feature (241)..(241): n is a, c, g, or t
  misc_feature (284)..(284): n is a, c, g, or t
  misc_feature (298)..(298): n is a, c, g, or t
  misc_feature (336)..(336): n is a, c, g, or t
ggcctcggccgccgaatgcagagagaggagaagcagcttgaggcatcattagatgcactgctgagtcnagtggctgatctgaagaactctctggggagtttcatnngcnagtgggagaacgagtatggccggctgacctggccatctgtcctggacagcntntgccnntgcntttctggacagnntgaacacctctgaacaaggtcttgaagcatnnanaaaacaccgcntgtnccgnnanccaggtcatcattcctctggtgttgtctccagaccgagatgangatctcatgcggcngatggaaggacgggtgcctgttttcagccatgaggtangtccctgacccatctggagaaccaagcctgaccctgaagtggacgaacaggagaagcaatctgagggacaagaggctgcccgcatgtggtgcagatgcagcccagaagcagatccagagctgtgaataaaagtgtgttcaaaccctttcgtggagaaaatcagcaaagaggagcgagaaatcagagaggtgggaggtctccggccgaaacaagcagaccttttaaccctacagacacttaatgcctgtggggccagcttggttccctttgggcaaaagggactatcctaaattgggggagaccttcaggcaagcaggggtcctgg

SEQ ID NO: 605967 - DNA, 976 bp, Homo sapiens
gcctgtctggggcatctgtctgggactctgtcggtgcctctcacctggcgaggggcttgtggtgggggtaggcgggaagtccttggcgccgggctttgtgccaagccctgctctgctgggctgcgggctggtggcgctcacccagctcctcacctgccccgcgtcctcctgtatttcttccttttctggttggacaactggagagttgagaggaggcacgatggcttccatcccagaaatcgctctcctctttccatccctacagagagggacagagaggcaaagttccttgcatcccctggggcgcttgtccctgtgagctcccggtgtcctgcacacgtgggcccctgagtcacctgggcctgtgtgtgtgcgatgggtggctccgtggccaagctggctcctggggttcacttactgatttcctaccccaactcttactgtgtggctttgctggcttccattggggagtgcacatgggtttggatgggcagatgagggcccgctggagagctgtacccctcagatgaaggccagcacttgatggtttttgatggataatgcggttgacctctttgttaccttccacaatagtaatgtagaccaacaaacagtaaactgactaaataataagattcgtgatgaattagcccaaattgggaagaagcaacttccttcataaacattgagaagaaggtcaaaccaccttgacgtggactgcatagagacctgcgaactgggtatgaccggaagagatggagagatgtaactgtgaaatcacgtatcgctgagaaggctaggatggtcaggggacggagcgatgaaacgtagaaagggagagaaactgaagttcagccgaggagagaagaagatcggaggcaaaggacgaagaggaaatgggaacacgagcgagagatacgagaaaatgaaagacgagacggttttcgtagtacctttcttttcgattgattccaag

SEQ ID NO: 605968 - DNA, 839 bp, Homo sapiens
  misc_feature (168)..(168): n is a, c, g, or t
  misc_feature (319)..(319): n is a, c, g, or t
  misc_feature (327)..(327): n is a, c, g, or t
  misc_feature (329)..(329): n is a, c, g, or t
  misc_feature (338)..(339): n is a, c, g, or t
  misc_feature (342)..(342): n is a, c, g, or t
  misc_feature (344)..(345): n is a, c, g, or t
  misc_feature (348)..(348): n is a, c, g, or t
  misc_feature (352)..(352): n is a, c, g, or t
  misc_feature (354)..(354): n is a, c, g, or t
  misc_feature (372)..(372): n is a, c, g, or t
  misc_feature (374)..(374): n is a, c, g, or t
  misc_feature (377)..(377): n is a, c, g, or t
  misc_feature (382)..(382): n is a, c, g, or t
  misc_feature (385)..(385): n is a, c, g, or t
  misc_feature (399)..(399): n is a, c, g, or t
  misc_feature (405)..(405): n is a, c, g, or t
  misc_feature (409)..(409): n is a, c, g, or t
  misc_feature (414)..(414): n is a, c, g, or t
  misc_feature (438)..(438): n is a, c, g, or t
  misc_feature (446)..(446): n is a, c, g, or t
  misc_feature (449)..(449): n is a, c, g, or t
  misc_feature (464)..(464): n is a, c, g, or t
  misc_feature (469)..(469): n is a, c, g, or t
  misc_feature (471)..(471): n is a, c, g, or t
  misc_feature (476)..(476): n is a, c, g, or t
  misc_feature (481)..(481): n is a, c, g, or t
  misc_feature (489)..(489): n is a, c, g, or t
  misc_feature (494)..(495): n is a, c, g, or t
  misc_feature (504)..(504): n is a, c, g, or t
  misc_feature (510)..(510): n is a, c, g, or t
  misc_feature (530)..(530): n is a, c, g, or t
  misc_feature (540)..(540): n is a, c, g, or t
  misc_feature (545)..(546): n is a, c, g, or t
  misc_feature (575)..(575): n is a, c, g, or t
  misc_feature (582)..(582): n is a, c, g, or t
  misc_feature (592)..(592): n is a, c, g, or t
  misc_feature (602)..(602): n is a, c, g, or t
  misc_feature (616)..(616): n is a, c, g, or t
  misc_feature (633)..(633): n is a, c, g, or t
  misc_feature (651)..(651): n is a, c, g, or t
  misc_feature (658)..(658): n is a, c, g, or t
  misc_feature (665)..(665): n is a, c, g, or t
  misc_feature (718)..(718): n is a, c, g, or t
  misc_feature (747)..(747): n is a, c, g, or t
  misc_feature (749)..(749): n is a, c, g, or t
  misc_feature (796)..(796): n is a, c, g, or t
gagggcagacacgccgctttttggatgcctcctatgcctggcgggagtcttgtctgagctggcaccaccacacggcccacgacatcttcgcagggaagcctgtggaccctctgccaggctccacaagaggtcaggacagtgcagtgtgttcacaaggccagtttctgnacgtccgccccgaggctgaggaccagtaggcagctcccaagatgggtgaaaggaaaggggtcaacaagtactatcctccagacttcaaccctgagaagcatggctctctcaaccgaataccacaacagccacccgcgttgggagcgggccnggaagccntnacagggcannctnannaancgantngaaaatccaaaaaacaantnggncgaangcntcaagaaccacaanggcaangganttcgntacaaatcagaaaagaagaagganggcaaatncancacaaccccgaatancaggntncggantaaantccacccnatttnnaacaacaangagaancagacggaccccgccaacancgacaacganaattnnagctgcgcccagcgcaaggaggagcgcgnggacagngcggacaaanagcaggggcngaccacagagcaanagaagaagcagaagcgngagacggacgccatgttncggccgnagcacgncgaggccgaccgcagcacacactagaaggcgccgtccacacggtgccacaacnaggaggcccagagcgccgtgaagacgacntngcccctacagcagtcgtggagaagggtcgggaaaagaaaaagccacncaggaggaggaggagagagacaggccttcaggcaaggcgagcc

SEQ ID NO: 605969 - DNA, 336 bp, Homo sapiens
gtgtgagaaatggctgactttgcatggaagtcgtgctaaagagtgggagcatgtgtgtgcgaattaactgaagtcagagagtggaatatacgtgcagtgaaggaagctgagtgcttcatttgcaacagaccatgtagtttctaacatgttatttacattgtttaattactttcagcgctcgtttggctatcatcacgagttcttatcgctataccatttgtgcacatcagttatacatgatacataaatgttaatggatgtcaggccttgattaagataacctgcaagaacttattcagattattttatagtagtgcctttattgatagcagataa

SEQ ID NO: 605970 - DNA, 411 bp, Homo sapiens
aagaggtggtaacatcatcactcttgcaaatatgattgtactgatagaaaacacagaaaaatcaactaaacgacttccaatgtgggcagggattggtggctcatacctgtaatcccaacacttgggaaggccgtagcgggcggatcacttgaggtcaggagttcatgaccagccgggccaacatggtgaaaccccatctctactaaaaaatacaaaatttatccaggcatggtggcgtgcacctataatcccaactactcaggaggctgaggcaggagaatagcttgaactcgggaggcagaggttgcagtgagccaagatcatgccatcccactctagcttgggcaatagagcaaggctccgtctcaagaaaagaaggtcatttcccaagactagcatagaacatatctg

SEQ ID NO: 605971 - DNA, 256 bp, Homo sapiens
ctctctctgtggggtcatcactgggcaggcgggtctcgaactccttttttttttaatttttattattattatacttcaagttttaggaaacaggggcacaactggcaggttggttacatatgtatacatgtgccaggtgggggtgcggcacccattaactcatttagcattaggtcatttcagcattaggtatcatctcctaaaggctatacctcccccctccccccaccccacagagatagcgtcggggtacgga

SEQ ID NO: 605972 - DNA, 738 bp, Homo sapiens
ggcggactatgtcagataaggaagtgagcgattgagagatggtgcaatagggcatgcctcgaccaggcacgggagacgcccatatgacgtgtgtacatggtccgggcgcgcccgtgcttaataacacgcccccaagtacgaaggagccccgaagctgcatataatgggagttgtggacgaactagagactcagaaagcgaataactggcagaggcagaatccggtgcatataactgtcaccagctcagaaacgaatcaacagtaatagacaagtaggaacccccagataactatcgagcagacgcaggaaaagaagatacagcagtcaggaactaggcagtcgcacactcgattaatacacgtggagctccagtaatcaatgtaacaaggggtaacagagacaacgaaagttgagagtcaggacggtcacgacagcgaaggtggacaggtagtgataaagccaggatatcgatgaaggtaaccagctgagttaaatagtagattattagtgattatggtagatacaagaaggcgagaagtatttatccaggtacgagagagctagttgtagggatgaagaatgaccgtacacattgtaaagaaaagtgacagagtagattagtaagtgacgtgatttgacaacagtcggaatatacccccgtagaagtgatggtaagatatagaggtgaagaagttagagcaccagtcaatctaagagacaggggttagatacagaaa

SEQ ID NO: 605973 - DNA, 263 bp, Homo sapiens
gtggatgatgggaaggaagggggttcttccactttggaaaagtctggtacttcctcaaaatgctaaaaacaatgtgtccatataacccaacaatttccttctaggtattatgagggtgggggaagtgtctgataagtaaatgatagcaggacagcgttagtatccatactatctaaaaagtgaaaacaaccactttgtctattgctatatggataaacaaaagtgtgaactctattacagtggaaaaaccctttttgccaaaa

SEQ ID NO: 605974 - DNA, 249 bp, Homo sapiens
ctcacccgaggggtgcacttcacgctgacctgcctcacctttaaccccccacctggagcgccaggtcctaactctgacctccaaattctctttgatctctgaatcccgtctgactccaacttctctttcaccctctatgagtcccattttacttctacacctgcaagtcctggtttatattggacccctccctccgagctgcagttcacctttgaccttgcctcacctttcaccccccaccccgtcggg

SEQ ID NO: 605975 - DNA, 150 bp, Homo sapiens
acagagaatgctgagagaaatagacttcatattttacagaaggggttgaaacatacagagtattcgtaatgatgcagtagcacatccagatctgactcctaagtagatgaggcattataatgggtagagagttgagagggttaatggcaa

SEQ ID NO: 605976 - DNA, 496 bp, Homo sapiens
ggaacatcaagaatgcccagccaggaggggcatggctgccaatggttgtcccctgttgctctacgagccttctgttccttggccatacccctggatgtgcctcctgtgcctgatgtccccagttggggtcagtctcaatgagtgatgccagtcttcttggagcctctgggcagaaccctccatcaagagtggaaatcgagacgggagccccgtgtagcttcccgtgaccacgccgattgaccagctatcttggggaagtttacttgttgaaggggtttctggcctttagcgaatggggttcactcaagggggttccctgaggcccagtggccaatggtactcccacctgcctaccttagcacatgggtctctgcagggactgagggagccagctgctccttgcctgccctcttgcccatgacagccctcttccccagtccagtgctgggcaacgacgggcggggctgtcctttgactactggtgcccggaaccctg

SEQ ID NO: 605977 - DNA, 353 bp, Homo sapiens
tcatgccactgcacaccagcctgggtgagagaacaatgctctatctcaaaaataaacaaaaacaaaataaaacaaaagaaaaacaaagaggagttttagaacaaaactttggaggaaaaacatatcctctctattcaggggagaagatcagatagggagagcatggtaatttgcaaaatgctcccacatgtcctgaaaaccaacctgcaaagccattgttttgattaaccccaatttacagatgagggaaccgaggctcagacaggataagtggccactcagagggatgttgccagtctgcgtgatttccagtcccacgctctctccactacttagtgtagtttggacaattt

SEQ ID NO: 605978 - DNA, 94 bp, Homo sapiens
ggcagtaccgggcgtcatcacgagagctcgcagcggtggctaggattccacttccggtgtcatgacctcaggaactcaacgtccttgactttat

SEQ ID NO: 605979 - DNA, 590 bp, Homo sapiens
  misc_feature (93)..(93): n is a, c, g, or t
  misc_feature (201)..(201): n is a, c, g, or t
caaagtgggactaacaagactctttttatgtcctctactgcttttctactcaaagtatggtccaagtaccaagaaaaataccacctaggagtntgttagaaatgcagactcggtcccacctaaaccttctgaattagaatctggatttaataagcccagctgatttgtatgcataagaaaatataagaagcacttctttantgcaaccccttaaaacattatgcaaagtctcttaaattttttcttttctttgtgaaatgtaagctaaaatgttcagtggtataaaaagcatcttttaaaagttgtaagtaaagcaaatataaaacaacaatggtagaatctaggtagtatatttgcaaatgttttaaataaaactcaattttgtatttgaaaatgtttcataagaaaatgttggaagaaaaaataataaatattagaatcatgttttctcagtaccttctctcctaagaaaagtcaaggagactgtgaagacagtaaaaagaaaaacaaaaaccaagcctcttcctggtctttggaacctggaaatggatttatgtgaaatcttaattcctctaaagtaaagtgatata

SEQ ID NO: 605980 - DNA, 220 bp, Homo sapiens
  misc_feature (41)..(41): n is a, c, g, or t
ggggggggggggccctcccccccccccaacaaggggggggnttttttggggccccccccccggggttttttttttggggggggccaaaaaggcccccccccccccccccccgggggggggggggggggccccccccttttttttccggggggggattttttttgggttttttccccaaaggggtttttttcccccccccccccctttttgggggggggga

SEQ ID NO: 605981 - DNA, 572 bp, Homo sapiens
cgagctctgggacacgacttttgggagttctttcttccagcgtattcccctcccccctaccttttgcagggcgtcccggcgctggccttcccggaccttgcgcccctcagccccgagacctattgctgggaacaccccgcagcaattttcccgaatcttctggcacaaacagtatcgtctaagtttctttcgggcaccaacaatcgtcacccaaaaatcgtgcccagatctgcgcgcccaaaataggggcaacgaatcagtgggtgaacaagagatcccaatggtcaacactcttgtgtcaccacgccattcatccgactatattttgtgagggccacccaacagcagacgcccccggtggatagaccgctttattgggataatattctcttctctcagggcactcgtcttaaatgaccacttttccagcattgcctacggaaccacccctactctttgcccctgtatggcgcaatctccagacaacaatgattttttccccctactcactataattcattaaccgcctctctcctcccgccttataagattctcatcaataatacacaaaa

SEQ ID NO: 605982 - DNA, 1405 bp, Homo sapiens
ggaggagcggggctgtatcctctctccgccactggtcgtgtgctcgacccactggatatcgcgtgtactcgccgagagcagggggtagtcatctggtcaccaaattgtcacctgggcctgcgattgtagttcagaggctcctattacgaaccagagtattggtgaactggagtgcacagccaatcttgcgcaagataacaagcgagacgaggccgcttatgcgtgtcaggtgaattagcaaggtcatcagactagtgctgagtctaggcggtactggacagaagctgtgggcttcgagatatcacacagatgatatccgacggtcggtgggtgatctgcagccagactcgtggactcgaaggtagcttcttatggggaaacgatcgtagtacggtcgggagggacccgagagtggtgtatggtctacacgataagccagaaatcctggacgacctgctgtggacgatcggttagaagtagaaaaaatcaaattctcagaaacacacggaatagcaggcgcaatctagtttgtctgggcacacttggactaggccctggaggacccccttaacccaaggtagcttgggtaccagtgttgctaaatagggtcacaccgttactttggaccggaaatgttccctaggaaacgttaccatttccgggtaagtttagaggcgagatgaaaagttcggaaagtggttacgagaaggaatgaacctgaggaagagtctagaaatgggggtaccttttagaggaatacacttaacaaaggacttggtaactagatttcttcaccccctgagggggataatggacattcttcgacgttggacataggataaggctgggagtaaacgaggcatagaatggacagatgaacacgccagcgaccggaaatgacccgagacggccacgggagcgcccggccggccatgcaatcctaatcaaaggcgccggcgcaaagggggaatcaacacacagcggagagacgacaagaggccccagagcagatatgacacgcgcctcaaaaggagagcgcaccaccctcaacacgtcctcagcagcccgaggccactgaacggcaagtgtcggaacaattccgcagcaagggacacacaaaaggccacccggagaaaggaacaaaaggcaggccgcatagagaacaagacggtgcacaccaagaagcaggaacacacgacctggcgacgagcgagcacagcccaggaaaacaaacgagccgacacacagccgcagccgcccctcagatcgtcagcacgaacaaacaatcgagaccgatgccactacgagagcacagcatcaggagaggaaacaacggctttcgatcccccccgcccgcgatcccacccgctcagctcaacgacgagaccacagaacacagccgagt

SEQ ID NO: 605983 - DNA, 1093 bp, Homo sapiens
  misc_feature (17)..(17): n is a, c, g, or t
  misc_feature (25)..(25): n is a, c, g, or t
  misc_feature (27)..(27): n is a, c, g, or t
  misc_feature (50)..(50): n is a, c, g, or t
  misc_feature (52)..(52): n is a, c, g, or t
  misc_feature (60)..(60): n is a, c, g, or t
  misc_feature (82)..(82): n is a, c, g, or t
  misc_feature (84)..(84): n is a, c, g, or t
  misc_feature (100)..(100): n is a, c, g, or t
  misc_feature (131)..(131): n is a, c, g, or t
  misc_feature (156)..(156): n is a, c, g, or t
  misc_feature (162)..(162): n is a, c, g, or t
  misc_feature (188)..(188): n is a, c, g, or t
  misc_feature (190)..(190): n is a, c, g, or t
  misc_feature (204)..(204): n is a, c, g, or t
  misc_feature (210)..(210): n is a, c, g, or t
  misc_feature (214)..(214): n is a, c, g, or t
  misc_feature (254)..(254): n is a, c, g, or t
  misc_feature (260)..(260): n is a, c, g, or t
  misc_feature (264)..(264): n is a, c, g, or t
  misc_feature (268)..(268): n is a, c, g, or t
  misc_feature (272)..(272): n is a, c, g, or t
  misc_feature (284)..(284): n is a, c, g, or t
  misc_feature (292)..(292): n is a, c, g, or t
  misc_feature (299)..(299): n is a, c, g, or t
  misc_feature (308)..(308): n is a, c, g, or t
  misc_feature (360)..(360): n is a, c, g, or t
  misc_feature (379)..(379): n is a, c, g, or t
  misc_feature (385)..(385): n is a, c, g, or t
  misc_feature (437)..(437): n is a, c, g, or t
  misc_feature (511)..(512): n is a, c, g, or t
  misc_feature (593)..(593): n is a, c, g, or t
  misc_feature (613)..(613): n is a, c, g, or t
  misc_feature (699)..(699): n is a, c, g, or t
  misc_feature (701)..(702): n is a, c, g, or t
  misc_feature (704)..(704): n is a, c, g, or t
  misc_feature (727)..(728): n is a, c, g, or t
  misc_feature (734)..(734): n is a, c, g, or t
  misc_feature (739)..(739): n is a, c, g, or t
  misc_feature (743)..(743): n is a, c, g, or t
  misc_feature (745)..(745): n is a, c, g, or t
  misc_feature (749)..(749): n is a, c, g, or t
  misc_feature (753)..(753): n is a, c, g, or t
  misc_feature (762)..(762): n is a, c, g, or t
  misc_feature (766)..(766): n is a, c, g, or t
  misc_feature (777)..(777): n is a, c, g, or t
  misc_feature (780)..(780): n is a, c, g, or t
  misc_feature (783)..(784): n is a, c, g, or t
  misc_feature (786)..(786): n is a, c, g, or t
  misc_feature (803)..(803): n is a, c, g, or t
  misc_feature (807)..(807): n is a, c, g, or t
  misc_feature (846)..(846): n is a, c, g, or t
  misc_feature (886)..(886): n is a, c, g, or t
  misc_feature (897)..(897): n is a, c, g, or t
  misc_feature (907)..(907): n is a, c, g, or t
  misc_feature (935)..(935): n is a, c, g, or t
  misc_feature (950)..(950): n is a, c, g, or t
  misc_feature (983)..(985): n is a, c, g, or t
  misc_feature (1086)..(1086): n is a, c, g, or t
agctgcacagccgtgcncagagagntnctggatcctaggcttatctccananaggagaanacacaaagacagcacgagtacnanagagagaacccatacntacacgcacaccatacccctgcacacagcgnactcaaactggaaagggcgcgtccngctcanagcatcacttattaaacttctggaancngcccaccagcatgncgcaantcangattgaagccgagccaaccaaagtttccgaggggaaggangtactnctanttgnccanaatttgccccanaatcttancggctanatctggtanaaagggcaaatgacgaggcacctctaccaatatgagcattgacatctactangtagtagacaggctgaaanaattanatatgggcctgcatatagtggacgagaaacagcatattgccaatgcatcccngctgatccagacctgtcacccgcgcgaggaccgcagagactcctcacacctatacacaatcataagagggaganngatggggactagatggagtaactaggacgtttcacctttcaccgttacacctgagagactcctaagccctccatctccagnagcaacttaaatcccagggngaccatgggggctgtgagcttaacctgtgaccctgagactccagacgcaagctacctgtggtggatgaatggtcagagcctccctntnngncacagggtgaaggggtccgaaannaacagnacccncaancnattnggtntcacaaagnatantgcaggacccnaanaanntnaaatacggaacccagtnagtnccagccgcagttacccagtcaccctgaatctcctcccgnagctgcccaagccctacatcaccatcaacaaacttaaacnccagggagaantaaggatgtnttaaacttcacctgtgaatcctaagagngagaactacacctanatttgggggctaaatggtcagagcctcccggtnnntccaggggtatagcgacccattgaaaacaggatctcattctacccagtgtcacgagaaatgaacagggccctatcaatgtgaaatacgggaccgatatggnggcatcc

SEQ ID NO: 605984 - DNA, 778 bp, Homo sapiens
ggctacggacgccatgaatatttgcccaagaagagctggcacgttccggaacaaggacaatgtcgcccgcgtgcggcgtgacgaggcccaggcccgggaggaggagaaggagcgtgacgcggagggtgctgcgtggctcacaacgaggcccgtacagaattcctacggaagaaagccagacatcagaactcactgtctgagcttgaagcgagcaaagacggcgggagccctcaaagcttctggcccttgtgggacctgattgcagcggagcgtgcatggagaggaacgtggaaaggaggtgagcagaggcaactaaagagtacgaggaataatatgcgacaggagaaagagaggcataggtagaagagcttcttggtgctattctggaccgaatacctggcgccagagatgtgcgcggaggtcacagactcaagcgcgcttagtacccaggcataaggcccccagggtcggaggtagagtccgcgcgcgacacgggatccttgcaccgcattatcgacgaaggtagtctggtaagcacaggctaggagcccatcttgtcgtggcaggaatgcctgtaacgctactcctcgtggaaatgggaagaggaccatcttccgggcgcgcttaaataaactgccaccacgcagaggcatacagggagaccatgagggtgcgtgtgataaatccgggtaacacaaggatatgtctgtcttgagacctatccttggatcccaacagtcttgtgcccgaacgtctacaatgctgtgtagaggccctg

SEQ ID NO: 605985 - DNA, 422 bp, Homo sapiens
  misc_feature (286)..(286): n is a, c, g, or t
  misc_feature (351)..(351): n is a, c, g, or t
  misc_feature (411)..(411): n is a, c, g, or t
agcaggaggggcctgagatggtagctccaggagctggtctagaggcttctggggacccagaggctttgggctcctggtcctggtcagcgtttggtccctggctggaatggggaggggaggttgacccccagggtggagggatggacgcctgcagggtccagctggagagctctgtgccccctcctggagcccccggaacgttgatggtgtgtctggcgccccacttgggtcagcctcatcctgagggctgaacctgagcccctggcattcactgtgcccatgtggnccttcagccttcgttcacgtgactctcacttcccagatgaagatctcctttcaacgacaaaagcntgcagaccacattttgagtaccctttccgagagttccttagagcaaggaggaaagaggtnggaccagcagg

SEQ ID NO: 605986 - DNA, 297 bp, Homo sapiens
  misc_feature (44)..(44): n is a, c, g, or t
  misc_feature (145)..(145): n is a, c, g, or t
  misc_feature (173)..(173): n is a, c, g, or t
  misc_feature (295)..(295): n is a, c, g, or t
gataaaaactcaaaggtaacagggccgggcacagtggctcacanctgtaatgccggtgctttgggaggctgaggcgggtggatcacctggggtcgggagttcgagatcagactgaccaacatggagaaatggtggcgcatgctgntaatcccagctactcgggaggctgaggngggagggtcgcttggacccgagaggcggaggttccggtgagccgagatcacaccattgcactccagcctgggcaacgggagtgaaactctaatctcaaaaaacaaacaggccaggcgctgtngc

SEQ ID NO: 605987 - DNA, 656 bp, Homo sapiens
  misc_feature (30)..(30): n is a, c, g, or t
  misc_feature (69)..(69): n is a, c, g, or t
  misc_feature (96)..(97): n is a, c, g, or t
  misc_feature (101)..(101): n is a, c, g, or t
  misc_feature (144)..(144): n is a, c, g, or t
  misc_feature (158)..(158): n is a, c, g, or t
  misc_feature (200)..(200): n is a, c, g, or t
  misc_feature (234)..(234): n is a, c, g, or t
  misc_feature (239)..(239): n is a, c, g, or t
  misc_feature (283)..(283): n is a, c, g, or t
  misc_feature (290)..(290): n is a, c, g, or t
  misc_feature (322)..(322): n is a, c, g, or t
  misc_feature (331)..(331): n is a, c, g, or t
  misc_feature (360)..(360): n is a, c, g, or t
  misc_feature (370)..(370): n is a, c, g, or t
  misc_feature (373)..(373): n is a, c, g, or t
  misc_feature (507)..(507): n is a, c, g, or t
  misc_feature (540)..(540): n is a, c, g, or t
  misc_feature (544)..(544): n is a, c, g, or t
  misc_feature (578)..(578): n is a, c, g, or t
  misc_feature (586)..(586): n is a, c, g, or t
  misc_feature (653)..(653): n is a, c, g, or t
ccgaatgggggggaagcccggatggtgcgncaccacctcaggcacaaagatgatcgcccgcaggtaagngggatcagcaccccacggcgcgggggnngcgnaggtgaggagggggcaacaccccaatctgcagcatggtctatnagagagggccgggnatggggccgagccagcgacgccagtgcagaaatggtatggancagagttcggaaccgtgcgcaggtccagcggcgngcgcngggccttcccccggagagccatcttggcgctgagcacagggcgnccatagncatgctaggacagcgaggacctcagcgctggntctgcgtgnggaccagaggcaaatggttgacgctagcngttgacaganacnggatggtgccagaggggcttgattggtgcagcgcggttggggccaggacccgcagctccagcttcaatggggagtcaatcactgctgggctcagcaggacaatgctcccaaagtaggtggccctcagcagcatntccaggtcgtggggcacttgtcccccaccagcnaaanctgcagggcccccgcccggaagtagctctccatngcagagtngaagaagaactcagagaaggccacatacaccatccgctcttcctcctgcagctggggttcactgccnggt

SEQ ID NO: 605988 - DNA, 280 bp, Homo sapiens
actcccagtgtgaggggctcatcgcccatccccagcgctgtccctacaggcgcagcacggtcgttatgggccttaccagacctgggtcagctcatactgcaggtccttgatggtgctgttcttcgactcaatgaacatcctccagcttgcgggcacaccagcgtcaggtctgcagggtccatggtcagaggcgagcagcgaccctcgtcgaactgcacctccttcttctccacagcggtgctcagagccttgtcgcttgcggttctagcacctcccaggt

SEQ ID NO: 605989 - DNA, 537 bp, Homo sapiens
  misc_feature (113)..(113): n is a, c, g, or t
  misc_feature (213)..(213): n is a, c, g, or t
  misc_feature (227)..(227): n is a, c, g, or t
  misc_feature (241)..(241): n is a, c, g, or t
  misc_feature (245)..(245): n is a, c, g, or t
  misc_feature (256)..(258): n is a, c, g, or t
  misc_feature (260)..(260): n is a, c, g, or t
  misc_feature (263)..(263): n is a, c, g, or t
  misc_feature (276)..(276): n is a, c, g, or t
  misc_feature (278)..(278): n is a, c, g, or t
  misc_feature (285)..(285): n is a, c, g, or t
  misc_feature (289)..(289): n is a, c, g, or t
  misc_feature (292)..(292): n is a, c, g, or t
  misc_feature (298)..(298): n is a, c, g, or t
  misc_feature (307)..(307): n is a, c, g, or t
  misc_feature (330)..(330): n is a, c, g, or t
  misc_feature (333)..(333): n is a, c, g, or t
  misc_feature (349)..(349): n is a, c, g, or t
  misc_feature (358)..(358): n is a, c, g, or t
  misc_feature (387)..(387): n is a, c, g, or t
  misc_feature (389)..(389): n is a, c, g, or t
  misc_feature (395)..(395): n is a, c, g, or t
  misc_feature (398)..(398): n is a, c, g, or t
  misc_feature (401)..(401): n is a, c, g, or t
  misc_feature (407)..(407): n is a, c, g, or t
  misc_feature (505)..(505): n is a, c, g, or t
  misc_feature (511)..(511): n is a, c, g, or t
  misc_feature (530)..(530): n is a, c, g, or t
atgttgagcaggcctgggtctgtgctcttttctctttctccttagtcctctcaaagcattaactaatctatggggttcattattggaattaacctggtgctggatattttcanattgtatctagtgcagctgattttaaccataaccactgtgttcctggccatagtgtgttctgattagaaatgacccatattatactaagaaaagatccgnctttattttttggnagatagaaataaanagcnatatccctggnnngnagntttttttcaacancnatgttcnttgnaanggtacngatcaagcnttggtgaggtggtttgaatgttntgncattaacagttttccntgaaaacgntttattggggttttaatttatttattaananggattntcnganatttanatttttattttattttttttccccctgaggtctttttacatgtggaaagggaatttgaatgaaaaatttaagccttgtttggttattgttcccagacnttgtcnataaaagccttttagttgnatgcgga

SEQ ID NO: 605990 - DNA, 165 bp, Homo sapiens
gcggtcgcctactactactaaattcgcggccgcgtcgaccctcataaaaggaaagccacaggactgggcagcagcagaatctaagttatatgaagtaggaaatgaaaaatagaagagggaaaataaaaaaaatagaagaggtattgttaattgtggaggacaaag

SEQ ID NO: 605991 - DNA, 238 bp, Homo sapiens
tgcgcctgggcttgggccggtggctgcggcccctgcctctcctgtctcgccgtccccgtcctctgcccttttccgcagcttcgcttccccctcgcgcgcacgccctgcatcgcacccgtccgctcgccgcgcacccccccgctgcctccgcacccgctgccgccgccgccgccgcctctcaccgcgccgccgctgctgcacacattgtcgcagcatcggggcatcctctcacatcgca

SEQ ID NO: 605992 - DNA, 359 bp, Homo sapiens
  misc_feature (8)..(8): n is a, c, g, or t
  misc_feature (20)..(20): n is a, c, g, or t
  misc_feature (83)..(83): n is a, c, g, or t
  misc_feature (174)..(174): n is a, c, g, or t
  misc_feature (225)..(225): n is a, c, g, or t
  misc_feature (249)..(249): n is a, c, g, or t
  misc_feature (309)..(309): n is a, c, g, or t
  misc_feature (336)..(336): n is a, c, g, or t
acataggnacattctaaagnttccttgatttgatcattataagatgtgctgggactcaagcacagggaaactgaactcttttngtgtcattggatgtttcatttttgacactaattttttctgggacaaactctttatgtgtttttcccaaggaatagttatctacttccgggnggcaaaatccttgggatttactaacatggatgatttaccttttcttcaccnttggtcgttacattgttaggaaangcaacaggaaaaaatccaattcatttggacctaaaaacaggcctcaggttttaaaaccangctcacgtttttctttagggggaaaantttgctttctttaaacttacatc

SEQ ID NO: 605993 - DNA, 460 bp, Homo sapiens
taaaaatatcaccatttctcaatttccagcaccaacctttttcaattgtccttgggaaaattaatgccctcctgcctcgtggtaaaatgcccagtcctttccatatgtgttgcccttcccaccgatggtgacggttgacacaaggcgtttctgcctttgcccactatcacttcctctaagggttcccatccgttgtaagaagagcaaggcaagtccttggccagagctccagtgccttggcgccacctgcccagaagtcccggaagaaagccgtagctgcctgggtgctctggaaagttcgctgcacccatcctgtcaaggttcgtccaagccgagatccaatgtagtgcaccgcctcggcgccgcggctcccgccgcgcagacaccgcacccgcagcatcgccctggcccggctggtacacgcgcggaatgttcctggcctactgggccgcgtcggtcc

SEQ ID NO: 605994 - DNA, 829 bp, Homo sapiens
cagaggaagcagccgcgctcccacccacccacacccaacgagaccctcgatacgcctcttctccgggagccagtgccgccgccaccgccgaccgcccaggaccatcgccaccctccgcagccatgtaccaccaggtccgcttagtcctcgtcctcctaccgcaggatagtttcaggcggcccgggaccaccgcgagaccggccgagactccagccggagctacgtgactacgtaccacccgcacactacagaccatagggcagccgcgctgacgccccagacaccagccgcagcctctaccagcctacgtaccccgggcggcagtagtatgccacgcgctcctctgccgtgcgcctgcggagacagacgtgcccggggtgcggatacctgcaggactcggatggacttctcgctggccgacagccaatcaaccaccgagatacaagaaacaacccgccaccaacagagaaggtggagactgcaggagctgaatgaccgcttcgaccaactacatcgacaaggtgcgctataccctaggcagcaggcagcacataagtatacctgcatgggcacgacgactacgaagcagactacaagggcccaaggacaaaagatcgccgccatggggggaccctcctcacgacggagcgaggatgcaggagccagccccgggcaggtggcaccagttaaccaaccgagaaagcccgcgatcgagagtggagcgcgacaaccatggccgcaggaccatcatggccccccgggaaaatgccagaccgagcatcctcagacaccagcaacgaaacccagaagcaaagaccgatgtgccagc

SEQ ID NO: 605995 - DNA, 893 bp, Homo sapiens
tccaaggcttggaccgggttatacagcgtgcggcacgagtgtggccctcagcggcgttggcgctgggctgcacgaaagaggggcgcttaggagtcttctttctcccgcgtagcgccccacttgcacggagcacaagctctctttgtgtgaatagaagggagaggggaggaccaccatttattatgagagaagacaatatatagagaatggaggatatgagaggaagagaagtttaaggagagccccacgaagattctactattggaagggtgagtacatttacgacggtgttgtcccgtgtgtagcacccagaggtgggtattaaggcttccaaggagcctgggagaaggggaacataatgtagggttaagcttttatactacataatatctataagggctccaagaatgttgggagattttaccgacgcgggaagagacccgtcgggtgtttgagaatatagctgagatctatgtaaaattatgggtatgggttaccccggtaaaaatgggcacgaagttcttttttatgggaaaaaatatagagggagaaggtataagggctcctctttggataaagctcgctcgttttaatttgtgggaccacagctcgagtccactcttggagatttctttaaaggaattttttataacgaaatggaattaatcactctttcttggccacgaagatttgctacccctaaaggtgaggttggggaaatttctgttgccgacgaaccacactacaaccttagtatgagctccccttttatccgtaattttcccgtttataaactcccggctattatgttaaaaaccaattgtttgtattttaatttttttaaaccccttttaaagatcccggttttggattaaaaaattaattgaaaccca

SEQ ID NO: 605996 - DNA, 512 bp, Homo sapiens
  misc_feature (4)..(4): n is a, c, g, or t
  misc_feature (18)..(18): n is a, c, g, or t
  misc_feature (26)..(26): n is a, c, g, or t
  misc_feature (71)..(71): n is a, c, g, or t
  misc_feature (212)..(212): n is a, c, g, or t
tccnttttaatggctggngtaatatnctttggtatggatatatccccaattggtttattcactcacctgtngatagccattggggtcgtttcccagttttggctattatgaataaagttgttatgaacatttacatgccagctttgtgaggacatgttaccatttcctaaaagtggaattgctgggtcatatggtaaatatacgtttacctncataagaaactgctaaactgtttccaaaatgactatgacattttgcatcctgtttggcaaagctgcaggatacaaggtcaacatataaaaatcaattctatttctatatgatagctatgaactgtctatttcagaaatagaatttttaaaagcaccatttatagaagcataaaaatatgcaatagggtgaaatttagcaaaatatgtgtatgctctgaacactgaaaacgacaaaatactactgagaaaaattttagaagacctaaataaatggagagaaatatactgtgctcacaaaaa

SEQ ID NO: 605997 - DNA, 141 bp, Homo sapiens
gccactgccgccgcctcgggagagaggaagcgggagaggagcccacgtcgcctgtcacctagatccacgccgcgccgccaggaagaaagatgttcgcctgcgccaagctcgcccgcacccccgctctgatcctagctggat

SEQ ID NO: 605998 - DNA, 674 bp, Homo sapiens
  misc_feature (334)..(334): n is a, c, g, or t
agctcgtgggcagggttggcgaactctgagctggggtgtgcttgtgagccagggatcactgggtgccggccacagtaggaagtgtccctgagtgacacagtaccgacagtctgatcccagaggagcgaaggaaggtggggccggggagaaggtctgcagtgcaggggagtggtccagggagtggaggactgagaagctagcgaaggatgtgctgcgatggtcgtgccagtaggactccttccatggcgcttgaagcttctactcgctttcacccgcactcctacgagggggcgatggcggaggccaggcgtctgctgagcttcttgtgctgtgngaacgtcgttcaatgcgcttatcactaccattctcttatagtatatcatagtgcgataatgagactacgaaatagattgtgagaactaggttcgtttttcgcgtctttgagcgtggatgtcccacgaggagaaagatggaagtaaagtgtcatttggacgtgaggggtggtattgtgatagtgtgtcatagaatttgagaatgtttgttggcttaacatacatatatcgattgcctaagtagaagtgtataaaaattgtgtgaaggtaagaggcccaggggagctagtgagcagcgagagggttcatgacgtttgtagaaattcctggttgtgatatagg

SEQ ID NO: 605999 - DNA, 261 bp, Homo sapiens
ttttttttttttggagacacagtctcactctgtcacacaggctggagtgcaggggtgcaaacacggctcactgcagtctctaccttctgggctcaagcgaccctctcacctcactctcccatgcagctgggactacaggcaaatgcaactactcaggaggctgaggcaggagaatcacttgaacccaggaggcagaggctgcagtaagccaagactgcgccactgcattccagcctggatgacacagcgagaccttgtctc

SEQ ID NO: 606000 - DNA, 100 bp, Homo sapiens
ttggaagccctccagcaagacaactagtgatgtcaataaagcatagtggcagtccattcacgtttaatctccaaaagattaatgtgaatatccacactgt

SEQ ID NO: 606001 - DNA, 563 bp, Homo sapiens
  misc_feature (356)..(356): n is a, c, g, or t
  misc_feature (396)..(397): n is a, c, g, or t
  misc_feature (408)..(408): n is a, c, g, or t
ctgaccaaccttccatgtatctccatcctcccctgctccagccagggaggactgagggagtgccccgagacccacgcacatgttggggcttctgggccaagagtactttttatataactaatttctaaatccaaaagctcaaggaatagacagtgttctgtgacatggattggtttgaaggagttacccaccatcccagcacgataatgtcatctcccaagttggatggcagcacgatctggccctagggagcttcctgttcccagaagtcattgtcctgggctatccagatgtccctagtaaatcttgcttccttctgcaatgttagtaatgccttaagctttttgggggggggngggaaaaaaacccccccggaaaaaggggttttttttgggnngccctttgaanttttttttttgttgcagaacagttttcctctttgcttagctagtaacttgcctctgagcctgggctgatctgagaaacaggtgtgacaagagcatgaaccagaggtgcacctggggcagttccctaataaaactggtttgtacagtcaaaaaaaa

SEQ ID NO: 606002 - DNA, 609 bp, Homo sapiens
acgcgatcacaggtgccgtcgtttacaccccggaaacctgttttgccccattaatacggattcccagggcggatggttataccacgaggaaaccagttatcccgtttatccgggttccctgggcggccgtatatccctgagaacacagtgagtagcgtgtataccggttgcctagggcgctcgttacatccgaaaaagcagtgcaaggactgacactccgatggccgaggggcagcgcgagtcccacaccagccacagttttagcaccgtgctgtcgtggtatagaattaccttgcaggtcatggaggctaaggtgatggtacacaaaaggcatcatacagcagccagatgttcatgagactaaatggaaaatatgactcaggtgatccacccgcctcggcctcccaaagtgttgggattacaggcgtgagccaacatgcccagctcaggagtagatatataaaatactcccctcttctatagtaacaaaattatttcaataattaagaaatacatcatacatgatgatgataatggccagaacataatttcagacagttaaccttttctatactgaatctgtgaatctgatgccgcactagaaagggg

SEQ ID NO: 606003 - DNA, 386 bp, Homo sapiens
ctcatattagccaggttagggggatgtttggtattttgtgtgttcagtgaccttgtttttttcctctgggcttagacacccgcctactcgtcttcccctcccgcaccccctctccaccctctacctcacccactctctccttctctctcccctctctctcatccctctcccccctcccctctcccttctctctcctccttctccccatctccacctcccctcccttcccctcctacgttcctcttctccttcccttccttccacacgacttccctctccctccacttcttccccttttctctctctccctctctctcttctacccctcctctctcctctctctctcaccctctcccgtcctctcctccccccctcctgtcactccc

SEQ ID NO: 606004 - DNA, 1290 bp, Homo sapiens
  misc_feature (373)..(373): n is a, c, g, or t
  misc_feature (415)..(415): n is a, c, g, or t
  misc_feature (577)..(577): n is a, c, g, or t
cgatctgctgctcgtctcaggctcgtatattctgccttcaagatgccggacaccaggcgaagtccgctcccgcgcccaaggaagggctcgaagaaagccggtgactaaggcgcattaagaaggaacgagcaagaatgctgcaacgcgcagacgaaaggaagagcctaactccgtgatacgtgtatcgcagggttgcttgttaatactaggtccacaccacagaaaacggctactctcctcgtaagggccaatggggaaactcaatgacacgtcgctttctgtcggaagcggacatcttcggtaaagcggcactccggtcggaggatgacggcgtttcctcggctcttgggtcggcaatatatctcaccgaaangcagctcgtatccatgtcatactcgcacgggtaggactccangaacagtgccgagtgtcgactcgtgtcgtagcctcgcctcagggggaagtttaggaccataaggcagaaagacacagtgatacccagagggtagacacctgatagtgtgcctctgtgctagacctcatgtgtatccattcccatgtacaggccttagagagntataaaacttatggaccctattaagggtagggcgtactacttttatcatttcatggggaaaacttttttcccttggaattttttggaacccaaaaagaaacacacgccttttacctattaatttccagaaaaacgcgaaaaggccacccaaaagtttttggagccccatattgccgaggctttaaacccccttccaagttttacgtttccttaaacctgtggccaaggaaaaagagaacggaacaaacgcaaccggggaaggaacaagttgggccaaaagaccaaattaagccccctatagaagttggggaacccttttgtttcctcaaaccaaaagggcctttataaaaggccttggaggcccactccctttggaaattccttccaatttttcaacggaaatttcccagaagagggagagaaaacttccaattttttaagccacaacaggttttaacacgttttttcctggattccttcccatatttgaggttccccaaaattcttcccgttttttcctcccgttcctatagaaattaaagttccacgttgttttaaccgtggggtttccccgttccaaacaaggaaacactttgtggtcccattaaccaagttttaaacgccgcaaattgcgttacccaatacctctttatgtgggcccatttccttggaacggcaacacacggaaaggttacattaacttaaaacagtgc

SEQ ID NO: 606005 - DNA, 284 bp, Homo sapiens
cccgactagcccgacagctgtcaccttcaccgttccagtttttaaatcctgagtcaagccaaaaaaaaaaaaacccaaaacaaaccaaaaaaccaattaaaggccatgcaattctcattgggtttcctggcccagttaaggttgggccaaaaaggggtgtaccgcacttaaattcatagtcggccaaaaagcttgggggggggccagatgagggggcgcgagcctcgtcatctctccgtgtgtgttggttcccacttttggtcggaggggggcgcaggcagatg

SEQ ID NO: 606006 - DNA, 468 bp, Homo sapiens
  misc_feature (34)..(34): n is a, c, g, or t
gagtgtctcaatgtttgaacactcttcacctatngtatgaccaaataaaggttatacaataggtgaagagtgtctcaatgtttgaacactaatgagataagcagttgacttactagattacaacttggcagttcaaagtcttgttgaagactttgaggaaaaagattggaaaaatgttgactttcggccgggcatgatggctcacgcctgtaatcccagcacttgggaggccgaggtggcggatcacctgaggtcaggagttcgagaccagcctggccaacatggtgaaatcccgtctctactaaaaatacaaaaattagccaggcgtggtggtgggcgcctgtaatcccagctatgcgagaggctgaggcaggagaatcagttgaacccgggaggcggggattgcagtgagccgagaccatgccattgcactccagcctgggcaacaggagcaaatctccgtctcaa

SEQ ID NO: 606007 - DNA, 615 bp, Homo sapiens
gggttttttccccctcgttttgccccctggtgtgggccccccgtcccgttaacctctccctctttttgtccccctcccgcgggtttccgtccccccgggggtgcccccccgttgttttatttgggacaccccccgcggcccccatgttattgctccgcccccggttttctttgccacctgtgtttcgggggtgtctctattgtttatcgccccctccgcgcacgcgtccctcctcggtggattttcacaggttctccccctctctcccacctcttttcgcggcggacctttggtcggggtgccacacacacgttctgttgtagcacccccgcggtgttccccgcggatcttcgccctccgctttttgggctcacccctgttcctccccactatgttcgttgtccatcctcccgcccccctctcatttgttcctcgctctcttgcagcctccccaccagcgcacgcactctctggtggtttggaaccccggccgccctgtaattgtgcgcgtttctgttggagaatggtggtttgtacatatattgtctgtaagagttctctctccactctctttgtgtgatgaggggcgtgttataacaaataacaaaacaacac

SEQ ID NO: 606008 - DNA, 131 bp, Homo sapiens
tgatgacagactgatgaaaatagagctgatcaccgttccagccccaacgtagcaaatcagcctcctagtcctggagggaaaagtgcatatgcctctggaccacagcgagataacatctgtctctactggaa

SEQ ID NO: 606009 - DNA, 201 bp, Homo sapiens
  misc_feature (12)..(12): n is a, c, g, or t
  misc_feature (154)..(154): n is a, c, g, or t
  misc_feature (172)..(172): n is a, c, g, or t
  misc_feature (193)..(193): n is a, c, g, or t
tccttaccatangtatgtactctaaactttgacatagatttaggttgttgtctattagagtcagataatcttaaattgcctaaataaagctctaagctatttcaaagcgccccctctatcagttaagagttgcaaatactctgactcatgaatnggggggcgagacacgagnacgaacttggaaaagactcgnttggagaa

SEQ ID NO: 606010 - DNA, 686 bp, Homo sapiens
  misc_feature (5)..(5): n is a, c, g, or t
  misc_feature (160)..(160): n is a, c, g, or t
  misc_feature (195)..(195): n is a, c, g, or t
  misc_feature (201)..(202): n is a, c, g, or t
  misc_feature (299)..(300): n is a, c, g, or t
  misc_feature (312)..(312): n is a, c, g, or t
  misc_feature (314)..(314): n is a, c, g, or t
  misc_feature (318)..(318): n is a, c, g, or t
  misc_feature (328)..(328): n is a, c, g, or t
  misc_feature (331)..(331): n is a, c, g, or t
  misc_feature (342)..(342): n is a, c, g, or t
  misc_feature (370)..(371): n is a, c, g, or t
  misc_feature (386)..(386): n is a, c, g, or t
  misc_feature (411)..(411): n is a, c, g, or t
  misc_feature (446)..(446): n is a, c, g, or t
  misc_feature (562)..(562): n is a, c, g, or t
  misc_feature (678)..(678): n is a, c, g, or t
ttgtncatattctataaagataatttattaaagagtcagagagaaagacagttctttacctctaggctattgataaaaccatctgggagtgggaacagcttcagggatgttacagggggattgggggggggcgagggagggtttgataaaatgggggaanatgttctactctcctttctttcctggggccttaanattaannatctgggattgaaaaatatactttcacacacatatctgtttcaatgggtgctgtctttctcaattttgggggggggtcgctggttggtggtcggggnngggggttgcgantnggtncccggttttngtntgggttgggtngctctggttattcatgggggcgtggtgnnctcggggctcgggcnggagctgctgctacttgtgcttaangctggggcgcgggcgcgatatcatttactgggganctgaagatgctgcgcaatgctaacagcccctctcagaagttctgtgtggctctgagtccttacagtgcagttgttgtgttagcccatcatccagtgagctggccagtagttcagcncctccacttgctgcagctgccgcgagacacattcaccaggcagttgcccaggcctctcacccatggggggaacacatctggccactttttttttctgtaaacctcaaatgaaacanaatctcac

SEQ ID NO: 606011 - DNA, 951 bp, Homo sapiens
cactacatgataccttcatcacatcggtcgaagacgagtcccgcgaactatcgcaaacacattggtggaccgaccttgcctgagtcgaagcactgaaggaatttagctggaggctctatcgtacatagtaatcagtaccctttatgtgaggttggcacaagggaagaatcttgtccatgatagctgaaatgtggatttgaacacgtatcgtcttgacaattagattgttgcactcttccagagagagtataagacttcgcttcctagatttgccttaggatgcgcttacatagattactcaggaatagcttggcgattgtattgcgtctgtgtaccagaataacttctcaagtctgacgatgggcatctagagagatatgaaacttctaggatgacatcaagagtaataaaagcgtcgaatttaacaaggtccaagaaggattccgtaaagaggggactcaagattcctcgtgactgaattagactcgggttgccatcaagtacatgcaagtagcgagaattgtgattgttgcctcatccgtacattggggcagatttctacatgaggcataatattgttgctcgatgtaacctatgtgcttagtagcaattttaccttcattgttgccaaaatctggtattagatgagggacgatgactagctgggcactagttgctcctgccaagattgacaggtgccggaaaattggtgctatttgttcctacatataatactttagatatcttaaaatcctaggtagtgccgtttgaagcccttttttttcactttgtgggtctgcaattacctacttctaatagcctttgcagctttgcttggttgcaccacaagtgtccacgtaacattgcagagggttattgcgtcctgtgcacagggtttctcgagcggctggctggacacctgggcctttgcctctctaatagagcagccac

SEQ ID NO: 606012 - DNA, 209 bp, Homo sapiens
aaccgatgcagacacggcaaagggaatgccatcggatgctggagacctgtgagcactacaggaggaaacgcgagcgtggtgagactgactccaggcacacaggcgaagggcaagagggttggacacagaagccacaaagctacttgggttcctccattcttctcgtttgcactttatctgcttcatgatgcatgatctccgagtccctc

SEQ ID NO: 606013 - DNA, 269 bp, Homo sapiens
actgcaacatctgcctcccgagttcaagggattctcctggctcagcctcccgggtagctgggattacaggcgtgcaccacaacgcctggctaatttttgtagttctagtagagatggggtttctccatgttgggcaaggctggtctcgaactcctgacctcaggtgatctgcccaccttgacctcccaaagtgctgggattacaggcgtgagccatcgtgcccagccagatctggtaactttagattccgagagtctccgtcgaactgg

SEQ ID NO: 606014 - DNA, 301 bp, Homo sapiens
cccctagagcgctggacactgaccatcgcagcacgaatgggcttgtagtaagtgctctctagcacttaggctgggctctgacactctctcgagaattcagacatcagagaagaagtccccttcagaggaccccagtcatcaccgtgatcccgtcctgactcccgtcctcaccgtgataccgtcatgactcccgtcctcaccgggatcctgtcctgactcccgttctcaccgcgatacagtgctcactcccatcctaagcgctatacagtcctcactctacgcctcaccgtaatcccatctt

SEQ ID NO: 606015 - DNA, 2076 bp, Homo sapiens
  misc_feature (1)..(1): n is a, c, g, or t
nagaggaccactcagggggggtagggcaggagcagcggggcggggtcagaagagggggtgcagcgcggaggtgaggtgaggcggacgacgaggcaggtaggaggcgcgagtgagagtggagggagcgagcagcaagggaggagaaggtaggggcacaggcggcagtgggcgagcggacggagaagagaggaacaggtgggggggagtcaggcgcggggggcggcgggaaggaggaggcttggcagggaggggcgcgcgggagagggcgcagccgcgaagcgggtgggggggcggacgcagcagaaggggggggtgtgctatgggtgttgtatcttcatgattgccgtcgagggagtgggtgtgcgctggtggtgctgtggtgaggttgggttgtgtggccccgtgtgcggtgggtgggggaggcgggggttggatgagagtaagtgatgggcggatggggggcgccaggccggtgttgatggggagtgggagggcagcgtcgcgttgatgagtggaggagaggaggtgttgggaaggggggagggacttgggtgtatgagtcgcgagctcgcagatgatgggtggtcgcggatgggtggctggcgctgtgagggaggaggagaggggggggtggggggacaggagaggggtgcggcgagaggacaacaacagtgagtgtggggagggcagcagagggagaggcacacagaagagggggggtgggggggcggaacgcgcagcagggagaggggtggaggggcgcgacggagcagagcgacagcagcggggggggtaggagggggagagatggaagaggggggggggtggggagacgccccgcgcactgggggggggagggagacacacagagaggggggggggcgacaggaggactcgtggggcgaggaagagagaggtgtgtcgtggggcagcgcgggggggggcgcaagatgagaggaggtgtgtaaaggagtggggtgggtgggtggggggggtggtgggggggggaggggagggggagggggggcgaaggacgagggggggggggcgcggcgcgggttgtggtggtgtgttgtatttgtggtttgatggtgggcaccgctggggagggggcgccactcgtgctgtgggtgagtgttgtggtgggggcggcgcctctggtggtgttgtgttgacacagcacaggatagacgccacgtcgtgggcgacgagcggctctgtgtgtgttggtctcgtccgcgcgcagagtaggggggacgtctggtgggtgggtggggaagacaacactcttttgagtgggcgcgtctacttctctgagcaacagtggtgttgtgtggtgttcgtcagcatctccgcctgcggggagagtagaaggagactactcttctcttcgtctcgcgcacaccacagcgctgctggtgtgggttggtggggggctctccgcaggggagggtgttggggtctcactgctgtggtggggagggagatagtgagcggctcatgtatgaggagatagtagtatataaacactactctctctctcacagcagttgtctctctagtgtgtggtgagacgcctcgcactcagcagcagatagtagtagagaagtgtgtgtgatgagaggtggttccttctcgcagcagggctgctgtatgagataggattgtctcataacagcgtgtagtgtagagactctctcacccccgccctggcgctctctcctcccactcctctgttctctcttgttgtgtgtctctctcggggggagaattcacagcgagagcacgccacgcgcgggtgttcgccctctgtctccccactcggagacacactggtggtgtgtgtggtgtggatgaggaaagcccccgcctgtggagattgttttgtggtggggcactctatatgtggggccatatgagagagggagaaatattatagaagagagagaggggagactgtgtgtgtctctctgtattgtgtgtatataaagagataaataataagttgtgtatgatgtagatgtgtataattgtacaccacgcaccacccccgaacaagatatataaatatataaa

SEQ ID NO: 606016 - DNA, 846 bp, Homo sapiens
tcgtccccaactcgcgcgtctgtccccaactcccgctctcggcgtgcgggcagtgtggcgctgagcgtccaggcgctccaagggggcgggcccgggtcggggcggggccggccgggcttccaggcctgggctctggccgcccgcgccaccgggccgctccggggacaggccggggcggggcgcggctggcaggaaacggggcggggacttgcggaggcgttggggacgagagagggcgcggccaactccaggggggacggcaggccgagagcgcggcgccctgggcctggcgcggagcctgagcccgccggactgggaggcggccccgccgctgggctcggccccgtgcccagccccgcacagacatggcctggccggacttgtacgggccggagaccctggagcctgggccaacgcatgacgatcaagcaacggtgatggcgaccgatcgcagaaggtccggagcatgggacgaagcgatggcgtgactgtgggcgcacacgttcccattcgatatctttcaagtgtggtgccacgtggtgggatccccaaggagcgaggcagcgaagggcggggcagagtgcgcggggaccagagaagaatcccgtgagccgaggagacgtacggcggccaggcggcgccagatccccagacgggggttgcgccctctcaatactggctggcatcttactgatgagacacagcaaccagaggtatccaattcgggaaggggttcactgcgacaaagggcaacaggagcccaggccatggggggcaacccaccgagcccaggccggccatggaggtcaccttgccggaacgccccaagacagggggttcccgtgg

SEQ ID NO: 606017 - DNA, 402 bp, Homo sapiens
  misc_feature (34)..(34): n is a, c, g, or t
  misc_feature (140)..(140): n is a, c, g, or t
  misc_feature (143)..(143): n is a, c, g, or t
caggttcactaccctccagagtcccagcaagggnatgtggggtggagagggcttgattttaggctacagatacgccaacaacgacaagctctccaagagggtgaagaaggtgtggaagccacagctgttcactcgggagnatncatagtgaaatcctggacaagaagttcaccgtgactgtgaccatgaggaccctggatctcatcgatgaggcctatggatttgacttctatattctcaagacccctaaggaggacctgggctccaagtttggcatggacctgaagcgagggatgctgcttgaggcttgctcgccaggacccccatctccaccctgaagaacccttggagccggagagcaagcccatctatgacaagtacaggagcttttgtcatcccccg

SEQ ID NO: 606018 - DNA, 314 bp, Homo sapiens
gttgacagagcgggagcatctccatcttgaacaaacaccaccattctaagttccccttgattaaaaaaccacctaaatccagccctaaaacatcagcctaatagctaatgtcagcataaccagaaacattccaaccctaagataaacccctatccaaccagaaacatgccaaccccgagacagcctaccctccaaccagagacattccaaccccgcaattaagtttccctcacatagaaacattctagacctacgataagaccctcattccaaagcccttaaatatccacagtatgaaagagagaaggctcctg

SEQ ID NO: 606019 - DNA, 340 bp, Homo sapiens
tctagagcatccccgcaagacgaccttgttgccattcctaactgcaaaagggattttataaccagaaccttcatttccttccatgggggactttcaaagagaagccatctgagtgtgcctgtaggtcacatgcctgcatccaaaaaaacatggagggtgggggcggtggctcacgcctataatcctaactctttgggggcccaaggtgaggggatcacttgagcttaggagttcaagattaccacggcccacatggcaaaactccatcactaccaaaaaaaaaacctcctccaaataaccaggatttggctggtcttggggcctaatccttgatttccca

SEQ ID NO: 606020 - DNA, 635 bp, Homo sapiens
agtgcgtcatataacaggtagctcacgcctataatcctggtactttgggaggccgagatgggtggatcacttgaggccaggagttacagaccagcctggtcaatatggcaaaactcccatctctactaaaaatacaaaaactagctgggctggtggtgtatgcctataatcccagttactcaggaggctgaggcagaggtcacagtgagctgagatcacaccactgcactccaggctggatgacagagtgagaccctgtctaacgtgacatcacatcacatcacatcacatcacatcgcatcgcatcgcatcgcatcgcatcgcatcgcatcgcatcgcattgcatcacatcacatcacaacataacataaattttcaaggcagaaatcttgtagtcagccttactgtttgttgacaaggacacggccctgagcacagaaatctcggcagttgataaagccaagaagaaggatactaacttaaagaaatttcagatttgcatctctggcattcagctaatagctctgagaggagatgcacttacagttgagaccggcagtatatattctgaaacattagtgaatgatgccccgagtgggagggtgatcgttagcccgtagtcatgcttggtccac

SEQ ID NO: 606021 - DNA, 183 bp, Homo sapiens
aatcaattatgcgaaagaatattataatatatgaaaagtagagcatgggaatcggctatcctagaaaagcaggtgacaggttaagagattcaatgattatctcatggctggtggtgtatatagaaacaaggctctgatcaaaaacacatcaaggatgaccgggcagctgagtggactgctcaa

SEQ ID NO: 606022 - DNA, 922 bp, Homo sapiens
gacacagtgagaaggcaccatctaccaagccagagagtgggtcctcagacagacactagaatctaccagtgccttgatcttggacttcctagacctccagaacctgtgagaagtaaagtttctgtttatggatgtcttgctctgtcacccaatgctggagtgcagtggtgcaatctctgctcactgcaacctctgcctcctgggttcaagtgattctcctgcctcagcctcccaagtggcagagactgcaggcatgcaccaccacaccctgactaatttttttgtatttttagtagagatggagtttcaccatgttggccaggctggtgttgaactcttgtgcctcaggtgatccaaccttcttggcctcccaaagtgctgggattacaggacgtagagcccaccgagcccgtgctagatctaacatggaaccgaacttcatgactactcgtcctatcatacacatgtgcaaccgaatttggactgcgcctagtgtggcaaccgtcaatcgccatcactacgactacatagtctcgctacaaactccacccacactcacgcagaacaggcatccttctggaccctatcaaactgcaaacccatactgttgtagatccaagtaatcccttgcttcaacgggacaagaaagctaccagaatatacgcaaatcggctggtcgacgaggaatattggtggaaaaacgagtaaatacgctaaaggccccggccacccacataaccccacaccgaaaccacacacaggccaaataaccccaccgacaaaggccaggggaacacaagctagcgaaaacacaagaacccacaaacaacagggctagaaaaactagagacagaacactcagaacgcactgcacgccaaccacgtagcacgcaagaccagccccacaaccacaacaaccact

SEQ ID NO: 606023 - DNA, 241 bp, Homo sapiens
gctgctcaagaggatcccctgccgagatgcatacagcacatgaaacatcgtatctatctgtaggctcgttgagtttctctgacatgctgtagtattaataattttcgatgatttgagaagccttcgcttcgaagcgactagtcctaatagtagaggaacgctccataaaactggagggattatatggatgccccccaccctaccacacatacgaggaacccgtatgcctcgtcgtgcaggg

SEQ ID NO: 606024 - DNA, 178 bp, Homo sapiens
  misc_feature (13)..(13): n is a, c, g, or t
  misc_feature (59)..(59): n is a, c, g, or t
tcggcaccgctcncgtgaactgattgggtctgatattaaagtgagagattaaacagaanatattcaacagaagcctcaccactgtcatcaatgttcatatcaaataatctgacactgtaaggagtttgaggaaattattgcactgtgtcaatggtgatgtgaaagtaatacaagttga

SEQ ID NO: 606025 - DNA, 933 bp, Homo sapiens
  misc_feature (933)..(933): n is a, c, g, or t
gtcgtaatgtctctttttaacactgaatatgttaggtggtttttcttgatggatttagggttaacctagttaataataaattgtttccaggtaattatcaagtttgtcattttataaatctgaagagttaatattgtcatcgatacaaataaagtgaaatctgactgaggctaaaatgtgtgatttttttcttaaaagactgactctatttagatctacttttttttttttttttttttttggaaaagagagtctcgctctggtcacccagggctgggagttgcagtgggcgccatctagggctcactggaaagctccgcctccggggtccatggccatgtcgccttcctctggcctcccagagtagctggggcaacgttattggtattcttagtaagaaaacggggttccaccgtgttgggccaggatgggtctcaatctctctgaccttgcccacctcagcctcccaaagtgcggggatacacgggcgtgagccacctcgcccagccaaaaatctacatcttcaaatgggattccaagaaaggttcaagtcctatatcggaggacctgaatttacccctcagctctctggttaaccccaggttcctgcaccaactcactctttaagaactgaccattttttctgtcgtattctcccatccacaattaatactaaatgtccacatttacacaaaacgaacacacgacgacaacaccagaagcaggggcgggccaaaaaaccccagggagacaaattacgcaccctctcggagaaggggcccaggaggggcaaaaccagcccggcggtaacaccccacggaaactcctgccggcgcccccgggggacacgacccacaaaacccgaaaaacagaggaccccgcgctccgcacccccactcgcaggccacgagaagcagcggcaccgacaccaan

SEQ ID NO: 606026 - DNA, 982 bp, Homo sapiens
gctcgcaattcggcggccccgctggttctgtctcttgcttctagcagtgtttggacggtaacagatccaggaggacttctcttccagccctccgatcgccctccagattgcctctccgattgcaaaacgctcctgggacccagtcttctcagtgcatcttcaccttgcgttcttgggaccgtgctcagccaccgctgtgtttgttggtatagctcccttcttgccgaacacaaccatcgagctcccagattcgtcggcaatgaataattccagctgacgtggagggcagacgtcgaacaggccctggtcccattcgtagccatggaggcctccatacaccataccgtcactcgtgggccttgtagtaggagcgcaatgatgtcggcgtctggacaggcgtgaggaccacttgcttccgcagaaactagggccgagggagaagcgcagagggctacgagcgtctcctgaagatgcacaaatccagggatggcaggcggggcttctcggtcctaggacggtcacagaatgcacgctgaggatgagtggggtagacagcccagacgccactgaataggctgcatgggcctggagaaaaagtggacaggcgctaggatctaaatgcctggggttctggcgaaaggagccccatctctgtgactccctgacaccgcagttcctagattaggaagtgagctatcagaacatggtaccactgaacaatcacagggtggtggcctgaggctggccgcggaatatctaacgaagggaatccaggccagcaaaaggttttgcgcaacgtatctaaagccctggagaaagggttccaacaccccagcaaagagagtaatacacaaagctgcaagaagaacttttcaagacagaaaaaaaacgcgcgccagtaaaacaggcccaagaagcagacagatacggtacaaagagaggcaacgccagacacacagatggatcagagagaagagcaagc

SEQ ID NO: 606027 - DNA, 372 bp, Homo sapiens
gcctgcacaaagcgatacccaatctagtggtttttagcatattcacaggctcgtgccatcatggcagataattttagatcatctttttcatcccataataaaactccatacccattagccgggtgtggtggtacctgcctgtaatctcggctactagggaggctaaggcaggagaattgcttgaacctgggaggcggaggttgcagtgagccaagaccacaccactgcactccagcctgggcaacgagagcaaaactccatctcaaaaaaaaaaagagagagagaatgaaggcctcttcccctactgaggttcttacagtcactgggacatgccagcccctctttggggtactacgcttgggcagggtaccg

SEQ ID NO: 606028 - DNA, 395 bp, Homo sapiens
gtgactatggtgttatgcagaggagctcagctgacgccctgtgaaacctcaggtctgaataagagttctctaggaacctggaatgagtacctgtctacctggagatgatggtctggggtgccaccctgttagaaacctacttacaccggtgaactccttaccctggggtaggtggttgagatgatcgaagttgaagctgggttgggtgagaagttgcctaactccctgcccgttcgtcctcctgcctgctggaaagagctaaagcagatgtcgagcaggggctggatggggtgtgctactcacattttgcaatctgatctttagagttccccgccttatgcgtacaggaggtctgatatcactcagctaatacgagtgtctctctctagtatagg

SEQ ID NO: 606029 - DNA, 225 bp, Homo sapiens
gcaccatagcatgagcccgtctcaggtccctacaactgtaggggcccaggtgacacgagaatgcacagagccctgtccggagggaagtgtgagatcagaccacaggcaggccctccagggtcgccactgcagcctgtgggctccagcaaactgagtctctcagcttctgaccctaccccagccctggcaatgctctcttcactcaggcgctacactgccttttta

SEQ ID NO: 606030 - DNA, 259 bp, Homo sapiens
gttacatcagctcgctaccgttaaggctgcagtgcacagaagctaatatttatgagatgtatgaaaacgcctggatattcaggcagaagtttgctgcagggtgtggggctctcatggagaacctctgctagggcagtgcagaaaagaaatgtggagttggagcccacacacagagtccctactggggcactgcctcatggacctgcgagaatagggccaccatccttcagaccccagaatggtagatctactgacagct

SEQ ID NO: 606031 - DNA, 179 bp, Homo sapiens
agcaaaagaaaacacagtgaagaggcgaatataccccaccttggaaatgctcaccaaaaagaaaagggaaaagtaattttctttagtgtcattttcaaaccacgattcagtttttaacaagatcgcatctacatcacacatagatgcaatcaaaagttttccagtgcatatgcaaacag

SEQ ID NO: 606032 - DNA, 804 bp, Homo sapiens
  misc_feature (195)..(195): n is a, c, g, or t
ggatcaaatccgaaccatcgaacggaatcaggaaatgcctcataaaggagcgtatgtgatctggtatggtcagatcctgaaggatgtgcgatacctgggactatcaggtccccgcagcgtagcaggtgtggtctatatcaggaagcaagatggtcacaggagtgatgtttgttgcactatcacaacagatcttanaaagctcatcgtgcagaggcaccatcagactagtgcacgaaggctataaaatttatgtttgatgagaagctggtgacaggtatggtctgctcctaattaccagcgtatcgttgtggaacatatggcttcgactcatggtcttgcaagagatgtacactacaagagaaccaaaaggttattcccgggcagctccagattcaagaacgtgttgattcctcccagaacgacgaacgccaataatttcctttgtgaggccttcgtccccatcctgctgacccatttttctgccctcttcttagcccaattttcttgttagttaccctctagaatataccttttggagttgaaggccactttagcatggtgaaatggcttgcctcattgccgtgatttgaaataagagttctacaattattcgtacattttattgtagggtagagcgcgtatagtagcacaagttgcctatcgaatttacccccccaattcgcatcacccacgtgttggtacttcatttgcgcagactagcggaagagagctaaaaatgaacacgtgctgagtagctctggacgataaacggacacgggaacaagagaggactcgtcagacaca

SEQ ID NO: 606033 - DNA, 902 bp, Homo sapiens
  misc_feature (892)..(892): n is a, c, g, or t
gcaatcaggcaggagaaagaaataaagggtattcaattaggaaaagaggaagtcaaatgtccctctttgcagatgacatgatgtatatctagaaaaccccattatctcagcccaaaatttccttaaactgataagcaacttcagcaaagtctcaggatacaaaatcaatgtgcaaaaatcacaagcattcttatacaccaataacagacagagagccaaatcatgagtgaactcccattcacaattgcttcaaagagaataaaatacctaggaatccaacttacaagggatgtgaaggacttcttcaaggagaactacaaaccactgctcaatgaaataaaacaggatacaaacaaatggaagaacattccatgctcatggataggaagaatcaatatcgtgaaaatggccataccgcccaaggtaatttatagattcaatgccatccccatcaagctaccaatgactttcttcacagaatggaaaaaactactttaaagttcatatggaaccaaaaaagagccacattgccaagtcagtcctaagccaaaagaacaaagtggaggcatcacgctacctgacttcaactatactaccaggatccagtaccaaacagcatggtaactggtacaaaacaggggttgaacaatggacagacagagactcagaaataaaccacatctacactatctgatttgcaccctggcaaatagatgggaagatcctattataatgggcggaaatggttccctttgaaggtgaggccctctaccttaattttcgagggcctttttcgtaccaactcgaacacgacacggagtgggggcttctacaagggcacagggttcgccgaacaggcgcacttcccaaaaacacagcgcggtgcgcgagnaccagcatcg

SEQ ID NO: 606034 - DNA, 1121 bp, Homo sapiens
gtataaagatagcactaagagtaagaagggccccatgagaaataccaacggttgagggcaaaatgacattctaggggtgcaatcagatgtggtatttagttgttaagtggaaccggggttccgtcacacatcctagtcccacgatagcacgagcacaccgcagacttagatggcctgcactgtacccctagaaggactgattgcatggaggtcagcacagtcccatgccgcatgtgccatcccaaggtactacgacttctcagctgcatattactaggatacctgcatagggctcacaagtttagcacgaggcctgccgagccatgcttagccgctcagcaacggactgggcttattatctctgtggccgacgggcccagtcatgatttagactaagagatagcacgtgagctacctgcactctcctccgaacgccaaagaatagtccagagccatagttgtggataaccaacgagatgaactggttacacaccacgggaccaactcctggggacccattcgcggccacagcggcggtacggactccatcggaatgcgcatcatggaccgtgaatctttggcgggaaacctgggccatacccgttgcctcagggggaaatgacctcacacaacatttgcccaccggactagtctagtaacataggctccaacattacccccccaggctagaaaaaacaccaaggccctgaacagccccaaagagggcggagcggaagaacacaagaacccaatagagcaccgcaaagacccgcacacggaggacaacaaggcaagctgtaaaagggccccgcgagcggcggcccttggccatagggggcatccccgacatggagaagttcaaaccttcgcaccccagaaacccaaacgcggggacccaacacgcatggcatccccacgctatcctaggacagagcgaaaccattctcggtggagagaggctattcaacagggggaaacataaggcgaaagtgcacgtggactaggcctttggacgtcctatccctgtgggcgtaccaaaaccacccccccaacagccatgttaaacccatatgtccttcaccagaccacacttccacgacattgttgaaattcgttcgcca

SEQ ID NO: 606035 - DNA, 178 bp, Homo sapiens
tacgcaggcagccaattcctataattagtagagacagggtaggcaggctgctgtaggactcctgacctcaggcgatccatctgtctcggacttccaaagtgctggaataacaggcgtgagccaccatgcccggcctctagaattttaattctatgaagaagacagattaggtgcctac

SEQ ID NO: 606036 - DNA, 767 bp, Homo sapiens
tcgcgctactgaccctgttgtgggcagtggtctccccccttggggcctcctttcgtcagtgccctagtctccatctcctcgtctaggtttctttagctccaggatcacctgtgtgtgtgtgacctccgctaggcgggctatcgggctcttgggagaccagccggcaggggcggacattccgtgcgtgcctgtgtccctgtgtgacgtgagagcgagagtcccttgcccctgctgtctgcccgagggctgccctggcgcctgtgtaaagggcaccctctgccctcgcgtaagcgaccaggtggagctcttgcgagacttgtgtgagctgcttggctcattttcagccatgagcagacggctgtggtccctgggactgaagcacggactcctagcaccagggtttggaggctgcgaccgaacccggagagcagcttcacactgttcgccagcagaagaggccccacgtgcactccctcggtctgcataccggcttgggtacacaggcccagaggactgggtgtgactcacggacctgtgctgtgatgttgagaagctgagaaataagctccataaggacctgagcacccatgcgcagccctgtcttggtcccaacaataccccagagctttggagtcttggggcccagacccagccctgtcttggtcctgaggctcagagcgtggaattgtgccctgtgaagactgcccgcggaaaaggaagtctgccctagcacatgaagacggcggggtcaaaaggtgaaatcctac

SEQ ID NO: 606037 - DNA, 359 bp, Homo sapiens
taggcggaccgtgatgtatccccaacacctccccaacacctgataaagatatcataaaacaagaaaactgtagactaatatccttcataaataagaacacaaaaatccttcacaaaatattagcaaatcaaattcagtactatagaaaaaggataatacagttaactcttgaatatgggtttgaactacatgagttcacttatatatgcacatttttttcaacaaatgtattggtgttgggcgataacatcactgatgttatcgcccaacacacacatggttgggaggccaggcaggaggatccctcgagcccgagtccagacccagacccagaccacctggcacgtccggtccggcca

SEQ ID NO: 606038 - DNA, 220 bp, Homo sapiens
ctctagaggatccatgggtgctcatcccccggcacctgcctctgcgagcagacccccccaccgagccagcatagcaggctggctcccatccatgctctgtccgaggccatggcagtgcgtgcagatgagggccgaatgcaggagacgtcacaacacagggatgttgctggaactctcaaagccaagctgcgcctctaggcccatgccagacagcacccat

SEQ ID NO: 606039 - DNA, 429 bp, Homo sapiens
tgatgttatcccccacactatgttgaataggagcggtgagagagggcatccctgtctcgtgccagttttcaaagggaatgcttccagttttgcccattcagtatgatattggctgtgtgttggggataacatcacaactgtagactaatatccttcataaataagaacacaaaaatccttcacaaaatattagcaaatcaaattcagtactatagaaaaaggataatacagttaactcttgaatatgggtttgaactacatgagttcacttatatatgcacatttttttcaacaaatgtattggtgttgggcgataacatcactgatgttatcgcccaacacacacatggttgggaggccaggcaggaggatccctcgagcccgagtccagacccagacccagaccacctggcacgtccggtccggcca

SEQ ID NO: 606040 - DNA, 164 bp, Homo sapiens
agagtagcaatgtctaaacaaaatactagcaaaccaagttcaacagctacattaaaattgtcatccaccataatcaagtggaatacatcccagtgatgcaggcaatgatttatttggaagtaaagacaatatatgatgatacacgcacatctaacatgacaaaa

SEQ ID NO: 606041 - DNA, 269 bp, Homo sapiens
atagaggatccctccggtgtctcatggattagcacccgtcaagaccatgacatctacttctaagaggcaacaactctacgtggcgtccgcggtgggtgtcacacatctgagcctgcaccggatgacaggcgtatggggctgcctgtgctgactgctgccttgccggggacccttactgtgcctgggcatggcaggccttgctcgcgttatacagaatcctccaagaggcggacctgcctggaagaacgtcgggcagggaaaaccccatc

SEQ ID NO: 606042 - DNA, 696 bp, Homo sapiens
cttcatcttgcccgttcagttgattgcagcctctagcgagcagctccgactctcgcgtatgtctttgcatcgaatatcgggatgcagaacagacctcgccgtaggaatcagcctcccattccgataagaatctaccttgccagcccgttagcgtatcagcaagtgcttatagagcgccctcggcttacttctcttcctgtctctgccttaatgagtatgtaacactattctcagccagagcctccctaggcgacccagactaatgtataccctagccaaccccttaaacacccctccccacatcaagcccgaatgatatttcctattcgcctacacaattctccgatgccgtccctaacataactaggaggcgtccttgccctattactatccatcctcatcctagcaataatccccatcctccatatatccggaacaacaaagcataatattgtcgcccacgtaagccaatcacgtttattgactcctagccgcagaccgtccgtcagttctaacctgaatcggaggacaaccagtaagctacccttttaccatcattggacaagtagcatccgtactatacttcacaacaatcctaatcctataccactaactccgttatgaacaaactggggtggggggggcgtggggggggggggggtggggggggggggaggggggggggggggtggggtg

SEQ ID NO: 606043 - DNA, 929 bp, Homo sapiens
ggcacccccgcccctagcgtgacatttatcctctagcgctcaggcccctgccgcatcgccgagatccagtgcccagagagaacagagaacccagcatggccccccttggagcccttggcttctgcatccgtgtggttgctgtggttgatagccccaagaaggccttgcacttgtgttccacccacacagagaatgtgctttctgcaaataccagacctcgtaacatcagggcccaagtacggtggggaccaccaagaagtcaatcagaacaaacttttatttaccaagcgtaagggagggtcacgattgacccaaatgatggtataaaagcgggcgttccaaacgccttaaggggggaattgccggcttgacacattcgggggtagcggtctaaccaacccactcctgccaatgggaagacagttggtctggcgcgatacacttttcgcaatcggggtttccccaacaaaccggcacggcgacagagcagttcccctcaatgtgcggggaaaacactttgcaggtgatgggacctctttggccacaatccacttaccgtggacagattgggaggcgctccccctttgagaatcgagctctttgaggcttaaagcattccagcacgcaggagggattttccacacagaggacctataacacttgtatgggactggccgacggactcgcacaggtgttaccccgtggtatatattcaatttccgcctgtgaaacgtgactacagtggccctcaattgtgcgtttggtagcacaggaccaaagttcctacaaaggtctctgaacaagggggcttccaggacccgggtcactttgcatgcactgacttcgggaacccagtggtttgcccgtggaaggtcctgcgggcacaaatatgctaatctggccggatgaactgtgaacctgcactgtga

SEQ ID NO: 606044 - DNA, 224 bp, Homo sapiens
gggacgagcggagctgcgagttccggcgggcgggggccgggaggggccgggggccgggggccgcgcccggaccgcatctccccccaggggggtcggggccgggggatccggtccgcatccacggcaacatcacggagtcatacccggcggtgccccccatcgggtcgggggagtctgatgaccctaagtggggggcggtctaagagagccgggcaagggtaccg

SEQ ID NO: 606045 - DNA, 218 bp, Homo sapiens
gagatctcatagaggatccccatcatggggtctgaatctgagcctgcagctcctggatttcctcttcgtggagtttcttcaacaaaggcaatctcttcttgcaaaatgattccatctttgcgttcaaggtcaatgacgtgccagagcacgcattgtctcacatcctagtctgaaatgattgcatgggtgttattcgtgcttccatctctctgatagca

SEQ ID NO: 606046 - DNA, 444 bp, Homo sapiens
caacaccattcctgtagcagcaacatttgttcacaaatctgactgcatcttgacattgtgtaccagtacattgcgttggcttgggtcacatgacagcgtcatgtcacttgtccgtagtactgtgttggtcatcagatgtttcgggcgattgtacataccaacatccactttaaaaaaaaacaccctggaacatgtatattaacaccactgctacagatattatagtaccgtttcataaacacacacagttggcagttgtatatttggactcagtttttgatagttgcatttttcttagatgcttcatctaaagacatggaaaaccttttagagcattaagtgtttttagtttgacatcctcgacattcatttgagttcatgttgtggtttggaaaaaatgtataagacgttctttgtttgaaaaatcaataaaaaatgtatgca

SEQ ID NO: 606047 - DNA, 452 bp, Homo sapiens
  misc_feature (2)..(2): n is a, c, g, or t
gngcgcactttatcgtgccccgcggatggtgtatcaatgtggatgtaatcgtagaatatataaataataataatataagaagaaatataaacaataaagagaaaacaaaatataaaacaaaagaataaataaacaataaacaaacaataaataataaaagaaaataaataacaaataaaaacaaaaataacaaaaacaaaaaacaaaaagaaataaaattattgggccaaataaagcaaaggaaccattataaaaaaaacctttctcccccgttcctccctattattatttcatttctcactgttttaccttgggggccgcatttgcctttaaccggcccttgccccccaacgtgccggctttttaatgcttatgtcccatctggcccttcctttttccccggttcctgcttattaataagggccccacccgatggggtttttcccaatttt

SEQ ID NO: 606048 - DNA, 231 bp, Homo sapiens
acgatctaacactgtcgtgacctctatacatgtaacactgcatctgtagtcaaatagatcacccagttattcctctcacatacgattcaccgcacaggggacaggttttttttcctcagaccagaaacatccaacgcgcacagctggtccagctgctgatactacaagtcttctgtggggtgaactgagcacacatcacataatggttgtgccctgtttaaacaaccacaa

SEQ ID NO: 606049 - DNA, 220 bp, Homo sapiens
accctgtgatcagaagaggcactccatctagtcttaactttgtctgttttatgcgatggtcctttactcagctagccagctctctcttccttcttattccatcgataaccttgatccaagaatggttcctttaccccccagtcaatacctgcctttcctccagtcatcccctcacatcagcaggaacccttcactttcttcttccattcctttcttcctc

SEQ ID NO: 606050 - DNA, 666 bp, Homo sapiens
tgatggcgcgatgtaacacgagaaagcacataccaaggccaccacacgagctcaccgtgtccaaaaaggccttcgatacgggataatcctatttattacctcagaagtttttttcttcgcaggattattctgagcctttgtaccactccagcctagcccctaccccccaattaggagggcgactggcccccaacaggtatcaccccgctaaatccccgtagaagtcccactcctaagcacatccgtattactcgcatcaggatgtatcaatcagcctgagtctcaccatagtctaatagaaagacaaccgaaacgcaagagtaattcaaggcggctgctgtattatcaattttactgggtctctatttgtaccctcgctacaaggcctcagagtacttcgagctctcccttcaccagttttccgagggccagtctacgagctcaacattttctcgtagccacaggcttccacggacttcacgtcattatggctcaactttcctcactatctgcttcatccgccaactaatatttcactttacatccaaacatcactttggcttcgaagccgcgcctgatactggcatttgtagaattgtggtccgaccttattttctggtattgtcttccattctaattggattcgaggggtcttacccaaacacc

SEQ ID NO: 606051 - DNA, 110 bp, Homo sapiens
agtccgtggccctgacggcaggatgcatggcaacaaatgtgccctgtgtgctgaaattttcaagcggcgtttttcagaggaaaacagtaaaacagatcaaaatttgggaa

SEQ ID NO: 606052 - DNA, 131 bp, Homo sapiens
gggagccaggtaaaggaacagggaaggtcttataaggcaaaactgtggagtcctagaggtgtgtgtgttaacggcaggtgtctgcagcagtggccagagggtcaggacacgctaggctgggctagtcgggg

SEQ ID NO: 606053 - DNA, 345 bp, Homo sapiens
tttaacggccggggtcccctgcccgtgcaaaggtagcataatcccttgttccttaaatagggccctgtatgaagggctccccgagggttcagttgttttttatttttaaccagtgaaattgccctgcccgtgaaaaggggggcataccccagcaagacgagaagcccctttgggggctttaattttttaatgcaaccggtccctaacaaacccccgggtcttaaactaccaaccctgcattaaaaatttgggttggggggccctgggggcagaaccccccctccgggcgggacatgttaagatttccccggtcaaagggaactattatattcatttgttccaata

SEQ ID NO: 606054 - DNA, 625 bp, Homo sapiens
cttcccttctcctggcctacactggccagaggaaccttagatcacagctcgatgcgcgcgctgggatgtgcactggaggatagtgaggggggcagttctgggatacgcacattagagctgcgcgcagccctggaggcctgtcgaaagcattattctaggcctgtgcagtgggactggattgccgtggcgtgtcggggcacagctgtgtcctgcagtcagaccataatccagggggctacccctggactctctgtggccagtggtcatcatcgcagtgggtgtctgtccgtcttccctggatggccttctcgtggcgctgctgcggggcctgcataggagtaactatcgtcttatgatcacgtttgccatctttctgtctcttatcatgttggtggaggtggccgcagtccatttgcgtggcctatgtgttcagacgataaggtgatgtcaggatgtttagatacatcataccttccggcagcagatggagaattacccgaaaaacaaccagatctgcttcgatcctggaccggatgcaggcggattttaagtgctgtggggctgctaactactcagatgggacgaacgatcccttccatgtcgaataaccgagtccccgactccg

SEQ ID NO: 606055 - DNA, 481 bp, Homo sapiens
gcttaaactgaagcaagttcggtggacgccggcgggccccttgatctaaagaaccgactcagggactgcggcgcttgcaccgtcaaccggcgagggtgtgagcccaacagacactgggacgtcggtcatcacgaatactgaagacagaaagcgagaagcaaggagaaacaacagggaaccaccggtagaacggtgtcctcttcgagacagtacttcaagcatacgtacgaacattacaaggcccgaactagacacgggaggacaggcaaatcaaggatcaggagtgtcaaagattcatgggacccagaagatcgtacagccctcgatacgcacaatttcctacactgaattaggaaagacggccaggccattcggcattcaaagcaccagaaagcgtccttccttaatgggcttcaagaaagggaaacacgaaaagttgcacggtcggttccaagggggtcggaggggaacatcgtataga

SEQ ID NO: 606056 - DNA, 768 bp, Homo sapiens
ttctttaaaaaggcgtcaatacttgagtgacttatgacttgggacctgtgatggcgcacttaacatttccggacagttaaatctgttgtacctggaacttattaattttggagagaacagccttgtaccatatgatctagaagtaatgctctctcacgtgctatttttttgggtgataatggatgacatacgggaggaataaactatcgtgggagctaggtccagggtggcatctatcatgaagactggtgcatgggtctatactggatagttctcaccaacatgtggtacattatattattgccacattgtagacatttttcattgactcctcaatgttaggtactcttatcatatgcctatttggttcgccttgccgaggcactctgatttaggaagcttatcatttacggtactctagctatttgggcatttgccgtaaatgagcctattacaattgattgccgacgtttaaacggctgaggtgggaaaaccttgcatttaccaacttgttgcttttaaacaattcccctttcccaagggggggttttgcggacatggccccaccgaacgcttttctcaaaaatgcttaacctgaatggggaatggaaaatcttggggcaatatttcctaaaaaacgggtaaaattttggctagccaggttatttttaaccaaagagccgggaatcgtagggccctctatatttaaaagatttacccgataagggttgggggtgtgccttttagaagggccatttagacgtggct

SEQ ID NO: 606057 - DNA, 117 bp, Homo sapiens
gagctcggtaccaaaatacccgattcatgagaggcactaatgataacctcctcgccattgctgccttcgtctccgcggcctcgttgtcccacggcccggccacgcgcgcaggtttgg

SEQ ID NO: 606058 - DNA, 102 bp, Homo sapiens
ttaccgaccgggcgtgacggactgtgacccgaccggtgggggacgacactaactgactggggaacgggactgtggtgtacgacgtgacggaacgactactga

SEQ ID NO: 606059 - DNA, 116 bp, Homo sapiens
catgatcttactgtagactcttgactcagatgttcactctgactggaagagtggagagtactggattgacccaacaaggctgcaactggatgccatcaaagtcttctgcaacatgg

SEQ ID NO: 606060 - DNA, 375 bp, Homo sapiens
  misc_feature (258)..(258): n is a, c, g, or t
cagcagcagcactagaagcagcagcagcgaggggtgcctcccggatctcatggccatatgggattacccaaggcagacccagaacgctgtcagttgttgaccattcctccaagctggtggtttaaccgcgagcgcacagcatctacctttctcagccagcatctctcttctctctaaagtttttacagatattggctgaggcacggtttcgtcatgcccacgacccacagcgcatatgctatatctcacagatatatngcgcggccctatttatctagagtgctttcgcactgcaaaggcacactcagcagcagtaaacagacaccccacagggtgaagtatttcttacatcattctatcgtcttcacaagaggt

SEQ ID NO: 606061 - DNA, 833 bp, Homo sapiens
gctttctgctgcgacgaacgacatcggacatagtgcgcgtgggcgatgtgcagcggggtggcggctatcgtgggcgccggcgaggaggcgcggtgcgccgggcgagctgcactgcatcctcatttcgaaccccaacgaggacgcctggaagggatcccgccttggagatagctcagcctgcttttgcgaggagagccgcagcgttaacgagctggtgtgcccagcactcaccctccccgagtgacagcccggcggggactttggtctgatcgacgtggtgacgccccggggcggcctatgagcgcggctggcgtctgtggaaggggccctccgatggtgtgcccgtagttgcggcgtggagactggcatggcggcggggttgcgcctgtgagagcgaggacggcgcggcctcccgaggaggggcccggtggtcggcgagggccatggctggtccgatctgaggactctgcaagatgtctggagacggcgtgttcagccctaggaaggcgcgtaggatagagacgtaggcctcagggccaggaaggacagactggccgggcgggcgtgactcagcagcctgagctcggcaggaaggagcgggccctggacttggtacagtttgcaggagcgtgaaggagttagccgagtgtgctgcttgttcaaaacggatccgggcaatgctccgtttgctagaggatgctgctgttgaatgcgtttgaattttacaataaacgtttagatgacaaataagaaccgaactgagactcaattgctagacagaaggaggggaagcgccacgggaaaccccagagagggcccaaaaaaaagtaccg

SEQ ID NO: 606062 - DNA, 732 bp, Homo sapiens
gtattagcttcatatcctgtacaagtaaagcttattagtctaatgttttgttcctttcccatcctacaccccgtacctcttcctgtataacgtctggttatctgcccttaatgtcacttacattcttattttctagctttaaagaacactgtcatgcggtagttgttgctgtataatttacagatcatatttattggactgagttttccgtagaataattattcaactatcgattgtatgtttgtatatcaaaagctgtcttcgattgtgtgtttccctgaaatattcatatagactgtcctaggaagtatgacttgtggcggacataaaaagtacgtttaataatccacaattattttggttaagaaggaagcattcagcattatatatattatgtgtatggaaaaccacttgaatgattttatcccttgtcgcatctggcgtagctacagagcctctcctcaaagatgctagaataatctatgaaatataatcacgaatttgggaatggctgattaaccatcgcatactagtgttgtgatgtgcatatacctagtgtctagactgtttgttttcacctataactcagtgtataccttttgtcaatgcaagacttgtatctttgcttcatctgcagtattttgcgagattttatccacagctgtcattttctaactgtcagaaatgataccgccttttgtcattgcacactattttttaaagtccagaaat

SEQ ID NO: 606063 - DNA, 227 bp, Homo sapiens
cgcggatgagctctgcgctcgacgagcacgggcattcgccgatggcaggcccatccgacgatatagtggtcagccttctatatgagcgctagccaaccagcagagacctaatacttgagcattatcgctattctaggttgacctaggagatacatgttgtcccccgcgattcatcatgacaacccatactccctaggactctacagactcagtcgtcagcgacagac

SEQ ID NO: 606064 - DNA, 634 bp, Homo sapiens
ggactcaagcgaagtagcaggttcgtgggttccgtgaatgtttcatgtgctgtttatttgccttcgtcatgctgcgacctgggccttttctgcttcttcgacgagcttccattgaccatatctgcagtgactattaacattctgtggcactttagcttgctcttttagcttcttctaacaacatctcagctctggcaatgtcagcagcagtatgctgaagcaataacctcgtacttgaggaaaggctttcaactcgtctcacgtatagtctctctgtcatgtcctgtatcctgctgtggggtgctaggcatctccattttcaatacttcattagcaactgcttcaatgctgtccgaatcagcactatcctgggtcaaaaagtttctgatttgcttgattagatttctcagctcctcattgctcttgtccattttttctttggtagcatttgtcttcaacagaatgtcttcagcactttgttttgcctcatctgccctcagttttgcttcagagaccatcttggagagctgttccacttcagccagggcactcaggacatcttggtccaagtccatggctttctgccaggggttgtgtgcaaaggtagccagaccacaaaggcaaccccccacat

SEQ ID NO: 606065 - DNA, 1013 bp, Homo sapiens
  misc_feature (1)..(1): n is a, c, g, or t
  misc_feature (20)..(20): n is a, c, g, or t
  misc_feature (28)..(28): n is a, c, g, or t
  misc_feature (42)..(42): n is a, c, g, or t
  misc_feature (59)..(59): n is a, c, g, or t
  misc_feature (65)..(65): n is a, c, g, or t
  misc_feature (71)..(71): n is a, c, g, or t
  misc_feature (195)..(195): n is a, c, g, or t
  misc_feature (229)..(229): n is a, c, g, or t
  misc_feature (248)..(248): n is a, c, g, or t
  misc_feature (326)..(327): n is a, c, g, or t
  misc_feature (392)..(392): n is a, c, g, or t
  misc_feature (397)..(397): n is a, c, g, or t
  misc_feature (456)..(457): n is a, c, g, or t
  misc_feature (464)..(465): n is a, c, g, or t
  misc_feature (496)..(497): n is a, c, g, or t
  misc_feature (511)..(512): n is a, c, g, or t
  misc_feature (519)..(520): n is a, c, g, or t
  misc_feature (608)..(608): n is a, c, g, or t
  misc_feature (697)..(697): n is a, c, g, or t
  misc_feature (702)..(702): n is a, c, g, or t
  misc_feature (718)..(718): n is a, c, g, or t
  misc_feature (780)..(780): n is a, c, g, or t
  misc_feature (894)..(894): n is a, c, g, or t
  misc_feature (900)..(900): n is a, c, g, or t
  misc_feature (936)..(936): n is a, c, g, or t
  misc_feature (1011)..(1011): n is a, c, g, or t
nttgtaacctttacaggaangcatgatnaaaaattgtaaaanatatcagtaagcatatnaaattncagcantcttttggacagtaattggtgttgcatgagggactaagcatctatgtagaacagacatgtcttggaatacacagtttacagattgaatcacaaagccatttcctaagtgattttcttcatatanagataaaaatatctttacatttaaaaagtatgcngtatagcacattttcagtnatgtacacagtttaaaagtaaaactatatccatgccagtgtctgttttaaatgcaaaaagtcaaagtaggtaacaggnnggtaattaaagtgtcaggcagactggaagaggcaaaaatcaagcagaggtccaataagtgtatgnaaaanaaatcgtaactgaaggtttaagaaaagtccccacacgcagaatcacaatatgccgccgnnggcatannaagcttttggatataccaggcagctttctgnnacgactcaggtttnncgggtgnnattcctcattttgagttcgagaagaattgtgaactttattccagcaaaaatacttcaattcttttttattaactgccctcctcccccnatctttcttttctggggcaaaggggattgcttgggattagggtccaaaagcttcctgggcagggggggagggggcccatgtggtcacangcatnaacaagacggtttgcnaagttcctttaactcgaggcaggggggtcagggttttgcaagcaaactcttgattagggctncacacaaatgggcctcccattttcacagccccctcccttgggagggccccactggatccagctgaaaatggggaacacaaatgttggagccaactaaaaccaccctgggtgatnggattnagtttgggattcagggaaagcgtgatttattcttgnaaaataaacgaagctgaaatagacatgctgatctcattcagttggatgagaggcagggaaagctggcttccaggnct

SEQ ID NO: 606066 - DNA, 400 bp, Homo sapiens
  misc_feature (23)..(23): n is a, c, g, or t
  misc_feature (327)..(327): n is a, c, g, or t
  misc_feature (368)..(368): n is a, c, g, or t
ggcacgagcttggctctgctctntcgtcgtgtcctccccactgacccccggctaccactggtcttttcactgtctccgtaagtttttcctttttcagaacgccatatagttggaatcataaagtatatatagccttttcacattggtttctttcactggataatatgcatttgtttcctctatgtcttttcacagtttgatagctcatttctttttagcatcgagtaatactccattgtctgggtgtacaacagtttatccattcacctgctgaaggacatcttggttgattgcttccaagttttgggcaattatgaataaaattgnctataggattatccatgtgtagggttttttgtgtccatttnaaggcttttcaactcctttggggtttaaataa

SEQ ID NO: 606067 - DNA, 894 bp, Homo sapiens
gggccagggcggtcgccgtcatggtgttgctctgtttcgggctgctagaagcagagtcctgctggtcagcgggagcagtgcacaaggccatcctgatatttgattgcacgttgcgtgacaagctgaggtgaggtccagatgaggatcgcccagtcatctggaattgtcggcggagcgcgtcccctgtgctccaggtcggacttagcatgcggggatctggtcaccggcaatgggataacgaggacacaagctgcgtgctcaaagaagagatcgataccagggagcagctcttggacattgacggagataccagtatcagacagcctggtaggccatggttctaagagtattgagttctaagcccagagtcgaaatgaacaggtgatggagggggctggcagtttgcggaagatgagtgtcctagaacataggattgcacgatggttgatcgttcattggaccagaggtcggagatggatgcgtggaggagacgacatcgcaggtcgctggagtaaccaagaggaagatcaaaatgaaggtccattgggcaggatggattcaccgtctagggaggatggaaagcgggctctattcattggacggaacgttgatgcgccaatcttctctgcgattgcaaaaattagaagcctggacaagacggggttcgccatccagaggccacctgttcctttgaggaagcatccacacgatgaagtgatcgcctgggcaatgaggcaacgggacccctgtgcacaggctggaggtcgccgatggaaagctctcgttcaacgttggtcctctgctgtgtgtggaactccacgggcggattgccctggggacttgtgtccccacagaagagttcgggtcactggcacgccccatgacggtgtcctg

SEQ ID NO: 606068 - DNA, 104 bp, Homo sapiens
  misc_feature (48)..(48): n is a, c, g, or t
  misc_feature (72)..(72): n is a, c, g, or t
  misc_feature (78)..(79): n is a, c, g, or t
  misc_feature (104)..(104): n is a, c, g, or t
gatctacctgcatataacagtctctaagtttttttttcaatcttgcantttgataattttgattttggccanattagnntaatttgggactatcctgaaacagn

SEQ ID NO: 606069 - DNA, 466 bp, Homo sapiens
  misc_feature (6)..(6): n is a, c, g, or t
  misc_feature (66)..(66): n is a, c, g, or t
  misc_feature (85)..(85): n is a, c, g, or t
  misc_feature (97)..(97): n is a, c, g, or t
  misc_feature (179)..(179): n is a, c, g, or t
  misc_feature (184)..(184): n is a, c, g, or t
  misc_feature (218)..(218): n is a, c, g, or t
  misc_feature (228)..(228): n is a, c, g, or t
  misc_feature (240)..(240): n is a, c, g, or t
  misc_feature (242)..(242): n is a, c, g, or t
  misc_feature (250)..(250): n is a, c, g, or t
  misc_feature (264)..(264): n is a, c, g, or t
  misc_feature (296)..(297): n is a, c, g, or t
  misc_feature (299)..(299): n is a, c, g, or t
  misc_feature (309)..(309): n is a, c, g, or t
  misc_feature (349)..(350): n is a, c, g, or t
  misc_feature (384)..(385): n is a, c, g, or t
  misc_feature (387)..(388): n is a, c, g, or t
  misc_feature (453)..(453): n is a, c, g, or t
gctagnagctggtgggcaaacactctgccctgctggagagctgccaggccatgcccgggcacaggntaatggggctcctggctcngtcctgctagcngtgcccgggaggcgtagaagatgcacacatgcggcacctgggcctgacgactcaccagcccacgtgggagcgtgtcctcccncaacnataagacacaataatccaacaagaacccaaccantgatccttcnccccaaatatancncaaaaaanagaggaaaaagaanaaaataataagatcataacaaaaaacacatannanaaaaaaagangaacaacaaaaataaaaaaaaaaaaaaaaaaaaaaaaaannaaaaaaatacgaccgcggcttgtgctgcgatatnnannaaaaataaataaaagaccccacagcaggatagacccaagaactagcaaataacaacacccaaatnccagcagaaccac

SEQ ID NO: 606070 - DNA, 134 bp, Homo sapiens
tccacggtctacggctccacggacaggcaatgacggacaaactccgtgcagtagcgaacgctacatgtgaagtccacaggactgcacctgcgggctactataatcagagctagcttcctcaaacacccgcggaa

SEQ ID NO: 606071 - DNA, 1344 bp, Homo sapiens
  misc_feature (104)..(104): n is a, c, g, or t
tggtcaccagaaaatattagtgactttaaccagggttttcaaaatctcggggcctttacctttaacagggtttcaacaacaagaatgtggcatctcaaataganggcaagaagtttagacattgtgttttaaaaattacacacatgtgcacacacacacacaaacatttttatagccattatattagcgtgtctcgtgaaatctccttctcaatataagaagaggagaaggccaccacacaatattaccaacacactctccacacacaaactctcaaacaacccatataaacacacacccttgcgtgtgttctatataacaaggggcgacgacaatttacaattttatactctactatttcaaaatctccgagtggaaaactctcgtgcgataaggggcccaggggacattattattataaatagatcacccattttatttcaaaagtgggtgaaatcattctgcgttgcaaccacatatatgtgcaaccgcgtggaggcgcggcttcaacttatcaacacaatgtgtgtgtgtgggcatcaccctattaaaaagacacacaacaagatgtggaacatctttctccacacacgaagtctatcaccttgtggtggggtctcctctccaaagagaaaatattattggtgtcttacaaatcatccaatagtggtggcgcgggagcacactcttacaaactaatacacctttcttcctggtggggtagtgagaaccccaaaagaacacatcatcaccacagaacaaaacaccacaccacacccagacaaaggactacaacactataacacaccacgacgacaacacataacgaaacagagcataataaacacgagagcagaaagcgaaaagacgaacacagacgaacaaaaaacagaaaagaaaacaagaccaacgaacagacgggggagtggcggagaggaacagcaacaagtgagaaacaaaaaaatcacaccagccgcggagctaggagagggagggagacaaacacaaaaaacaacaaaagaggagaaggctgaacactcaacaacgaggaacctaaagtagtacttcgagagaacacaggagaaacacagagtggggagcagcgccccccatactcaaatgaggagcgtagggagcagcagacacgaaagataacaaagcaagtagaccgcagccagcgaacgacggagacggcaggtgcagggagcgtcgtgtaggtgtagactacagaagaaaaaaacgaaggagaagaaaagaaagaaggacggcgcagccacacacgccgtatgagagataagacaagaagtgggagagctgaaataagcatatgaagagagaagacaa

SEQ ID NO: 606072 - DNA, 356 bp, Homo sapiens
tgttgtctgtggttctgcaattttccaaagttattcaaaagtatcaggcatgggcgatgtgaaagtgacctgacctctaagatgtgttccacttcttcctcgtgagattttgaactctgagacgtcatatccgtgaatgttgtgaatacccgtggtgtgaaacacaaattcagtgaaagcgatccctgcctcaagaaatgactcttccctatcagtgcttctatggtgtcattctcaaggtgtttcttcatgaggtgcacttccacagtgtttcttatgtgccaataccaccagtggcctctgcacaaagaaccccaccactgaataaaagcgcaatataaattgtgatgtgttaa

SEQ ID NO: 606073 - DNA, 186 bp, Homo sapiens
cgtgagacaaaagcagacccataatttggaatatatagtagaccttatacaggatgaaggaggagcatcccgtggcatgccaatgaatcttatctgatgggagacatgtacagatatagtgcatttatgtaactgaatgcaagatcaacaatactgatctagagtttaaaagtgcatgtacattag

SEQ ID NO: 606074 - DNA, 514 bp, Homo sapiens
  misc_feature (72)..(72): n is a, c, g, or t
tgatagggctatgtgtcgccaggctgctgagtgagtggtgtatctcggctcactgcgactctgctccctgancaagcgattctcctgctcagcctcccgagtagctgggactgcgggtgcctgcaccacacctggctagtttttgtattttagtggagacggggttcactatgttggtggggctggtcttgaactcctgaccttaggtgatccacccagcttggcctcccaaagtgctgggattacaccatgcccgacctgcaagaccagataaatatttggcctgctccctgcaaggagggcctaaacacacaccaaggagcaagtgacacacagatacaagcttgggtcagagttcattctgctgggacccacagtgatatccaatgtgcactgccagtggtgtggtgcctgaacggggctgctcagtgcctctccttcctgcctgtattctgagcctggccccagcctgacagacaattctccaagccaaccagcattcttccagtagagt

SEQ ID NO: 606075 - DNA, 907 bp, Homo sapiens
ggaccttttcgcaaaccgttactggaaaccttaagtaagccagtggctaacacagaaaagccggttgcccacctgcattaatggaatctggcataaaggaaaagaaaaaggtacaaaagagagcacggaaagaaaggcaacgaaaaacagggaacaaacgaagaaagaacaacagaaaagagacggagaaacaacaaaggaaaaacagaaaaagaaaaaacaaagaaaaaagagaaacacaaagagaaaaaggagcaaagaagagcgaaaagaaaggggaaagagaagaggacaaacagagccgagaaggaaaaaacagagacaaagaaaaaaaggaagaacaaagaagcaagaaaaaaaaaagaacaggaaaggaagaaaaaaaaagagaacagaaaaaacaaaaaagagcaaaaaaaaagaaaaaaaaagaaaaaacaaaagaaagacgaaacaaaagaaagaagcgaagagaaaaagaaaaaaagaaaagaaaagaaagaaaacagagaagaacggaagaagaaaaggaaagaaggcaccaagacgaggaagggacgaagagggacggaaaaggagaaaaacgagaagacacacaagacaacaagaaaagaggaaggaaggacgaagaagacaagggagagacgagaaagagaaacgagagagagaaacgcagaagaaaagaaaggaacagagaaaggaagagagaaaagcaagagagaaggcaaagaggaagaaagcaaagagcaagaaggccaggaagaagcaaagaaaacgaaagaaaggaaaagaagaagaagaaaaagaaagaggaaaaaggagcgggaaagaagaagaggaaaagaggggaagaagagagggggagaaagagagaaagaagaagggagagaaaagagggagaaaaaga

SEQ ID NO: 606076 - DNA, 112 bp, Homo sapiens
tgacaggcggtatctaaccgactgaactacgtccagctttcttaccctcaccggcaggacgtcggttacgttcctgcacgcgtgcgacacttctacgaaacgccgctgaatc

SEQ ID NO: 606077 - DNA, 959 bp, Homo sapiens
gtataagcaaatcatcctgtcgagtgtaaccagtgtccacgtacttgaagcttctgggatcacgaaaagtctattgaaattggatgcccattcataactgggttggggcacatctagacatcatactgtgaaaagacgacgatctacacaatctacgcttgcttgctgattacactggacctggggtcgtctgctcttctccccttaccctcccgcctcccaccctcgcgtgcatagaacaagcgccatctagcctggggggcttgtgtagagtacatgtgagggttgcgcggtctgcatggcgggtgggacttagcgtgctagggttgtgtgggggctgtatcagtctggcatactcgctggtatactcttacttcttaaaggttgactgcccctttctcctaaccatcattcttggtcctccagcgctccttcgcaagttccccgtccctgtgtctctgaggtcttgatagtgtgtgaactctccctccatctctcctctcgggccgtagttgggcgggagcgcgggtatgcgcaattcttcaccggattgttcctcccactgatgctttcgggctcggccccacgctgtgatcccttggggcgttgaatctcccctaagcgctcgctctcgtgcggatatcgcctggttttggcttcccggggctattagacacggagaaactatggcacatagacacacttaccggtgtcttaatggaccaagaaaagccaatcagggtaacaggttgggaaaaggagccttcttgaacgctccccattgtaaaaggttgtggggaaacccatatgtcacttcaggttctcccaccagggcttggggacacctgaattaatttggggtccctacaggccctagagcaacgctcatgcttgtcaatcagagtggaatgcatttgagttttaaaggtcaagggctgtagaaaagggggggaagagtg

SEQ ID NO: 606078 - DNA, 186 bp, Homo sapiens
gaccccagaggccactagcctcatcatctgcctttcatagatcggaactcgtcagtggggctggccataggcaggtctcctcttactggggaggttgaggtgggaggatcccttgaggccaggagttagaggctgcagtgtgttatgattgcgcctgtgaatggccactgcaccacagcctgggcg

SEQ ID NO: 606079 - DNA, 200 bp, Homo sapiens
caaaaaaaaaaaccaaataaaaaaacttataatcaaattaacttacatccggtagcagttacttggtatagggtataaggaaatcaagggaggatggagagtatgcaggaggatgcgtgtaggttatatgcaaataaatggccatttaatataaggggatctggagcatcctcgggaatatgaaggggtagggggcaggg

SEQ ID NO: 606080 - DNA, 152 bp, Homo sapiens
  misc_feature (116)..(116): n is a, c, g, or t
  misc_feature (118)..(118): n is a, c, g, or t
  misc_feature (132)..(132): n is a, c, g, or t
gagctccacgctgatctgaagatacaggagagggacgctgcctaagaaactaacttgacggttggacgaagatggggaaaggacgagactcatacgcaacctcaatgtcatgcttntnggggtacacgatancgcttacccaaagagatagg

SEQ ID NO: 606081 - DNA, 598 bp, Homo sapiens
  misc_feature (19)..(19): n is a, c, g, or t
  misc_feature (80)..(80): n is a, c, g, or t
  misc_feature (111)..(112): n is a, c, g, or t
  misc_feature (115)..(115): n is a, c, g, or t
  misc_feature (120)..(120): n is a, c, g, or t
  misc_feature (135)..(135): n is a, c, g, or t
  misc_feature (155)..(156): n is a, c, g, or t
  misc_feature (201)..(201): n is a, c, g, or t
  misc_feature (247)..(247): n is a, c, g, or t
  misc_feature (252)..(253): n is a, c, g, or t
  misc_feature (304)..(304): n is a, c, g, or t
  misc_feature (306)..(306): n is a, c, g, or t
  misc_feature (369)..(369): n is a, c, g, or t
  misc_feature (411)..(411): n is a, c, g, or t
  misc_feature (573)..(573): n is a, c, g, or t
gccaggaggagggggcagncccaggtaggccaaggggaggcccaggcaggaagaggtaagccaaggcaagcagacccacnaagggtccctgaaggccagcccttgagaagnngtntaagncaaagggtgagtgcncagaccaaagcctaacccanngaggcagggttgagacccggttgggggcacttgaagcctaagggntggcatcactgggggccaccccgaaccactgccggaacaccaagcntatcnnccggttagactccaacagcccctagaaacaggcatggaggtggtcaatctncncctccaggtggtccagacaggagtagaactgagatccagcatggagtaagatggcagcgtatnctcaagccctttgaacatgcagcagtctctgcctagaaagtnctgggtcctcccaactcccttcccttcatctcctcctggaagagtcccacacatccatcaagtctcagtatggatgtcaccaccgggagcccacccaatgccccagactggatcaggcctcaatacagagccccaagccctcctcagacctccacgaccttntctccaagattaactgcagtgctta

SEQ ID NO: 606082 - DNA, 126 bp, Homo sapiens
cgcatagagtaccggttgcggcgcgagcgcaacaacatcgcggtgcgcaagagccgtgacaatggtccaagcagctgcaacgtgagagacgcagcagataggtgctggcagctgaccacgtgacaa

SEQ ID NO: 606083 - DNA, 284 bp, Homo sapiens
catgtgtcagtattttccggttgatagttccctcaacgaccgttgctctgcagcaatcagtgtaaatgcgcttcgagcaatgttgcatgatgatgcatatagaatagtggctttggtagcacagaggatgccccaagaaactcatggcgttgaaaccacacagtactcattactgtaattaattagctgtagcattctctgtctcctctctctcctcctttgaccttctcctcgaccagccatcatgacatttaccatgaatttacttcctctcaagagtttgg

SEQ ID NO: 606084 - DNA, 216 bp, Homo sapiens
ccgaaatatggtagtgccacattagagtgttctcattgaaatacttgcagcttatattcatccaaaagaaaggtactcttgatagggtgatcaaaggggtacttggacctatgagtgtctagaagctcgaggcgcctgtctcagcattcatccagtgaccatccattcgaggagcaaggagatagacgactatttgtcatcctctcttccggctct

SEQ ID NO: 606085 - DNA, 540 bp, Homo sapiens
  misc_feature (57)..(57): n is a, c, g, or t
  misc_feature (65)..(65): n is a, c, g, or t
  misc_feature (142)..(142): n is a, c, g, or t
  misc_feature (153)..(153): n is a, c, g, or t
  misc_feature (218)..(218): n is a, c, g, or t
  misc_feature (236)..(237): n is a, c, g, or t
  misc_feature (256)..(256): n is a, c, g, or t
  misc_feature (380)..(380): n is a, c, g, or t
aaaggctccttaaggcctaagtaactgaagctgtggaatgtttgctgtcccctgaangctgagtntaaagaaaaagactgggaagacttatgtacctggccaagcccccagcatcgcagaactcacattcaaaaccctgtcnagtaatgctcnagcctgctggagcggagaaaacccagaagccaaaagtgctatttgacagagtggcttgtcaaggngaagtagttcgaaaaacnntaaagctgaaaaaggcctnttaaggatcaaagtggattcggcggtacaagaacttcttcagctgaaggcacagtacaagtcgctgacaggaatcgagtataagcctgtgtctgctactggggcagaagacaaagataaaaagnagaaagaaaaagaaaataaatctgaaaagcagaacaagcctcagaaacaaaatgatggccaagggaaagactcttccaaaagccaaggcagtggcctgtcatcaggtggagcaggagaagggcaggggcctaagaaacagaccagattgggtcttgaagc

SEQ ID NO: 606086 - DNA, 684 bp, Homo sapiens
  misc_feature (401)..(401): n is a, c, g, or t
agtccttcaatcatgcatcaggctctcaggctgtcacatgtcaatcatgcctagtgtgagcatcgcatagtatgaaggtatactcgcttgtggctcacccgcatagatgcacataaagttcagtgcccgtactaatctctctagcggatctggagtgcactatagcactgccatcaggaaagaccatgttcatgtcttcatagaatttcaccctcacttaagtgtccgccagtggtagtgcattccggcctttgcagcatggacagctaccgtatcaatgagcatgtggatgcttggatgacagctcgcttactcagatacgcagatcattagaatgttagtctcaagctgttcgtgatggaaggactcccaggtaggacaggtttcataaaaaattgtgntacttcaagagtgaggcgtggtgcggtgtctcatgcctggaatcgcagctcttccaaaggattaggtgggcagatgtctaggtcgaaatagtcaggccagcatggccaacatggtgaaggcatgtatctgcaaaaaatagacagtaatagtctaagtgtgaaggtgcaggcctatagtccgagcggtaaggcaggctgaggcaacagcatggcttgaaccgggaaaccataggttgcagtgagccgagactgcaaagtgtacgccagcctgggtgtcgcaaca

SEQ ID NO: 606087 - DNA, 325 bp, Homo sapiens
aggcctccaaccctgcttgcaggggcaagcttgccaaacaaggtgtaccttcccggtaggcacccagccaggcgtggggaggggtcccctttttaggtggaacgcctaaaaatggagcctcccaaaggggtggtggtccgcttcccccacggggcctgatttaagcctgaaaaggacccaaaacccttttcctttccttcccaggccctttgggttttgattttttttttttttaaaaacaaacaaacaaactggtggagattatgggtgaaccccccaaaagggggttttttgccttcaaaaaaaagtccccccgggaggggga

SEQ ID NO: 606088 - DNA, 220 bp, Homo sapiens
ctgtgtggtgtatgaggagaaggcatgcaagtatccctgagagggtgcttgagcgacatgtagatgaggagcttttaactcctaaggttaatgggcctcatattgatgtggagtagccacatgcaagggttcatagagtggagtcatccattcaggaagagtcttccaaagagggaagaaagcacactatgaacccttgcatgtggctacaccacacaat

SEQ ID NO: 606089 - DNA, 133 bp, Homo sapiens
cgaggatctccatcacccctaaatttattatgctgttgaatatgatactttggaggagagagtgtgctcagaacttagacgggattgggtaggccaatgtatgctaggtgtacaatatattttatgaatttat

SEQ ID NO: 606090 - DNA, 157 bp, Homo sapiens
tccctacctcacgaccaacgttgacccgtgacgggtaactactgactgtggttgactgtatatatgggctgttactgtcagttcagtgttttaatctgcacgcaggcttatgcggaggagaatgttttcatgttcacttatactaacattagtcctt

SEQ ID NO: 606091 - DNA, 365 bp, Homo sapiens
ccagtgagggctcccaggtcaaggcgcaggcagggtcccgtgctcccctggggtgccccacccctcacaccgtgtggtaccccgcaggcacggcgcggctgcccgaagcctcccagagcacgctggtgctgaagcaggcggtacgcaagccgctggaagccgtgcttcggtatcttggtgagcagccaggcgtgctggggggctccactacattgctgcaggcagcttctcacccaagctcgtgcactggtgtcccagccttctctagctgggagctcctggacacgccccagggcctggaactgtcatgttgcggttctctgcaccgtgccaggctcaggcagaaccactgggacccaggctgc

SEQ ID NO: 606092 - DNA, 253 bp, Homo sapiens
  misc_feature (113)..(113): n is a, c, g, or t
cccacaaagaacgtggggtccaggttctttttgccccttcccagcacatgcagaatgactccagtggttccattgtcccctcctgccctgggtacctgcttgcctttttcagntgccccccctcccctggggtggcccactcacccccagtggaagggcccgggatttgcacttcctcccctttcacctacctgtacccctaacctggccttagactgagctttatttaaaaataaaatcgtggtggtggtca

SEQ ID NO: 606093 - DNA, 364 bp, Homo sapiens
gacggatcccggagttccctttgtcggtcttagctatgaagctatggttttaacatcgtaaggcaaagaatctggctttcaattagcaacaaatagaatggtgctgtaaatgtagcagcattaaaaaatagagtaccgtatttctgtaacacttactctctagtaaggacttagggataacgataataactaaagggctaataagcaagagcacatcaattcagaacttggatgatagcacatcaggcaacatggggcaaatgcaaaagcctccataaaagaaaagggctaggcactatcaatttagcaaagggagatactcaaagaccgatcatatggaaaagtttatagacaaagggaaaca

SEQ ID NO: 606094 - DNA, 313 bp, Homo sapiens
  misc_feature (46)..(46): n is a, c, g, or t
  misc_feature (52)..(52): n is a, c, g, or t
  misc_feature (93)..(93): n is a, c, g, or t
  misc_feature (249)..(249): n is a, c, g, or t
tggctaaacagtacatcactgcactgaacatcatccactacatgcncgacangtacagctacgaagcctctctgatggcgctgcacgaccgtnacgttatccgcaccatggcgtgtggtatcgctggtctgtccgttgctgctgactccctgtctgcaatcaaatatgcgaaagttaaaccgattcgtgacgaagacggtctggctatcgacttcgaaatcgaaggcgaatacccgcagtttggtacantgatccgcgtgtagatgacctggctgttgacctggtagacgtttatgaggaaattcagaaactg

SEQ ID NO: 606095 - DNA, 295 bp, Homo sapiens
ccccaaaagaggggggggggggggggggggggggttttttttaccaccgctttttttttttccccccctttttggggggggccccccccccctttttttttccccctttaaaaacccggggggggccccccccccccctttttttttttggcgggggggggggggatttttttttcccggggaccctttttcccctttggcccttttttggggccccttaaaacaattttttttcaaaaaagggggggggggggggcggggttttcccgggttttttttcccccccgggccccga

SEQ ID NO: 606096 - DNA, 103 bp, Homo sapiens
tcagctcggcccttctttgccggcgcattttagtattttggacatactggtgagtcacgcccatggccaggttgcggtcgcagcggtaggtgtcgaagccctc

SEQ ID NO: 606097 - DNA, 137 bp, Homo sapiens
cccgactagcccgacaggtccgctagcccgacagcccgactcccgactagcccgacaggctgccttctgggtgatgagaatgttctggaatcagatgggatggctgtcgggcgtcggggctgtcgggctagtcgggg

SEQ ID NO: 606098 - DNA, 301 bp, Homo sapiens
tgcgtgcagatgaggagagggaaggaggatgaggtggtgtagacagcggagtcagcaggacttggtcttgtccagtgggtgagtgagagaggtggcccaatgctttccagtgctgagcatacgagagaccacaggcaattgaagccttgtggcagtggtgggtgcccatgcatgcacctgccttcttgtttcatgtggctccatacctcacaccaatggtgccccatcagccatgaacttggacacacttgccatgagaactccagtgggtcatcttggtctggctcattgcctacctcct

SEQ ID NO: 606099 - DNA, 344 bp, Homo sapiens
gccaattccgtcttgcgaggtctttacagtatcggcaacacagttaccacttcttctcttagttgatctaccttgccaatacacatgaagttcctttataccctgatcggagttagaccggaagtattgttcgttctaagcttagcattttaattcatttggaatatcacatgtaaacgtggatctcatctttatcacagtgacatctagctagtctctccatcagcagatattaatatctctttctttccattggcttattaatgccagataaactttctacttggcaccacactatattcaggaaggttgtttcatagcatgtttttagtattaggatagcg

SEQ ID NO: 606100 - DNA, 263 bp, Homo sapiens
cacgagggagacaccaatccccaaaccatgaaaagattacttaatattgtttctgagacatgacgattactgacagacaatcagattagtttcaaatgggacaggcttgctagctggttcaaccttactgagcaatggccataccggacttcatggctcatattatatttgcaagagactgaaggaattccacatcaaatgacattaaaaaccatctatgactcaacatcaaagaatattccaacacctaaggatgttgagcc

SEQ ID NO: 606101 - DNA, 395 bp, Homo sapiens
tgaggccagcgcacgcggtggcgcagccagatggctgacagcagcaagacgatggtggggttcagatacaggatcgcgcgctccaggctggcgctgatgtgcttcaagcccatgaagtccagcgtgctggccaggtagtagcccgaaaaaccaagcccgacaatctgccagcgctgtgtacggctcagcagggcggcttcgcccagcgcctctcgatgctggcgcccagcccaccaggccatcgccaggaacatcgggaaggccatcaccatgcgcatgccaaccacggcaaacgggtcggctcccaggcggtacatcagcttggccacgatggccttgccggaaaacgccacagccccggccacagcgaacaacagaccgtggtaacgctgctt

SEQ ID NO: 606102 - DNA, 264 bp, Homo sapiens
  misc_feature (222)..(222): n is a, c, g, or t
  misc_feature (249)..(249): n is a, c, g, or t
gaattcggcacgaggtccatcagacgagctgtacctgcccccccatgcggaagatagacggcctgctgaatgagcacaagaagaaagttctgaagcggctgtcgctaagccagccctgcaggtgcctgggggtcttgacagagggtttcttggggccaagggtccacatgtggaggacatttacgtttcgcccccttttgcgcgcggttaacccttggaagnaaacctccttcttggctcagattgganacagttttaggccag

SEQ ID NO: 606103 - DNA, 1650 bp, Homo sapiens
cggccgcgcgacattttttttgtaagaatctttaaattgcacaaaggtaacctaaatattcttacaaacaaaacggaaacaaggagttgcccatgcagaacaggtatcataacaagataaagtaaaaggaatttaacatttactaaactagcatctttggtacttagaagtgttgcccaagaactgagtgaaacactgacaaaacagataaaaacaaaggaaaagcagtatttcaataaatatgatgccaaataatgtaactgtacttacccagtatcccacaatgaataaaacctgccactccatggtgcaatgtaacctgtataagtcaaatagatgacactaaggaacacagcacctgcagctagtgatacacccaaaaagaaaagggtctggaactcttgttttgttaatcggtctctcagatactgcaagaaagcataagcttgcagcaatgcaaagacacctgcagctgccatgtgttcacttgttctgattggctggaatcccacaaaaggtatctgcattgataatattaaacccacaatgtagaaagtgctatatgctatgtagactcttttgctgtatctctgcatcagtaacaacacaaatacatgcagtggaataagattgatgataaatacataaccaccccaagcagagaccatatagaaataggataagcagcagcacattgtccaaaaaactgacccagtttttacagattttacccataaatagtatgtgaactgaagtgcaaaaatagcaatgccttcattatcaaaggatccagctactgaccgagatatgtagcctggtacatagcaataaaacaagcagctaaaagtcctgctccttggttccaaagttctcttgtaagcaggaaagtagatatagatgtaaggccgctaaaagttggtgcaaggaacacacatacgtctcttatgtgaccagttatgtccaatgtatttaaaatccaatgaataaggccagcggttatcatcaaccctgggtaaacagtaccacctactattcttcctagtggataccatgctctttcatcaaaccaatttaaaaattcatagaacccatgagatgcaagatgatgtgttgatctatagttaaaccacgggtcgaactcgtggatgatgctttcgaagcggatgacggcgaagaggcgcgagctgaagccggcaagccaggccaggaagaggatggtgaaggagagaagcgactgccacccagccggctgcgacagccccccggacagccccgccggggccggcttcggcggcgccgcgccgcccgccgccttgtgcgcgcactgggccccgggcccgtggtggccgtgccggctgtttcccagggccatgaggccactccacggggacgagttgagggacgacttgtgcttgctctccggggccgagggctccgccatgttgtgccccggcggcgggtctagctctcctcctccgccgccgccgcctggtgcgaggggtgctgggcggggacccggaggaggaggaggaggaggaagaaaaaggaggagggaagagctctgcgcgctcccgccctcagcgccgcgaggccggcggactgggggtggaggaagcggcggcggggagtctccgcctcagcagcggccgc

SEQ ID NO: 606104 - DNA, 491 bp, Homo sapiens
cggccgcgcgacattttttttgtaagaatctttaaattgcacaaaggtaacctaaatattcttacaaacaaaacggaaacaaggagttgcccatgcagaacaggtatcataacaagataaagtaaaaggaatttaacatttactaaactagcatctttggtacttagaagtgttgcccaagaactgagtgaaacactgacaaaacagataaaaacaaaggaaaagcagtatttcaataaatatgatgccaaataatgtaactgtacttacccagtatcccacaatgaataaaacctgccactccatggtgcaatgtaaccttggaaggaaaaacatggatgaaattaatctgcctttttattattttgtaaatcttttattgcctttatgtttattgctaattatagatagacaaactaatgttcaaagaatttcagttttcatttataggtgtcaacctatttcagacagttggcagtcagaaaaaataa

SEQ ID NO: 606105 - DNA, 104 bp, Homo sapiens
ttggcttggtacacccgccgagccatgctgggctgcatctacaacacaacagagctggtgatgatgcaggagtcctctccagcacttgaggacacttggcgctt

SEQ ID NO: 606106 - DNA, 373 bp, Homo sapiens
cgttctggtcccccacttgctgtatttatccaaaagaaaggaaatcagtatattgaagagatatctgcactaacaagttcatgggaagactattcacaacagccaagatatggagtcaacctaagtgtccatcaacaggtgcatggataaagaaaatgtggtacacgtacacaatggaatattatttagccacaaaaaagaataaaatattttcattctcaacaaaatgaatggaactggaagatattatgttaagtgaaataagccaaacacaaaaagacaaatactgcatgttctcactcatatgtgagagctaaaaaaaagttgaactcatggtgaagacaagacaaagacatggggtgaggggtcaggc

SEQ ID NO: 606107 - DNA, 497 bp, Homo sapiens
aaagaccaccaaacaggctttgtgtgagcaacaaggctgtttatttcacctgggtgcagtcgggctgagtctggagagtcagcaaagggagataggggtggggccgttttataggatttgggtaggtaaaggtaaattacagtcaaagggggttgttctctggtgggcaggggtggggatcacaaggtgctcagtgggggagcttttgagccaggatgacccaggagaaggaatttcacaaggtaatgtcgtcagttaaggcaaggaccgtccattttcacttcttttgtggtgatatgtcctcagttaaggcaggaactggccatctggatgcgtacgtgctggtcacagtgtatatgatggtttagctttggctcatcatcttgacatttctttcttcttattattgtttaagtttttataaaatcatagatattgttgaagttttggggcttgctgtatatttttggggtgtcggtatggagagtgtatgggcg

SEQ ID NO: 606108 - DNA, 370 bp, Homo sapiens
gggaacccctggatcatgactttggggtggaaaggattagaagggttggaaatcggccttaattgtggggggtggccaaggggccggccaccatgtccagactggttaattttcctccattcctttattatcaaggtcagaacctgcccaagggttttgtcaagggggttccagttcttactcccacttttttggaggtttaaggtccaccagatcctccagaggaggtggatcttaagcctaaaactttgaaggttggttaagggggaaaagggttatggttttaatttaaaggcgattcggggtttgccaggttaattcttcaaggaggtccaagtgaatgggtggaatgtgctaaatgaaccttatg

SEQ ID NO: 606109 - DNA, 660 bp, Homo sapiens
tacatggcaaggccacattgcggcagtaaggtggctgtgcaggggccaggcacagtgctgaccgtgagagccatgatggcactcatgcctgtgtggatactgcgcccatggccttggtcagaatacagtgcacagaacgagctgagaatggcatcaactaccgtatgaagctgaattccgccatgctccataagcttactgcgctcagcaagagaaagaggtgcacaaccacacccaccccaactacagcgtattgagaactgagcagagagccttcccatgacagagacagacaacccaatggcagggcctgaatgagtcatacactcctgtgcacaagctgactgacgctgaatctacatatactgaggaaagcagttgaaggtaggcgcatactgaagaggacacgtggtgggttatgcataacctatgtcgtagacaacctaggatacactatgagtctggaactggagctggtccttcacaatgtcgatagtaccggaagcacactctggctgtgaactggcgctggccatgctttatcgatcatacaggacccggcaaactggccaaagatactgcattttatttccgtttgaaccatgcaggagctgttgatgatgcaatgagggcataccgggatccggagccccggtggtc

SEQ ID NO: 606110 - DNA, 369 bp, Homo sapiens
ttttccaaggatttatttaatggggatgtgttcaaggcaagaccgaattcaaaaggatatcgacgccgtgatccacaagtccaaagctgaggactgcctgtttgcaggtgagttcttgcttttccagaaccttggacccagcgccccctttttagttttccaaccgaaacgtgtgtggctggggcagctactaactttgaaggcaaaacccgagtggccctagcgggggtctaggccaaggggcaaggcccggtatttccagccccgcgtagagcccgaagcctgcaagcacccctcctgggttccacaagcggcggcaaaacggggttggttggaccccccaggtttgcgtaatgggcttatcggggg

SEQ ID NO: 606111 - DNA, 172 bp, Homo sapiens
tgtctaagcctgctgctgggttctagggtgatccttgagctttggctcaaaacatcgtgtacaggctgggtgtggtggctcatgcctgcaatcccagcaccttgggaaggccgaggcggggggatcacgaggtcaggagatcccagaacttacacatcagagcccatgtaaa

SEQ ID NO: 606112 - DNA, 405 bp, Homo sapiens
gcactctatcagagatccccgagtctgatctccgcggatcatgggaattcacgccgtccgtctatcgaccgagttcggcatgctttatggtcataactaggacgtttttctgatcatctgcgaacatccgattgtcgttcttcattagtgaacccgttctcgtgcaatgctttcactctgcttcgtcttgcgccgtctctgtacatcttgacaacccttgcggcgcaatacgaatgcccccggccgtccctcttaatcatggcctcagttccgaaaaccaacaaaatagaaccgcggtcctattccattattcctagctgcggtatccaggcggctcgggcctgctttgaacactctaattttttcaaagtaaacgcttcgggccccgcgggacactcagcttag

SEQ ID NO: 606113 - DNA, 430 bp, Homo sapiens
  misc_feature (134)..(134): n is a, c, g, or t
actggttgggctcatgacgaggacttggactgttcctgctcaccaccagagaggccatcggaaagtcagtgtctgtcacgcctcagtacctcctcctgcgagcagactcacgcagctggctcccccctccaggncaaagccaccaactgaaggtgcagggtcccctgccaaagccagccaggcttccaagctgcgagcctccaaggaggagaaagaggactggctgagccatgccctgtctcggaagaagtcccaaggcctggccagaagagcagcatgctgggacctctgaggcgctgcatttggcggggacagcgggccatcccccttttgcagccaacctctcaccagcacacaagggcttgagcacgcagttgctggagggagtctggaacaactgcacgaaaagaccgtggtcaggcctgggtct

SEQ ID NO: 606114 - DNA, 186 bp, Homo sapiens
gattgatctagagatccccaagcagttatacagaccatgctagacgtgacgcaaaacgtcatgttcaggaaggtactgaacccccagtccaggagcatactccagggaccaggatacaggaaggttccagtggacaataatagagtacattgccatgacgaccagcataaccatggaaggggcttt

SEQ ID NO: 606115 - DNA, 464 bp, Homo sapiens
tacgaagtcgaggttaataccctctgatgacagctgaaactcaggccattgataccaagggctcgaaagagtccacagccactaacctggagttcccctctcgtgctcgcccaggggtgtgaggggtgtagtgaccttcaagggtgctaaggaaaggattgtcgagcaaataagcaaaggccacagacctgcggggggccagcctaaaggtcccccagccctttctgccatgtagggaggccagaggaggcggattcctccaagagagaaatcagaaccagagcactgtggggagaagccagggcaggggtgcgtggctcggacgatccactccggttctgtgtctccagtggcagagcccaaggatttggaccctcagaaagtctagagggtcccacaggttgaattgcacggggaggggccagggtgtcatccacttgcagggggtccgaagaggaccgtgg

SEQ ID NO: 606116 - DNA, 138 bp, Homo sapiens
ccttactgaccactcccttatgctgaactttccaatccaaatttctattgttttagtgacatacagtgaatcagtgatatgtggcttgctcaaaactaaaaaactaaagtggtattaggcagcattaaaaaaagcatc

SEQ ID NO: 606117 - DNA, 354 bp, Homo sapiens
tcctgcattacggtgatatccttctaactggttctgctgttttcactctggccctcccacttccacaccagactattcttaacagcagttagcatgatcccagtagaaacttaggccatactgtgtcactcctctcctaaatccacctcacccagagtaaaggccaaagttctttttatttttttaagatagagtctcactctgttgcccaggctggagtgcagtggcacgatagctcattgtagcctcaacctcccaggttcaaccgatcctcctacctcagcccctaagtagctgggactacaggcttgtgccactaatttttgtatttttttgtagagacaaagggaaaca

SEQ ID NO: 606118 - DNA, 267 bp, Homo sapiens
  misc_feature (41)..(41): n is a, c, g, or t
  misc_feature (45)..(45): n is a, c, g, or t
  misc_feature (67)..(67): n is a, c, g, or t
  misc_feature (69)..(69): n is a, c, g, or t
  misc_feature (71)..(72): n is a, c, g, or t
  misc_feature (75)..(75): n is a, c, g, or t
  misc_feature (78)..(78): n is a, c, g, or t
  misc_feature (115)..(115): n is a, c, g, or t
  misc_feature (123)..(123): n is a, c, g, or t
  misc_feature (214)..(214): n is a, c, g, or t
  misc_feature (216)..(216): n is a, c, g, or t
  misc_feature (225)..(225): n is a, c, g, or t
cgacagtctgcctgggccacagccctctcaccctggtactncatncacgcaatgctagctgcccctntncnnttnttnttacccccccgtctcccccgaccccgggtcccaggtnatgctccncacctccacctgccccacttaccacctctgctagttccagacacctccacgtcccacctgtgttcctctcccatcgtcccacaaaagtgtngntacgtaggntacgtagtcttagtctgtagtctgtgtgtagtgtagtcagtg

SEQ ID NO: 606119 - DNA, 147 bp, Homo sapiens
agaagggatacccatgtcggacttcactacagagtagcattttccctggtaccttcagaggtcgcctgggttacaccggacctgaggagcctgctatagcgcggagtaggaaggctcccatccagtattcagataatcctatagacc

SEQ ID NO: 606120 - DNA, 572 bp, Homo sapiens
attcatgcggtgagccatcttggccaggctggtcttgaactccttacctcgtgatccaaccaccttgccctcccaaaatgctgagattacaggcataagcctccacgccaggccaaatttttgtatttttagtagagacagtgtttcaccatgttggccaggatggtcttgaactcctgacctcaagtgatcgcctacctcccaaagtgctgtgattacaggcgtgagccatcgggtggccagatctgggttttgatgcctgcactctgatatcctctaggcacacaaagaatgcagacaccggtcagacgcattgatagtgagcttgtgagccagcctgtcctgccctggggctatcatcgctttcgtccacccttggcagcaggaaactgcccctggagagggccaggaatcagggggtgccttgtggaagaggtgatgtttgagctgggcctctaagagaaagctgaaattcaccctgtgggggcaggacaggaaaaccatagaagaaacactgcaaggcaagagagaggacataggaagggcgagtggtccaggggctcaaagaggct

SEQ ID NO: 606121 - DNA, 314 bp, Homo sapiens
ggatttggaggttacagtgagctatgactgcaccactgcactccagcctaggtgacagagtgagactctgtctgaaataaataaatagtatttgcatggcattcacattgtattaggttttattagtaaactaaagatgattaaaagtatacgggaggatatgaataaggttatatacaaatattatgccattttatataagggactggaacatctgtggattttgacatctgtgggggtcctggaactaatcccccacagatactgagggatggatgactatatgtgtgtctgtatatttatgtgagtccgtg

SEQ ID NO: 606122 - DNA, 162 bp, Homo sapiens
aaaacccccccggttttggggggggctttttgcccttttttccccccggttttttcccccggggttttaaactttgggtttgggggttttttttgtttgggtttttttttttccggggttttttttttggttttcccaaaaaaaccctttggccttggccta

SEQ ID NO: 606123 - DNA, 102 bp, Homo sapiens
ggatttgctggtgcagtacaactaggcttaatagggacatgactgaggtgcctcccaacgctccgcccacgctgacaataaagttgctctgagtttgtaaaa

SEQ ID NO: 606124 - DNA, 354 bp, Homo sapiens
gcttaggcagacagatcacttgaggtcaggagtttgagatcagcctggccaacatggtgaaaccccatctctactaaaaatacaaaaaacttagccagatgtggttgtgcacacctatagtcccagctactcgggaggccgaggcaggagaatcgcttgaacctgggagatggacgttgcagtgagccgagatcacgccactgcactccagcctgggcaacggagtgagactccatctcacaaaaaagagaaaagaaaagaaaactttgcttcactaagtttctcttgccattatctcattaattcagatctgtacctcattgctgctcacacatatatgtttcttaccttagc

SEQ ID NO: 606125 - DNA, 662 bp, Homo sapiens
  misc_feature (634)..(634): n is a, c, g, or t
gtatcctttgtggcatgtccttatatctattgggtcactgtggttacatctattcatcttcaaatgcaagatctttgaaccataaacaaatcaagtgaaaagaatttttcattacctactctgtcatactaggttaatttaagtaaactaaaacaacagttctggaagttggcaacactagaaatctggaccagggttagaagaaagagataattaatgtaggcttcccacgtcaaaagaaatggagaatccctctttatcgtctgttttccttgcttctttggaattttctcagttgtatctcctttgttcttagttaccctggttgatcctaggcttctgactgaccccttgtacttttcctagatagtggtatcttgtgttctacccatatcatgtaaaatactgtattcaccatatcgatcttataggtctttaatccctgtttgtggaaatctaagaggaggtggaaaaagggaaacaagtgcttcttgtgcctcgtttaccctatactgaaaagatagacagcaggcataacccacaaaggcccctctgtcaccttcagaggacagttgcctgcccttctttcatgtagcaacatggtcactttttcaaaaataaaggcagggattanggataagctgttcttggacaaactgtct

SEQ ID NO: 606126 - DNA, 299 bp, Homo sapiens
tctctgcctcccagaattcaatgcgtctcctgtctcagcctcccgagtagctgggattacaggtatgcaccaccatgccgtggtaattttgtatttttttgtagggacggggtttcaccatgttggccaggctggtttcaaactcctggcttcaggtgatccacccatctcggccccccgaagtgctgggattacagacgtgagccactatgcccagccgaaagaccagttttggcttgagctattagaaaagactgtagggaaatgtttgaacttggctgaaacttaaagaaataatg

SEQ ID NO: 606127 - DNA, 123 bp, Homo sapiens
ggccccagatataagatgtcagaactctagaaaacgggtggtggggatgctcctttatagcaggaaaggtattccatgatttgtacgaaatactcattaaatatcgagcttggttacttcaga

SEQ ID NO: 606128 - DNA, 851 bp, Homo sapiens
actcctactcctcatgtacccattctaatcgcaatggcgattcctaatgcttaccgaacgagaaaattctaggctatatacaactacgcaaaggccccaagcgtagtatggcccctacgggctactacgacccttcggctgagcgccataaaaactcttcaccaaagagcccctaaaacccgccagatcctaccgatcgaccctctacatcaccggcccgaccttagctctcaccatcgctcttctactatgaacccccttcgccatatgcaagcacgcacctggtgaaccgtcaagctagggctcgctattgattctaggcagctctagcctatgcgtgtagagtcaatcctcgtgatcagggtgagacatcgaaggtcaagactagtgccctgatcggcgcactgcgagcaggaggcgagagcaatctcatatgaagtcgaccctagaccaatcattcgtactactcaacagttgaactaaataaggtggcgtcctcgtagagccgtctccagcccgttatcacgaacaggaagaacacctcgtgaattactcctgagcatcatgaccctggccataatatgactttatctccaaactagcggagagcaagcgaagcccccttcgatcttgccgaacggggaggtccgaactaagtctcaggcttcaggcatctgaataccgtcgtaggccccttgagccctattcttcatagcccgaactacgacgaacattaattatagtagacaccctcaccatacaatcgttgctaggaagaaatgtgacgcatctcccctgaatctaagaagatatttggtgccaagacccttatttaagcccccggcttatga

SEQ ID NO: 606129 - DNA, 495 bp, Homo sapiens
cccagccccaaattttatatattcatctgcttaatgaagttttcatccacatgtcccacaggcaccaacaagatcagaagtgaacagaacataattttcttcaaaatttccctccatcctaaccgtcctcttctagctcagttaacaataccagcctgcatccacttgataaatcagaatcctagaaacgtaggagtcatctaccttcttccttctacctcactccccaagaactggataggattggtgatcagtcagtcatcagtcttattcagtctacctgtctttcagctctgtctcttttctttggtccctgccactgccttggttaggtactcatcatctcttgcatggctacatccaggagacacataacaggtctctttccctctgtccactgattcatatttcttattcctgccaacatgatcttgtttatacttaactctgattgttaacagcttccctgcccagagttttctaatagctgaagga

SEQ ID NO: 606130 - DNA, 1093 bp, Homo sapiens
cgcgcgctcccgttgaggcgcctgcgccctggtcccgagggcgctccgttctgcgccgtggccgtgcccgtgggcctgcttcaccctgctgtcagcccaccccgctgcggcagccgcgcctcgtggcgctgtcagatgccctgctgctgtgctgttgcgtgggccgtaggtgctgctgcctgccctgcggcgctgagtgcctgatggcctgaggcccgcgcatgttcttccagctggcaactgctgctctctgcctgtgtgcggcctgagcccgcctgctgcactgctacttgctgtgccaccaattctggccagttctgccgtggcagcttgggcgactgtgcctgcctgccatgtaccttgggcgaggtgtgcactggctgacctggctgagacgcttgggagctgcagctcaagtggcgcctgggcccacgcccttctccagtgtccccagccttcctcctgatacgctcgtggtggcgtggccagctttacgtcccagacagcctcgctctgcgacttgacttcagcggaggcctggcccttgacttcccttgcgtcgggcagccctattattaagccccgaacgtgagaacacgaatgattgcttgattatgctaacaacgcggatagaacctggaagggaccgtgtgtgcaagtgaacttaggctggctcacagagagacaaaataccttgtgttgatccccaactttacattgagacaggcccgacggtcgcaaatggttcctaacgggtcaaaggccatccggggaggtcactaattgcagctaaacggacatatgttaccacgctttggagaggatacgccaaccaaagacggggcgcgggcggccttgcgatacacgatcaaggaggtacaaagggttggtggaggcgtaaggatgttatctagttgattgggatatgggaatacctttatgaggaattttatataagggtcattgcaatggattgatgaaaaatatggggtgttgcaagtgtcaccaagtattgatggaaaggtaacggagaattagagattcgtagaatgaaaggaaaataatgttcatggaaggtgcattataagccgga

SEQ ID NO: 606131 - DNA, 782 bp, Homo sapiens
gctttgacaagagtgtgtcagtggagctggagctgtcgagttgaaagccggcttggagggagtttaagagaaaaaccatagagtcctcttactaaaggattcacaagggaatcaacttttatatatgatgataaaaagatttgcatttgcacaacttggagaatgagttaccatctcattccagtcccaaacagttgactgtgggaggctatgggtggaagaggtgttggaactgaaattcagattttaactccatctgagaagcttacaaggcatcccagtggagatgttgaataggcagtgggatctaagagactagaagttggaagaccacggtcgtgggactgacagatacgacactttgggcagtcatagacatacaggtggtatctaaggcttgagagtggactcgagatcagcatcgaagagggtgtatacaagaaggccaaggaataagcctatagtatcagctgccatgtattaagaagatcaggaagaggaggaggaatgaggtaagaagactgaggtggaaagtcagtgaggaaggaacgaagatcagaagagggtggtatctggaaggtcaagtgagggacgggtatcatagcataaatgccatcaggtgtgtcaacttgtgggctgcaagagcattcggagtacgatgagatctgaggcaggagaagtccgttgaagctgctaggcagagatcgcaggtgagccactgatcaaggccattgtactccagactgagataaccaacgagcgaaactctgtcgaagaacaaa

SEQ ID NO: 606132 - DNA, 177 bp, Homo sapiens
  misc_feature (95)..(95): n is a, c, g, or t
  misc_feature (98)..(98): n is a, c, g, or t
  misc_feature (101)..(102): n is a, c, g, or t
caatctgggcttcagtcttcaaggctccgggacatttgatccgttttctgatgctcacgctgcatctgcaccacaagcctacatgccagcgcagnctntcnntagaagactgccggctgacccctttgctgactctgccgcggtactgggaccttcggtgcatagacgaagcaaaag

SEQ ID NO: 606133 - DNA, 806 bp, Homo sapiens
atttgtggcttcaatctacgatgttaaaactcagttaataacacctaagtgactaccacttagttctaaatccgtcactatggttttgtggctgtgtgttcagaagtagctagtgacttcggtatcacatataataagattcttaggtgtcttttaaggatactgtctaagaataatgacgtattgtgaaattgtgttaatatatataatactgtaaaaatatgtgagcatgatactatgcaccttataaatactgagaatatgaaattttaccattttgcgatgtgttttattcacttgtgtttgtatataaatggtgagcacattcaaattaaacgttatctcattgcacaaatattttatttttatcccatctcactttaactaataaacaatcatgcttataagctaacatgaattaagaactgacacaagaggaccatacatactaaagttattaatagccatttgaagaaggaggaattttagaagaggtagagataaatggaacacttaacccgtacactcggaattccctgaagcaacactgccagaagtgtgttatggtatgcactggttcctcaagtggctgtgattaattatagaaagtggggtgttgaagacgccaatctaatattggagagtggtgtatttctcccagtcaatcctgtcaatgtttgctttatgtatatgttggggaactgattgttctgataagtgtatgtgtttataacctgttatacaatttgttaattgagccttttattaacatataattgttatttttgtctcgaaataatgttttt

SEQ ID NO: 606134 - DNA, 1083 bp, Homo sapiens
ggcctgaggttgcacactccgacgaagaagggtaccggcgcccgggatggacgcctcagcgagtctccgagatcaccaacgcctggttccgtgctatgctaacaaccatatcttggctcctgaaggttctgactagagtcgtgggagacatgggcgcctaagcgcgaggttcatgacgtccacttccctcaatatcgcagtcgatcacaggttctgactcgggcacacactcattacttgccatttggaactttggcttatctactgggcttcacgcgatcccggttgagccctgttggaaccccgtcaccacgtattcgagtaccgaacagtagttgggatcgacaagcaaggaagatcccgtatagcacgattgggatcattattaatcgctgaagaacacaggacgtagagcagaacacaggaagggagaagtcagggcgggatcagggaagtgcaacggattgaggtccactggagtcgtttccgtataggtaatgccgccgtgcccgatgacatgggcaacagcaattctgaaggtgcaggacaggtgtcaagactctgaggggctgacatgaatcttgtcctgcagaggagcagtatgtgtcactggactcatcgaaggcagtgcacggggcgggctcaccaggagtcatgcccgtcactccagagatggacggtcttggtccgtcgtgaacgaacagagtaaggcaggctaccgggaccagccggtgggctgggagttccctatgaacagttcccatggcaccatatgactgtgtccatgcacgagggactagggaggccagggccagatgcagaggacagtacgtctccgggtctctgcggagtcaggttgaaaacgaccagatgtgggcgacgtgagtaagaaccatccgttgactcatgacacgggctgctggaagctgcacctgcaggaaaccatgggctcgatttgcactcggctcaggaggcccaaggcagttgtgcctcccacgggaaacttcccaagaccagaccgcacagcaattggcgggaccaacaacccgcgcacacgacaggcacccaaccgaaaaaacagcc

SEQ ID NO: 606135 - DNA, 213 bp, Homo sapiens
cccccctttttttttttgggagggcggtccagttttgcccatttacatccagagctgttaacaggaagggtcattacctgggaaaaacatggagaagcttccttgacccccccagaaatcccctcaaatttggggatggtcattccttttgggaaaaattaaaacaattcaggggttttttaaaaattttaataaaaaaggaaattttttcca

SEQ ID NO: 606136 - DNA, 262 bp, Homo sapiens
tgggagcatggaggcattacatgagatgctatgtgtaatcgaccacctagcctactctactacccctacccgtcctcccccagaatcacttcctaggacacccgagctgcttgcccaggatcctgtaaccctgctaacaccagagaagcatcccagggcttagtggcagtctctactacagagtcaacaccagttttcttcaaaacggtttgacttcaacttttgcacttacgctgatataactgaagtcattctcttctgt

SEQ ID NO: 606137 - DNA, 362 bp, Homo sapiens
aaaaaaattttttaaaaaaaaaaaaagggggccccccccaaaatttcccgaaaaaaaaaaggggccctttttccccccccaaaaaaaaaaaaaataacccccccccgttttttttttttaaggggccaaaaattggggggcacacgggggaaaaaattttttttttttaaaaaaaaaaattttttttaaaaaaggggggtaaaaaaaaaattttttaacccaaaaaaaaaaagttttttttttttttaaaaaaatttttttaaaaaatttaaaaccaaaaaaatttttttttttcttttaaaagggttttccttttaaaaaaaaaaaaccccccccccaaaaaaaaatttttttttttttta

SEQ ID NO: 606138 - DNA, 347 bp, Homo sapiens
cctttatttgaaagctttttaatttttctttccagtaacccattttgatttcataaattaaccatttatgccccccttttgtgttgaccctgtagctcatcctggaaaagtcgatcaatgttttgcagtttattgaaagtagttctatatataccaatgttataagcctttctttaaaaatggttgaaaatgcttttaaaatgtgattatcgcccatggtatgcatgatcgttgtaattgttgccattccttttaaaagttgtgaaatgttccaacttgggcttatgtagacccatttttttgtctcagtccagaggccctgccttcaataaagtctttttttccta

SEQ ID NO: 606139 - DNA, 1824 bp, Homo sapiens
  misc_feature (1451)..(1451): n is a, c, g, or t
tccatccccaaaaaagttttataaccttgattaaaaacttttccttgtgaattacatcacacgagaaaagaatattccttacaactatgaaaagaatattatcgaggggttatcccctttaacacaccatttattgggaatatggacaagtggccgagcttatatgtgccagctctttcaaaaaaacatactccatgtgaagtgtggttctcccactgtaaaagctcggtgacacatattggctgtgggccgtggagacattaaagtctcccatagcgggcaatttacaggttttttcaacacaatatatctcttcccacatctcataataatgtgcgcgaggtgtggtgaccccgtgacatgtggggcaaaaagtggtgggcactccatgagaggtattaacgaggaagttgtgctgtatatacagaaattctccccaacaaaaaggaaagtgtggggcgtatcttggcgcgtgcccctttgtacacaacacaaacaactttctccctttttatacacacaccccatctaccccaagaaaaggaaacatctaactctctaacggataatctgatgtggggggccattatctattaaaaaaatctcccccatataaccgaagttgaacaacatatttatacacaaagagtgcggggcgccccctcccccaagaggggggtttccccctcccactatttcacagcgtttaacgtttgggtagaaacaccacaagaaaccccccttctatttacaccagaggggggcgcaatatttcccccgggaaagggggagcgcgacgagaacactctgcgtggaaaaaaaatcttttcgaaaacccctccccaaagagtgttgttttcaatctaccgcgtggggcttcttggacacgacaccacccataaaacagcgcgcagttatcactccccgaaaaaacacgggagtattacatacgccccaactaataatacaccagtttgtttccgccgcctttatcacccacccacagtgtattatgctgcggcaaccatctcgtggggctaaaaaagccctctccgaataatacccaaaccacccacctctttttcgtcgctgggacaacacgttgctcagccgggcggaaactattcctcgtgagtgattctcttcccccccgaggattctgccccccttgtgggtatcttccccccaacacttcttcgtcggaggtcggccttcccccccccccttgtggcccccctctcggtgctttgtcccccccactcatgcggccacctcacatagcgggcgggcgctaccagtgcgggcagtcgtaagttgagcacccagctgccctcattgaaaaggtgggcggccccccaaaaaaaacttctccgcataacattctgttttacacacaagacacagggacggagtaatcacaacaaggggtccttagctacatatctatccangctcagtggatacacatatattattgaagcaacgccgacgattcgtgacgccaactatattacacacgaggagcgacgatatcatattcatgatagagcagagaaatgaaatatgttatcagacaaccccggtggtgtacaatatccactgaaaagcacaaaccataattggtagcattcactccggctctccacacaaaaaaagtggatcagccgatgcacttaattcagcacagatggttgacagtaaacttaccctcacacgtatactgtaatataactcacaccattattacctcctgtgcttcgtttctgcttttttctcctcatatcatgtccgttctctctacatatcgcatgaggagggcgagga

SEQ ID NO: 606140 - DNA, 1210 bp, Homo sapiens
aggctgtaccccctggggtatggcagtgtcaatacgcgagcgagcgatgcaagcgagcgcggcggggaaagaatgcagagaatgtccgcgcatctaccctccgctcctgggcgcgctctcattcatagcagcctcttcatgaattacagcatgaggggtgggcggaggacggggggggtaccaccataataccccagctaaagctccgggacccccaggcatcggctagctctgtgtgccgatgcatggtgaggcttggtatctgtgggcaccgtgtccactgtgcagcgaataaataccaccgtgtgaggggcttcaacgcactactggatggtgtacgtacgcggtccaggagcacagtaacatacagcactttgtggcacgaacagtcgtcgttccacttgcactaaagctttcctaggcctaggaaagaggaccctagataggcagtattcataccagcagcagcgaggcagcgagcatgcagtagcgagcatgcatcgatgcagcgagacagcagcacgcgagtagcagcagcagcacagcgagcagcgagcagcagcagcagcagccgcaggagcagcagcagcagcaggaggtagtaacaggacgctcaaaagcgtctacaaattacatgaaggagcacggaagggcaacaagcgttctaaacgacgtcccagagcaacgtacagagtgccgtcggaagaaccttccagggatgcacagagagatgtcttccgaagacatcctctaaggaaacccagaagaaagactcaagcactggaacagaatgatgaaccatcggttccgtaagaatgagccatatcgaggcacagcgtaaacgccccatgtctagaaggacgcccaagaagacagaattggttaagcgttagcgtccaacagtcaaccacgtgtggcaatcgactatgacaggcttccctagtttaagacggggtccgtcaccaaatttcacgaaagttaccacggaagacaccattcttcaggagcgaaacaaagagagggcacgtaatagacgtttgcagtccaggccagggccctttagtcttcccaccagcgttagacttagggacacaccagcccactagggatacttacagtatggatcccgtccctcgaccaagcactcgacgagctgtagtgacacagcgcatgtactcttaaatgatatgcgcacaggcgtcaaccagcg

SEQ ID NO: 606141 - DNA, 243 bp, Homo sapiens
  misc_feature (217)..(217): n is a, c, g, or t
  misc_feature (227)..(227): n is a, c, g, or t
cgcaggaccctttatgtgacgtgcaggacaggttgaacagtctaccctcccttagcaggaactactccgcaccctgtgagaccgtccgtagaccgtaagcatcttctcattacgctagcacgggttgggtactcctctatcttaggggccatcaatttcatcacaacaattatcatataaaaccccctgcctaacccaattaccaaagcgccccccnttcttcgccntgatccgtcctcgcac

SEQ ID NO: 606142 - DNA, 290 bp, Homo sapiens
  misc_feature (121)..(121): n is a, c, g, or t
tccccctttttttcccccaaatttggccccccttttttaaggttttttttttttaaaaaaaaaaagggattttagggccggccggggtttttttttaaattttttccccaaccccccttanggccccgggggttttaaggcccggttttaaaacgaaagtttttttttttaaaccccaaaaaccttttttgggattttttttggggaaaaaaaagccctttatttttttgctttttttaccgggccccggttgtttttttttaataaacggggcgggggcttttttccca

SEQ ID NO: 606143 - DNA, 383 bp, Homo sapiens
cgtgctactgtactccagcctgggtgacagagcaagacgccatctcaaaaaaacaaaaaaaaaattcaaacagcatggaatagataaaaatgcaagactgggcgcatgtgtcacgcctgtgatcccagcactttgggagggtgaggtgggtggatcacttgaggtgaggagttcaagaccagcctggccaacatggtgaaaccctgtctttactaaaaagatactaaaattagcagggcgtggtggtgagtgcctataattccagccacttgggaggttaaggcaggagaatcacttgaacccgtgaggtggaggtttgcagtgagccgagatcgcgccactgcactccagcctgggtgacaagagtgaaactcggcctcagg

SEQ ID NO: 606144 - DNA, 507 bp, Homo sapiens
acgaaggcgcgtcctaggcctgttagttctccttgtttaccaagcagctgtttggctttccgaagccccacttatctgtctttaagaggtttaaagaaactaccagaccattttccaatgaatgtcttggtaccaccagacccgtagttcctatagattcatcagatttgcattggatattcgcatgcctggggttacacctaaacagtccgatacatacttctgcatgtctatgcgaataccagtggatgaggaagccttcgtgattgacttcaagcctcgagccagcatggatactgtccatcacatgttactttttggatgcaatatgccttcatccactgtaagttactggtttcgtgatgaaggaacctgtacagataaagccaatattctgtatgcctgggcgaggaatgctcccccttaccgggtccccaaaggtgttggattcagagttggaggcgagactggacctaaatactttgtactacaggtacactatgggga

SEQ ID NO: 606145 - DNA, 498 bp, Homo sapiens
cctgcacatgtttctgtgtatgggatacaggcgcgtgcccaggccttggctaatttttgtattttagtagagacgaggtttcaccatgtgggtcgtcaggctgggtctcgaactcctcacgctcaagtgatccacccgcactcggcctcccaaagtgctgggattacaggcgtgagccaccgtgattgggcctacacagctttcaatggctggatctatactttatcaaagagaggaagcacaaggagcagggatcactaaaatatacctaatatggcatgtgaaagtgatcataatccagatgatctacaccaacactgcattggcatatatctgaccaaattttatgcgagataggcaggtctcgggcacttcaacattgagtgtcacatagaaaataataactaatagctgatgagggtactcatttatttaatcagaatacgggattatatccataaaatttacttgcagagaagtactttctttgtgttgcaa

SEQ ID NO: 606146 - DNA, 395 bp, Homo sapiens
  misc_feature (212)..(212): n is a, c, g, or t
  misc_feature (240)..(240): n is a, c, g, or t
ctgagctctgtgatgtagccgcttgcggagactgcaagcagccgcggcgcgcccggccctccctcttccgctgccgccgtgggaatggaaacatctgccccacatgccggaagccaagtggtggcgacaactgcacaccactccgcagcctaccacacagatcctctacatatgtcctcacaagacaagctcaccaaaatggccacatccantcaaagaaactttaaaggaaattttaantcactggaccttgcaaaatttactaagaagcagccatagtaacataaactattcgaacaagaatctaaaccttcagcagaaaagtatagcataacaacccagctattcattaaaaatatcactaaataatacaccaatttcatattccagaaagt

SEQ ID NO: 606147 - DNA, 403 bp, Homo sapiens
gccacccctaagtgatgcggacgctacctctaccacgtacacgccacaatgatatgcacctcctggcactgactcgatgagagtaagggagccggatttagggcattcacagtctctaaagttagtttactagcttcctgcacctgtacggcagcggctgctagtgctttaagacaaggaggccatccaagtgcaacagaatctagttgcctggataaatatgccaccaggcgatgccatgaccttatggcttgagtcagaacccctatggcctacctttcacttgtgcacatacaagaagaaaagcttgattagttagatctggcagtcctaaagctgacgcgctgagcaaggcttctttgatttctttaaaatccttctcctctttgcctgctagaggagg

SEQ ID NO: 606148 - DNA, 299 bp, Homo sapiens
cagagacgggaggctcagatctaattagaagccaccggcatagatcaggagggatacttcaactcaggaaacgggctccctgctgggttcaaattcaagctctaccacttactatctgtatgactaacccttgtgttcctcaactataaaacagagatggtagtagataccatcttaaaatacctggcgcgttgtgtggatatgaacgatcatgcgggtcatgcatttatcacagactctgctacataagtgatcagcaaatttgaggtactattcaatgaatggctctattgttcgga

SEQ ID NO: 606149 - DNA, 153 bp, Homo sapiens
aaaaaggggaagattttagcttgtcctaaattttgctgtccccccctcccggaaaggggcattgtaaaagaataaaacattttccactccttttggatttttccccccaaaaacccttttatccctgtaataaatcagcctggttttttttga

SEQ ID NO: 606150 - DNA, 353 bp, Homo sapiens
ctaattttaacccttgtctctttgagccaaatcaaatacattaattattggatcaaggataacttttataaaagggtctgggacaaggattaacattccccctttcttggctggtgtcttttgtcctgaaatcttactttgtctcattcatagtaaaataggttatttttcacactcctctcttcctttcgcaaacgccaaagccgtaaatgcattgagatcagaggcttctcattatttgtaattatcccctcagccgaatgcaagagggccccgtgggtaaggcagggtgttcacgaatacgccggcgttttcatcaccatcgataccatctcggctctttgcccctactc

SEQ ID NO: 606151 - DNA, 358 bp, Homo sapiens
atattgccccctataaccttggtggtcctggtcaagaatttggggtgggcggtggccctgtttgctttttattaacccaacttttttgggaatccccacaaaaaaaatttaaccccatatgggttccttttgttttaattttgtcccccagggcaagtggccggcaaaattcccgttttttttttcccaaatgtttgggacccggattatttgccaaaggaaaatgatacttttctttttttgctgttcccccaaatcccattcaaatgctttttgttttttttttttccccattcccatttcaaaaggttcccagggggctataataaataaacttcccccctttttttggttccca

SEQ ID NO: 606152 - DNA, 378 bp, Homo sapiens
  misc_feature (285)..(285): n is a, c, g, or t
  misc_feature (352)..(352): n is a, c, g, or t
  misc_feature (356)..(356): n is a, c, g, or t
ccgctacggacgcacgggcgcctgactgccatcggcgacctgacagtcaatgccaccaccctgaacaactacggcaccctgggcggcgccggaaaagtccggctgaacgccacgcacctggtcaatgacaagggcttgctcttcagcggcaacgacatggcgttgcgcgtcaatgatttcagcaaccgctatggcgacgtctacagcctcggcgccctggacatcgcccgggatgatgcgagcgcgcgcagcagcctgatcgagaacgtctccggcagcctgganagtggcaccggcatgcgcttgctggcagacaccctgagcaaccgtcgtgaccagttcaccactgaantgangctggtgtcgcgtccgtagcgg

SEQ ID NO: 606153 - DNA, 369 bp, Homo sapiens
aggctatacccctagttttagaagtttcaatagcatcattcttaaggccctaagattttcagaatggtaaatgagcatgctttagcttaatgtcaccacctgcattagcccctaacaggagtcaccttgtcctttgaagcaaggtgtttttttcctttctagctatgaaggtcctagatggcatcttcttccaatagaagactgtcttgtctactttgaaaatatgttgtttagtgtagctactgtagttattgtagctagatcttctggataacttgctgtagcttctacatcagcatttactgccttaccttgcttttttttttgggtttcctttggctatggaaatttctaaaactaggggggatc

SEQ ID NO: 606154 - DNA, 265 bp, Homo sapiens
ggctatacattgtctgatgacagaacactcacgtaggcacatataagcaatctcaaaatcagaaggctctcaagcactgacttaatgaaaacaaagtcacgtagagaaatattacctcttcccttcctccctatagttaacgtgaagctctggggcttgggcaaagtatacagcaaaggaagagatacttacctctcagctactgacatgtcctagtgctagccatactctactaagatagcctcagtaagtctcatcaatagta

SEQ ID NO: 606155 - DNA, 105 bp, Homo sapiens
tccatggtagctctattgaccccctgacaagggctgttcgttaccaacttcgaatggtgacaccgaccggagtcaattcgcaatacagtcggatttgtaaacagg

SEQ ID NO: 606156 - DNA, 205 bp, Homo sapiens
  misc_feature (9)..(9): n is a, c, g, or t
  misc_feature (53)..(53): n is a, c, g, or t
  misc_feature (58)..(58): n is a, c, g, or t
  misc_feature (68)..(68): n is a, c, g, or t
  misc_feature (87)..(87): n is a, c, g, or t
  misc_feature (95)..(95): n is a, c, g, or t
  misc_feature (109)..(109): n is a, c, g, or t
  misc_feature (166)..(166): n is a, c, g, or t
ggtgtggcnggaagagaatgtacgtataattcaggtccgaaatgctaacttgncgccnaaaacgtgtntatgttttctccctttttntgctcacnggctggctatgccntagtttcatataagatatatagatgttttggtttctgttttgagaaggttggtcttnaataatgagtgagtgcagacacccgccaccctgccacaa

SEQ ID NO: 606157 - DNA, 912 bp, Homo sapiens
ggggacactcggctgtggtgacgagaggcgaggtcctctgaatgatgcgaatcccggcgtgcgtactcagagtccatcacgaacctgcctaccatgtacggtgtgtgctactagcagctaagatgcttgcttgcctattgattacaggatgaggtgcatcctgcatgatcggtcggatcttacaattgcgtcaccgtatcatggctttctgacaagccacatgcaagtttcgatcctctgtgaatgtgactagagttccgacacagatcatgccaatgatatctccatacaagccgaacgcggaaagagacagctgaggttctccggcctgtgtgcttgtgtgcgaacggggagaatcttgggtctccacataggaccacgtccgagggaccgtcgcgtcctcaaatagtattacttgggtcattttgcttcgtaggtttccccaatttaggcttgcgaggctagcccggggggggacccctagtcgggaatttccgcgcaggagggctttgcttggctacgggacgggacatttcccctatgccttgagtggtgtgatccgccattggccccccaggtggatttccctttggtttgaggcactttttggcctttcgggagccgtaacgttccgcggtgtccggtttagggctgggtggccccatacccataaaacaggggttggaattggaagccccccgaatgaaagtggaatagcacaggggtaccctgtgtgttttagacaggcgccgggcgttgaaccagcttctttggcttcgggtcctacacaagaggcacaggctaatatttgggccaggtagggggatattccccagaagaccgcacccatagtgataacccgcaaaccctttggttgcctggttaggcaagagaatactcattacgacagcg

SEQ ID NO: 606158 - DNA, 128 bp, Homo sapiens
aggggggggggccggggttttattttggggccctcccgaaggggggaaaatgggaaaatttttttttttgaggaaaaggttagggggggtttttaaaaacttaaaaaaaaaattttttttctggggga

SEQ ID NO: 606159 - DNA, 981 bp, Homo sapiens
  misc_feature (234)..(234): n is a, c, g, or t
tggaaattggcacaaggcccctgttccgcctgtatttgacaccctgcaaaccgggattaggcaccttggaggttcaccagtggagaagtttataattataggaggaaatattatgggactggtaaaaattttgactgaaatcttccttggttgtggtggccacaaagaaaaggtattctgctcgtgaaatggtgcccggtgataagggccttttcaccctggctcaaaccttangtacatcctaggaaaaatactccgtgaattaactaaggtatcatccgtacccttctctttgtctcaccccgaaatatgatggggggaattacctgccctatacccctccctccataataccttactgtactctggaaatttaggccaaaccttaaatctccaggctttttaaagccccaaatataaattaaagctgggaaagttaaccccaaattctttccagattgttccctccatgaatatccccccttcctcttcgccaattttcccagagtggtacaccagatgggttagagcgccagctccaggtgaattaccccagcttgcctctctccaattccattcctcctctttcctcttcccaaggctgaaggccagggccctttcccagtccctccaccaaccctgtcccttccacctagtcccctcctgaccccagggatggaggctttggagtccccccagttgtggtgatacaccagagccacttagttgtccactcgcctggctttattttaaaggaactcgccagtaggcgttcctcttgttagagctcttgaaaaaggttgactataataagaggtctttgtatagtttttacattggtccaagtatttctccaaatcttttgttatccagagtacccattcccatcttcttaacttcgccagttgtgtgggaaactgttttgtaatgaaagattttcattgggggattgagcagcatttaataaagtttatgtttgta

SEQ ID NO: 606160 - DNA, 496 bp, Homo sapiens
aacgataaataaggacaaatctccaccttctcctcacaggtcgttgaaaggatcagaaaatgacacagcagagacgactggcacatagtaagcacttaacacacgtatctattactattgtcgttggtattaataacaaataacttgaacttgacgcctagtgtggatgcaggagtccacatggttattccaatttcctcacttgcccaagaagctaggtcacttaaatgacggctgggacgatggagaataccagatgatgataataagccacattaactgggcacctgccatgtgccaagcgccactctatggactgtaacattttgttagagtctcccagcagccctataagaattcctgtcattggccgggcgcagtggctcacgcctgtaatcccagcactttggaggctgagacaggagaatcgcttgaacccaggaggtagaggttgcagtgagccgagtttgtgccactgcactcccgactaggcgat

SEQ ID NO: 606161 - DNA, 655 bp, Homo sapiens
  misc_feature (36)..(36): n is a, c, g, or t
  misc_feature (270)..(270): n is a, c, g, or t
  misc_feature (325)..(325): n is a, c, g, or t
  misc_feature (337)..(337): n is a, c, g, or t
  misc_feature (345)..(345): n is a, c, g, or t
  misc_feature (370)..(370): n is a, c, g, or t
  misc_feature (373)..(373): n is a, c, g, or t
  misc_feature (402)..(402): n is a, c, g, or t
  misc_feature (421)..(421): n is a, c, g, or t
  misc_feature (439)..(439): n is a, c, g, or t
  misc_feature (446)..(446): n is a, c, g, or t
  misc_feature (449)..(450): n is a, c, g, or t
  misc_feature (453)..(454): n is a, c, g, or t
  misc_feature (456)..(457): n is a, c, g, or t
  misc_feature (464)..(464): n is a, c, g, or t
  misc_feature (473)..(473): n is a, c, g, or t
  misc_feature (484)..(484): n is a, c, g, or t
  misc_feature (492)..(492): n is a, c, g, or t
  misc_feature (496)..(496): n is a, c, g, or t
  misc_feature (499)..(499): n is a, c, g, or t
  misc_feature (509)..(509): n is a, c, g, or t
  misc_feature (526)..(526): n is a, c, g, or t
  misc_feature (535)..(535): n is a, c, g, or t
  misc_feature (562)..(562): n is a, c, g, or t
  misc_feature (573)..(573): n is a, c, g, or t
  misc_feature (578)..(578): n is a, c, g, or t
  misc_feature (581)..(581): n is a, c, g, or t
  misc_feature (587)..(587): n is a, c, g, or t
  misc_feature (652)..(652): n is a, c, g, or t
agttgattttttccccgggaccgtcttgcatactgntttttttgggttttaacatccgcaaaatcttggcatattaatttagttgggttgtagaattctgggtttaggaacaaaaaaaaattaggtggggatggttgacctatgctccctactctgtagcttttgtttttttaaaaactaagttttaaatcccgttttctgtcctgtcttctttaaaagcaaaacaaaacattttaagtttcttaactttttcctggggcaggggacggngcaaactcaaagctacagtattcttggaaagaagaggcaaccccctcccttggcncctttaggggcnggtggcgncatttattattgggactggaatggngtnaacaattctctctctttttttcccttgtnaacagcaactttcattgtngggggggggggggggggngaggccntgnnggnngnngtcactngggtcatgnggccttcgccnagaggtgnggcngcngggccgaccntgggggagtcctctccngcttcaatntgctgctggataggaactaatcagagngagagaagcgntaganggngaaggngggcgtcgcaggctttcccgctcacaaatctcacctccactacaactctctttatacttttcttncag

SEQ ID NO: 606162 - DNA, 341 bp, Homo sapiens
tgccatgcgacagttatttaagccagacaaacccattggaattcagatggaataagttcggtctttgacatcttccagctttgcaaagaagttgtggtatatgaagtattgcgagaagtatgagttttccccacgaaagaattgcttgatagtcttaatggtgaaaaacactcctactactgcaaggcatgctttgatgtcccttcatcattgctgggtcctcaatgcagggggccatttcatagatgaaaatggctctcgccttccagcaattccccgcagtgctacaaagtgggaagtcagagaccatcacagctgatgtcaatcacaacttgaaggat

SEQ ID NO: 606163 - DNA, 231 bp, Homo sapiens
tcggatcacgaggtaggagttgaagacagcctggccacgtggcgaaaccctactaaagatacaaaaaaaaaaaaatttagccgggcgttggtggtggttgcctgttgaccccaggtacttgaaaggctgaggcaggaaaatctcttaaccccaaaaggcaaagtttgcagtgacccgaaatcatgcctttgtccttctagcccgtgggtgacatgagcaagactccatctc

SEQ ID NO: 606164 - DNA, 495 bp, Homo sapiens
ggccaaagtgggtggatcacttgaggccaagggtttgagaccagcccggccaacatggtgaaaccctgtctctaccaaaaaaatagaaaaattaggtgggcgtggtggtgtactcctgtaatcctaggtactcaggagactgaggcatgagaatttcttgaacccaggaggcagaggttgcagtgagctgagatcacaccactgctctccaacctgggcaacagagcgagactctgtcttccaaaaaaaaaaaaattaggatatgtacttgggttaactaaacataatgctatggcacacttaatagactatagtatagtgaaaacataacttttacatgcatgggaaaccaacatactcgcattgactcaggtgacattggctttattgcagtggcccggaactgattgcacattatctttgaggtatgcctgtgttttccccttctggttgactttcttcacttggcttacaggacaccgtgcttatctcaat

SEQ ID NO: 606165 - DNA, 212 bp, Homo sapiens
tacgtggtgttaccgtgagggtgattgatgatggattcttttcagttcccttcagaatctagttaaatggagaagaaaacaatcatcataaatcacacatgatgtcttgagatttaacatttttcatataactcaagctactctgataatgacacttgaaagacagacaataataagggatatggatctccaactattaaatcagggcacgg

SEQ ID NO: 606166 - DNA, 440 bp, Homo sapiens
agcccaggctgtggccaaggtgtaacttgtaaacctgagttggaggcctatatttcacaataaaattggccccctgtgccctctggacatattactggtgcctttacttttaataaagcttggggccccctttacttttttatagcttaactaatttgaatgggggtacttccccctgtaggggaacggaaaagttgtttttaaagggatgggggggatatttttaaaaactccttttggttttcctgggggtcccattgatggatatgtttataaactgggttcttgttttataaacctgggtttttcttttttaatatgggtttctgaaggggatggggggttttgaaaatttttcttccctagggccttctgcatgttagcccagtcatggggaatttgctgcatagctttttttttaagtaaaagtttccccccca

SEQ ID NO: 606167 - DNA, 309 bp, Homo sapiens
ggtatcgtccagtatccagtgaggaagtggtcaggacccaccatgggtacttaaagcaagaagagctcgagtctttgatatacgaggtagtattggcatgtaagcttttacatcatctcagattacttataatacctacgtgcaccgtaaatgccatgtcaaaactggttatattatgtggttgacaaaataatgacgaaaaaaactcaatacatgttcagtatagatgcaaccatcctttctctagtcttatcctgagatctggtttaataagattaaagactaaggataagacaaggtagagccgag

SEQ ID NO: 606168 - DNA, 312 bp, Homo sapiens
tatcaactcatagtataaaaaaatgtaaattaaaattctataagagaaaatttttcacctgcctggttggcaaaaatccggaaatttggctctgtgggtgaggctatggggaattcttatatattgcttgtaatattcttataaattgtaaccattactattgaaagacaatttgacaatacctaaaagaaatgatgaatgcacttatttattgatacagcatttctgctttagggaaattattctgtagttattatacctggcactaatatggataccaacatatgtgcaaaggttattccattatagcag

SEQ ID NO: 606169 - DNA, 288 bp, Homo sapiens
aagtgcagtaagtaccagagtcctgctccacactaagtaccagagtcctgctccacaccgagcggcacgaagtcgacaataaataatgaatgaatgcattttttcagtggggtcaaagatttactattgcttccaagactgattagcagaaaatacattaaatgttaacatgatctcacgcttggcatgattactatgttgtgggattttgtaagtttctgtgattttaaacaaaataaagtagaagattatttctcttgtagtgacagaaaaaccactaaaatgcaa

SEQ ID NO: 606170 - DNA, 400 bp, Homo sapiens
  misc_feature (124)..(126): n is a, c, g, or t
  misc_feature (128)..(128): n is a, c, g, or t
ataggtgaagatgacatttggcggggccttcagccgcttccctccttccttaaggccaaggtgtccgtgccaagggcacaggcaaaaccaagggttcgggttttgtcagcttcaaggaccccannnantacgggggccccatgggtgaaataaatgggaagtatgtgggctcgccccccatcaagcttcgcaaaagcatgtggaaggcccggaatttggagggggtccccaaaaaccaaaaggaaaaaaaaaagcggggccttaaatagggtttgtggccaggcacccgctccccccgggggggggggggggtcctccctcagttttttttggaaaacccccagcgggccccccatccccggccccaaaaccggtttcaataaatttaggttcttttcca

SEQ ID NO: 606171 - DNA, 129 bp, Homo sapiens
gctggagctcgcgaggaatggcttctggggagcccatccaggacactgggagcacatagagattcacccatgttttttgaccttagagtaattctaatgcttttcttataattacacatatatccagga

SEQ ID NO: 606172 - DNA, 379 bp, Homo sapiens
ctatatatcacttgaccaagaaattggaatttctcaatgttcgtgcgggtatataccagatgagtacagtgagtagttttatgtatctccagagtgggttattgccaagttatacatctcccaaagctgtatgcccgaaggtttgtgttaccctggtttaccaaatgatcccagtagtatgactttgatatctatgaggatatcaattctactttaagtatcatttgattcgattcagaaagtactttgatatctttcagtgcttcagtgctatcattgtgagcagtcgtcttttatatacggtgcgtgtagccatcctaggcctgtctgtggcattctctagatgtttcttttcttcacaataaattccttatatcaa

SEQ ID NO: 606173 - DNA, 593 bp, Homo sapiens
attgaaaaaaaaccctcatcatagagaggtttcatgcgcatccataatgacatctgatatacattccatcggatggccaacggccctgaaggtacgccaaacacccgactgtcattcccgacagaattgccctcatagagaaaaccgacttaagccaggtgcagatgctaacatctgacctcacggccccttgtgtgtccgcagcatacatattacgatggcaggtgaacaagaacatcctgtccaacacctcgcagcactctctctactaaaaatacaaacatatccccacgcgttgtggcggagcctgtaggtgcagatactcgcgaggctacaagcatgagaacgtcgtgaacctgagaggacgtggctaggctgagccaaaactatgccattacactccaggccggcctacttggcaggactgcgccccctcagacacgatggtgcattgactgcatgaacactaacgctggcgaagcacttgtccagagagatctgctgcatatgaaactactgctcttgctgctgtttcaagaacaattgcatatttgctgcaatgctcataaattgatttctgtgtagacagagct

SEQ ID NO: 606174 - DNA, 186 bp, Homo sapiens
cgtggatgttatgttctgtctcttagccatcttgtgaattagggttcctgcgagaagtgatggagggtgctgagaaccagtgatgcaggagaacaaggtagaccagtgacgcagtatatgtatcggggatatagaccacgattcagcaggggccctcctcgccacagcacagcctagagaggacgg

SEQ ID NO: 606175 - DNA, 839 bp, Homo sapiens
  misc_feature (195)..(195): n is a, c, g, or t
  misc_feature (482)..(482): n is a, c, g, or t
ggacggcgcgtgtggtttgaggacgagaatgggccttgttgctaataagatggcatagttcgtagcgtgtgccgttccttagtgctctaatgttgcccaaccctgaagcttgcgagagaagtcgtactctggcttgagcatcactgtgcacgtctgctccactgtactgttgttatgtctcctcggtggttcggnagttcttcgactgtctgctcatacacaacggatgggaataactgttacgtgatgataaatcagttgccacgaaccttccaagatgtacgggtatctaatgtagcgtgaatagaagcagtgaggtcagtcagaaggagcgacatagactttgcttggagcatacagcaggtcatatgggagcaatgattatttagtaggggaaaggatcggtgggcagtccgagacgtgtcccgtaaactatagcagagttgggaaggatttaaggattgtacagtaaagtgcctggngagccagagtacggaaatgacggcacagaaataatcgcgctagaatggtcgaagtgagattcgcttgctgtctgttgcattgaggaattcgttctggtcgtgccttatgtggacgttgtctggtgcatggggcgtaagatgtgattacagtgagaaaagtgagataccgtgtcacgcgagacgtaatctgaatggagctgtagaagtgccgtattgtagacagacaaatcaagctgggaactacgtgtgattcttgctccatgatcagagtgcagagttttttacccagggtctgttaaccacaaatccttcctcaagatattcgaaaatggttgggaaccgatgcaactgaccgga

SEQ ID NO: 606176 - DNA, 305 bp, Homo sapiens
gtcagatagaggggagtatatactggggaggagatcgaacagggcagatgaaatcacgaggcaacagaaaggccgaggaggcagaaaagaagccgtccctttcttctgcctcgtggccctctccttcctgttatcccagcaatcctacccaagaactctcccaccgagaaagcttcgctatacagcaaggagcctcctttcaaggggactggatagtcaaaaatcaaaagctcgtcctcccctaagagcagaccaaagaaattctgacatctcttcaccaatccttccatatcagtgtgcggctg

SEQ ID NO: 606177 - DNA, 142 bp, Homo sapiens
tggatagtcctgaccacgacaaaataactacttctaattgctgcgggcacatttactatcaattgtatctgctcttcacttacacttccttctcctaccttgcctcccacttaacatatgtgggagacaaggtagagccgag

SEQ ID NO: 606178 - DNA, 215 bp, Homo sapiens
agcggatgcatgtgttgtagattcatgggttggcttttccgtgatagaggaagcctgtttgtctctttggggtcttgcccatgcatgggaaataccattctgatgtgctgtttgcttctaaggtaagactataggaaacccaggaaagttgtcgagtggagtgatatttaaggctgttactaaaaatagatggacagtgtttggccgcttttgtg

SEQ ID NO: 606179 - DNA, 697 bp, Homo sapiens
aaactggattatttaattattttctatggagtttggtcgctttgtattcggcttatcaatcgcttgtcggatgtgtagcttgcacatattttctctcttatctcttttttcttttggacgacagagtctcctctcatcacccagcctagtgtgcagtggcacagatctcagctcactgcaaacctctggcctcccagattcaaagcgattctcctgcctcagcctcccaagtagctgggattacaaggcgtgttgtcacttgcgcccagctagatttggtattttccagtagaaacagggtttctccatgctggccaggctgtcttaaactcctgacctcaggtgattcaccttacctcggctcgcatagtgctgggattacaggcataagccacatgcccagcttattttctgctcatttaaggaatggtctcttcatttgttgattgtttcctttggtggtgcagaaagtttgtggtatgatgtgatctcattgtgtacatttgatctcattcccgtgtgctttgaaacgattatttaaaaatcttgtgctcagatcaataacctgcagtgttgtctaaggtttttaggggcaagttaatacgtttcaagtattcgattttacggtattgaatccatttctatttggattggataggagggagagacaaggggctaggttaaatactaaggaatg

SEQ ID NO: 606180 - DNA, 640 bp, Homo sapiens
  misc_feature (166)..(166): n is a, c, g, or t
  misc_feature (381)..(381): n is a, c, g, or t
  misc_feature (439)..(439): n is a, c, g, or t
  misc_feature (458)..(458): n is a, c, g, or t
gctaactggttggccttttgaagacgccaaccgtgtgctaaccaccccaacgtgtaccaatatgccccaaggacatcccgcttgcccgccgcatacgctggaggacgtgcttaaggatcccctatgatggggaaccttttcattgttcccagaaaaaaaaaaaaanttctcttcttcctgttattggtagttctgaacgttagatattttttttccctggggtccaaaggtacctaagtatatgattgcgagtggaaaaataggggaccgaaatccggtattggccgtttttcccttttcatttgtgtgtgaatttttaatataaatgcggagacgtaaagccttaatgccaggtaaaatgtttccagtgaaccagtttcngcggttccactttataataattataaataaacctgttaaatttttctggaccatgccngcctttggatttttttaanaccagtaaatttcttattgatggccactaaatggtgtttgtagcatttttatcataccgtagattccatcccttcactatacttttctaactgagttgtcctacatgccagtacatgtttttaatgttgtctgtcttctgtgctgttcctgtaagtttgctattaaaatacccttaactata

SEQ ID NO: 606181 - DNA, 882 bp, Homo sapiens
caagaatgaagagccagtcagaagtgcagaaagaagagatagaagaagcgtcagctaatgctcgaaagaggaaatattcgccttcgctccccctccgaaccaacagaatcacggacacaagagtggcaagaaaggccaacgctagcctgtcaatgggaagcgcgagaagtcagaaagacggaggatgagccacacgaagatgctaaccaaggaatatggaagacccaaagctgtacccaatatagcaagaagtagttacttccccaaaaatgtgacagctaaaagaaggatcgggcaaaactacaaccatgtcaaacggacggaaacctggtaggcggatctacgactgcagcaggatggagagaacatctggcacagcgatggagggaacaggcaacgaatgaaagatcctgcccaaaagggtgacatcacgaggtccgatcagatggatcctctgggggaaagaataaactgtccaccacgagcagaagccaatccacatacatcaatgcccagtaatgccgctcacgggcacgatgatagacggtaacacacgctggaagccacggcgggcctcccacccgggagctgcgggcaacggcaacgaaaccacagtccaaaggaagacagaaactagcacctggactatcgaacaatagatgcactggaacggtagcggctaaaagccacaaagaagtatcaaacaagcaacggcctggccgcaagaacctgacggggcatcgccggcggcgagactgagcgccagccggaccgaccacggggagacggaaaacaccaggagaccggacagcaacccagcaagggaccgccaacccacgcagggcgagaaaccggaggccacgacgaacacggcggcaaacg

SEQ ID NO: 606182 - DNA, 177 bp, Homo sapiens
tgcagctgttccagaggatccctgcactgtagatcgctcggggttgcggcgcgcaggaacaccagctcctgctgctgccggccacaggccgcgcagcactcccggtcaccttgatgactcggaagcctgagtgtggcgccggttgagcatgatgatcttgtactcgtcggagcatca

SEQ ID NO: 606183 - DNA, 294 bp, Homo sapiens
  misc_feature (209)..(209): n is a, c, g, or t
tctggtgctctagatttatcccggtcgctcggacgaatgctcggattgttttaagaaaactggcagaacaaaaccagacatgggggaaaatcgcagcttcgataggccaagcttgaaggaaaacggagacgcaggggaaggaaaaagaaacaccctgcgcgaaccaaaagagacatgagcggagaagcggagtgaatcctagatctggnagggattgtccttaccccacgtccttcttcccgagaccccgagggtcgtgatgtggaggaaaggagccaccctgcaagatggccg

SEQ ID NO: 606184 - DNA, 705 bp, Homo sapiens
caccccattcctccccacactcatcggcgccacggtggtaccacggctactcctacctatctccccttttatactaataatcgttgtataaagaaaagaaaaaaaaaaaagaaaaacaaaacaaaaaagaaaaaaaacaaaaaacaaacaacaaaacaaaacaagaaagaggggccgcgcgcgcgcgcgccgacaaaccgctctctccctcccacgagggggcgcgccccacagaagacgctcccacgtcgcgcgccacgacaccacaccacaccgaaaaggctcatcatagacgggagggggcacgcgacaacacacgacggggggccgcccggccggcagccaccaccataccaagcagaggaggcgacggaaggccgcaggcggaaagcaagcactcactatccactcaaccgacaccaccgccccacccaccgcaagcggggcgcacgccccggcccggccaggccggggcccgcccccgcgccgaggccacgccagcccccaacccacgcgccgcgcatgcacccctccgccgcacacaacacgaccccacaaccccgcaccacaccaaagccaggccacgcccaccacacgccacgcccacgcccgaccggccggccgcggcgggaccggggccgcgcaccgcgacacgacaaccacacgagacgcacggcgggccgggcccgccggccacgacccccc

SEQ ID NO: 606185 - DNA, 238 bp, Homo sapiens
ccatatcacagtcgcacattgacatacagattcatactagtaggtcgacgcgtggaaatgtccacgtggtacatttccacgtagtcacaacagtgctaataggtagaggattaaaaactgcatcaaacaggtgctagagaataaatactacctacggacaaggaggtgagagccctcgtgtggggttagtttgcagaccccttgagtgtgtgtggggggtgactcgtggaaatgtcca

SEQ ID NO: 606186 - DNA, 235 bp, Homo sapiens
gtgcaggtagaggcttactagaagtgtgaaaacgtaggcttggattaaggcgacagcgatttctaggatagtcagtagaattagaattcgtgaagcatatatagtgtagatcggaaggttatatggttgatacttgctagggctggcgcttccaacttagcgtgcatgcagtaggctcgcctgcacgctaatgtttacgcgtgttacgcgcgtacgtgccagggcctcattggtt

SEQ ID NO: 606187 - DNA, 338 bp, Homo sapiens
  misc_feature (27)..(27): n is a, c, g, or t
  misc_feature (30)..(30): n is a, c, g, or t
  misc_feature (325)..(325): n is a, c, g, or t
cttagagtgagatgaagacccactggngtntttaaaatgttctagaaggccataagcaatctccctgtctagatggtagttataacttgaaaaacttccccagcattatcagagcaaggaaaccttttcttatgtacccagcagtcatttgtgagataacaacatatattttatattaaaatgtaaatgctaaaattccatttggattaagtatgtgataatacatctagacatactgatagttgtcatgatttattgctcagtggggaaatcaaaagatgtagtcattaaatttttgtattcccgggcacataaccagtatatnaggtcttccaaag

SEQ ID NO: 606188 - DNA, 216 bp, Homo sapiens
aaagataatttatctagccctaagtaaaccaagtctccaggcagctgctgaagagccaccacaaggtgaacaaaacagtactctaaccacagccttctgagtagctagaactacaggcacatgccaccactccctgaacgcaggagtttgaggctgcagtgagctatgatcgcatcactgcactccagcctgggtgacagagtgagatcctgtctt

SEQ ID NO: 606189 - DNA, 197 bp, Homo sapiens
ggggtgtaacttttccttgccgaaggcgcgaatcaggctctgggcgatctgatcgagcaccgccggattcggccatcattttgccgagcatcgtgcccagcgcgaggatgatgccgacaaagccgagtactccgccgaaaccgtcctggaacgccttgatgatcttgtccacgggcatacccgaggtcaggccgagg

SEQ ID NO: 606190 - DNA, 470 bp, Homo sapiens
tacgagtttcagcacgagggaacagctcgcgcaatttttcgttgcagaaagaagttcggcgctatctgatgatgtcgagaaagacatcgtcctttataactacactcatagagttatcagtgcagatctggcccatgtaatagtgtgtcgacatgagtccttctgggcctcccttcaacagagaagtccaacagccagtgaaagagaagacatggcagaactgtgcgagattcatccttctaacattctcagggttctcttggaggacagacccaggcccaaagacagaagttaccgggagggaggcttcaactccatctaaggaagacctttctaacagttagagctgctcaacaactgaatggactgcttggtgaggtagagtcacttggaagtgttcaaggtggaaagatcacccttgtagaagggactcctgcatttgttaagaggttagagactggatgaacctc

SEQ ID NO: 606191 - DNA, 372 bp, Homo sapiens
  misc_feature (38)..(38): n is a, c, g, or t
  misc_feature (40)..(40): n is a, c, g, or t
  misc_feature (156)..(156): n is a, c, g, or t
  misc_feature (293)..(293): n is a, c, g, or t
  misc_feature (319)..(319): n is a, c, g, or t
  misc_feature (362)..(362): n is a, c, g, or t
ctcaactgccactcacctatctaccatccactacccantnaccacccaccatgacccaccatttgccatctacccatccatccattctataaataattagtaagcacttaatgcatgctaggtattattttaggcaccagtaagacaatcatgggnaaaaaagacagacaacccccgaccctcccatcctcagggagctctattccagtgagaacaatcaatgtgctagattgtgaaggtcatcagtgcttgctgcccgtgtaagactgaggttcccaggcccgaggaccagnctgggccagggcttcccaggggtctnctggtgggggactctcaggagtccagctgctgccccttagctnagcacctggg

SEQ ID NO: 606192 - DNA, 120 bp, Homo sapiens
cttttgctgattggtctggtatggtcccgatgccaggaccgtcattgacggcgctgaccttccccggccgcgcggagagccgggacactgctcgcctgttgtcgcggcgttggatgcagt

SEQ ID NO: 606193 - DNA, 290 bp, Homo sapiens
ccccacccttgagtttagttgcaggcccaggccctttgttttgctcccgggttaggaggtggccctctgtttgggggaacagccccctcctccccgccccccgtgcaaaagttgagccggcaaagcaaggggggcggccccagggccctgggccccctttgcacacccgctttccggcccgcgcccctgtttacagggtccctgtgtatgttggactgactgtaataaatctgtttatatcgacttgtccatgtacgtttattaaaaccatagtccgagcgtgttaacca

SEQ ID NO: 606194 - DNA, 743 bp, Homo sapiens
  misc_feature (1)..(1): n is a, c, g, or t
nggggtcccattctcccccttcccatgttttgttctaccgccgggaaggggccaccttctctttgggacctccagttcgttggaatcttagtaccagggctgcaaacaggtagtatccacggaggcccccctcaatccagcccgtgctcctgggttcccgggccggggcagtgtcccacctagcctgctcagttttggggtcgccagtgctaggcacgctttactaaagcagctggtgtgaggtcctggtctcctgaaagacggtagtcagacctccgcctccatccagaacaagcttggggcgccatgcccagtagggaataagccatccacagccttctctgtccacggctcctctgtcctgcctacactggtcctggcggggcttctctatttgacttggtttcctatcacaaattcttggctcagggcctgggttgatgtagcttagggaagcacgtccgtttgagtgcatttcctccagtctgccgattggcttctccgtctacccgcagtggcctcacaaagaggtcctcctgccccccatgctcatgtggtgtcccctccgcccacgtgttttatgtccctggctgtatacatggatttatattcttgatattttctgcccactctacaatgtttgctccatgaaggcgcagacttttcatgttctcttctctatccctagagtaagacccacttggcccaggcatatagtagctgcttaattaatacttgtctgt

SEQ ID NO: 606195 - DNA, 456 bp, Homo sapiens
  misc_feature (47)..(47): n is a, c, g, or t
gggttttgaccaatacccgaccgtaaggcctttccccaccaaatacnacgcctcttaaccaaactatggctgtccccggaccccctggtataatagaaattgtttaccctttaatacccaaagaaggttgggaaacgcccccaaaatctgcaatgtggtgtgtgccccgcgcacgacttcgaaggggttcgctgctgtaagacctataagtttttaatgagattgtcccaaaccacaaagaaaccacagtcacgcccgggcctattggtggttccacatgtgtggctaaaatgtgttcgtgacccggatccagcgtgctttccttatcgaggacgcccgaaaatcgttgtgaaagtgttgaaggccaccagccccgagtccagaaagctaaattaaaaaatgaaacttttttgagtaattaaaatgaaaagaccctagttaacaaagaaaaaaata

SEQ ID NO: 606196 - DNA, 556 bp, Homo sapiens
ggtgatcggcgcggtgacctagaggatccccgtcgcgagtgtatcctagcatcattcttaagggccttaggattcttggaatggtaaatgagcatggcttcaacttaaagtcactagctgcactagcccctcacaagagagtcagcctgtcctttgaagccagacactgacttttctgtagctatgaaagtcctagagccatcttcttccactataaagctgttctgtttacactgaaaatctgttgtttaatggagtgaccttcatcgatgctcttggctagatgttctggagaacttgctgcagcttctccagcaacacttgctgcttcaccttgcactgctatgttatggagggtggcttctttccttagttctcatggattgacctctgctagtttccagcttttcttctgcagctccctcacctctcgggcttcataacatggaagagagttagagtcttgccctggattaggttttggcttaagcgaggatagtggctgttttgatctgttcttggccattaaactttctgcttatcagcgacagtgcag

SEQ ID NO: 606197 - DNA, 1174 bp, Homo sapiens
  misc_feature (334)..(334): n is a, c, g, or t
gccaacccagcatgagcgccgcaaccacttcgcccatgatgcatgtggcgtccggcaactgtgaccgcgagcctttgccccccggatgggacgatcaagatcgacccagcagaccggcctggcccttcttcgtggaccacaaacagccgcaccacatacgtggaacgatctcgcagcgtgccacatcatgagaggcgctccaaggagactccgagtcctcgtgccaatggcccttcccgtgcatggtgctctaggcctgccgttctggctagtgcgaagtgcgcacacctgatgtaacccccatgggctccgaaccagtgctacattacccatntccttgtgctccattgacacagcgcatgagaatcctggcatggtgcaacccttttccatgtctatgccccagcctgggatgcacgtcgagttccgaactgagcgcgagcagtcagcagtgctccatcacgagagtcccaaggtcaccatctgcgtggcgccatgccagaaaccacgtcagccaggactaaaccacgtgttggacaagagtggcatgcgggctggcgggcacgccccaggcgcccacagccttcacccagggagaccttgaggcgagtcccaggtcctcacaggcatgcctccttgacctgcatcagtcgcttcatacctccatctgtgaccaagccatgacctttccttcctgtgccagggagcaaggcacagggccgaggtcactcaagggcttccctcgggagggcgtaacaatcatcccaattcccggggtggattaacagcgagaaggcatgcaaacggtttaccccgagcccatgcaggcaccaatgccctttcctttccaagcaagggcacatgaaagaaggctaggtacaccaaagcgcaggcacagtgcgaacagtacccaagatcccaaccaaggccttgatgatacacaccagacgaaatgccaaggggggaactgcgcttgggaaaggccccagagacccccagtccggggcagggacaccccccagtacacaaggaccaaccatcgacccaggggctgcacaactcagacggcgcgagaaagagcatacacaccaacgccaaaagaaacaagcaaagcccaaatccaacgtcccacaatgggcccacccggtagggccacaccggcgagacaaccagg

SEQ ID NO: 606198 - DNA, 160 bp, Homo sapiens
ccatgtggggcatacgtttgaagaaatctctatttcaatctattcctatacgttagttatgaaaaagaatagacaatcacaaaaacaagtggaccatttggtgttcccgtgagcccagttcacgaaatgccctagtgatgggacctcgggcccaacatgg

SEQ ID NO: 606199 - DNA, 251 bp, Homo sapiens
agtacacaggatcaagatgggaagattgcttgagcccaggaggtcaaggctgcagtgagccatgatccctccactgcactccagcctgggtgacagagcaagaccctgtccaaaaaaaaaaaaaaaaaaattattatttaaaatttttcatacccttcctggggggtcgtttccttccctgtattttactactgaataagatttggggggaccattatttttgcgtgctcccttattttgcgttgcacgca

SEQ ID NO: 606200 - DNA, 772 bp, Homo sapiens
acgggtaaaatatttatttggtttatgtaccttccaaatgaagaacactcagtatgaagcaaaaactattctctgacaaagatgtgaaaggggggagtgaattactgtccaggtgcatatcaacctctccatgcaattacatcggtatcttatgcaatggagaaactgggtttacacagctccgtaactggcagtatttttaaacaccccattgttggcagtcttcagaatactttccaattaaacgggtcgacatgtttaaagatgagaagataagatgtttcgctattggtaaagttgagtaatagctaatacgatgcacacttccttccattaatataatatctgggaacaactttagtggtaaacaaaaactctatcgcgcgttatcagataactctaacagcggcatacttttcactgagacacttccgtggtgagccaggcctcgtagtaacacatctgaacatgcaatttcacattccaggggtggacataagacggtgtcaataggatcgcggtgtattcaccaacgtgacttatgatgaccatgcatgacagcgtgcactaagcgcggttgtccaaccaaccctttaccgggcatttaaagccagcaagacccgcttgctatggcagccgtacacgggtgccccgctggcaccattcttagaattggtcacttgaataactcaggctgaataacctttccccttccaaaaaacaacaaacagaaacaggttagccttaatactcaaaaaacatctgtaaaacc

SEQ ID NO: 606201 - DNA, 268 bp, Homo sapiens
gcgtcgacggggaagagcaagaactcactggaaacgaactagacaccactggcacccctcgtggcttctaaccatgaccaccttcagagacaatggctattgctgcaaatgtgccttccatgtcccagatacatttcccttttgccaacttcaacctgaaactacacagggagggggattctggaaaacagccaattggacatgaaaaccttctaccggaagacatcttgggctcttaaaataaaaagatttccctgccgggcacagt

SEQ ID NO: 606202 - DNA, 260 bp, Homo sapiens
  misc_feature (77)..(77): n is a, c, g, or t
  misc_feature (96)..(97): n is a, c, g, or t
  misc_feature (115)..(115): n is a, c, g, or t
  misc_feature (134)..(134): n is a, c, g, or t
  misc_feature (153)..(153): n is a, c, g, or t
  misc_feature (237)..(237): n is a, c, g, or t
  misc_feature (244)..(244): n is a, c, g, or t
ccccaaatcctctatattgccgttgccttccacacacacctttaaaaagaggatcaaccagggtggtgaagatcagncggaatgcttctttggaanntccactggcatcatctancagaacaatggtgtgagcntgaagaggcacagacaggnctccaaaatagatgttaggatttgggtgctacctgacacagaagtaggtctaaccctccaagttactggggatgataggattantcaatgnaggtattatatatgat

SEQ ID NO: 606203 - DNA, 1171 bp, Homo sapiens
tacagggcttccttctctttctcttcctagccacccaaattttaagggtggttaattctcacaccttaataaaagcaagtgtggtgggtggcctcagtgccgtgttaatcccgagaatttggggaaggctgtgaggcagacacgagattcattgggagcctcgaggatagttcgaaaaccagccgtgggcacacatgtgggtgaaaccctgtggtctctcttaccaaaacaccacaaagaaaactttagcggggcaaagtgggtggcctgtgaaatcgtggtcccaagattacttggggaaggctgtgagggcttggaagccccgagaggggcgcccagaagaggttgtgcgagaggaacccggaagaatcgagtgcccattatcacacctccgcacgcgtgggtggtgaacgtggggtggagaaccccaaatcctcaaaaaaaaacaacaaaacaaaaaaacacccagaggcgaactaaaagtgccggggtgcgcgcgagcaacaaagggggacacaggaacagggcgcccacgggggccacaaacgcggtgttcccagtacacacacaaacttcaccctctgggcccccccagaggggggggaaaactactcgcgcgggggcatccccccccctatataagcgagagaagacgagagaaatctacaaaattctccgagaaactaagcccccgagggttaacccccgtgggcaaaaaaggaaccgcgagcgcacacaacaacagaaaaaccacaacacacaacaaaccacgacccccgaccaacccacagaaccaacagaccaacacgagggctcacacacaaacaacaaatcacagaatcagcccacgtcaagaccgctcaccaaaacgacacaacacaaaagagacaaaaatatatacaaaccaaaacacccaaacactaaaccagctccaacctataaacacaggagcacatggcttgaaaaaagaaacgggcggaccagaaagaacacaaacggagcgcggagagcagcagtgcaaagaagcacgagcacgatggagacctacacaccaccggccgaacccccgactacgaaggcaaggaaacacaacagtgtgaggcgcaaatactgcgtacatacgatagagaataggtgcctggagcaggcagagaatacgcgcgggcacgac

SEQ ID NO: 606204 - DNA, 208 bp, Homo sapiens
ctgcttcggtcgctctgcggatccccccggatattaatactgtgggttgggtgacgggagatgacgtccggttcttgacgctggtgcgtaggctttggacacgtagagcaggaggtggcacgagagaagggtggttacgcgcgaatgaagaacgcctgaatacttaggaatctcagaccatttctcacacagttctctacgtatccgg

SEQ ID NO: 606205 - DNA, 351 bp, Homo sapiens
  misc_feature (34)..(34): n is a, c, g, or t
gacgctcccctttttaaaggcatggaaaataaanaccctggctctgcggcttgccgtggaaaagctgcttttctctttgcccttgtggccgcaagaggaagaggacgtggaatgtgacgtggaaacatctttcaaaagcgacgataattttctatgttgaacagaactttgtccttttttctttcttgttatctgcgttcattggtgtgtgtgcttgtgcatatatgctcggtatcttttgccctctttctctttcgatcaggggaaatgtttaagctaaataaatctggtttgttttttgttctgttttgttttgttttctttgagaaaataaggtctttgtgttcattt

SEQ ID NO: 606206 - DNA, 141 bp, Homo sapiens
aactccatgtagctgtcaaaaacgcttgggcatggcttcctctctgccttctgacatgtggacacgtggccttcctcccctctctcctccggggaatgccgttgttttgggcgccatcttgggaagacagagatcaggcct

SEQ ID NO: 606207 - DNA, 354 bp, Homo sapiens
ggctccctagtgccccacagaatatgcttctgtctgccattttcaaagactagaataatctgccctgaattagtctatccaacatcccccagtgaatggtccctcccccaattatggcccctcatgggccataacagtaacaaccatcagtaacttatttatcattagcagcttagaagctgtgttctcttgttttttactcacagcaagtctgtaatatcaatgtaattactattattgttgctgttttaatgattgggatttaagcagggtataaagtacatctactgtcttcatcaagcccccatgcaaatgttgaaatggctagtttgcattttgttttgattagtttgg

SEQ ID NO: 606208 - DNA, 258 bp, Homo sapiens
gtttcaagaaaaccctttaaaaaatttccatgttccttaatttgcacgaatttttctcccacaagatgtgccttgccttccgagaatatgtattacctttaaacaatatcagcgcacacacatcgctgcatgttcttgtcgtgtagtttaaaaaaaaaaggacaaagcagtgacactgaactaaaaagtaaaaattgaaaagggatgtatttctatttgtaaaaaaaataaaataaaaaataagaaagtggggatcta

SEQ ID NO: 606209 - DNA, 575 bp, Homo sapiens
ttagaagtctaatgacactaggaagcaaaccaaggctgacttcagacttgtatgtagtacctgtgggtttattacctatgggtttatatcctcaaatacgacattctagtcaaagtcttggtaatataaccaatgttttcaaatgtattctgtcatacaaagagcagatttttattgaacttgtgcaataactatattaccatacaatataaatattcatgaatagtttcccaagtctggagcgaccacatagggagaaaatgtaaatgtctcaattttggttcacaaaagtatattttatcaaattgctgtaagctgtggatagcttaaaagaaaaaaagtttcctgaaatctgggaaacaagacatttaaagaatcagcaaaatttcaaataaaaaattatgaaaatattatcctcattagttcatttagtcccatgaaattaattattttctctgcttgatcttggtggacagtttcatgaagctgtcagttagttcattaaagttttggaaattctcagacagtgcagtggtatcagaaacttgtattcaaaagtacaaggccatccgtct

SEQ ID NO: 606210 - DNA, 225 bp, Homo sapiens
ggagccccgtgtccccacggcggcagcaagcggcggggggggtgaacgcggagggggcggaggagcccggggcggaggtacaggaattgcggaaaacggtgtttgacacccggtgggtgatcacccaaaggccgcagaacctgaaattgaacgcctaaggggaccccccaagaaaatttccctccgaggatcgatgtgaggcaaccccggccaaacgggtgggag

SEQ ID NO: 606211 - DNA, 400 bp, Homo sapiens
  misc_feature (64)..(64): n is a, c, g, or t
aggaaaattcccttgtttattcgccgaaagtttgggcaaacattttaagcggcaacagcatcancaacgcactggtttccctcgaaatccctcgcttggtggagcgcctccgcagggcgttcaaggaggacggagacaagaagcctctgactcgccgcaccggctggaagatcctgtgggatgtcaggcgctccaaggtcgtgattacggagaaggacggcagcgtctgggagcaaaaggtcagcgagctgcctcctagcgtgcaggagattatcgccgtcaagggtctcgagaactgggtcaagtccaagcttcaggctttggaatccgaatcatgatgtgggatgaaaatgtttatagtcagctagataaaaatgtgaaataaagaaagggcatagaa

SEQ ID NO: 606212 - DNA, 338 bp, Homo sapiens
atcactatcatggcggcttacagtcaaattcatgacaagttgtcatcgtaataccttctgtcgtacataacctccatccactctgcttgtgtcctgtcaggaatgtcggtaagtaggcagtcaatactcgatattaatatagatcgcatgtaacacttgagtagccagctgtgccaaacctcgtcatctatgccatgtatagcctagaccgtaaagtgtctaatcctccccggacatggaggacccagtggcccaacagcagcgccaacaatagtctgcatcactgtgcgtgttttccgagggttcgacacttctcctgagggtgtccgcaatgagac

SEQ ID NO: 606213 - DNA, 405 bp, Homo sapiens
  misc_feature (398)..(398): n is a, c, g, or t
tggtcctcaaaaacctcccccatggtaagggccccccatatttaattgtggattccaattatgccccctagaacaattttatgccccccggcattgttgaaaatagtagaacaataatcctggcccattagttcctgggtatgatcatgaagccctaacttctgaatatgatcacagagaaagatagtaaaaaagaacctttcccaaaccattgtcattccccaggtgactgtggacatactcaaagctgtgctccctgaggaacaacttcagagcctgtacactacaggggtgatggtgaggaatggacttcactaaaatagttgagtcattcactagcaaaatgaacaagcaaacaacaaaaacaatccccaaaagtggggcaccagtacccagantttcaaa

SEQ ID NO: 606214 - DNA, 238 bp, Homo sapiens
caggatcttacccgtacgcccaacacaggcccgcattatatcaacactccgcgaacacacaaaactgacaggccagacgggggagcacacatcggatacaaagatcgggctctcgagagacgcggcctgttggtctcccatgttagctccaagtgactaagcgcagggtgggaaataacgccactatgccggcaaatctcccgcctgggccctgagttcggcagccttttcacgggga

SEQ ID NO: 606215 - DNA, 429 bp, Homo sapiens
gataaagagcatccccgtatacagaggctaattaatttattgaaacacagataaatgagcagagagagagaatgggagaggcagagacaggcagatagccgatgtgcaaggttctggtcctggcccttcctgctcctaaggccccttcctataggtgccagcggaacttctttctagaggtggcctttcccatcgtgtgggtgtggcagagtcccagaagtgggtggatcacacagtagaaatgtgatgccaggagttgggaggggtctttcaaagtgcaggagaagtagctgagcacttgctccaggcgcctggactgcatgggccaagcaaggcagggcaggacagatgcctggggcctgggacttgagttggggtgcctaacatttccggcagctgctgccgcaagaccccacacccagggagctg

SEQ ID NO: 606216 - DNA, 489 bp, Homo sapiens
tcccaggctcaagtgattctcatacctcagccttccaagtagctggggttacaggcgcctcaatcatatctggccaattttttgtattcccagtacagacagggtttcgccatgttggccaggctggtttcaaactcctgaactcagatgatctgcctgcctcgaactcccaaagcgctgggattctaggcacgaaccacattgcacccggcctcaaacttttcatttttaacagactgtagctccgacgtaactactcagtgtgtgggcccgcatcggaaggaatgtctgcaagcttccttccctttcagcaaatgctcagaatagctccattagcgtccatggaccttctgcacatgcattcaaggagaaaacagccacaaataacacagcctgctttccaaatctccaaagcacaatctctgcactcattctactttccaactatcaccactgacggcttacagccagagagcaatttgttttcaa

SEQ ID NO: 606217 - DNA, 700 bp, Homo sapiens
ctcccaggaccacccccaaaaagaaaagctctcacgttgctccaccaataaacgtttcgatctttaaaatataaaaaaaaaaaaaaaaaaaaaaaaaaaaaaaaaaaaaaaaaaaaaaaaaaaaaaaaaaaaaaaaaaaaaaaaaaaaaaaaaaaaaaaaaaaaaaaaaaaaaaaaaaaaaaaaaaaaaaagggggggcgcgcccccaattaattttcttctgttaatacgtagaaccaaaaactcacgccgccccactatttattataataaatatagagagagcgcgcgcgcccactaatcgatgtagtgcttgttacaaatatatgtagaacagcgcacgcctcttattttaagttaggaattagctaaatatgtgtggagacacaccacttctctaccgagcgagttatacgaagccgacaccacgctctctcttcttatcgcggggggcagcaaagataataacgggcaggcacacaaactacctaagatatgattgtcatcctctgatgagaagaaaaacattatcctgctctatctgagcgcgacgttacctgttgtggagagacacaacacatcaccccccaagctcatcatcgtctaatcaacaaactaccgcatcgtcctcatcttcgatagcagacgatatatcttcataacatacaaacatattatttctatccatacgagcgccgag

SEQ ID NO: 606218 - DNA, 199 bp, Homo sapiens
gcacggtgtgtcacgcgcgtagctgtggcggaacgtgttgagcgggatggatggcaagcggcggccagcccagggcgcggggtgccccaaagctggcccgtgggcgcctctgggatgatgatgatgccactcggccatcccaattcggaggaggccctgcactgatggaggagatggaggcagaaccacaggctgcaag

SEQ ID NO: 606219 - DNA, 125 bp, Homo sapiens
ccctgcaccgcgaatctccacactgcacacgccgaagcacatactttaacaacccattatcgccgatcttcacgtgcacacgccgaggaaccatactgagcaaaccattatcgccgatcttcacg

SEQ ID NO: 606220 - DNA, 356 bp, Homo sapiens
gggtgaaaaagctttatttataaacccactcacagggcccgatttgggccacgggccgtaattgccaacccggctttaactggtgggcctcacgttagtctcactgcctcctgcagggggggcatgtgggtgtcgtgttcacccagcccctttcttcaccccacaaacaccctgggggctgtcctggagcgcgacacactgggcattcgggaggggcgggtgttcaatgcccttggccgctggtccgaggcccagtgtcaacggcagcagctgcaggtgacccccaaaaacaggcggaagggtttgggcaaggccctgggcctcattcgcttcccgctcatgaccattgaggagtt

SEQ ID NO: 606221 - DNA, 819 bp, Homo sapiens
  misc_feature (119)..(119): n is a, c, g, or t
ttttacgtcggcttcggagcgttgggcgggtggtaggaacaatggcgctgtcttaagtggcacagtggagcagctctgaagatgcaaagatacacgaaaaaacttccagaacatcttgngagaatattaatgaaaatcgttggttaaacctgacacttttaacagtgaacagcgttctgagtgtggacgagtagccagtgaagataatgaatgtcgaatgtgactgactagcagttcatttggactgagggtcgctgtctgcccatgggatagaggccagatgtgtctgtgggagttccaaagttgcaacgatttctggctagtgccagaggtttacttgactgtttgtgtgaaaagtgataagaaaacatccagaaaaaaaggctcttcgctttttaacccaaaccatggaacaattaacacccatgggttaattcttggctcaaccccaaacaccacacccaacaccacaacacccaccaccccgacaccccaccacaccacaagaacgccccacataactcacaccacaccaacaaaagcgctgggcgccgcccccccaccacaaattaaacacaccgggggggccccgccccaaaagacaatacgtctagcctgcctccaggaccaccgcagcaacatcgtcggttcccccacaaaacaccggcgcggcacgtgtcgccaacctacggccggcggatctgtacacaccccccccgatacccccccggtgtatcaacaacacaacagagcaagagcgaggcacacgcgcggccgccacagcaccgacccgacccagccacagcacccggagaacac

SEQ ID NO: 606222 - DNA, 283 bp, Homo sapiens
ggggtttttaaaaaaaaaaacccccccccccccaaaaattgttttttttgttgggccaccccaacccgtttcccaaaaaaggccgggggttaaaaaaagttttaaaaatcgggggggttttaaccccccccccccccccaaaggggaggggggttggggtttggttttcccttgggggcccgttttggaacccccgccttttgggccaacgggggccaaaattttaaaaaccctttgcgggtttttaacccccccttttgtttccttttgtttttttttggga

SEQ ID NO: 606223 - DNA, 583 bp, Homo sapiens
agtctacctctgtcaccaaagatggaaaacagctgtgcgatcacagatcaaagcaaccttgacctactgagctcaggtgagcctcccacttcagcctccaaggtagctgggactataggcatgtaccaccacaccagactaatcttttgtagagacaggaattggccatgttgaccaggatgggctcgaactcctggactaccatgatctgtttgcctcggccttccaaagggttgggattccaggcttgagccaccacgcccgtgcagaatccgggttttagacaatacatcagaactaatgggaataacactggtacgccaggtgttgcgaccaagcaggatccttcacttggtgctatgaagagagagaggtgagccataggagtctgggcggcatgacgaactccaacacgtctgcctgatagcacgctccagcagctcattgactcattcagcacattagcagtgtgtgatgcgcttatcactatgctgagagtacggaacacagaaatcaaactgacgtgcttcctgcgcttgtgaggctgacagcccaagcttgattgaaaatcatgcaacacgcg

SEQ ID NO: 606224 - DNA, 334 bp, Homo sapiens
  misc_feature (154)..(154): n is a, c, g, or t
  misc_feature (169)..(169): n is a, c, g, or t
  misc_feature (173)..(173): n is a, c, g, or t
  misc_feature (309)..(309): n is a, c, g, or t
aacggcccgcgccctgtaaattgggggcccccaagaatgccaaagtgacaagaccatgggggaggagatgactctcaacaccttcttcagtgagacgggcgctggcaagcacgtggccccccgggctgtgttgtagactggaacccacagtcantttgactgacagttntccnggcactggcacctaccgccagtcttccaccctgagcagctcatcacaggcaaggaagatgctgccaataactatgcccgagggcactacaccattggcaaggagatcattgaccttgtgtggaccgaattcgcaangctcgggggctggaaccaagtgcac

SEQ ID NO: 606225 - DNA, 132 bp, Homo sapiens
tcctagatagtgtgatacctaaagcctgaaaaaggaggtcttctcgcggcccgagaccagcgttctgggctgcacagtgacttcacatggtggcaatggcacctagcacgggcagcagctcgcccctgagtt

SEQ ID NO: 606226 - DNA, 138 bp, Homo sapiens
ggacttagctcggtcaggaagactgcgcctatttggcatgctgtactccagaatataatcaaagaattttctgtacatatttcactaaagacaagtttttgggctggagtgtggtagcttacacctgtaatcccagca

SEQ ID NO: 606227 - DNA, 584 bp, Homo sapiens
tgcgactgaacgatgatcgactagctgtatcacggaccattggagagacaaggccggggtgacgtatgcatctgtgtctttggtgatatagggcagggggtcagtcagtctgatgtattgcttcttttggagaagaaaggcagccatactggtcgacgcagcactggaagaagagggtggtgatgtggtcagtatactgtgtcgctaagaaatgtatgtactgtgaatatagggcagtaggcaggatgacttagagaactaaggttgtgggtggtctgttcattgtgtctataaaagaagaggctgcaggatgagttgagaatcatgtccattggagaagtaaggctgcacagtggtctgtgtatcgcatcctttggagaaggagccctactgtcagagcaggatgcttctgttgggggcagggctcacagtgcagccctattgcagccagagggtaggagctgtagggaggggtagcagctccctggtcctcatggtcaggctatttctctgaccatcatcttctttgctgtcagagtgttacagaggctgcagggctgtcttggagccttctccctcaccaa

SEQ ID NO: 606228 - DNA, 431 bp, Homo sapiens
gggagccaagacgcaaggtggttgatccattatctaagaaagatagatatgatgtgaaaccacatgctatgtacaatcataagaaatattggaaagcacgctcgtaagcagagaccaaggaaccaaaattgcatctgatggtctcaagggtcgtgtgtttgaagtgagtcttgctgatttgcagaatgatgaagttgcatttagaaaattcaagctgattactgaagatgttcagagtaaaaactgcctgactaacttccatggcatggatcttacccgtgacaaaatgtgttccatggtcaaaaaatggcagacaatgattgaagctcacgttgatgtcaagactaccgatggttacttgctacgtctgtactgtgttggttttactaaaaaacgcaacaatcagatacggaagacctcttatgctcagc

SEQ ID NO: 606229 - DNA, 257 bp, Homo sapiens
  misc_feature (214)..(214): n is a, c, g, or t
atttttaatttgtgtcataagaatgttttcctctacagtatttgtcataccagtttataacccacagaaatgcagagattttatttctattggaaacattactacagctatgttttacttttgaacagaatttttacttgtatagggtgcttactaatgttaaatagtttggagtatataacatttacattaaggactcatggtaggttaaaancctaaagggtaaggggtttaaaggaaataaatattcaaactga

SEQ ID NO: 606230 - DNA, 118 bp, Homo sapiens
acacaatggggctcactcacccaccacatccacaacactacaccctcattcacacgagagtaccaccctcatgttcatacacctatccgccattctcctcctatccctcaacccccac

SEQ ID NO: 606231 - DNA, 322 bp, Homo sapiens
tgtccatccccctttgttgactctcttttcagcctctgacctttgtaacaatctaatttccttcaaaagatcattgtttgggcctgtggccacctaaccttctgatgctctttccccacccttggaggaggaggaaaggaaaaaaatgggccctgagcgatcaccacataccacgccctgggggtctagtggcgaaggaggcaagtaaggtctcttgctttcatggagcttttagtcaaagcgagacgcactaaacagttaagggacaaataggattactggaggtagccctaacttctgggacagaaacaagatggtaaga

SEQ ID NO: 606232 - DNA, 140 bp, Homo sapiens
ccactgtgtctccagtggtcttgcccccccccccactgaggggaggggcttgccagcattcctctcactggcttcatttctgttctctctagtttgagtcccccaactggcaacttctagatgtctgctggctgggaaac

SEQ ID NO: 606233 - DNA, 1492 bp, Homo sapiens
cgcccttttttctctatattatgcgggggcaaatacacttaatgacagaccgtgggcatcagacacgtgggggaagaaccgtgcggggggggccagggccccaaacacagagcagggcacccccaccccctcagcatacgacagacactcagtcctccaaagacaccacgagacacgagaggcacaatttctgtcaacctccacaattgacacgttgtatttttttctccagtgtggctactttttattgtggtgtggtgtggtagtggttatttcttctcaacacaaaacaaacacaaacacaaaagacaagagcggcacacacacacagaggtcccacaacaggccggagagacaccacacacacacgctatacacacgagcggagacgagagcgggaggcgagatgtggcccacagagcgaagcgagataccacccaaggaagggagaacacgacagccacgcgacgcgagacacacctcaggggggaacgcaggggggtcaacggaagaaagagaaaaacacagcgggggcccaccccgtctgtgaggatccccctgaagaaaacatatgcggcgagagcgagtagcagacacatagagaaacacgacgtgtgcaggtacacacacacacacgcgcgggagaagaggtgcgcgaccaccgcacacaagcccccagcgtcagcaacatcacaacgacaggagtagaaaaagagagaggacgcccccacaagtggagtggcagacgagtgaatggaggcaagacgaagagcaccagacagaaaggcgtagccatctggagaagcaggacagaagaccaacacgcaaaaacaactacatagagaggcgcgaaccactaacagcacacctaggggcgaggccacacacacacagacgcaacaaaacagggagagcacacaaagggggaacacaccccacagagggatgcggacccaccactcatgtgtacacgcggtgggaaaacaaaaccaacacagataacacctaccggagaacaacgaaacagcacacaggacgagcacacaaccaacacgaccaacaacaaaaccaacgacacagaggtggcgacacaacacaaccaccccaaagacgggaccacaaaacaacggaggcgaacacaaacgcaaaccatgaaaacacaagggggcaagacaacacacagacaagacacacgacacaacgatagctcaaacgccacgtggagcgaacccaacacataccagacaagaaaggatgagagaatcaactcgccaccccaaagcaacagacccagacaataggaaaccgaacaacaggaccagaagaaagactatacgtccatcgaaggacaactaacaaactacgatgtggccatgactgacaacccgcagcagcactacaacggcggcaccacacacaacccccacgtataataaacgacaccaacagacagaggagcctcacaaagaaagatataaacgccgcccggaag

SEQ ID NO: 606234 - DNA, 1144 bp, Homo sapiens
  misc_feature (6)..(6): n is a, c, g, or t
  misc_feature (8)..(9): n is a, c, g, or t
  misc_feature (11)..(11): n is a, c, g, or t
  misc_feature (14)..(16): n is a, c, g, or t
  misc_feature (18)..(18): n is a, c, g, or t
  misc_feature (28)..(28): n is a, c, g, or t
  misc_feature (64)..(64): n is a, c, g, or t
  misc_feature (287)..(287): n is a, c, g, or t
  misc_feature (818)..(818): n is a, c, g, or t
tctagncnntnccnnnantcatcgtgcncctccagcccgcttgaacgctccccgcagccaccgncacccattggaatggccaacaggggacctgcatatgcctgagccgggaggtgcagcagaagattgagaaacaatatgatgcagatctggagcagatcctgatccagtggatcaccacccagtgccgaaaggatgtgggccggccccagcctggacgcgagaacttccagaactggctcatggatggcacggtgctatgtgagctcattaatgcactgtacccncgtagggtgcaggccccgaagtaaaagacagatccaggcctccaccatggccttcaagcagaatggagcagatctctcagtttcctgcaagcagctgagcgctatggcattaacaccactgacatcttccaaactgtggacctctgggaaggaaagaacatggcctgtgtgcagcggacgctgatgaatctgggtgggctggcagtagcccgagatgatgggctcttctctggggatcccaactggttccctaagaaatccaaggagaatcctcggaacttctcggataaccagctgcaagagggcaagaacgtgatcgggttacagatgggcaccaaccgcggggcgtctcaggcaggcatgactggctacgggatgccacgccagatcctctgatcccaccccaggccttgcccctgccctcccacgaatggttaatatatatgtagatatatatttagccagtgacatacccagagagccccagaggtctcgagctccattctgtcagggtggggggttcgagcctgntctgtcacctctgaggtgccgtgcgtggcagtccatcctcaccccatgcttagtaatacgattgccgcttccccagttagccatcaaaaggtggaccaactggactcttcctatatacacactgggacagaaaattagggggcctacagtcacctcaccgcacatgcccctggcctattactgtctctccattcttaccacctggactgttcagtctctgagctctgtgtcctccgttcattccaagagtgggagtcactgatgctggcatctgacttctgatgctggatggccttgttctacaagtatgctttctaccacaagat

SEQ ID NO: 606235 - DNA, 348 bp, Homo sapiens
gacaacttgtcaaattttgtatattgaactggttaatctgtgagtggattgtattgccttagaaattaatggcatttggctgagcatggtggctcatgcctgtaatcccagcactttgggaggccgaggcaggtggatcacctgaggttgggagttcaaaaccagcctgaccaacatggagaaaccctgtctctattaaaaatacaaaaaattactcacgcttgtaatcccagctgctcgggaggctaatgcaggagaatcacttgaactcggaaggcagaggttgtggtgagcggacatcggccattgcactccagtctgggcaacaagagtgaaactctgtctcaa

SEQ ID NO: 606236 - DNA, 996 bp, Homo sapiens
cacgcgtgcagcacttctccgccgcagacgccgccgcgatgcgctacgctcgcctcctacctgctggctgccctagcgggtgcaactcctccctccagcgccaatggacatcaagcaatgatcttgtgacatgctgtgcggctactcgcaggctggacgatctgaccggctcatacaacggttatcatctgacgctgaactggaacaaaacagttgaacgacgtcacttgctccaggtgtatttggcataggtcttggccatgtagtatcctagcttggctggtggcttgtacgcctgtgtttctgtcttgctcccagtccctctggcatgtccctctgtctgtctgggtctcttgtcgctcttgctgtcatgcacgcaggatcgaacgaatactgactgcagaatgcaaggacggatcgtcctgacatgatgtcatgactgactgcacatggcgcatctcggcctttctctgtgactgtcaacaggtgtccttggcgttccgctcgtgtcacgatttacacatgccgcctctctcttaccgctcatgtccattctccgctcattctctttttgtacgtggcgtgtgcggtcggtgctctcctacgtgtcgttgtgtcgccctctgcgcggggtgggccccctatgtggcttttgcgcgagcggttctccctctgggcttctcctgtgtgtgtcctctatttgtgtcggtctgcgcgtgttagtttgtgtgcggggttcggggatgttcgtgttcgtgtccccctgcgtggtctccctgtgcctccccgtgtctcctgcctcgttcctctcacctgctgtcttccctctcgcccctggggggtttactcccccctccgtgcctctcacgcgctttgcgcgtcctacctctttttggggctcctctggtgtggccccgcgctgtcgtgtgtgtttccttgcttgcctctgtgtccgccccgtgctccccccgcggcccccccgccctcccccccgct

SEQ ID NO: 606237 - DNA, 375 bp, Homo sapiens
  misc_feature (6)..(6): n is a, c, g, or t
  misc_feature (8)..(9): n is a, c, g, or t
  misc_feature (11)..(11): n is a, c, g, or t
  misc_feature (14)..(16): n is a, c, g, or t
  misc_feature (18)..(18): n is a, c, g, or t
  misc_feature (28)..(28): n is a, c, g, or t
  misc_feature (64)..(64): n is a, c, g, or t
  misc_feature (287)..(287): n is a, c, g, or t
  misc_feature (325)..(325): n is a, c, g, or t
  misc_feature (338)..(339): n is a, c, g, or t
  misc_feature (357)..(358): n is a, c, g, or t
  misc_feature (360)..(361): n is a, c, g, or t
  misc_feature (363)..(363): n is a, c, g, or t
  misc_feature (366)..(366): n is a, c, g, or t
tctagncnntnccnnnantcatcgtgcncctccagcccgcttgaacgctccccgcagccaccgncacccattggaatggccaacaggggacctgcatatgcctgagccgggaggtgcagcagaagattgagaaacaatatgatgcagatctggagcagatcctgatccagtggatcaccacccagtgccgaaaggatgtgggccggccccagcctggacgcgagaacttccagaactggctcatggatggcacggtgctatgtgagctcattaatgcactgtacccncgtagggtgcaggccccgaagtaaagaggagccagggntcgaccaggggcnncaagcagagggggcaganngnngnggncctggaagg

SEQ ID NO: 606238 - DNA, 1007 bp, Homo sapiens
  misc_feature (6)..(6): n is a, c, g, or t
  misc_feature (8)..(9): n is a, c, g, or t
  misc_feature (11)..(11): n is a, c, g, or t
  misc_feature (14)..(16): n is a, c, g, or t
  misc_feature (18)..(18): n is a, c, g, or t
  misc_feature (28)..(28): n is a, c, g, or t
  misc_feature (64)..(64): n is a, c, g, or t
  misc_feature (287)..(287): n is a, c, g, or t
  misc_feature (818)..(818): n is a, c, g, or t
tctagncnntnccnnnantcatcgtgcncctccagcccgcttgaacgctccccgcagccaccgncacccattggaatggccaacaggggacctgcatatgcctgagccgggaggtgcagcagaagattgagaaacaatatgatgcagatctggagcagatcctgatccagtggatcaccacccagtgccgaaaggatgtgggccggccccagcctggacgcgagaacttccagaactggctcatggatggcacggtgctatgtgagctcattaatgcactgtacccncgtagggtgcaggccccgaagtaaaagacagatccaggcctccaccatggccttcaagcagaatggagcagatctctcagtttcctgcaagcagctgagcgctatggcattaacaccactgacatcttccaaactgtggacctctgggaaggaaagaacatggcctgtgtgcagcggacgctgatgaatctgggtgggctggcagtagcccgagatgatgggctcttctctggggatcccaactggttccctaagaaatccaaggagaatcctcggaacttctcggataaccagctgcaagagggcaagaacgtgatcgggttacagatgggcaccaaccgcggggcgtctcaggcaggcatgactggctacgggatgccacgccagatcctctgatcccaccccaggccttgcccctgccctcccacgaatggttaatatatatgtagatatatatttagccagtgacatacccagagagccccagaggtctcgagctccattctgtcagggtggggggttcgagcctgntctgtcacctctgaggtgcctggtggtatgctgctcctctgtgcttagtatagtttccgttcccgagagccatcatatctggaccagtctggctcttcctttcgcctgggaccggaattcaggggcctcagtccctcagcggcatgtccctgggtattctgtctctccttcttccctctggctgttcgg

SEQ ID NO: 606239 - DNA, 625 bp, Homo sapiens
gaggccctagcagcttcgggacaatgataagactcgcctatatgcgggcaagggtgtctcaaaggctgctcgagcacactcaactaaacactacttgcgccctgcccctggcttagcatagaaactgcaacgctcacacgaacaacgcagcaagcacttgacaacactgcactgactcgacgactggatggaacagcaaaataacatctaagttatggtagcgaacgccattctggcggcgtgtcccattgccgtctgcaaagctggtgccgcttgacgaagggggtccccctgtaccgccacatcgctgacttggctggcaactctgcaagtcatcctgccagtcccggcgcttcaatgctcatcaactggcggttctcactgctggcaacaagctggccactgcaggagcttcatgatcctcccagtcggtgcagcaaacttcagggaagccatgcgcactcggagcagaggtttaccacaacctgacacgaatgtcatccaacggacgaaactactgggacaagatgcccaccaattgtgggggatgaaggcgggtttgctcccaacatcctggcagaattaagaaggcctggagctgctgaagactgcttatgggaaagcg

SEQ ID NO: 606240 - DNA, 1080 bp, Homo sapiens
  misc_feature (891)..(891): n is a, c, g, or t
gcttgcttgtgactctgtgcgctcttctgctagcgcactgattgtaacactgcaccgcgactgcacctggcacgtattgctagatgtgctgccaggggatctgacatttgtgctgaagctgggaatgtgcctcccattcatggtaccattactagatgagtgcatcgcatcactccttcgatcgagtgtcctgcatcccattcgcagtcaccagacgcgagatgctcaaagcggattttgaggcgcacctcgggtcttgcagcgcagataactctccagaaaccttggttcagacgaatgagcagcggatgacgtgagtagtgacgtcgtctagttccattgctgcgtggtatgcctcgatgtgcgcgcaggtccccgaggtagaagacagatccaggcctccaccatggccttcaagcagaatggagcagatctctcagtttcctgcaagcagctgagcgctatggcattaacaccactgacatcttccaaactgtggacctctgggaaggaaagaacatggcctgtgtgcagcggacgctgatgaatctgggtgggctggcagtagcccgagatgatgggctcttctctggggatcccaactggttccctaagaaatccaaggagaatcctcggaacttctcggataaccagctgcaagagggcaagaacgtgatcgggttacagatgggcaccaaccgcggggcgtctcaggcaggcatgactggctacgggatgccacgccagatcctctgatcccaccccaggccttgcccctgccctcccacgaatggttaatatatatgtagatatatatttagccagtgacatacccagagagccccagaggtctcgagctccattctgtcagggtggggggttcgagcctgntctgtcacctctgaggtgcctggtggtatgctgctcctctgtgcttagtatagtttccgttcccgagagccatcatatctggaccagtctggctcttcctttcgcctgggaccggaattcaggggcctcagtccctcagcggcatgtccctgggtattctgtctctccttcttccctctggctgttcgg

SEQ ID NO: 606241 - DNA, 1212 bp, Homo sapiens
  misc_feature (6)..(6): n is a, c, g, or t
  misc_feature (8)..(9): n is a, c, g, or t
  misc_feature (11)..(11): n is a, c, g, or t
  misc_feature (14)..(16): n is a, c, g, or t
  misc_feature (18)..(18): n is a, c, g, or t
  misc_feature (28)..(28): n is a, c, g, or t
  misc_feature (64)..(64): n is a, c, g, or t
  misc_feature (287)..(287): n is a, c, g, or t
  misc_feature (886)..(886): n is a, c, g, or t
tctagncnntnccnnnantcatcgtgcncctccagcccgcttgaacgctccccgcagccaccgncacccattggaatggccaacaggggacctgcatatgcctgagccgggaggtgcagcagaagattgagaaacaatatgatgcagatctggagcagatcctgatccagtggatcaccacccagtgccgaaaggatgtgggccggccccagcctggacgcgagaacttccagaactggctcatggatggcacggtgctatgtgagctcattaatgcactgtacccncgtagggtgcaggccccgaagtaaaagacagatccaggcctccaccatggccttcaagcagaatggagcagatctctcagtttcctgcaagcagctgagcgctatggcatttaccaacccacttgaccattcttcccaaaacttgtggaaccctcataggcacagggaacaaagaaaccattgtccctgtgtgcacgccgggaccgctcacatagactctatggggttggcttggaaggtacgccccggagattgattggggctcctcaactctgtggggaacttccccaatctttggtttcccctctaaagcacacatcacaaaggcagaatcccttacgagaaacttctcggataaccagctgcaagagggcaagaacgtgatcgggttacagatgggcaccaaccgcggggcgtctcaggcaggcatgactggctacgggatgccacgccagatcctctgatcccaccccaggccttgcccctgccctcccacgaatggttaatatatatgtagatatatatttagccagtgacatacccagagagccccagaggtctcgagctccattctgtcagggtggggggttcgagcctgntctgtcacctctgaggtgccgtgcgtggcagtccatcctcaccccatgcttagtaatacgattgccgcttccccagttagccatcaaaaggtggaccaactggactcttcctatatacacactgggacagaaaattagggggcctacagtcacctcaccgcacatgcccctggcctattactgtctctccattcttaccacctggactgttcagtctctgagctctgtgtcctccgttcattccaagagtgggagtcactgatgctggcatctgacttctgatgctggatggccttgttctacaagtatgctttctaccacaagat

SEQ ID NO: 606242 - DNA, 377 bp, Homo sapiens
agttgtgcctgcaatgggactgtgtcgacgctgtagcttgtctgagaggacactgcctggcgggagctgggtgtgtagaagctgctgcaacgttgggagcttggcttggggggtccacagtgaggtagaacctgggcgtacagaatctgctgtgacgagccaccgttgggacctgtacacgtgctgccgggaggcagagtgctgggcctggaggggccaccaagatgcatgagctgggcctggagaggcttgcaaagaaacatgaccttgggcctggtgaggtcaacttgagaaagttcagggcctggagagaatgctgggaggcaggagctgtgtctaaagaggccattgtaacgatggagctgtacctcacccat

SEQ ID NO: 606243 - DNA, 119 bp, Homo sapiens
aggtgtagcactgaatatgtgctatgtctggaataattttcctttacaccctaagtgggaataaaaaatggcttcatcagttatgctgataattgtactccacattaaactgctgtcca

SEQ ID NO: 606244 - DNA, 682 bp, Homo sapiens
caaaaagattgtggaggaactgataaaaccaaccaatgcccccaggcttttttttcctgtgtcaaaaggcggccccagggggtggattttctcaagggccccaggaaagagaaccggtcaccccttcaattagagagaacaagcttgagaaggggatggacaaagtgcagctcattactatttctgttttggaatgtagaggacaggccccagtgtacggtcatagtgggatcaagcctcgcctatggagtgctctgggttatgaccggaaaggagccggttcatgacatcaagggcgggaaagtgggtctgaaaactgaatacttgcaggaggcgcaacaggccgctgccaagaaatataacaaccatgtcaggcagcaactggctcaagtaaaaacgtaggacttaagtaacatggtgtttggggccacaacctacctgagcctaaagcatgggcagtgtaagtcccagaaaagctgtgggggcaggatcaaacataaagggtgcaagttgtaggtccccagtggcccagccatttttttggctaggtgtctgaacgcctgggcttcccccagaaaccacatctcccagagttccaagggaggggtctttccacgtccccaaaggaaccaagccttgttcctagcgttcaataccccgtcaataaatgttttctttgtca

SEQ ID NO: 606245 - DNA, 372 bp, Homo sapiens
gagaaattgggccggttcttttttgatagctggttgaacccccccccgcccaccccttggggggtcgactctaagcccccctttctccccacgggcctgggctttccacccggcctgacttcaaggcatctgtggagctgtcctgtttcaccaaaaaacgggagcgttaggcccggctttccccccctgacaagcccaggggttaagggttcatagggggtttgggggctccccccccttcctctcccccctcccccaaaaggggttttaggggcctgggctgggggaatggggagggcaccatcgtgctgtgtttttcaaaacttatgtttttatatgggtgcatttaccccaataaatcctcagctggga

SEQ ID NO: 606246 - DNA, 199 bp, Homo sapiens
tctctacaggttatacctagtgtccaaagagctgtcctctttggactaacagttaaagtttccaaggagattaagagggtctagtggagcaattataaagttagaactaaagatactatcttaagacaaccacgctatcaccaggctcagtaggataagtggcctctacctaatcaatcttcccacatatattgctaca

SEQ ID NO: 606247 - DNA, 1366 bp, Homo sapiens
caacttaatacacatctttgactagaatcaagcacattgaataagaatttttgtttgtttgtatttatgttttttttttttaaagaatatcatccgggagcccttcattcctcttacaggtagatccattcgtggtttagggttacatcttcaactcaaggaggcgtggtgctagtgcatggggtgtctttagaaataaagaaagttcgacgtgggaaataattttccttagaaaaggcaaaccgtggtattttttgtgatagaagttgtgggacaggcattagctcaatttttttgtgagtgggagaagaagggtaaaaactcgtggacaatttataattctatcattctaattataacttatagttcatactctctctgtgaagaaacagaagctcatgtggactcgtggatgctatacggccgtggaagatcacagcgtggcaccacactcttcagagcctcacgtgggcaaacccatctgtggccttccacagaggtctacaacggcgaaatttatgggtggtcatacagaccatttcgtggagtcatagccgtgtggatttacgaggtcattggcacacaaccaagtggccaggggcatacaaattctatggcgtatattctctatacgataaaaaatagcgggggatctctgggccatgtgtgttgctgccacggattgaggctgtggaaacctctcgtgggtcttcacagagcaatgtcacacccgtggccttgtgcccttcccaagagttgtctgcgggactatcaccacggggtgataccattgtggttcgcttgtgcgagtcattgtggccaccatctatataatacacagctaattctacacatatgggactcctccctatggcatccttaaagctcttaaaattccccttggcccctttcctagggaccaattttgggggccggggcatatccagggaaacctcctcctggacaaccccatcacttagaagaggagcagatttacccagcagtgaaacggacacacactgtggggcaaatggggggccaatcactcacaatacatggtggccgccataaaaacaccccgatcttttacgtcgacacaaccacgctggtgcgccgacattttagccccacatttctaacagcgactacaactcgctagaagctcgcacaggcacgagagagacgacacaaacaactaactactcccccagaaccacaaactcgtctctaccccacacggagtgattgcacccacaccaaaccaaagaaacctggagcgacgggaggatcaaatcaacataatagtgacaaccacgcactaatgtgcataacccagtacgagagggggcacataataggacgaccc

SEQ ID NO: 606248 - DNA, 169 bp, Homo sapiens
aagatcaagagcatggcggccgcgagccaagctgaattgaattcccgatcgccgtgcacgcagttcttcggatgatacgaggagtcctggatcaaggagaagaagctgctggtgggctcagaggactacggccgggacctaactggcgtgcagacctgagcaagccagg

SEQ ID NO: 606249 - DNA, 170 bp, Homo sapiens
gcaccgtcataaggtgtagtagcaggagcctctatctttgttctctggcatggaaggggtcctcagagttactggggcccagactgatcttgcttcccttggcctttatcccctggctttcctagacactgccttgtgctggtggatatttattagcctgactcaaacaa

SEQ ID NO: 606250 - DNA, 121 bp, Homo sapiens
agcgggtttggaggcatgtttggtgtcagatggaatgagttgatcagtctgctgtaggttatgaataccaggggaagactgagaagcatgcctcccagaaaatgactactccagtaggtta

SEQ ID NO: 606251 - DNA, 378 bp, Homo sapiens
ctttggggtctttgctaagttttatcagcaaaaaagaagagaagagttgaggcgacattttagagattttggagacagcctgaccagaggaggaaagggctttctgcgaggagttgttggaggagtgactggaataataacaaaacctgtggaaggtgccaaaaaggaaggagctgctggattctttaaaggaattggaaaagggcttgtggttgctgtgacccgtacaactgggggaatcgtagatatggccagtagtaccttccaaggcattcagagggcagcagaatcaactgaggaagtatctagcctacgtccccctcgcctgatccatgaagatggcatcattcggccttatgacagacagtaatctgaggg

SEQ ID NO: 606252 - DNA, 575 bp, Homo sapiens
ttttttcccccttagaatacctaccatactgcatttcagcttggagtgcgcagcatgaggcatttgtggttcagaaaagaggtcttcctttttcctcctcctgttttcttttccttccttctccccaactccccaaaggcttactgcctttcttctcaggccacgtgtgtagataacctttgaggaaaagatggtttccgtgctgggatatttggatattacctaaagggacaagatgagccctttctttgccttgttttctttttctggcctcatcagagttaattatatgtgagtgtgtggcagtttattgaaccatccatcccgtgtcgtgagctgataagcccctttttgttggcttccatcaaggttgtttgtttcagaagttcctaatgcagtaggagaacaaagtggcaggtttcttatccctcgaagtctctaaagcagattcataatggtgttccattggtgctttattagaactgtcattcgctgtcaacttaggttattagcattgttccatagtgccagggattgataagttagagcttcctcagaagcaccagtgagctcag

SEQ ID NO: 606253 - DNA, 126 bp, Homo sapiens
  misc_feature (27)..(27): n is a, c, g, or t
  misc_feature (86)..(86): n is a, c, g, or t
  misc_feature (96)..(96): n is a, c, g, or t
gggcgcgccgcagctcctcaacgccgnaacggccggcccaactgcaggaagggttataaaattatacaccatggccctcctaaagncactctaggnaaaccatgtcatcctgatcttaaaacacct

SEQ ID NO: 606254 - DNA, 141 bp, Homo sapiens
atctgcaggacactcagtgtgtaagtgtctgtactttgtacaatagcatacaactagttggacagttggactacatacatgggctggaatcttatttgtcctgatatattttctagattgaccaatagagtgattttgcat

SEQ ID NO: 606255 - DNA, 84 bp, Homo sapiens
gagagagatgaagggtcttactactgtgcctgtgacaccgttttactgggggccggtggctcctgggacacccgacagatgttt

SEQ ID NO: 606256 - DNA, 583 bp, Homo sapiens
  misc_feature (6)..(6): n is a, c, g, or t
  misc_feature (67)..(67): n is a, c, g, or t
  misc_feature (338)..(338): n is a, c, g, or t
aacctnccctggggtcccctcctttgaatggcccaaaagatcaagttagggggccttcctctgggcntgccttatcccctcaataagcaccctgctccccggatgtgacagacagcttcagttttgtcaccctgtggtccagcagctttctgagggagggctgggaccagctctcatttacctgtgtctctcacccctgcaaggttctggccacagcaagcaatgcctaagcacatatttgtggagtaaaggtataaaagacaaggcatcccagatgggcgtggtggctcaatcctagcacttggagagtctgagacgggaggatcacttgagggcanagtttcagaccagcctgggcaacccagtgagaccccatctctacaaaaaaaacatatttttgtttgtttgtttgtttgtttgttgttttttaattagccaggcgtattggtgtgcacctgtaatctcagctacttgagaggctgaggtgggaggatctgttaagcccaggaagttgaggctgcagtgagttatcatcccaccactgcacttcagcctgggcaatggagcaacaccctgtctcaaa

SEQ ID NO: 606257 - DNA, 499 bp, Homo sapiens
cccccactgcacaaataagtgtaatccacttaaaagatactgtcttaatgtctaggtatttttatatcttttgtttttgcaggtgttacagacagaagaaaacatgttaaaatggaccttatattttatttctaggtcatgtttatttctagaaagttagttgggtatgaaccaatggccaggtgggcatgaaccaatgagccacgttcaagacatgataggggaaaatctcttgcctgtgaccactactatacaactacatttcccctgctagatccaacctgctcatcactacacttataaatatcatttcagttttctctttggactgagcaataataaatctttgtttcatcttagcagctgaccatatttcatgcaaactttgaatttaggttctctttagccccaacagcaacgtgttgtttgtcttatctttttcaaatatcttattatttttcatcacatttattctcttggttaaaactgaaaacattct

SEQ ID NO: 606258 - DNA, 432 bp, Homo sapiens
acaaggtcatcatttaataaggctgaattcattttcaccacacgggattgtacacgggcatttggtgaaacaaatttcttttttaacagatcttagtttaaaaaagtcatagggcccgggggttctgtataaaccgggggacagtaagttagttcctttggtttaacttataagcctcaacttcaccgcaaaataaagaatgggggccaaagaaagcataatcgggcactcgtataaaacaggattggttctataatttgaagctttctgaatggacgggttcaggcctgatgcaactggaaaaagattacttaatggatagactttttggaaattggataaaagggtattaccttttatcggtgggagcttaaacagccctatatcactaattggttttcaaaatcaaaaacctgtttttgaatccccaag

SEQ ID NO: 606259 - DNA, 155 bp, Homo sapiens
  misc_feature (47)..(47): n is a, c, g, or t
gatctacaggattctctttcaaggctgaagaaaaaagagcacgtganttccaatccatctccccactccaccccttccaaaattcaagcaattctcctgtgttggcttcctgagtagctgggactacaggcatgtgccaccacgcctgaccaaag

SEQ ID NO: 606260 - DNA, 942 bp, Homo sapiens
  misc_feature (325)..(325): n is a, c, g, or t
  misc_feature (383)..(383): n is a, c, g, or t
  misc_feature (661)..(663): n is a, c, g, or t
  misc_feature (822)..(822): n is a, c, g, or t
  misc_feature (847)..(847): n is a, c, g, or t
ggaagatgtctcagagccttccatgacctcccctccccagcgccaaatgccaagtgagacttggagctgcacaaagtacagtatggaccactaaatctccaagacctggtgtgtgcggaaggccggagtcctgctatgctgctgcaggtgttctgacacgcaagctgtgtgtagctggtgtagctgctgcagagatgggtgcggcgtgcgctgtgctctgtccggtgtctctgtgcgtcctgtgctgctgggtggggatgatgtgcatggtgatgaggcagctgtctttccccctcgaagatgttccctcgaagacatcgcatangctgaggatggcgtgaaggcgctccctcgagggcaagatcaagatacctttaagtgcntcttcatttagcaagtcgagagtctccggtcgctttcaccccaaatcctcctcgcatgtgggagcgaacgacgcaccaattccctaggcgcttacccgtcagggggtagcaccgtgttgagaccgcgtaagagagtggatctggtgcgtgagagtgatagaggagactgggcgactgacgagtgtactagcaaggcgctagctagtggtgcataaaagtcgggtcggacgcgacaagtgcgtcgttgatcgaagactaccacgagcaatagtttgttnnntcccccaaatccttctgttgtcttgggcgtgcctcacccagcaagtaaaggcgtgagtcaagcacagggtgggtacgacccgtgatgacgagatgatctgccctacgagtgggactcattgccctctaagaatgcgtcacctcgctcgactgttaacantacaatagactcgccgtatgaaagncgaagaaaaagaacgggttccccatgtggggcttgctcaaaagcatgtgaaggacaccacgccttcggagttgacttgggcgacgcggaacagac

SEQ ID NO: 606261 - DNA, 500 bp, Homo sapiens
  misc_feature (22)..(22): n is a, c, g, or t
  misc_feature (88)..(88): n is a, c, g, or t
  misc_feature (132)..(133): n is a, c, g, or t
  misc_feature (136)..(136): n is a, c, g, or t
  misc_feature (332)..(332): n is a, c, g, or t
  misc_feature (370)..(370): n is a, c, g, or t
  misc_feature (404)..(404): n is a, c, g, or t
  misc_feature (458)..(458): n is a, c, g, or t
agtatgctgtcctctatggaanactgagagccccaggagaggtctttaaatcccttcctcagaattatattcatcccagaaatatagncttggaaaaataatttggttacaagcatagatcccaggaatagnngtnccccaagttgctaagttttacataggggagactgggaaattcaaagaattggatggagaaaccataggatccaagataatgtcagggggttgaagatgttgggagaggcatggtagctcattgcagttgtgtattttccttctcacttggagtggaagttgtagggatatctgcctctaggaaatgtgccaatccnttttgaaaaaatgtggacacaggaagaggaggtggtangtaggagatggccagctctccgccagctgatcanaccaagagagaagatgatgaggcccaggaccagagtcatagcagacacagaaancttcagggtgctggcattgggggacaagccaaggtgtccaag

SEQ ID NO: 606262 - DNA, 447 bp, Homo sapiens
  misc_feature (94)..(96): n is a, c, g, or t
  misc_feature (98)..(99): n is a, c, g, or t
cgtgcgtctggttatggatgtgttaataatggttttctccgccgccgcgttttgaatagagttggtgttagaatacgaaaaatccatgtttacnnnanngagaataagattagttgcctaatccggagatatttgagaacaggtaagtagtattccgggggggcggttgaaaccgagtgagccagaccatacgctagacgagatggaacctaattagcccaaagatcacacgctgtgttgagagaaagtgcagccggagcgtcagcgtgtgtcgctgagaaatgttattctagttgaggatgatctagattttgttcctcatgggcagaaagctacgtatcttgtgtattgtccggctggagacgggacgatactactgcactatacgctttagccgaatgataaataaaatgttcagccaccttacgtacctgaacagaagctggg

SEQ ID NO: 606263 - DNA, 351 bp, Homo sapiens
  misc_feature (94)..(96): n is a, c, g, or t
  misc_feature (98)..(99): n is a, c, g, or t
  misc_feature (297)..(297): n is a, c, g, or t
cgtgcgtctggttatggatgtgttaataatggttttctccgccgccgcgttttgaatagagttggtgttagaatacgaaaaatccatgtttacnnnanngagaataagattagttgcctaatccggagatatttgagaacaggtaagtagtattccgggggggcggttgaaaccgagtgagccagaccatacgctagacgagatggaacctaattagcccaaagatcacacatagtcatagaattagaccagcggtttctgtacccccgattatagcgcatcgttactgcctgactnggcttaaaccctgtaccttcatcaaaagtggtcatcacgtacccggggtttacc

SEQ ID NO: 606264 - DNA, 303 bp, Homo sapiens
ttagatgatcccgcagctcgtgtcgtggcaaagatgcaaagaaaagggaattcatacactgttggtgggaatgtaagttagtacagccattatagaaaatagtatagaggttcttcaaaacactaaaattagaaatattggctgggcatggtggctcaggcctataatcccagcactttgggaggccaaggtgggcggatcacgaggtcaagagaaggagaccatcctggccaatatgatgaaaccccgtctgtactaaaaacacaaaaattagccgggcgtggtagcgcgcgtctgtagtcc

SEQ ID NO: 606265 - DNA, 270 bp, Homo sapiens
tgacagaggtcactcagtgatagtttaagttaaatatgtagatcagggatgtacaatcttttggcttccctgagccacattggaagaagaattgtcttgggccgcacataaatatgctaacactgacgatagctgatgagcttaaaaaaaaaaaaaaattgcaagaaaaatctcatgttttacgaaagttttacagattttgtgttgggctgcatttcaaagctgttctgggctgcatttagacccgtgggctagagttggacaagcttg

SEQ ID NO: 606266 - DNA, 437 bp, Homo sapiens
cccaggaccaggagatggaagatggattagcctttaagacttttttggaccaccttgtaccaaagttaattgaagccggagaagtcaaaaatgctgaaatcctcagattgaaggagcagttgcgtgaaatggaaaacctacgcctggaaggtcagcagttattagagaaaaactggttcctgcagggtcagctggatgatattaaaggccaaagggaaaccagggatcagaatcatccagatattcaacagttgaagaatgaccaggaggaaagtttcaaggaaggacttgcaaaaggtaaaatagttgagaaatgctgaaaatgaaagcagacctagaagaagtccaaagtgccctttacaccaaagagatggattgccttagaatgactgatgaagtcgaacgaacccaaactttggagtctaaagcattccagg

SEQ ID NO: 606267 - DNA, 441 bp, Homo sapiens
gctcagccgaacacatgtcccggagatcttgcggcgtgtgggccctatgccatgcatgccaggccccttctcttgctgtgaggaccttcaactccttggctatgggggttctggctttaggtccattggctcgtttaggggcccctcaagatgatggcagttcctgggtgtcacgggtacctttacgggcgtggcactcccctcgctttgggtgcctccgttcgggctgctcgcctggaattctctaattctcgacgtcgcatctcctcctttatcagagtttcgcccaacctttgctgatttgacctggtccctggaatcttctcacatatgtgctgggtcgccacaggcagaggaggtggcaaagtggattggacggctggtgaggtggatagttctgctgcaagggtgctgggtggttgggatcctttggagacatct

SEQ ID NO: 606268 - DNA, 249 bp, Homo sapiens
  misc_feature (30)..(30): n is a, c, g, or t
  misc_feature (125)..(125): n is a, c, g, or t
  misc_feature (128)..(128): n is a, c, g, or t
  misc_feature (173)..(173): n is a, c, g, or t
  misc_feature (185)..(185): n is a, c, g, or t
  misc_feature (208)..(208): n is a, c, g, or t
agccagagacaaagtggtgaggtagaaatnccatccttatctctggaaactctgctctatatcttggccaaaggagacgccaaatcaaagtggctgtttagcagcaccacacagtaagagtttcntcncacgggtcccccgggtaaaaacccctggctggccttcccacactnctgggatatccnctttgggacctctcccattcagnatgggtggcactctgatcatttactaaaaccagtgctaacc

SEQ ID NO: 606269 - DNA, 119 bp, Homo sapiens
ttaagcctcacacgttttaacaagttcacaccgtcggtcacctccggggtctcatggatggtctcgtttgtggctcaaggtggggcttaagggacccttggggcttaagggacccttgg

SEQ ID NO: 606270 - DNA, 111 bp, Homo sapiens
  misc_feature (91)..(91): n is a, c, g, or t
gttccgaggagcatcgccgaagcccgaggccggtcccgtgttagggactgcaggggaaggcagcggcggggcggcgggagccaccgggtcntgggactggggaactgcctc

SEQ ID NO: 606271 - DNA, 170 bp, Homo sapiens
gcgtctgctcttgaggatcccacctcgctttagtgctccgcgttccagtggccaggctggagccacagcaccccattatgcggcaggggcctacccatccttcaggcagcctatgggacgcaggcccattctgtccctcggtcgccgtgtgcccggagtgggtccgtcgt

SEQ ID NO: 606272 - DNA, 225 bp, Homo sapiens
tttggatctggtgcacaatcacaatccagttggtcctgagactttgcgcagatatcatgaatgtcattggagaacctattgatgaaagaggtcccatcaaaaccaaacaattagctcccaattcactgctgcaggctccacgagatacatgcgaaatgcagtgttgagcacggaaattctggctgactggctatcaacggttgtcgactctgctcagctcccata

SEQ ID NO: 606273 - DNA, 308 bp, Homo sapiens
actggtgactctacgtggccatcagcaacaagttcatcggggacctcatgccagtgaccatcatgcgcctcatgatcaacaatacgaaggccttcatccaccacgagctgctggccaacctatactcctcggaagaccatagcaggctcatggagagagtcggctgatcaggcacagcggtgggacgacatgctgtgcatttaccatgcccttcagggaggcgctcaagagtcgtcggtgacggtcatgaccagtaggtgtgtgcacgtccgatatggggatcctgagagtgaacccagcgggcatgc

SEQ ID NO: 606274 - DNA, 261 bp, Homo sapiens
ctgaacatgccagcaggatggctcttgtacatgtatagagggcgtgtccacgttctggggtcagaggggattcatgtgatcagtgacttgaggtcagctgaccctggaagtgctgctcatcctgccaagacctcctgggtcctcctatggccccctcccagaccagtactccgtctcctgctgcagaacaaaccacccaaaacgaagcagctttagacgacagcaactcagcatctctcagacggttccggctcagccctt

SEQ ID NO: 606275 - DNA, 134 bp, Homo sapiens
cccctgcatatgcaaggtccaagaggtgtgtaggcagcgtgacatgtgcaggatatcaagatgaaccaccgaaatagaataagttacctattgcagttgtgccctacgcaggttcttggccttgccatatgcaa

SEQ ID NO: 606276 - DNA, 448 bp, Homo sapiens
  misc_feature (422)..(422): n is a, c, g, or t
  misc_feature (438)..(438): n is a, c, g, or t
atggacttttaggttgattccatgtctttgctattgtgaatagtgctgcaatgaacatatacatgtgtgtctttataacagaacaagttatattcctttgggtatctacccagtaatggggctgctgggtcagaaggtatttgtttttcggtctttgaggaagaaccacaccgttttccacaacggttgaactaatttccactttcaccaacagtgtgtaagcattcctttttctctgcaacctcgccagcatctgttttttgtttgttttttgagacggagttttgcttttgttgccggggctgggagtgcaatggcacgattcttgggctcatcgcagcctctgcctcccgggttcgggtggattctcctgcctcagcctcccaagtagttggggattacagggcatgcaccaccatgcncgggctaatttttgtnatttttaagt

SEQ ID NO: 606277 - DNA, 1371 bp, Homo sapiens
  misc_feature (1)..(1): n is a, c, g, or t
ngtcgcgctgggtgtcgttgatggtatgtctgtggaggaatgtgatctatgtgtctgtggcgtgttgtggtttgcgtcggcttgtggtggcttgtagtcttctcgttgttgcgtggcgttgggtcgtgtgcggttgttgtgtgactgtgtagtgtgtcgttcactaccttttttcaaaccccggtgttgggcccttatggactggaggagatcaacgtggttggcacagaaaggacgtcgttttttactgcctccccctttttttatcgccgtttctcattgttgggcgtgcccttggggtgtgcaaattttggcacccgagggcgtttgagacacgaaagtttgggttagcgctacgtgtctcgtggaaagaaagacgctcgcccagctccaacagaaatagggtccctactgttatatggtgatgatttaacatggggcacggtttttccccctttattaggggattatcttgagagacccatggttattgttgagagtttcttaaatacggggacaggaggtgccccccggtaagtccttccaagacacacagcggttttaagggattgacgaacgaattgtgggtccatttggaaaaagggtggtctaataccaaggaggttcacaaggatggtatcgtcatgagtccatctcatcttcaggcccctccacaaggtgtccctcgtttatgccccccacggggaaccttctcctctctggagagcttggaaggaccccagtactgcccgcctttgggggtgacaaacaaattgggcctaccattgacccttttgggcctgtttccccctctgtctacaacccaatagcccagtgctctgagaccacacccccagtctaaccctgtagcccaacaagttctcgggactacacgtgccacgtacccaccatcacagggcttttaaggcctaatattccacgacacggtatgtcgggcggaaacagctcttgactgtccctcaagggtgtctgtaaccgcgccacgccccagagatgccgcagataaaaaaagaaatgaaaacacatcaccctttctgtttggcaagaagttgggccccacgaaaaggagaagccacggagacacaacacgctgcatccacccctggaaacccgagttatgttactaatgggggaagacgttttcatcccgctaattcttgggaataagaggaggaagcggctggcacactgaaggctggaacacttgctactggataatcgtagcttttaatgttgcgccttcttcaggtttttaagggattttcccttttggttcccttttgtacccctttggaaaaataatctgcagaaacgagctgtgcttgccaagacttcatagttcccaagaat

SEQ ID NO: 606278 - DNA, 92 bp, Homo sapiens
gagactggagcgctgcggcgcccgcaacttctcccgttgctgctgctgctctgcggtgggtgtcccagagcaggcggctgcaacgagacagg

SEQ ID NO: 606279 - DNA, 215 bp, Homo sapiens
  misc_feature (28)..(29): n is a, c, g, or t
  misc_feature (40)..(40): n is a, c, g, or t
  misc_feature (64)..(64): n is a, c, g, or t
  misc_feature (169)..(169): n is a, c, g, or t
agatacccccggagctccagccgcgcgnnttccgtgcgcnggccgctctgcccctaaacttctnccgtagctccctttcaagccagcgaatttattccttaaaaccagaaactgaacctcggcacgggaaaggagtccgcggaggagcaaaaccacagcagagcaagangaagaatcagagagcagccttcccggagcaccaactccgtgtcggg

SEQ ID NO: 606280 - DNA, 346 bp, Homo sapiens
  misc_feature (7)..(7): n is a, c, g, or t
  misc_feature (198)..(198): n is a, c, g, or t
  misc_feature (259)..(259): n is a, c, g, or t
  misc_feature (307)..(307): n is a, c, g, or t
agtgtgntggaaaggcaggaggaagctctcccatgctgttttctctggaggaacagaacggaaaaggacagcaatgatttgaaagtctcccaaggcttgaccctggcctgggcctggtttcctcctgggaaagaaggataggcccagtccctgggggattgggataggggtatgaagataagatcgtgcttgaaaatnagtttgcagtgttttcttcccctcagccactcgggggtcttgtccttagtgcagcacaaanatcaggactcaggaaaggatccttttgttttttttttttttttttttntaaactgtatgaagcttgagagttgcatcacacgccgcc

SEQ ID NO: 606281 - DNA, 235 bp, Homo sapiens
gcggtacggcaaactgtggagtcctagacgtgtgtgtgttacaggcaggtgtctgcagcagtggcagaggcgcaggccacgctagcgagggctaggagttaagagtactgtctaaccagtctgccttcttccttcttccagcagccagccctcccctcccattacagttttactcccacatcctaaaagctcctaacttgaccttggtctaaatagtctctcttaagcggctcag

SEQ ID NO: 606282 - DNA, 1138 bp, Homo sapiens
caggttctctctcacgtgccatcaaacgtgtaaaagattaaactgcgaagtcaagctcaacagattattttgggaaagtttcggtatcaagggattaagtaacatcattctggttttccaccaggcagggagtcagggcttagggtttcaaaacacctctgcttactgatgtgcgccttaatattcggctatggccagcaattacacacatggtcttcatggtacattgggaactaacacgtgatgtgatatattcctaaactatgaaacctttttcctaagtagtcaggctagactcattggtacggggaagtataaacgccacccaacggtacagtaacataagcaaacatccgtggactaatcatggtcgtccagcagacaaaatgtgctttggcttgcgtctgggacacaccgcgataccactacggtgacattactaacataagtcagggccggggcgtgggtgggctcaaacctggttaattcccagaacactgggaaggccgaaggacagggggggactggcttggagctcaggggagttctgagacacagttctggggcaacaaaaagttggagactccatctctattatgaaaaccaaaaaaccacgtacaggcacacacacaacattaaatcacgtgggccattgggcacctggtgcttaagacagtaggaaaatttacagggttgttggggtggagtaattccaaaaaggtccaatgtttctcaatggtaccgtctggggggcacgctccggtacacatcctggtgagggggccttcccaagcagcccccaaatgtcacgggaggcacacgaagtatggggccacggaaaacctgtgaactgacactggcaagcagaacaggcggggccaacccggggagtatttggaccccagtagaagagatggggtcccagaataatgaggccctcaagggccccatatggctgaatcaacactggctcccttgacagacggcatggataacattagacttatgcaaccaagcggccaagtactgcgagcagcaacagcaccagctgatacaccctggtcgttcgtgatcgccatccatacgtcagctctctcttttttctttctctgccgtcctcttatgtatgtctgtgcaa

SEQ ID NO: 606283 - DNA, 509 bp, Homo sapiens
tctttccaaacaacacaaaggtattgaaataacattaattctaattaaattccacaagttctttattaaatctccaaattggatattattagtattttatatagtcaatgtttatttttttgatgggacatggtgggggcttaccttttttcttgtgtgtcagatgttccttctaggtagaattctttataccttctgaaattatgtccttagagctgtagatttagaactgacatctcttgagctgttctaagataatatcttttactttggagatacgcagtttttattatatgtctagctatagatttatcatggatttaggttcattatgaatctgcagatttgtgtcttccatcaaatctggattgttttcaatattaaaaaaacttctattttaaaatctgtatatagaaaggtacataaacataaatgaacatgttaatgagtaattgtaacaactatgtaactgtccaagtcaagaaataaaacatatcaagtaaaaaaaa

SEQ ID NO: 606284 - DNA, 971 bp, Homo sapiens
cgttcagtcgcctctcctaattcagtcctcacaacagtgctttatacaaactgggacaagaggtaagaggaagtcaggcagatttccagtcatcagtagagagtagaagggaccaggtagaggatcaggattcgaacggactgcacccaggctctgctatccaggcttgctgtgtgacttgtggtaattttgttcccttagggaactgagcttgctcattggtaaatgcaaacaggctggtgggaggatcagaatgagatccaggggtgaaaacagcttagttcactatcaggaatgtacccacgcggtatataaaggcgagatattattatagtcatggtgatggtagatcgaggaacccatttcctcaattctgcaaattggaaagcctgagggcccaaagagggacaggggcttgccccaggtctcagcaggctgtgagcaagagctagagcctaagtcctcctgtgcttggggcctggagcccttccttgtagccccaggggatcagggtcttagtaggatacaggcttagatcgagtgactgtaccctgagaacctaggggagtaccggtacccaatgcttacgtccgaccaccgaccttggacatgatggaggaagacccagctgtgtagagatgagcaccagagccaagaagctgaggaggatctggagaatcctggaggaagaggagagtcgcgctgagaggctggtacagaagccgggttctcaaggacccaggaaggtggcgtgcagcatctggagacgagacgacgacgcaaagcctcccggaggacccaggagagcggaatagcgaccagggggcacgggccatcacaaaggtcaccatggagaagctggagacctctagagagccccaagaggctggacggtccataggcggaaagagtgtcagaggccagagacaagaacagtagacaatcaggacaagtgtgagtgagtaggagag

SEQ ID NO: 606285 - DNA, 543 bp, Homo sapiens
  misc_feature (393)..(393): n is a, c, g, or t
gaatgagtgtggttatgttctaataaaacttatttataaaaacaaggggaggctgggtttagcctgtgggccatagttgtcaaccactggtgtaaaaccttagttatatatgatctgcattttcttgaactgatcatgaaaacttataaacctaacagaaaagccacataatatttagtgtcattatgcaataatcacattgcctttgtgttaatagtcaaatacttactttttcctatatccaggactctgcctgagaaatttatacattcctccaaaggtaagtataaaattctcaggcagagtcctggatataggaaaaagtaagtgattgaagtaatacttcagatggttaagtcagaactaagtgatagtgctaacaactgatgcaangagtgcctcatcgtgagagtgcttaaagatgggatccccagagaccataagacagatactggaactggtatctagctactgatgtcttacttcgacgttctattgatgcttcagaatacagtggtagccatgtgcatgaatatacccata

SEQ ID NO: 606286 - DNA, 430 bp, Homo sapiens
gatcagctcgtcccgcttctgcttctgcctaggttgaacagggtcgttggtgagaggcaattgaagtggggagagaccacctgagcaatgactatcgatcagattgtcaaacgcatatgctcgaattggcaagtcctacttcatagaagacgagtactaggatgccgatccatttctatatagcaagatctctggacagagcaccgatatcccacggtgtgctcaagacattgccatgccaggtcagagaaatatctcatgtaaggagcaagaagcggctggcctatcgactaaacccctgatctggactttgtgtcgagaagaacaaacggcaaccgcagtagtttgctcgaagagggtgacctatcccgcaggaccaatgatacgcagttagtacacgaagaccagtcatgagagcgaacctcgaaac

SEQ ID NO: 606287 - DNA, 121 bp, Homo sapiens
  misc_feature (5)..(5): n is a, c, g, or t
ccggnacacgacaggagtacctgagatgtagcagaaactcaggcttcacgtgggttacacggtgaaagagcgagaatcaggcactcctattacgtgtacgcggccactacgtgtccggcca

SEQ ID NO: 606288 - DNA, 866 bp, Homo sapiens
  misc_feature (300)..(300): n is a, c, g, or t
  misc_feature (490)..(490): n is a, c, g, or t
  misc_feature (800)..(800): n is a, c, g, or t
  misc_feature (826)..(826): n is a, c, g, or t
catagaatacatgagctatttctgtcaatctcctagaacgtttatgggcgcagattaaacactatctattagttcttcattctgctgtttctaaattaacagaaacttcattagcatttgggcataggatttccttcatggccttatggtgttatgtgtcacactttatgcttcagatatgattcttaaaatcataactgaagatatgattaaaaaatcaaagatttttaaaatctttcacatacttgtccttgaaattcccagtaaaagggaaaccatcagtcccatagtcctaggggncttcccgactgtacaagaaatcactacttcatgccccagtgcagtgttttagaggagaggctgcaaggcttgggaaagtggccccgcattcagagtcagacctcaggggctgtgagttctgactccgcttcgttgtggttgaatcatcttgtcaacttccttgacgcgcccttgagtttctctttcttcntctttaaattttggaggatcagatgccagaaagtcaggagactgaagagtaaagatgtggaaatccctgtctagaccctggtactggggagagttttgtccttgggatggacctggctcctgccctgtaggcagtgaccacagcagcatgtccagccttccactgaggcaggcgtgtctgtcttttctcagagtatgaagagtgtaaagacctcataaaatttatgctgaggaatgagcgacagttcaaggaggagaagcttgcagagcagctcaagcaagctgaggagctcaggtgaggggaccccgtngggggaggcaggcgggtagggtgtanatctcctgaagtacagcagccgggcgggcctaaacggccc

SEQ ID NO: 606289 - DNA, 1051 bp, Homo sapiens
tgctgctgttctgccgccggctgcgacaccaggctgatcgtgaggatggaaaacgcttgcaacgatttacctgccagacgtgcccctactgtgcacatcatcatccgcaaggtaacgaatgcgtaagtagcccaaaactgaagatatacgatgattatcgtgcgttggtgcgtacgaccagacgtgcgctgggtagcacattggttgagctactacctggacgagcaggtacagttggttccgcaagagtggctaacaattctaatccttcgttaaccatttcacattacgagtggcgattcattacggagcacttccactgtgtcctgtcagagtagaggacctggcattgaatctcacccttcataacaaaggctggcgtgtaactgcttacagcttggttggaaaacgcgattggaggtggaatacatggccagcgttggcctcagcgtgccccataaggtggtgttgatttagctgtttgttccccatcaggtggagcaagaataggctttgagattggcaaatttgaatagaaatatggcagatgtaccatgaaatgccttcgttagacataggtgctgagatgcgtaacaagtatgagaacccttttttgaagggctgtaaatgaagcccaggcgagtgttcacgttaaaaattactggtgctcgttatatttggctcgaatggcaaggtgtctgggaaataggaaaagctacattgcaaatagtacatggggcgagaaattatacctaggtagctcggtgggacaggacagaaaccacggagtaaccccgagtaaaacttggaatagtttatggcttgctgggttggttaagaaaggtaaccctttagttcattttcccattagcaaactcggaagcgtttagtgatttgggccccaggtttgcacaaatttccccttgagacttacccccaaattcgaaagtaaactcctgttaaagactagattaggcgcaagccctggttttgggtcacacacagctttttatttttagccatgtttcccctttggagtttattttaaccc

SEQ ID NO: 606290 - DNA, 453 bp, Homo sapiens
  misc_feature (140)..(140): n is a, c, g, or t
  misc_feature (153)..(153): n is a, c, g, or t
  misc_feature (159)..(159): n is a, c, g, or t
  misc_feature (195)..(195): n is a, c, g, or t
  misc_feature (257)..(257): n is a, c, g, or t
  misc_feature (323)..(323): n is a, c, g, or t
  misc_feature (371)..(371): n is a, c, g, or t
  misc_feature (378)..(378): n is a, c, g, or t
  misc_feature (417)..(417): n is a, c, g, or t
gggtccaagtccagctgccttcccaaggtctgctggtccattaggcccaggtcaagttgctttccccaggtcagctgcggggcacctgggctcttctccagcaggccctgtgggtatcaacccagctccttttgcaagancaaaggggaaccntgggcnttaacccagcttcctttccaaggatgaatggccctntaggtaagactttggtcccatttcctagggtaaggcagccctccctggctcaaatccaagcntgctttccccaggccaagggggtccaattggcttgcaatgtacccaaatggaatgttacccccttnaaataccatttttcttccaagggccaattttgttaatttaagcactgnggggttntgaactgggggctgtctcttagataaaaggagtagattntggaaagtaaagttttaaagaacatagctggggctc

SEQ ID NO: 606291 - DNA, 167 bp, Homo sapiens
agtgttgcctgggttataccctttgtcctcgcctggataccatacctagcgctcatacctagctcctaccgtagttcaggatacagggtgacagcgcaagtgccttcagggagatgactaccgtaccacccagcggttgctactaccttaaaatattaccatggtgg

SEQ ID NO: 606292 - DNA, 129 bp, Homo sapiens
aggggagtcggaaggaacacttgtaaccacaccagtgcctttatcctccttaatagttagcaatgggagagaccctttgaagtcaaggacaccgaggaagaggacttccacgtggactcaggtggtgtg

SEQ ID NO: 606293 - DNA, 465 bp, Homo sapiens
ttgttcgcgacgcggggacgcctgggggtatgcgtgccgtagtggccggtggccagagtagggtttatctccaccttggaggaggccacgcggacccccttcggccttgccggagggggggccgaattggtttcgggctttaacttggaataggcggcgggccccttggcccttttttttatggcggggtgcccaaccttttttttaataacccccctcccccctccatttttcttggggccaacattggggggcctttccccgggactttacccgacatttttgggccccagggccctatttttaacccccgtgttttttgggtttgggccgggatcccccgggttcgggtggggccaatttatccccctccttgggaaaaatttcctccccctccccctgggtttttttttttggtggggtcccatcccccttccattttccgggtttcccccccccccctta

SEQ ID NO: 606294 - DNA, 917 bp, Homo sapiens
aaaaaaaaagaaaaaaaaaaaaaaaaaaaaacaaaaaaacacaaaaaaacacaaaaaacaaaaacaaacaaaacaaaaaaaaaacaacaaccaacttcttgtctaggtcgaggcctggtgttacaaccatcagtacccaggcccagtcgggaggatggccacaggccctaagttcccaccggtactctgcctgcagtaggtctggagtggtctgccgcagtcaagtactgcaactagcctccctgtatatccccttcgtaccccaagttcatcacctaccccttcgtaccagaacaggttcgtccagtacaatagccacttccttggaggaacagcacaaacatgtacctcctgactgagccagtacctgggggtcaccatcgatctcatcaactcctgacacctaccgcttcgaccccaactgttcttctagactccagctgatgagaacacttttggacagacggagattcaggcccccaccagctccacgacgactcccagcacgccgcgacggtggtgccctgcgactgcgacccgacagagtacactctccactgcagttccaccgtcactgcgcatctccaactgagcacagcctgcggtccgcatctggggcttctgtgacgccgcacgctctaccgcgccccgcaccctctcaccgacggccctgcccgatacagccattgccaagactccgcggatgcccacacctcatctcacgcatcacagcaaccccgagtccccggtggaggtcattgctgtcttcccagatttaagatgtggctcactcctgtgctcggtgccttgactcgacccgcccccaggcccgagtgctcactccgtgggctcttctccggccccctcggctcctgccggacgccccgcggcttcctctgtcccgtccacccggcccc

SEQ ID NO: 606295 - DNA, 976 bp, Homo sapiens
ccgccgcctgtggtgacccccgtttcgctagcgctccgggtcattatcaacaacggggtggagttccactctgcgttgctcacttgggcggttccttacatggccggtgtgtggcacctctcctgctttgtctggggtggtttctccccccccccttttcacgtgtttccgttccccgaacaaacccggggggggtgccgccgcccgacccacctgggtcggcccctccccagctcctggtgacttcgtgaaccccttccctgcgtgggaaggaggttcacccccgcccactgtggcagcacccaggggtgccagcgccgctttccctctgtgtgtgtaggagacccccccgtttcgatttcggccgaactccaacaatgccacatggtaaatctcgggcgactttcccgcggtgcgctgttttcttcccgtagggcccggcggcgcttcttactttctgccttctcgggcccacggaaatcgcctccccttgtctgggttctcccgccccacagagcgagtcctctctccagcgcgcagcctccccggtcacccccccctgtgaacagtgaagaacactgttctgcccccccagctgctgcaccggtgaggtccaaacacttgtctctacccgcggtattctgttccatgccaccaacaagagggcgtctttctcacagacagcacacggttggacacgttcgtgacgtagaggtacggaacaaggtctcccgctcgctcttggggtccccccagcgtccccatgttcttgtgggcgcagcatcacgcccccaagtcttgtggtggcgcccgcgcccgctacctttctcaaagcagtgagcgctccccccggatgcctcgaagacacatctcgagtcgcctcgctaggaccacgttagcacggcccacgcgggtccccccaaccccacactcctcctattaaagggtttccaaaaaagcgggcacacatgagcaa

SEQ ID NO: 606296 - DNA, 550 bp, Homo sapiens
  misc_feature (458)..(458): n is a, c, g, or t
gaatccccggcgtactgtacagtggccattacccctctacttggaaaacgccactgtgctggtcgaagcctgcagccttttagggctagagtattttatataaacagaagagctaagttcctgaagactaagctagatagctgcagctatatgtaaattgtatatttttatgaacttttgaagcacacactcctgtttccctctgtgtagctttgtggggatttcatgtatatatgctgtctgaaagaatccagaggttggagtgccaatagaaaatgaaaacaaatgccttgtactacaggcagcctctgaaagagaccagataactgtgttcactgcgaccagtcggagtccctgcttgcttgtgaagaaggggctcttgtaccttgttggagatgccacctcagaagttcacactgtgcaggaaaaaggttttattctctcctggcatacattanaatgtcagatgcctgcatccatgtggaccacgatggggcctctaaaattggtgggcagggggtttgcttatgagttttctctggaaaccgat

SEQ ID NO: 606297 - DNA, 427 bp, Homo sapiens
tgagcagcgcgggccggaccgtgccccctcctcggtccccgtgccccgcgatgtcgcgcatgttcccgaggctgcgggccctgttccctgcgcctggccccctcagcgggccgtgctcgcatcaccgaggtcggtccggggcggaccgaagcccccggggcggggcggggcgcgggcgtccggtggcgccgcgggcccagcccccggcatgccgcccggcaaagtgctgcagccggtcctgaacgatgaatggtggacgagctgttcctgtactggctcagcgaggccagcacgcagcggatgctgcaggactgcctgcgccggatcaaggcgcccgggcgggaccagccgaccccgggggacggggagcagcccggggcctggcacacagaccagtcgacgaacaaggacaaaaggagtcgaacaa

SEQ ID NO: 606298 - DNA, 126 bp, Homo sapiens
ggttttttttttggggggggggggttttggggttttggttttttaacccgggcttttttttggggaccccctgccccccaattttgtccccggtttttgggccccccttaaaaggttttttgggga

SEQ ID NO: 606299 - DNA, 933 bp, Homo sapiens
  misc_feature (87)..(87): n is a, c, g, or t
ggtctgtacgacctgaatcatactgagatgggggagcttatccgtatgacatagatggtgaggaccattccagcatagatatgtccnatctcgtattgcccagagttggagtctgtccacgtggcaccgtgcgagcctgtatcacagcgcgtccacgccatggaacgggtggagcgtgatcaatcacgccagagcatatccatgtgggactgaaaaggatgcatgtggttcatccgaggcgtttgggacttctggtggaggactgtggacagctaggtgattctgtaccatgagtatcatcttcctggaaggtcaagtacgctgcaggaggagcaggcgtcattacgatgtcgttcgatgcctgtcttgagaccaggtggccactcagtacttcatccgtagtggtgtcatgacgcgctggctctcttgtgaggacccagactgcctgttctcgcttccggggatcctgagtcattgcctggagaagtagcgcccgcctgccaaccgaactattaggaagctgctatgacccttggaccgtgtctggtctgagaatacagtgtctttgagagtctttaccaggatagaatttcgctttcttacaatcccatgcagacccaggtgtttaacactgtatacaattagtgacgaaaacgtgtatgttggtgggcccccaacgggacatgcgggaagactatttgtagcagagtgttgtcatcctgcgacatgcgtgctgcccgagctcggaggggccgctgctgggtacagtcgagccccagtggaaggtcctggcagagcaggtatacatggaggtggtaggagatgttccaggagaggtgtcaagaggaagggtggtactcctgagaggtgagacagaaagagctgaaaggtgtggggaaagggaaccattatcatcaggatcccgtgagaagt

SEQ ID NO: 606300 - DNA, 109 bp, Homo sapiens
ttaatgacaagattctaatccaaaggattacgtgaaacatacgtcatcactactgctcaaacaagtgcccgagatccacaaaagccatcccatcagtatcttgattatc

SEQ ID NO: 606301 - DNA, 129 bp, Homo sapiens
gcctgataaccaggtgtacagagcattttctcatgctgggccgtggggtggcctcactcaggaatcttgaggcctcgagagaaccaccaccatggcatagaggtcggtggccccgtctgccagccgctg

SEQ ID NO: 606302 - DNA, 163 bp, Homo sapiens
aggttctacctagtgaacacggcaagccaatgtgccccccgagaacagaagaggcggtcgtgcagagttcagaaggcaggcagctcatgcttgaaggtgatagccttctgtctacaagagaaatacttgctgcacctcagttacttctgtgttatcaaggaat

SEQ ID NO: 606303 - DNA, 635 bp, Homo sapiens
gagtttcactcttgttggcccaggcttgagtgcaatggtgcgatcttggctcactgcaacctctgcctcccgggttccagcgattctcttgcctcaacctcctgagtagctgggattacaggcgcccaccaccatgcctggctaattttttgtatttttagtagagacggggttttgccatgttggccaggctggtctcgaattcctgacctcaggtgatccacctgcctcagcctcccaaaatgctgggattacaggtgcgagccaccatgctcagccctgaatccctgactttgttaatgacctgtccttacccccggctcttctcctgacctgccaataaaaatttatggtccaagggaaaaaaaaaaaaaaaaaaaaaaaaaaaaaaaaaacaacaaaaaaaaacaacaaaaaaataaagcacacgacactaacactaaccagaacaacaccacacaaacatatacaataaacacacaaactatacatctcaaacaatgtcgagccctcgtatatccatcacaacccctacacaccaacatctattcaccccactcttcattcatccaatagcaccatatacatcaacattataacatcataacatcattccccctctaacatagcaacta

SEQ ID NO: 606304 - DNA, 238 bp, Homo sapiens
  misc_feature (124)..(124): n is a, c, g, or t
ttcatatacagtgctttcatcccggctggcagctagcaaagccagaaagcaagtctaacaggatctaagatgaccatcaggagaaggagttgagactgtgtatgcaacgccccaatagaccccncttttactcgtgatcttggagacatgtatctaggcttcatcattttcaatgtcacagtgtctcgtcagaccccgtggattcatgaacccataggccacacaatcatagtgcatg

SEQ ID NO: 606305 - DNA, 1450 bp, Homo sapiens
ggacatctactctaaagatcattcgcttcgcccttgttctgtattgatgcgccagtgacatcgatcggaagcgcgattctggtcccgacgtgatgcgagtgcctcacgggctccgagcgaatggcgtgatgcgtagcgtcgcctaggatcctgcatccatgctgaatgcaatagttatctgacgaatggaaagggtacctcgtacactgcatgatcaggtctatcaacgacaattcaacttttcaacgtgtcgcaggtgtgaggaccctagaagtgccaaggctgacatgacaccaacacctagaagggtccgacctcgtttcgtcagggcatttgtgggctctcaatataaccaagtcgactaacccgtgggttctacaaggtctcgttgatcgtaggcatcctactcacatcttgtcatggatgaaaattcgaaggatcgaatccaagcgatccttgtgttagaaattgtcccacccaatttgactgaaaaagcctaacaaggaatatcgtgggctcctgcgtagatgcgccaattcgtggggggcatagcgtacaacacagaagaaggtacttatccaatcgggactcatcaactttcaagttccgaagctagtccgttacaatcttgttcaccaagaatgggactaggaaagtagccactttacacacatagtgagtattaggtactaaggaaagaactggagtaattagcaagctacggatcaattgaaacataaataatgccgtggagacagtgaagcttgaatacgttcatcattctttggcatgaatggggcacggggccttccccatggaacaagagggcctaataggtcgaccaacaggaaccaaatggggtaccctcgtgattgagcacaagattatagacggcacgaaagacattgccaacttgaacatatgactttagcaggggttggccccttattcttgaagggtacaagtgagccctgcgggatttttctggactgggggagaaaacaatgcccggccattaaggctgggagcccacccattgacctgtcccctttaaattctaccgaggtggactggacagggcacagggaaacgcgtcacgccttgttctattcccaacaccttttgggcaagcgccgaggcaaggtggatctaccagaaggtcagaaagtttcacgaaccagcccggggcaaaccaggaggaaaacccgggacttaacttagacgtatattacaatagcggaggcgaagagacgggacccatgtaatacccgaacaaccggcaagcctgaagaggcggaaccgcgacaccacgacgacgatggttgcgtagaccacagctacaccaggagcaacacgaggcgacagacacacctgggcggacaaagactcgacccccgcgagcaaaacaagaaacaaccaagaccgcactcagcgaacaacagacagagca

SEQ ID NO: 606306 - DNA, 111 bp, Homo sapiens
ctgcagcagacaacagcagtgtatgaggattaatttctctacatctgtgcgaatatacagtacagtcttttttaacgtttttacaatttacatggtgtataacgtatattc

SEQ ID NO: 606307 - DNA, 457 bp, Homo sapiens
ctcgaggccaagtgcggcactttgcgacgcgtttcgcgtccgtgtcgccaccccgcctgcgcctgcttcgacattccggattgacacccgccgcagtcggcctatccgtagggtcagggattacgctggatgcagccgcgcgtcccgggcaagcttactccacgacaaggggaccatccgtgaccaacgcacctgctgaaacctctgcaccctacacggccagcacggccatctggatcgccctgatcgccggccttaccgtgatcggcagctacggctatgcctgcgccgcaccgctagcggccgttgccgcgctcgccgcgctcaaaatgaaccgccgcaacggtgccatcctggtcggcctcgcctggatcatcaaccaggccgtcggcttcctgctgctcaactacccgcacacggccgaaacctacgcctggggcgcgggcatcggcttcgg

SEQ ID NO: 606308 - DNA, 631 bp, Homo sapiens
  misc_feature (95)..(96): n is a, c, g, or t
  misc_feature (99)..(100): n is a, c, g, or t
  misc_feature (111)..(111): n is a, c, g, or t
  misc_feature (113)..(113): n is a, c, g, or t
  misc_feature (116)..(116): n is a, c, g, or t
  misc_feature (123)..(124): n is a, c, g, or t
  misc_feature (128)..(128): n is a, c, g, or t
  misc_feature (139)..(140): n is a, c, g, or t
  misc_feature (142)..(144): n is a, c, g, or t
  misc_feature (171)..(171): n is a, c, g, or t
  misc_feature (174)..(174): n is a, c, g, or t
  misc_feature (198)..(198): n is a, c, g, or t
  misc_feature (221)..(221): n is a, c, g, or t
  misc_feature (258)..(258): n is a, c, g, or t
  misc_feature (504)..(504): n is a, c, g, or t
tcctgagttcaagcgattctcctgcctcaacctcctgagtagctgggattacaggtgcccaccaccaagcccagctaattttttgtatttttgtnnagnngggtttcaccntntgncaggctnntctngaactcctganntnnngctccgcccgcctcagtctcccaaagngcngggatacaggcgtgagccaccagncccgactcctatttgactttttnaaaagtgctcctcagagtactgataccatgaccccanactgcccacagagaccctgtctctggatgtaatgccagcttcgtgccagtagaagcagcgtgagttgccaggctgccataatgggatggttatgctgtcctggaacgtgagaggtgatcaggtggtcctttgaggcgcttaaacgttgaaaccgtaagtaaagtgctggcggatgtctaaaacttaggcctaaatagtggcaccacactcccttgccttcctctcagtggtccctcggtggtcggntactgagatggggtccctttcctatatccctcaggtcccctaagtaagctcactccacccctaggcctgcctccctcaggagcatctccgggcagggtgtcatcgggatggcaccacttggtggacg

SEQ ID NO: 606309 - DNA, 282 bp, Homo sapiens
  misc_feature (202)..(202): n is a, c, g, or t
gaggcattctgcactgataaagtagagatggaatgagaccaagtggttcaagatctagcctgggtacaggagggagacagagtcatgaaatcaatatgggatcaaatgtttccgaatcactcatcatattctcatagtttggaaaaaaatacctcactctttctcccaaaaatatttaaatctgccatacatattatatatngtatgtgtacaacaggtccataaacgcaaattttataactttaatcacttttggcaggttagcatagaatttacaagcaa

SEQ ID NO: 606310 - DNA, 113 bp, Homo sapiens
gtcgacggggagagggtggctactgccagggaacaatggccatgagtgtgtgtttctgtgtgtgtgtgcatgtgctgtctgtgctgtctgtgctgtgctgtgctttctgtgct

SEQ ID NO: 606311 - DNA, 362 bp, Homo sapiens
gcccagtgacagtgggctacccctttctctgtggaacagggagggcctgtgtctggccagtgctgaggtaccagatctgttgccatcatgggcccttcagggtcctgggaaattcctggcttctcctaaatcagggtgaactgggcctccaggatcaggtctggagcaggcccaaatatagtcctggatctgcctggattaggtgccaattgtctgagtctgggttccagatcaactccagaccccaggctggatctggccccatttgagttctgattccccttggagctgggctctgggccctgggccagcatctatccttgtgtggcatctgtcctgagctggtcctggggcaccatgca

SEQ ID NO: 606312 - DNA, 357 bp, Homo sapiens
  misc_feature (110)..(111): n is a, c, g, or t
  misc_feature (113)..(113): n is a, c, g, or t
  misc_feature (187)..(187): n is a, c, g, or t
tgttccccccccccccccagagggggggggggtgttttttttttatttatttttgtttcccccccccccccccccagggtgtggaaaaaagggggcggtggttttgggcnnanccccccctccttaaaagggggggtttttttcccccccagggggggttttggggttttttagaagaaaatttttnttttgccccccgtttttaaagaacccctccccccggtggttttttttttgccccccccccgggggggggggagaaaaatttttttttttttttcccccccccccccccccgggcggggggggttttttgggggtttcccccccaaaaaaaaatattttttttttggggga

SEQ ID NO: 606313 - DNA, 501 bp, Homo sapiens
ttccaatgtgcccgagctctgccatcatggttagcgtggctggttcacatctcattggacgtacgtgtaattcggaggctggcggaatactgagtctgaggctgattcatgtcacccttggctgcccccatggctgctttctgggctgcctgctgcacatttggcttcttccatgcccctgtgttctattcctcctcaacattgctgaaactccccccacttccccggtaaaatttatgaaccatgctgagggcgatgaaggaaaagacggccatcactgtgaacatgacagtgggaattagcatcaccaccgccgagccaatgttcgttccgaagaaggtgatggtagcaatccagccgcagacgccccagcctgggatgcccacggcctggatgatgctgatgaccaactgagccatgaaggtaaagaagaatgccatgaaactgaaggagctgtcagtcctgcggcagaggaggtggctcccgtcacctgggcagagg

SEQ ID NO: 606314 - DNA, 502 bp, Homo sapiens
  misc_feature (132)..(132): n is a, c, g, or t
  misc_feature (140)..(140): n is a, c, g, or t
  misc_feature (145)..(146): n is a, c, g, or t
  misc_feature (150)..(151): n is a, c, g, or t
  misc_feature (154)..(155): n is a, c, g, or t
  misc_feature (163)..(165): n is a, c, g, or t
  misc_feature (173)..(173): n is a, c, g, or t
  misc_feature (186)..(186): n is a, c, g, or t
  misc_feature (200)..(200): n is a, c, g, or t
  misc_feature (210)..(210): n is a, c, g, or t
  misc_feature (217)..(217): n is a, c, g, or t
  misc_feature (223)..(223): n is a, c, g, or t
  misc_feature (264)..(264): n is a, c, g, or t
  misc_feature (409)..(410): n is a, c, g, or t
aggcccaccccaactcctaccaggctacgctacaggcagagcccagcactgatagggccccgcccaccgggccccgcccaccccaggccacatcccacccatctgaagtgaaggcccagggactctttttcncccccccnaaccnnccannacnnacacgggnnngacggatncgtggtgctcagnaagagctagtgccntaggtggggnaaggcangactcncgactgagagagagaggagggggatatgaccaccctgcccnatctgcaggagcctgaagatccagctcaagtgccatcctgccagtggcccccagactgtggggttgggacgcctggcctctgtgtcctagaagggaccctcctgtggtctttgtcttgatttttcttaataaacggtgctatccnngaaacgggcaaacctccactcagcttcttagcatttgggctaaaattaaaatatcagcaaatgtgtagaacagtgccaagtgttaggctccc

SEQ ID NO: 606315 - DNA, 343 bp, Homo sapiens
  misc_feature (97)..(97): n is a, c, g, or t
  misc_feature (157)..(157): n is a, c, g, or t
  misc_feature (178)..(178): n is a, c, g, or t
  misc_feature (211)..(211): n is a, c, g, or t
  misc_feature (259)..(259): n is a, c, g, or t
tgaggatccttgcgggcctttcccacaaggtgaactagttacagtcccacagtagtgtaaagcatcctatttctccacatcctctccagcacctgtngtttcctgactttttaatgatcgccattctaactgggtgagaggtatctcatgtggtttngatttgcatttctctgatggncagtgatgatgagcatttcttcatgtgtctgtnggctgcataaatgtcttcttctgagaagtggctgttcatatccttggnccactttttgatggggttatttgattttttcttgtaaatttgtttaagttctttgtagattctggatattagccttttgtcaga

SEQ ID NO: 606316 - DNA, 1311 bp, Homo sapiens
  misc_feature (421)..(421): n is a, c, g, or t
  misc_feature (607)..(607): n is a, c, g, or t
cgggttttccacacacacctccagtatcctcgtggcccaaaaaaaaatttatggaaaccactggggggattataaacgcccccgccaccacaccacaagaacccctgggaacatggcccgggagaaaatttttcgggtaacggagtcctttattccggaaaaaagcacccagtagcccccgggtgccccaagagtccaagatccgagaggacccgagattccgggaacagtagaatcccatgagccggggccccgcaggaggagaaactaatgagggtaaagcataggaggacctcccacgcctacttttggagaaacccccccaaaagttaagatgtaattgagagcgccccactgggaactcttgtgtcaccacaaagggtaccccttgggggttctttaccccaaaagaggagctttnggattcacaagctcgccatcccaaatggaaaaaagatttttcttgggggttttttcattgtgcttgtgggaaagagccccacaagaaattctccctgtaaagaaaacgccccagggaagcgccttaaaaggcgcaaacctgggggagaatattcttttggcgcacaaagtgctccacacacagatnttatagtccagaagatggcttacaccccagaccccacagagatggtgatagcacacatagcgccttttgggaatatagtagatattgagagagacaggctcggagatatatatcttgccacacaatatgggagacacacagggtgtatacacacacagagaagggggcgcgcccctatatgggcccccctgtgtggagacctttagaatatacctcacgcgagaagagatataccacgcgagagaatatattggacccactccataagagagggcttgtgcccacaaggcgtgcacatgtccacagtatatggtatatcacaaaatgttctgaagaggggcggggaaatcccacagggcgccttccacaaggagaaaccccaatgcgaacccaacgccaggagccttggatctcgctccagagtgggaagaggagagattgagagcgccaataccattggagaaagagagggatagaaagagatgggaagactggatgggggttggaagatccaaaagcgacccaaaataactaatccactagtgtaccaacccagagatgcgtcccacaaggataatgctccccccggttttctttctgaccaatgttcccaaaggttgccaagatagtttttttgtggatgaataataaaatttttattgtgtaattacttggttcccattataaattggttaacttgctta

SEQ ID NO: 606317 - DNA, 427 bp, Homo sapiens
cacccacctgtagaactcaaggacatccagaaggtccaagagcttccggttcttctcgctgtccttcagtttcacgtagtcatgctgcaaaccatgcagggtcacacttcgtctcatcatccacgaagatctccattggatcttgcatgaacttgcggcagcctggacggcatctctttgctccaggtagcactgaacatcatgacctgcttctcgtggggggtcatgccgaaacatttcctggacatcccgacgcatgtggagctgtacaggcatctttatcacattcatccaaaaataaagggttcatgtgttagcggttgaggctcttaattcgagccaaggctaggatacggcctggagtcccaagacgatatgcgggagttcttcttcagaacctcttcatccttcttgatagacagagcaa

SEQ ID NO: 606318 - DNA, 257 bp, Homo sapiens
  misc_feature (176)..(176): n is a, c, g, or t
tccactagatgtggcagaggcagagatggaagttggaatggacaagccgtgcctctccttggctctccatggctctgtcctcaggctgtttctgcaatttgacatgaggcctggccccagtgtaaaccatgtggggcctcatctccttcccgtgtgctgctctgagtgtggagccnttctcagggttcagtccatgctctggagccccttctccagcgtcggtcaccaaatgctgtctggtcccagggcgctgacta

SEQ ID NO: 606319 - DNA, 302 bp, Homo sapiens
  misc_feature (270)..(270): n is a, c, g, or t
ttttaggctggatgtggtgacccacgcctgtaataccagtactttgtgagtctgaggcagtaggattgcttgaggccaggagtttgagaccagcctggttaacgatacaagacccccttttttaaaaaaaaaaaaaaaaagccaactgcaccagcatatgcctgtagtcccaactactgagggcatagaggtaggagcatcatggatcactcgctccctcgaggcgtttgaagctccacgacgctacgatcttatcactgcaattcagcngaggtgcccgccagcaagcccttgtcacacca

SEQ ID NO: 606320 - DNA, 432 bp, Homo sapiens
ttcaagatagttgagaaaaatatatccatagcctaaaaaaggccataagagggttgcaaaatctcaaaatcaaaataaattattactaatatatatttggtgcttcatgtgtattgacccagttaattcttaaaatagtccaataactgggccgggtgcggtggctcatgcctgtaatcccagcactttgggaggccgaggcgggcggatcacgaggtcaggagattgaggccatcctggctaacgtggtgaaaccccgtctctcctacacacacaccccactagccgggacacggtggcaggacgcctgtagtcccagctactcaggaggctgaggcatgtgcacggtgtaaccccggaagacgtagctcgatgtcaactagtatggcgccaaggcactcccgcccgggcctcacatttagactccgtatc

SEQ ID NO: 606321 - DNA, 116 bp, Homo sapiens
tcacaattcagcaattgtgaacatgataagtgtacagggaacgttatggttgcatattgctcaggtggcgcatcccaattcagtgcatgcagtagtggcctgccagtcaatgttag

SEQ ID NO: 606322 - DNA, 349 bp, Homo sapiens
aaaaaaaagtttctgaagacaatgtgaaatctgacaactgggaaatggatgctgttcattattttattccacatatttgttgtggtgcttaaaatattttgtcattgaaaaaaatgtaataaacaaatgactagaaaaagtcaaaaaaaaaaaaaattatttttaaaatgtcctggtgttggccgggcacaggggctcactgtttaggtggtcaaagtgggaggatcacctgaggccaggagttttgagaacaccctggacaaccttatcaagactctctgcctccaaaaaaaaaggcccgggttgttttatggttcccaaattcattattttttacacgttgattttt

SEQ ID NO: 606323 - DNA, 444 bp, Homo sapiens
gtcgtctctacaggatccccagttgacttcgtaagcgccttattaagactctctgcaaattcagtgatttgtctaagtaaatatagaacttagatgtacatctagtagttactttatggcaagtcttagtcgctattcaaggcactttagatgcacaaattcattgtgttctctcaacagccatgtgatattaagtaatattactttgtttgatagaagaagaaactgagggtctgtacacattggtagtaaagggcaaagttaggaactctgaacagatcagacaaagccgtgtacttcaagtgttctcctaatgtctgcaatagaaatgtggatggagaggcttctggtcagctattctggaagctaaaaaaccttgttcaatagagtaacattggaaattgtgaccacatagcctgactaagccatgagagaaattcagtc

SEQ ID NO: 606324 - DNA, 595 bp, Homo sapiens
cccccccctctttttttttataaccatgggggggggtcccagggcgccttttcccccaagccccccccccctttggaaagacctttggggggggggggtaccccgattttttcccgggaatcccgggggggccggggggaaaatttttttgggggggagggggcccctggggggggggaaaaaatccccccgggcctaaaaaaaaatttttcccgggttttttttttcaccgggggccccccgggggggggttttttttaaaaaaaaaaaaatttttttggggggggggtaaatttttccccccccccgggggtttttggggagaaccccctttttttttttgggggggggggttccgaaccccccctccccccggggggccaaattttttttaaaaaaacccctttggagggggggggtttttattggctcccccgggtttttaaaaaaaccccaaaagggggggttggggggggggggggccccctgggggggttttttttggggggttggggaaaaaggggttccccttgggggttgggccccccccctttgtttttttttacccccccggaaaaaaaagggttttccccca

SEQ ID NO: 606325 - DNA, 103 bp, Homo sapiens
tgtgagctccttgtggttttttattaactcatggatgaaatcgaattcgtgtcattaaggctgtaggccaccttgaaggcttcaggtactcatgactggccaa

SEQ ID NO: 606326 - DNA, 248 bp, Homo sapiens
aagcatcagattgaatgcagtggatccatgcagtgtcattgaatgcagtggattccatgcattgtgattgaatgcagtgtacaacatgcagcctggtaaaatgcatcccgattgaatgctgtagattccatgcggcatgattgaatgcagttgattccatgcagcatgaagaaattgaaccctattgaatgcagtggattttatgcagcatgattgaatgcagtggatttttgcagcatgattgaatg

SEQ ID NO: 606327 - DNA, 553 bp, Homo sapiens
  misc_feature (28)..(28): n is a, c, g, or t
  misc_feature (66)..(66): n is a, c, g, or t
  misc_feature (109)..(109): n is a, c, g, or t
  misc_feature (143)..(143): n is a, c, g, or t
  misc_feature (147)..(147): n is a, c, g, or t
  misc_feature (163)..(163): n is a, c, g, or t
  misc_feature (165)..(165): n is a, c, g, or t
  misc_feature (191)..(191): n is a, c, g, or t
  misc_feature (206)..(206): n is a, c, g, or t
  misc_feature (217)..(217): n is a, c, g, or t
  misc_feature (233)..(233): n is a, c, g, or t
  misc_feature (248)..(248): n is a, c, g, or t
  misc_feature (250)..(250): n is a, c, g, or t
  misc_feature (254)..(255): n is a, c, g, or t
  misc_feature (326)..(326): n is a, c, g, or t
  misc_feature (337)..(337): n is a, c, g, or t
  misc_feature (341)..(341): n is a, c, g, or t
  misc_feature (349)..(349): n is a, c, g, or t
  misc_feature (399)..(399): n is a, c, g, or t
  misc_feature (415)..(415): n is a, c, g, or t
  misc_feature (419)..(419): n is a, c, g, or t
  misc_feature (421)..(421): n is a, c, g, or t
  misc_feature (423)..(423): n is a, c, g, or t
  misc_feature (436)..(436): n is a, c, g, or t
  misc_feature (440)..(440): n is a, c, g, or t
  misc_feature (446)..(447): n is a, c, g, or t
  misc_feature (505)..(505): n is a, c, g, or t
agttccagacaagcaggaagcagcagcnagaagcaactagcacacagaaacacccgtgcgtgtgcnctacacattcaagcaaagccattcctctagctaggacgcagcnatccccaccctcccacctacgggcaaaagagaanagcngaaaacaaacttcccncnttaaagggcacactcaagtaattttngaccacaatggccangaaaaagaaanaaaaacaaaaaaaaanagaaaaggtcgatcntncctnnaaagcgggcagtggctattttcttctctctgccaaagcaggacacttataaatcttaacacagagggcccnaacgctaaacntcanaaatactncagacagttgtcttcaacatcctgtggttcttcgtccgattccttttttnttttgagatggggagncgcncngncccccaggctggngcanagtggnnccaaacttgacttactgcaacctccacctcccgggttgaagggattctcctgtctcantccccccaaatacctgggattacaggcgcacgcaaccacgccaggcta

SEQ ID NO: 606328 - DNA, 439 bp, Homo sapiens
  misc_feature (24)..(24): n is a, c, g, or t
  misc_feature (28)..(28): n is a, c, g, or t
  misc_feature (51)..(51): n is a, c, g, or t
  misc_feature (58)..(58): n is a, c, g, or t
  misc_feature (74)..(74): n is a, c, g, or t
  misc_feature (78)..(79): n is a, c, g, or t
  misc_feature (123)..(123): n is a, c, g, or t
  misc_feature (220)..(220): n is a, c, g, or t
  misc_feature (332)..(332): n is a, c, g, or t
  misc_feature (371)..(371): n is a, c, g, or t
  misc_feature (437)..(438): n is a, c, g, or t
ccggctcaggaatcggcacggagntaantttgtgttcaatttgagtccccnaggaggnaaagaggtacatgatntccnnacacatcaccagcttccagtggctttgcgtgggagctctgtcancgggtttacatgggttaatcatgctgaggccagatgcagtggctcatgcctacagtcccagagctttgggaggccaaggcaggaagactgcttaagncaaggagtttgagaccagcctgggcaacagcgagacccccatgtctacccaaaataagaaaaaattagccaggtatagtggtgcacacctatagtcccacccactcaggaanctgagatgggaggatcacttgagcccaagagttccaagnctgcagtgagctatgattataccatcgcacttcagcctgggccacagagtgagaccctgactcccnna

SEQ ID NO: 606329 - DNA, 1626 bp, Homo sapiens
  misc_feature (1197)..(1197): n is a, c, g, or t
  misc_feature (1626)..(1626): n is a, c, g, or t
tgggttgttggttttgaaaaaaagtcttgctctgtctcccgggctaggggtgggggggtgtgactcttgggcctcacgggcagcctttgcccttcccgtggcctcaagcagtctttacatcttcagccctccaaagtacgctgggactacaggcattgtgatatgatgcctcggctgatttgtggttacttttttaagaaaagagtggggctcttgtgccatatatttgtgccagggctgtggtttgtagaactctcctatacaaccctcaaggcattctcctctccacacctgtgtgtgctcctccccaaaatgtgttgtgggacaccccagcgggtgtgtttgacagcccaacccgtgccgccccgagactttagactctcccgtggtgtgtatgtgtgtgtattatgtgggttgtgtgtatacacatttgtggtgtgtgaaagtgttatagagcgcgccctctcacaatttgtgtggggaacagagcggagggaacaacacagagcgatatttattcttagtatatatatataacactctgtgtgtgtctccccctgtgtgagaagggatactcccagaggagggagtctgagagagataataaagaagaagtgtggcgccccgttgagagaaacacacagagtggctgtgtgcggaattctccgacgccctcttctgctgtgcccgtggggcggctccctatatctcatgccgcgtgggagtaatacaacgggggaggcggaacccaaaagagcagaggaccagcggaggagtgtgtggagacaccacatagggagacaccgtctgcaggccgcgcctcttatctcctctgtggggggtggttgagccccccgcggtgtttgcagttttctattgtcaacacgcagagaacaaaacaagcgcttctcgcatgtgtggttgtatacaaaaacctccgtcttttacaaacaacggctaccaactatgggtattatttcaggcgtcgcagaaccatctctgttatgagagacacttatgttgggtctgcgagcgcgacgcacacctctttccaacgagcagaacaaatcatacaaagggaggggggcgatgtggtatgaggagcgagcaacacaacctcccccccccctctccccactgtatgtttgttgtcttagtgggccaaccaacacgctggtgttgcatcaatttgtcaanccctctatacagacgcggcggcgtcgcagacagtctgtcgaacaagaatctaaaaaggcgcacccccaccggtggctagaaactcccgccgcaaaaacaagaaacaacaacgaaacacaacaaccacgaaaacgacaacaaaagcaacgacaaacacacaaacaaccacaccccagcggcagaccggccacatcattatcttaccacagcggggactcgcagcagccgaacaaaacaatgagcatcaatgagaaacgaagcagaccgccgagcgagctgaatcgaacacatcgatactctatctcactgcagcacaaccacatcatatccgtatccaagcagaggggcggtggacgaaagccgccgcgcgcaccaccaaatcacagtggcgggcgagctatacaaactacagcaagccccggactgcan

SEQ ID NO: 606330 - DNA, 107 bp, Homo sapiens
ccatttgcagaagaggacttatcagcagatgccctcttgaatatgctttcagaagtaaagattcaggaattcaagccttccaagtaaggttgttcaaacagatgaaa

SEQ ID NO: 606331 - DNA, 999 bp, Homo sapiens
ttcttggaaagcagctcaatcttggaaagactgatctttccaaaatatatccctggtctgaagctttggtctgcacttctcaaggcttagagaatccagttacagaccttatggggttcagtgatgctatagattgacaccctcctgcctgtttatctctgcatcccaacctggcaaggccctcctgttgggtgcccatctgtgcctttataccggctgtgccctcgactttacagcttacccatgttctttggttaggtttctctcccttccttctttctccttcgacaatccgcctgttcgtcagggcccagtattgtttcctcatacaccttcctcatacccaccccacatggttgactcttgtccctcagctaccacagctcttcatcatgccactcatttcagaacttgagcacaaaccagggcagtccggcatctgatagtctttctggtctcccctaagaaaaactaatgctcttgagtggcaccagcccttggaaattgcttcctatcttgctgagcatggtgcacctttccttatggacttccagagtacagcccttctggccagagagcgcatcttacctccatgcactatggatgtgactcaaactgctgggtcccacaggcttctccctgtaccacttgctgtgcacttatcacatgtggggtctgctcttaccgcagcgcgatccgggacccaggtgggtcacacaccccagaggtcggccggccgcgcacatcagcacagagacgcggagggagcacgcccgacccgcgacacccggccgcgaccgacaacacgcgcactagcgcactcaacatgcagacaggcgccgcgcccagacaccccatcgcggccgctgtcccagactctcgaacgacgggcacgcctcccgctccggtggcacaccaaatgcaaaccggaccgacacaccaccaaaaccacgctagcacaggataggacacgcccccccaacacccgcgccgccccac

SEQ ID NO: 606332 - DNA, 235 bp, Homo sapiens
tattaaaaaaggagtttttttttccccaggcgggggggacgggcccccattggggtcaattggaactttggcccccgagggaaagaaaatttcctggcccaaccccctggggggggggggcccaagggggagggcccccacccccgggtatttttttgttttttatggggggggaaaaatttggggccccgggccgaaattcaaaaccggggcaatggcttgtcccgggggaaaa

SEQ ID NO: 606333 - DNA, 157 bp, Homo sapiens
ggccagggttcctggagctggcctgagggggctcaatgggccctcgggggcccaaggggggctttcaaccctctccccccccccccagccccctgccctgaaatggggctttattttggaattattaaaaaggacagggatgctccaaaaaaaaaaa

SEQ ID NO: 606334 - DNA, 253 bp, Homo sapiens
  misc_feature (28)..(28): n is a, c, g, or t
  misc_feature (118)..(118): n is a, c, g, or t
  misc_feature (166)..(166): n is a, c, g, or t
  misc_feature (201)..(201): n is a, c, g, or t
  misc_feature (222)..(222): n is a, c, g, or t
cttctagggactgggggctgcagatctnaggaactggagggaattcataggcactctgggttcaaatcttggagtaggttcgtaacccaggcattcacagtaggactggagattcttnggcaagggtagttggtttaagggatatgtgagacaggtgttgagtgangaggaagtaaaccatgacttggaagtttctagttngttggggagaacagccgatgnctttggactgtagggacatggagcttggttt

SEQ ID NO: 606335 - DNA, 1839 bp, Homo sapiens
taaggtttgacgggggaatgctggaaatggtaatggggtatggaaactttgtcatataacgtaatgctagggtgaggggtaggaagtttttccataaggcaggttgtctatcgagttgggcccgtcagcgggacctctgggggtaatagctggagtccggatattccataaaacacaccagggcagtgttaaacaatgtaaggtgtcttcgtggttgcaccaacaattattgttgttgtcaaatgtccacgggggaagaaagtgtggcgtctcacatatgtgtgtgtgtgtctccatagagaaaacgcacctgtgtgtagcgtggtgtgacagggtgtgtattttactatatatcacataaacgtggtctgaggtgttaaatgtgcgcgcgctatgtgtacagaacatatacgaggcgcgatacaggcggtgccccgtgtgagctggcagaataaatctcagcacgtgtattgtgacaacagcccctgtgtagagcacacttaacgtatctcgagaactctccccacatttgcgtgccaatggggtctcacacagagaggagaggatctccgagtagtgtggtggtctctccgtgagcataccgtgtgtgtgtgagagcactaattaaatctccaatatctctaaatgtggcgcgccacaagagggttgtccccacttgatgattgtggcgcacagggagaagtgctacactaactccacaagagaggcgctgggtaccacctatgtggtggtgctatgctgggaagacaacacaagaggggtggatgagaggaccacgacaggtgtttaacaactcaccgagtcgaagcgcccccacatctttataaattaatccaacgaaacaacatatgagtggtcagatcagaacatcaagctgatacacacacactacatcttgaaatattaggcagccacaaaaatcgatggtggatgaagcacacacttctacacaacatatataattatgtaagcagacacatttggagggtgaataggggaggaggcagaataaatcagttggctcctaccagacaaatgttttatgccgacccacctagaatatcccaatcgtgggagccaagagttacaaaactctatgtcggaggaaatcactagaagcagtgatgcagctcacaaacccccccaagtatgaaactaccacaagacaaagggaacttatgaggagtcaatcaacaaacacagcgaggcaaccataaggggccccaatcaaaaaagcgagtctgaggcgcctcacagcccaaacactaacaaccactacagacgagaagtgctccccaaagagcacatacgaaacgaatcatgaaacacacaagagagagagcgaaaaagagaccaaacaatagcgaaaaagaggagggagaaaacaaaaaaagacacacacaaacagcaaccacacaactggagacagaaaaagcacccaacaagcgagcatcacagaataaccgtgtagtcatatctatctaaaaaatgagtagtacacttcggaataactacctgtgtagtcactgacggcattatctatcacgtggagtgcccccccaatatcgtgtgagtcaacatcacacgaaaataaacaattgataggtcatcaagcagcaagacaaggagtgtatgcaggatacaaaccacccccaactgaatagaggcacgcacaccacacaacgcacgatatagagaggctagcaagctagtgcgggcatactcgtcaatactataatacacgcccactaccataacaatatccgtgcctcgctagagcacgacactactaaaaagtaaagcatagcgatagcgaca

SEQ ID NO: 606336 - DNA, 171 bp, Homo sapiens
tcttgagatcactgcaatctctgcctcccggggttcaagcgattctcctgcctctagcctcctaaggtagctaggactatagatcctgccaccatgcctggctcatttttgtatttttctttttcttttcttttccttatgttgagatggagtatcggctcttattgccca

SEQ ID NO: 606337 - DNA, 163 bp, Homo sapiens
tgtcatacaccgtgtgccaactctacgtttcgaatgaagaatttcttaatggcctagtccttgggtcacgcatcactgcagcaggttagtgcagcgaataggctgcacgtggccgcggcccttttgggcacgaccattgttccttcttttctttgtcatcttg

SEQ ID NO: 606338 - DNA, 165 bp, Homo sapiens
tgcttgggcaacacaggtagacccatatctctacaaaaaaaaaaaaaaaaaaaaaatttaaattaactggactggtgggtgggttgtgcccctgtaagtcttaagtctaactcgaggaggtctggagtgtgaaattggagcctggggtgggtccagggctggcaa

SEQ ID NO: 606339 - DNA, 397 bp, Homo sapiens
acagacgagcgaccgtaacgaacagtctaaaagagcgcatcccgtctatgtatgcaaaatagtgggaagatttataggtagatgcgacaacacctaccgagcctggtgatagctggttgcttccagatagaatcttagttcaactttaaatttgcccacagaaccctctaaatccccttgtaaatttaactgttagtccaaagaggaacagctctttggacactaggaaaaaaccttatagagagagtaaaaaatttaacacccatagtaggcctaaaagcagccaccaattaagaaagcgttcaagctcaacacccactacctaaaaaatcccaaacatataactgaactcctcacacccaattggaccaatctatcaccctattagaactggctt

SEQ ID NO: 606340 - DNA, 118 bp, Homo sapiens
gcccagtgtgtggcatctctgccgcaattcggctttggccgtcactttcactcgccaccaacccccttctacctgcctaccttacacacacactaccacgttctctactggacacctg

SEQ ID NO: 606341 - DNA, 137 bp, Homo sapiens
ggcacgagcggcacgaggaggtcttcctggtttaaagggacacaatggattgcaaggtctggctggtctcgctggtcaccatggtgatcaaggtgctactggctacgtgggttctgctggtcctatgggccctgctg

SEQ ID NO: 606342 - DNA, 122 bp, Homo sapiens
tagctcggtacccctgaacttgacttgcaaagaaagactgtgcctgcctcagcagctgcctgaagtacccatgtgacatattttggaagtgcagggcatttggccattgagtgttgggaggg

SEQ ID NO: 606343 - DNA, 696 bp, Homo sapiens
  misc_feature (478)..(478): n is a, c, g, or t
  misc_feature (489)..(489): n is a, c, g, or t
  misc_feature (548)..(549): n is a, c, g, or t
  misc_feature (616)..(616): n is a, c, g, or t
  misc_feature (620)..(620): n is a, c, g, or t
  misc_feature (663)..(663): n is a, c, g, or t
gggctgcaggttttttgagacagagtctcactctgtcacccaggctggagtgcagtggcacgatcttggctcactgcaagctccacatccccagttcacgccattctcctgcctcagcctcctgagtagctgggactacaggggcctgccaccatgcctggctaatttttttagtagaaacagggtttcaccatgttagccaagatggtctcgatctcctgacctcatgatccacccaactcggcctcccaaagtgttgggattgcaggagtgagccaccgcacctggactgtttcctgactttttaatgatcgccattctaactggcatgagatggtatcttattgtggttttgatttgcatttccctaatgaccagagatgatgagcttttcttcataagtttcttggcagcatgtcttcttttgataagtgcctgttcatatcctttgcctattttttgaggcaggtatttactnttttctggttntgtttaagttgtttgtagaccttggatatttagcccttgtcagatggacagattgtttnntctccattctgtaggttgcctgtccactctgatgataagttcccttgctgtgcagaagctctttggntaantagatcccattgtcaatttggcctttgttgcattgctttggtngttagtatggtcttccccatgcctatgtcctgg

SEQ ID NO: 606344 - DNA, 1116 bp, Homo sapiens
  misc_feature (853)..(853): n is a, c, g, or t
atgggtgatgcggtcgcatgtaagtctctaagcatagatcgactgagttctcgcctatacatagaatgagctttatctactcttacatgatcgaggcgcatctagtagatcgatgtatacctttatactgactatctctcaagtccttggtatgaccctatgtgccgtaatccaatctacaacaaaacactacctaaatgacttatacgattcttcatgacggtctcgagagtccattaggcatcacgctgtacttgaacttaatcgctttgtgccgaacatctatccatagttctctcgatcgctccatgcccatctccattatgctatcacatttgagcgataactagaaagagagataacgatactgttcctcgttaggcattcatagatccaattgggcccttcccaccagtcgtgtgatcatgaaaccgctaacaggaagtcacgcacgcatatactgcgtgagaaggaagagtgcttttcgacactttcacgtaccaattacttttcactccctacttattgcagttagataccccaagggctgcagcctgtcgcacatccgtgtgcatcggtgagtccacatcgcagtgagtcccatctcgcggatggagagccctcccatgtggttcttacatacatttaccaatacatcatcgacgtctttgcactacattgagtttgtctgtacccttgaggttgaatccgcagattgcgagtttcgccgctaggtcatagggcactagcagatgacaacgcgattagacgaccgaaggtattgctcgagcaatttccttggaaatttgtgcgaggtaccacagttcatggcatcgtactaagattaagtgcnctaaaaattttgaaataagtggcgattaccgaaatagaagcttttaagggatttaagtcgggaagttgactataacaattttgggggggaagtcagagagtgtaagccaactggttgcgggccaggggttgtaatgaaagttcgaggaattgggggaatgggacacaaaaaaacgggggagcagtttgacaattagtgtgtggacagtcgagtaaccgaggaagaagattaaggagaagatatagaggggggatacagaacga

SEQ ID NO: 606345 - DNA, 147 bp, Homo sapiens
cgccggtccttcgatgggcgggcacttagaggtggggagcagagaatctcttatccaacatcaacatctgggtcagattgaactcttcaatctctgcactcaaagctgttaagatagttaagcgtgcataagtgcccgccaatcgaa

SEQ ID NO: 606346 - DNA, 1018 bp, Homo sapiens
ctgctttctctctggctctctgtgctgtgtttcgtcctgttgtgggtgtgtgtcggggtgttacttcgtgcgtgcttttgctagcttgccttggctcaactctggttggttttcttctgttatctccatctattgtcgcctgtgtgggtggttccgtttggttgaaaagttggggcatgttgggccttcgtggttccacgttctcgcgctgatgccactaccatccccttgtccaaacgtgatgtgcccttttccacagggtgccactcaagtcttgagttgggtgtttccctagatctaggcagtcaatggggtattcttcccaaggagttagaatgggcatcctcaatcctttccgctttcatccagctgggatatatgcattgcgtacgccacgtgacatagatcaattaagacgcaggctttcccgtattagtgcgtaataaacaaactttggggctgttgggtagtgtgtatattcttcaggatatccgatgggtcattacagtgtcgtcgaactggtgtttcccacaatcactgctatgtatgtctctcctagcgctgacaatgcccatgtttggcgattggcagcatcgctcccagatgggctacactgtcggtgccccatgactggcaattgccatctattcgcttgatagtgacctccagagaccagcttagttaggaagacgcaagtctcacccatagatggagtggacactgaggcccccgagatgttgtcctccggtgtccaatgctcacatgcggtctggctgcttgggaatgattggccaggaactggactcactatccatttggcacagttaggctaatcctggttttatgtgaagtcagcaattaagtgttcccactagaactgacctaagccactgatgaatatttaatgagggaaggtaggggagaatctatgccattgtctataatgccaggaaatctatatatcgttatctgatgccatttttcctgaagtagcctatacgtctgcggcctgcagttt

SEQ ID NO: 606347 - DNA, 331 bp, Homo sapiens
  misc_feature (42)..(42): n is a, c, g, or t
  misc_feature (71)..(71): n is a, c, g, or t
  misc_feature (148)..(148): n is a, c, g, or t
  misc_feature (271)..(271): n is a, c, g, or t
tctgtgtcataaataagtttaaggaaaggtgctgtgcctggntgtgcacataggccagatttatgtttgantttacacagacatctcagtgcagtaaagagcagtattgccgccagcaggtctcacttccagccataaggcagttttntcctatctcagtaaatagaatatatgatcaggttttacactgagacattccattcccagggacaagcaggagacagatgccttcctcttgtctcagctgcaaagaggccttcctctttcactnaatcctcctcagcacggaccctttatgggttgggggctgggggatggaggtctttccttt

SEQ ID NO: 606348 - DNA, 657 bp, Homo sapiens
  misc_feature (212)..(212): n is a, c, g, or t
tcatagaactgtcactcagtaatgacacagtatatgtgaaagcaactagaacacacctccgatatataacagaatataccaccatattatctggctactttcaccatcacaagtgcattatcatatgtggatttttgataacaaggtgttgaccacgattatatcttcatattattgcctttcccctttgtaaatttttttccccataaatngctggcacattacatcatgcattaagaaatcatgtatggactgtgccctcaaaatacattatctatacaggtactaaaccatgacattctctatcatattatataccagggtagcatatcttgtttctgtacaataatgactgtattctctcaccattaggacttaaactttgtttctccagtggcttaattcctgttcctttgggtgatcactagcacccatttttgataaagctggttctacatggggggatagctgtggaatagatcattcgctgcatgttaattaattctcatgaactaagcctgtgtcagtggttctcacggaaagtataccttttatcaggagctcattcccagaacctggatgctattacacatgcttttaagaaacgtccatgtatattcttttataactctaccactttggggcaagctaattcag

SEQ ID NO: 606349 - DNA, 178 bp, Homo sapiens
acatacagtagacttaccttctgtagtttttaattaaacaactttaaagataagtctacattaaacaaatgatcacatctaaagctttatctttgtgtactctacgtatatgtgagaaatcagaattggccatcaacttgtcttcagttgatattccacaggcatttccacagtcaat

SEQ ID NO: 606350 - DNA, 239 bp, Homo sapiens
cctttttccccccccccccggtttggggggttttgggcggtttaaaaagggggctttccccccctttaaacccggggggttttggccctaaaaagttaaattttttagccccaagggaaaaaccccggggggagttttttgcccccttcgggttttacccccttttggccctttttctttggggggcccccccccccccccccccactcccggtttttttttctttggcccaagggggg

SEQ ID NO: 606351 - DNA, 263 bp, Homo sapiens
gggttggggagggaaaaaagtttttagcccaaatgttttacataatttgttcccaaaaaaaaaaaaggaaaggaaaaaaaggggtggcctgaccctggtggccctactaagtgtgtgtttttttaaaaaaaaaatggaaaaaaaaaagcttttaaactggagagacttttgacaacagctttgcctttgtattgtgtaccagaatataaatgatacccctctgaccccagcgttttgaataaaatgctaattttggatttgga

SEQ ID NO: 606352 - DNA, 821 bp, Homo sapiens
catgtacaattgacacattaatatggcagtacagagaaaaggagttgcagatatagcctgactgctgtgggacctattgttacatgatgacaagagaagactttatgtgacctgtagaagaatacccagattttaattatgttgggaagaactacctctggacctagaggacttagcagccaaacaacttgaagcagaaagcggatgtcaaatcatggtccgaggcaaaggctcaaatgaggcgatacaacacaaaaggatggtagcacaatagaggcaagcccaattgggacgctatctacaatgacatgatttcacagtgtgactcacatcacatgtgtgatagcatgccccacgagacagtagacatgaaactcaacattgacagtagatgcagattgcaagaacgtgacagacacattagtcggtacctgcagcagaaggcagacagacagcctgaagaagatgcacgctgatggagcttgcgattcgtgaatggcacctactagagatgccaacattaaatcaccagcccttgccttttctcttgcagcaacagcccaggctgctccaaggatcattactgggcctgcgccggttctcccaccagctgccctgcgtactcctacgccagctggccctaccataatgcctttgatcagacaaatacagaccgctgtcatgccaaacggaactcctcacccaagtgctgcacatagttcctccaggggccgaaggcttggttaatctatacaccctatgagtaccccgtacacattggcaacaggtacatcaatccttgaagtatcctatggaaccta

SEQ ID NO: 606353 - DNA, 199 bp, Homo sapiens
cctatcactattacgaaccaagtaaggcggctggagcgtgaatccccaacgctgagtgtggggagccatccctctctagcaaggtggcaatgatggagggaacttgcatgctaagcattcaggatgccatgagggggacaccagggagcactgagccagtgctggagcactttccctgcctctgccattgggcccagcg

SEQ ID NO: 606354 - DNA, 247 bp, Homo sapiens
  misc_feature (32)..(32): n is a, c, g, or t
  misc_feature (55)..(55): n is a, c, g, or t
  misc_feature (79)..(79): n is a, c, g, or t
cgaggaatcttccgagtcctatttattctttnaaactttggcaaactggtccttncctcgctgggcaccatagctgtgnatgtccatttactggaaaataaaattaatggcaattgcacaggcattaaaatctacgtttctgacgatggcaaagctcatttttctattaataactctgctgaggatccatttattgcaattcatgctgaatctaaattataaaatttaaaattaaatgcatatcctc

SEQ ID NO: 606355 - DNA, 142 bp, Homo sapiens
gctatttctatgcaattagaaatcagcacattcctcctacttccctttctccacttcccccatatcttaaaaggtgtggaagcagaaaggacctcattttcctacatgaggagctgacataggggaaaggattggatacgaa

SEQ ID NO: 606356 - DNA, 416 bp, Homo sapiens
agaatgtatagaacatcatcagtaattacacctgcactgtgatgtggggtactatgggcccagtgtcagttcgatgattcacgtgtgagcctttggtaggccccagcacctgggctaccactggactgtactcactctttgggaaacttcagcttcagcctcacagtgtgccttcaactagcactgaaggaacaaacttaactgggattgaagaaaccacctgtgcaccatccggaaactggtcatctccagaaccaacctgtcaagtgattcagtgtgagcctctatcagcaccagattcggggatcatgaactgtagccatcccctggccagcttccgctttacctctgcatgtaccttcatctgctcagaaggaactgagttcatcgggaagaagaaaaccatttgtgaatca

SEQ ID NO: 606357 - DNA, 368 bp, Homo sapiens
accccttctgtattctccccagtaatccgctgtgtattgttccaggagcaccagtggatgtctgaaacctcagacagtaccgaatcctattgccatcattcacaccatctttctgtgcatctaccaccttgaaattgtaattgccttttccatcttaactaagcagttacacacactgtggtcataacttccatagcttgaggtacgacagcgaaactccatgaatttcttttatcttcctcacaatttcatggcacaagattcatttttaccatagatcttagcaacctcagcgtattattttctttccttatttagttgagaactttcaccttttgacttccagaaagcactttatggcttctctt

SEQ ID NO: 606358 - DNA, 1412 bp, Homo sapiens
aaggaaaggtaccggctctactgccacctcttccagctccacctgtctgtgtgcaggcacgtggaacatggcacaaggcaaatggaggctcgggagattcagccgtgaacgcacagttgcagatagatggcctttgtggtactcaaactgataatcaaacattatcaagaaagaaggacaagggaacgtgaagttgttcaaggagttgcttattgggtctggttgtagaaagatcggcttgaaattaccaactgctttcctttccctcagcacacagaggatgatgctgacctttgatgaaagtccaaatatcagatggaacatgatgcgggagccttgcgcacatggtacaccattggactcattcttacacgttgggcctgggtatcaggtcccaacaatacctaagtggctcaatgcgttaacccccgggggcgactccctggggaacttctccaagtctcagacgttcaccaagccatggccatttgagacgaatcctgtcgtaactccactttagtgatccctattaaagacgatcgtggcccaagagatctctctacaactaccgcgccgcaatcacaagcaccgtgggactactcataaaacgctggacttgccgacaacgttgcgctacaccagcacaccccaggactttttacccctcgttaagacgcgactttgacaacaacacgccaaaaatacttcacccgttttggaaggctaccaattggttctggcaaaccaacagtgccccgcattcgggtatcacatgtcacaaacagtgtcacacacttctggacatcacaacctgtcccaaacagtggtggacgccaaccgttcacaacaggaacaagctcgacacgtggttttgccagcatatacaacactttgaaatttgggctcccacaccttgtgacaatgcaagacaacactcaatagtgcggcgacaacaaatatctcaacaagatgtacgtagtcggcgcaacaaaaaggagcggacaacacaaacaagggcgcacccaagagaataagagatgttcaaacaccacgacagcaccaacataccatggaggggaaacactcactgcatgtgacccaacccacgacccgcgggcgaccgacaaagacgccgaacaaacagaccacaggcggcagccaagcacggcggaacaatataagaaggagaccagaagagagggagagaaaaaacccccgcctcaccagtgagaggagaagcagatgccaaaaactattataaaacacacgaaggagctgccgagcagagagagcgcgagtccataatgtgaggaccgagaaaaaagaagcgtgacgagcagaggaggaggtggccgccagcaatcaaagagcgcgcagcgatcaaaagacagcaggaacgcgacacaacagaa

SEQ ID NO: 606359 - DNA, 555 bp, Homo sapiens
tatatttctatttaagtagagatggggctcactatcttggcctaggaaggtctccatctcctgatctagtgatctgcccacctcagcctcccaacagatgctgggattacaggagtgagccactgtgccgggtttgagttgaaatcgttacagctttatattttgtgtcttatgttttgtgttctcatgagcaatagtggtatattagagatggagtcttgctctgtcgcccaggctagagtgcaatggaaggatcgtcgggtcgactgaaatctctgcctcctgggtccaagctattctcctgcctatagcttcctgattagctgggatgacaggtgcgaacccaccatacccagctaatttttatcttttgagtagaggacagtgtttcaccatgtcggtcaggttggtatcctgacctcatgatccacccacgtcagcttcccaaagtgatgggattacaggtgtgagccaccgcgcctggggccaatttttggtattggcagtaggcagtgtaccaccatgttagcgaggatggtctcaagctcctgacct

SEQ ID NO: 606360 - DNA, 286 bp, Homo sapiens
gtttggtgcgcggacccagctatgtaacgatgaaccatggtcattgctgtgtcctaggagatcctgctcatgagtagtgcattggattcctcagccaataatagactgcccggtggctaacgatcgttcttgaacaagctccacgatgagtgtcactgatgagtcattcactggattctatcaggcatggagtccaaggcgacgtgcgaatattgacaatttacggcccacgggtcgtgattgactacttctggtatgtctccatcctacttgatgaagggtcgtc

SEQ ID NO: 606361 - DNA, 401 bp, Homo sapiens
tgtacagatggtcgagtatagctgtttctgagttgtaaaatggacggggagatataactggatgcgctgtattgtaaacggagggcgagtaatagctgagcgctgtttgtacctaggaggcggagggcaagcggagggcggcacatatcagtaggggaggtctaggcggacggatcacgatgtcaggagatcgagagcatcctggctaacatggtgaaaccccatctctactaaacatacacacaaacttagacggacgtggtggcgggcgcctgtagtcccagctacttgggcaggctgagcgcacgagactggcgtgacacctgggcggcggagcttgcaccgagccaagatcatgccactgcactccagcctgcgcacccaagcacgactctgtctca

SEQ ID NO: 606362 - DNA, 108 bp, Homo sapiens
agatggcttcttgccagtttgagcctaatctgatctacaggtttacctcttggaccaatgtaaaggttttttaatgtgaaatgattaaatgctcagtgaggctatctg

SEQ ID NO: 606363 - DNA, 279 bp, Homo sapiens
tccctccttgttcttccttttctcttttcttttctcttctctttttccttccttccttccttccgtccatcttgctctgtagcctagggtggagtgcggtggcataatcatggctcactgcagcctcgacctcccaggctcaagcaaccttcctgcctcagcctcccaagtagctgggactacaggtgcacaacaccatgctctgctacttcttatcgtaaagagaagatagggtctcaccatatagcccaggctgatctccaactcctgggctcaaat

SEQ ID NO: 606364 - DNA, 789 bp, Homo sapiens
gccctttggcacgaagagtgggtctaaggtgcccagggcccatccctgctgacagaacttgtttcgcggttctcagcctcggccagcccccggacagccttcgaggacccatacccaagtccttcctggtcagcgcagaccatggcccatctggcatcccgactacccggacaagcatgaggagaacccccggcccttattccccaagggccccgtgatccaggtgaccgccagccacgctatgcttccaaccgcggtgtcagaggccctgatccgagaggtggcccaccaagtcaaggtccccctgccggatcgtcatggtcccggaatgaccacccccccgtgggaccccccttggacctatcttggcttttcggctggggctgcgggtgctggatttaggcccgccccccactggcccatgccactctatcccgggagatggcctgcaccccaggagtcctcccgaccctcaccctcttcagggcttctttgagctgttcccttctctaagccctaatctcttagtggattgagccctcttggaaagacttctctgccactccccttgcaacctgagaggggaagttttcacgctgagctgaagctggattatttaagtgggttgtcaacctcagactttccgtgctacgcttatttggaggactagaggagatgggaattgagcctggcttgaacctttggaacccagaaaaagattggggagccggtggaggaggcccaccctcctgggagactgatggttttaaatctggttttaaatttcca

SEQ ID NO: 606365 - DNA, 107 bp, Homo sapiens
tagctcaccttcacgagttcccttgtcaaagcgcactaaacgtctcagttcgagcattcagcaaacaagcaagcagagcaacagaaacgtacacctgattttcatga

SEQ ID NO: 606366 - DNA, 211 bp, Homo sapiens
  misc_feature (40)..(40): n is a, c, g, or t
  misc_feature (109)..(109): n is a, c, g, or t
  misc_feature (111)..(111): n is a, c, g, or t
  misc_feature (122)..(123): n is a, c, g, or t
  misc_feature (154)..(154): n is a, c, g, or t
  misc_feature (182)..(182): n is a, c, g, or t
  misc_feature (185)..(185): n is a, c, g, or t
  misc_feature (199)..(199): n is a, c, g, or t
ccaatttaaaggccaaattttttttttcccaaggccctgnttaaagggggggcttccgggggttaaaaaatttttttggtggtggttaccttccttgccaaaggactananggggggtaacnntaaaggtggatttttaggggttccccaaaangggaaccatctttttttttgaaggaatnaanaaaccatggttttngaaggggctgga

SEQ ID NO: 606367 - DNA, 127 bp, Homo sapiens
gagtgtacaggtcggtcatctgtgtccctaccagctacaacagaacagcaagtctcacccgtgtgtgtttgttggacatcaattcacctattatggagcgtgccgtagggcgcactggcagctcatt

SEQ ID NO: 606368 - DNA, 356 bp, Homo sapiens
gaatatatcaggctgaggcgtaactctaagaaaaaataatatttttgggcagggcgcggtggctcatgcctgtaatcccagccttaaaactttttttttttacattagctgagtgtagtgggtgctcgcctgtagtcccgtctactcaggaggctgaggttgcagtgagctgagatggtgccactatgtcccagccgggacaacaaagcaagatcctgtcttaaaaaaagaaaaaaaaaggagaaggggtagagtggcctatagcagcaaagggagatggtctacctaattagaagaaagtgaaagatttcaaacaaattaattaaaagaatctacaagggaatacaagataataa

SEQ ID NO: 606369 - DNA, 309 bp, Homo sapiens
  misc_feature (38)..(38): n is a, c, g, or t
aaggaagctggtagtcatcggtcgtctcggtccggccnttgcccaacgccgccaagaaactgcgcgggctgacctggttcaaaccgtcctgcaaatggttgaccaaccaagtgtaaggcttgccccgtttgatgctgctgcccatcgccttacccgcaagacgctcgaaaagagcttcctgacgatcttcatcttggcgcaggtcagaaggtacggcccagttcgttcctgcgttcgtcgtcgttgctcgactccggcccacccagaccgcaaagtgtttgtgactcacaggggcattgccgtcgacgc

SEQ ID NO: 606370 - DNA, 328 bp, Homo sapiens
gggacagtccgccgaggtgctcggtggagtcatggcagtgccctttgtggcaagactgggacttggtgcaaaccctgggcagacaggtgcctcatggagcaagttcaacttgctgtgcaatagcagtaactgaagcaagcagtcgcagtgaagattgtagatatgcaagcgtgccgctcagcactgtcccaggaacaatattcaagcaacagcagcatctggtatccacatcacacaaatgctcacaatccatgcaaacatgtcagataaagattctcatgggtccaccaggcagcagcacaggcgaatcatccgaatcattctcatt

SEQ ID NO: 606371 - DNA, 312 bp, Homo sapiens
cgcggccgccgacacggcgcgagaagacgacagaaggggggcgtggtagtcacgcctgtaatcccagcacgggaggctgaggcgagcggatcatctgaggtcaggagttcgagaccagcctggccagtatggtgaaaccccatctctactaaaaatacaaaaatcagctgggcatggtggtggggcgcctgtagtcccagctactcaggaggctgaggcaggagaattgctcgaactcgggaggtggaggttgcagtgagctgagatcgcgccactgcactccagcttggcgacagagcgagactccatctc

SEQ ID NO: 606372 - DNA, 1337 bp, Homo sapiens
gattccagtcctgagcggttgttctcatggagcagcgtacttttatctccgtccgacttctctcctacctaagtgcgtgccgacaaccgatggaagatacgatggacatggacatgagccccctgaggccccagaactactcttttcggattgtgaactaaaggccgacacagattatcactttaaggtggactcactgatgaccactgagcaccagttatctttacgaacgcgtccagttcaggggctggtgcacaggatgagtcgcacacttgtagaagcagagcgcggatgcaattaccgaaggcagtcccacttacacagtacaccactgcgcaactcttgcaacaatgtctgtacagcacaacaggtattcccattgggtcggcatctcggaaataacacacaccagctggtctttaaggtctgacagtgtgcgttcacgggcccacgtgcatataacctgcgacagcaccttacgtagctgtggcacgggcacgaactgcacagacgtccacgaacgctgacccacggcaggacagcgctcgcgacacacacctctacagtatcatctgcgaacagcgcgcgacaggccccctgcccacggctgccaacaccacaggtaccaccagagaacacagtaaaaaccctgcctgccatgcatgcacagaatgcatgaccgcactgactggctgccaccccggcatgcccgccgggcgactgccagacagcagcaagaacaacacgaaggacgcaacgacaacaccacaagacaacaagacacacacgaccacacaagcaacacgaacacacccaaaccacaaaacgcgacacaacgcgccgaaactcgccactggcagcagccacaccccacccgcagaccagagccccaccgcaccaggaccaccaaaaaagcaacgacacacaccaccaaccgcacaaggcgcccaccccgcaagcgagagaccggcacgacgccgccgcaccacagccggccttaccgccaggccacacacaacgccacgcagcgaagcgaagccgaccggaagaccgccggacacgagtcgcgaagaaccaaggagagacacgccgcaagacgaccgacacggcggcccaggaggaacacaggccggcagcaagacggcgaaacggagacgagaagacagagcagggagcgcacgggcgaccgcgggcggcaagacaggggccagggcaaacgaacaacccgaacgagaacaggaccagaaccggcggcgagcccacacccgacgggagagcacgcggcgacacagcagcaccgacgccggaccgagaagccaaccgacctgcccgaacag

SEQ ID NO: 606373 - DNA, 418 bp, Homo sapiens
gatccctatctctactaaaaatacaataattagctgggcatggtggcatgcacctgtagtcccagcttctcaggaggctgaggcaggagaatggcatgaacccagaaggcaggaggttgcagtgagctgagatggcgccactgcactccagcgtgggcaacagtgttagactccatctcaaaaaaaaaaaaaaagaccttttccttgactacccttgttttagaattaacaacttcctgtgctccaagcacttaccagttcccacttttcacttactttatatttttcccgtggtagttattttcaccattctgagattattagctttagattacagattttagattatttttctttttaaattcgtgttaacttataacccttactataaaattgttagagccatattttaaggcct

SEQ ID NO: 606374 - DNA, 318 bp, Homo sapiens
ctgtcgaagagtccgttgttcgacgagatgatgagcggacgctggaggccatctgcgagcggctgcgcccagcactgtatacccggggcacacgtctggtgcgcgagctggaccccgtggactccatgctcttcatcatccgggggtacctcgactcatacacgacgcagggtgggaggtctggtttcttcaactcgtgccgcattggagcaggggagttctgcggagaggagctcctgacatgggcgttggacccgaggccctccgagtacctgccgcggtccacgcgcaccgtgcgggcagtgtccgaagtcgagg

SEQ ID NO: 606375 - DNA, 100 bp, Homo sapiens
cagggaggccaaccctctccaacagtacactaggtcccatcccttctagcagagacaaggacacccacggtaatccttccctcatcctaaactcatcact

SEQ ID NO: 606376 - DNA, 217 bp, Homo sapiens
atgcaggatcccgaggcgagcgatgccaacattgctactgtgcaatagcttctaacacggatgtctagtaatctgaatactttatggggttatatgaaaatgtgctttcaatgttactaattaatagatctttagaaagggttgtatctttatgaccctatattaatttcctcaaggcatcaactgtcattagtaaaaagattacggaagtaaatga

SEQ ID NO: 606377 - DNA, 937 bp, Homo sapiens
  misc_feature (937)..(937): n is a, c, g, or t
gagctggtcgcggcggagtgctgtggagactcgatgtggtgacagcgaaagaacgataacaaaatgcctggagcgagatagtgagcacgttctcacaatacctttggcccccgtatggcctactgatgtggatgatcctcacttcctgccacacaatcaaaactcaccaatgaagacttcaggaaacttcgtcgatgtatccccaaggctgggcctacctctgaccagcttctaagtcacgtcaccatgagatgccaagggagtacaatgaggatgaagacccagctgcgacgaaggaggacccctagaagaacgttattatgccaagcgtacgccaaccagacatgcgagagagagagagctagtcaagagaagtaccgggatcgtcgccaaggaacggagagatggagtgaacagagattatgaagcaaagcgagcttatcagcaccacgagctaacatatcgggctgtggggcccccactgcgtgaggcggacaaatcagtctgcgggagaagagaagacagtagatccaggaggtccaaaattcttgggtggtgacagtggatactacagtccattggtgaaaggcttggactttgcctctgcttcaaaaggtacgagctgagattgccagtcaagagcaggagaaagagcagtggtggaaaggcccagaaggtgaacgccagaaagcaggggatcctgacgactaagtcgattggaacacgatggggccgaaggatgaacgaatgctgatagagcaaagcattaaggcggaggagtcacacggcggggcctaggtaacggcgtatggctggaagagatccactactgaggagaccccgagcaccggacagatatagggccaatacgaggcccacgccatagggagaacggacaaaagcccaccagaaataggcaaggaaaacgcacgagcgn

SEQ ID NO: 606378 - DNA, 161 bp, Homo sapiens
gagtagcccaatcgatgcctaatgagctacaccaccaccggggcacatgtcctcaggttcctgcagcaaagtaccaccggaacttcttggtcaggtgagcttggaacttttcatgctttctttctcagggctggcatccacggacaatgctgcaggcatga

SEQ ID NO: 606379 - DNA, 1389 bp, Homo sapiens
  misc_feature (370)..(370): n is a, c, g, or t
gcccgactaactgctcctgtggatgcgcgcggtgcagatccgctgcgccgatcgcgatctgctatcgcaggcttgagataggcgcagggcctgctgccatcagtgcatctggactccgcttctacagcctaacaagctcagaaacctcgactagtagaccacgctttcctagctctccgtggcgagcactgcatccgaaatcggttggcgctgttagcactacttccgatgatcactgggctgtaccgtcctggcgtcgagtacgacgtgtggggcctcactactctgtgagtggcatcactccgcggtgctacgctccaactcgttgccaagacgcgcggtcgattcgatccataatattgagtacctncttcatgggtagctgcacatgctattcgtacccgaggtacatgcccatcggatgagtgcgtccactcccatccttgtgagcccgtggcagcactcgaaccgcgtcgagtcaagaacactctctggtgtcgctggggacagaatctctgattccgaaccgtgaggcaaagccgcccctaggactgaaaccgtggaactgtcgacaagggccattacacacctctgcattgcagacctcatgtgccgcagttctgccgaagcctcaggacagagctcccttgctgatcaaccgaaaagccttgaccttgcggacacggggaatgctcctgctgctccatcgcactacgtagaacaccacacgaccctcccccccagcaggtccgcacaccagcctactgcgcccctgcaatccctcacccatcgcccccaccgccactacccaccatgcccccgcccaccccctctttgccccgcacacttcactgccgcatagcccccaccgcgcacactaaccccccccccccaggacgccccacagcgccctgaccaaaccctacatcacccccctgcaccccagccacaccggccctcctccccccccccgccgcccgcaacccacccccaccgcgcccgccgacccaccagcccccacccccgccaccccgcccccccccacccccgcccccccccacacccccccccccccccccccctccacccaccacgccccccccccacaccccccccccccaccccccaccccccacccacacccactaccacaccccctccaccctccccccctcccctcaccccccccctccccccccccccccctactccccaccccccacccccactcaccttcctctccccccacactcactacccaccaacccacacccctccccaccctccacacttccccccccacccccacccccccccccaccaacccccccccccctctccactcccccccccctcccaccccccactcacacactcccacccccccca

SEQ ID NO: 606380 - DNA, 777 bp, Homo sapiens
  misc_feature (35)..(35): n is a, c, g, or t
  misc_feature (75)..(75): n is a, c, g, or t
  misc_feature (97)..(97): n is a, c, g, or t
  misc_feature (99)..(99): n is a, c, g, or t
  misc_feature (150)..(150): n is a, c, g, or t
  misc_feature (159)..(159): n is a, c, g, or t
  misc_feature (190)..(190): n is a, c, g, or t
  misc_feature (212)..(212): n is a, c, g, or t
  misc_feature (215)..(215): n is a, c, g, or t
  misc_feature (233)..(233): n is a, c, g, or t
  misc_feature (257)..(257): n is a, c, g, or t
  misc_feature (312)..(312): n is a, c, g, or t
  misc_feature (318)..(318): n is a, c, g, or t
  misc_feature (388)..(388): n is a, c, g, or t
  misc_feature (394)..(394): n is a, c, g, or t
  misc_feature (396)..(396): n is a, c, g, or t
  misc_feature (398)..(398): n is a, c, g, or t
  misc_feature (470)..(470): n is a, c, g, or t
  misc_feature (481)..(485): n is a, c, g, or t
  misc_feature (630)..(630): n is a, c, g, or t
  misc_feature (683)..(683): n is a, c, g, or t
aaaaaataaaaaacacttcaccaaatccaaatganaccaaatacagatctacatggggatcagaaatgactccancgaattatcaggattccataantntatgttttataaaaccagaaatcaaaaaaaaaagcccaagttcatcatganaggagaggncccacgacagctcccaggactctgctgaagnccaggcaatgctaacagtctgngantccacatttacacaatantctataaagaccctcggtccactncgactattcaagtatatatcgattttaaccgagcccatcaccactcctttgcccnagtcanctgtgtcacagctaccacaaagctgtgttacagtcatatttagcaattttacaatcataatactcctttnaaaccntncnggggggctttaaaaataaaaaaaaagtaaactttgttaaagcgacactgaggctctactaaacccagaagtnaccaagtacannnnnatgtataaatacaacttacaagtccatgatttcccatcgtcccccttccttgtacgaaagcagggtgaggaagtacaaagcagagcttttagattagtctctcgtggagatcggagctctcagctgttcctttagcttagctctnggtatatatagtcagctgtactttgttctgaaagatatgttaaatgccacttntatatacacttggagctttacacctgagagtgattatcaagcagtcagcttatctctcttcaaacatttcatatagacatacacacacctctgc

SEQ ID NO: 606381 - DNA, 155 bp, Homo sapiens
cgggtgcttccacccgttttccctaggccttgggtctcaaggggcaccaccttggctctactgtcaaccgctcgcgctttccagggtttcagagccaaattttctctgtccttagccctttccaagggagccggtggcacattcaggccacaagt

SEQ ID NO: 606382 - DNA, 1159 bp, Homo sapiens
agcgggtcttacctcgttgtggcgtcagaaccgacgtcgactcgctcccttctcggcagtggtacctgttcccggtgatccctgagagtacgttgcgggtcaggtacggccccgaaagtacggaagcggacgggcgagcaggtttgcgggtccaagtgttagcggagtacggcacctctacagtcgtagcaagtcgcggagggagtgatgactgcgaggcataggcccatggacgtaatggagtccaaagaggaacgagctgttaaacaagatctcagtcgctggagacaaatgtcaaccatggaaacctgatgaaggcaagatgaaaaggcgagcaagattgcctaattaacgcgggaagcccttatggacccataaccctgtatgaactgctctactctgacacgtacatgtgatggcctaagaagggaaaaaccggctaatgctcggtttcccagctggtatcatcggtcaaggccccatatcccttgacagttacattacgactaggcgacgattatatagccgcttagcgctttgcgagaaggccacaaggggctacaaggtacatgaacgaagcatgagcaagctattggcatcaagcgacttgcggcgcacgtaagggttgaaggaaacaaggcattgtacttagcgacagcagaacgccgttgcatggcgctacaatacacgccaaggctcctgcagcttccacctaatggatccattgtcggagcgccaatggtcacaatgcccacacgtggaagttccccgcgcgatacagctccaatggcaccgcaagtccacaccggaacgtggaacgcttattaggccctttaattgacccccgtgtaacattcccttgaactagcgatattccccccccttgacagaccgttataccactaacggcggggaacgaacgccccctattggcgttatcttccgctgttaaagaaacgatattaccgagccaactttattcgattgacggcttggtttaaccccatatatagcgacccgtaaagacacgctggttaacaataagaactttggtttaaccgcctatgaggctctacaacttataggttatgagggcgatatcacttccacatttaaattttaccgccacagacattattcctacaaacaatatgagaag

SEQ ID NO: 606383 - DNA, 128 bp, Homo sapiens
agctcgtgatcacagtggcactggagctatggaggacagacaagccaagtggacatcccggatcggcctagcaagtctcgaggaaatggtgcatctcggtgaacacaggagtcagtcagcagcctcca

SEQ ID NO: 606384 - DNA, 130 bp, Homo sapiens
taggggaaggtcacttcagtatgtatataaatgaatatcagtcacagtatttagttgtggaatacctataaaataaattgattagatgatgagcaggggtaggcaactatagcacactgaccaaattctg

SEQ ID NO: 606385 - DNA, 951 bp, Homo sapiens
  misc_feature (43)..(43): n is a, c, g, or t
agacaatgcatgcagtgctgacatcacgcagtactatcttggnatgccaccacaatgggacatgttctgtgtgtgtatggctgtggccttgagtgagtattgaacgtgtgccattagctgttttgtgtgacacttctggactgcactggtcatgaacatcgcagagcactacatggcttcctgacgtcgaatgggatcctactgggcgctacgtcgtcacctctgtgtcctggtggagccataaggtggacaacgcgtactggctgtggactttccagggacgcctcctgcagaagaacaacaaggacctgcttctgccagctgctgtgtgcggccccggcctcccacactcctgagccaggaacagatcaagcaaattaaaaatggatctgaatgaaatactctaagatcttttgaacatgcaaggatctgttctgagtccagtcccaatagcctccaaagtgcacatttgggtgtgagcagaagtgcgccaccatgcatggccagcatttcctgtgcaagtcaccggaaaatggcccaggagctctatatggagcagaaaaacgagcgcctggagttgcgaggaggggtggacactgacgagctggacagcaacgtggacgactgggaagaggagaccattgagttcttcgtcactgaagaaatcattcccctcgggcaatcaggagtgacctggagcactgtgggtacggactccgcctgctgtcccgtgctgagctacagggactcacgagtggtgagccgtcggtcctctgagtggcagagcacaccgatgtctgatttggatcccgtaggccgaacatgcagggaaagccatggtgactacaggcttctaccatgggcacatctaggactcggacttgtactggtcatggaaatctggcaatgtgaagaactataggtggcctcaagccctggcgtctcactggg

SEQ ID NO: 606386 - DNA, 329 bp, Homo sapiens
cgagtgagcccctgcccgagtgcctgctgggggatgaggccgcgtatgcgggaccgagaagtgggctgggatgcagaggtcgcggaggtggcgagcgaggccggggtcccatggcgtgggacctggcagtggcccgggagtggcgggcagcgccaggaatcagtggtgccgggctgagggagggggccctgcgggttggggcacgtggtggcccggggaggtgaggtaaacagccctgcaggcctcggggcaccgttgctggtgcggcgccggctggcatgtgcgagggcccgtcccgcatctcggggcccatccccccagacctgacg

SEQ ID NO: 606387 - DNA, 157 bp, Homo sapiens
tgacagtgatatgggtctgccaagtgcttccccttcagtacgttcccattcatatacgggtaagattacacagcatatagaacttgatgggctatcttgtgccactggcacattatacgctgcatacaactggttgactgccaaccttcttgtcacc

SEQ ID NO: 606388 - DNA, 421 bp, Homo sapiens
  misc_feature (56)..(57): n is a, c, g, or t
  misc_feature (87)..(87): n is a, c, g, or t
  misc_feature (113)..(113): n is a, c, g, or t
  misc_feature (261)..(261): n is a, c, g, or t
gcaagggaaagatgaaaacattataaccaacgcataatatagcaaggactaacccnnctataccttctgcataatgaattaactagnaaataactttggcaaggcagagccanaagctaaagaacccccgaaaccatgacgatgctaccttaaggaacaggctaaaaagatgcactaccccgttcctatgttacgccaaaattagcttgggaaggaatttaacttaaggttagcaggggcgacaagaccttacccgaatgntcccttgggggttggactaacgcccttgggggatataggatccaccaaaaccgcaacttacacgaacacacttcccttcttcacggctctaccaacaccccttcttctcaacaacctctcctggggcccaccaagccaaacgcaaaaaacccccccattt

SEQ ID NO: 606389 - DNA, 116 bp, Homo sapiens
acgcctgtaatcctatcactttgcgaaactgaggtggtggaaggatcactgaaggtcgggagttcaagaccagcctggccaatgtggtgaaaccccgtttctcctaaaattaaaaa

SEQ ID NO: 606390 - DNA, 153 bp, Homo sapiens
ctcatccatattttcatccatattatttttggctaaaaagaaccatgtaacgataatttacgttatttccagagtattagcactttaatatgtcaagtttagtgaaaataaacaagtaatttccagcaagttatgtttcattttttcatttaa

SEQ ID NO: 606391 - DNA, 771 bp, Homo sapiens
  misc_feature (274)..(274): n is a, c, g, or t
gccatgtgctggctctgtgactttaggcaagcgattcacatcctcagccaatttcatccgtgaaaagaaaaccagaagagcaagatgtggagaataatatctgctagagaaatatgcatctcagcctgactattgtggtgcctgaacatgatggcggagttcggtcctgtgtgcccaggctgagtacagtgcgcaatttccagctcacagcagtgattctcctccctcagcctcgcgagaagtggattactgggcatgttgccattacgcccanataattttgtatttggtagagacggggtctctccatgttgtcaggctggtctccggaactccttgaactcaggtgatccgcctgcctcggctcccaaagtgctgagattaccaggtgtgagccaccgttgccgggctaattttggtatttttcagtagagacacggttttaacccatgtgtgccagggtggtctcaaactccttgatctcaggtgatccacccgcttggctcccaaagtgctggattacaggcatgagcccactgcgccagccaaagtgaaggcttaatttttaaccttgtgatgattatacttggaaggggtggctgcccctccaacctgtggtaatttagtcgggtgtatgagacgactgagacaaagaacttaagacacagagactagtatagagaaacaatagttggcccgggactggcggtccagacaccaaggacctgattggcacggtctgattcctcggtttattatattcttttttgg

SEQ ID NO: 606392 - DNA, 103 bp, Homo sapiens
ggggggcccccctgggggggccccccccccccgggttcccttttggggttttttggggctttttcaaagaaaaacccccttggggggattggggaagggccca

SEQ ID NO: 606393 - DNA, 97 bp, Homo sapiens
ttttatttcatttataagatggctcaatgtattgggaggctttttttttattacaaaaagtgtatattggtatataataaatgaacttttcaaatga

SEQ ID NO: 606394 - DNA, 186 bp, Homo sapiens
gcggcccctactactactaaattcgcggccgcgtcgacctggctgcatgttgattatattcacaagtaagaggcaggagcatttttatttgagagttcatggcaataactgctacttttaaatactggagatctcaagagacccaagggaacacaagacacttccaggtctgggaagtttgcttgg

SEQ ID NO: 606395 - DNA, 1318 bp, Homo sapiens
cagagacgcagtcgcgctcccacgcaccgcatcgactcacacacgagccctcgttctgcctcttccatccgggagccagtcctgctgccacctgcacgcacgcccaaggacacatcggccacccatccgcatgccattgtacctaccacggtccagtgtcctcggtcctcctaccgcatgagactgttcaggaaggacccgtggacacctgagtacgacctgagtccgcagtctccaaggcacgtgagactaacgttcgacctaacagtggcaacaccgaaaccataaccagcacttgggacaagtcgccgcgtgcggaccgcacagatagcacatgatctccaagccactcgtacgacctacgattcccaccagtggactggaggcgttgtaattggcaaacaggcggccataccatacttggcccggatgcacgccgtgcaaggtagacaaggcgagatagccaccagagggttgcatgggcatccctttgccaggtgatccgtacggagatgtgaggctaactgtcagcgttgagtccagctcgtcctcaatacagatcacccccgaaacgtttccccacggaaaactacgcccgctgacccaaaggcaaccacatggcttggacagcctggaatgagacggcctgaacagttctcccggcctgtcggccccaacctaagaattccgcatccaaggggtggaggcccactcccattgggacgccaggcacacacactaagagataccctgcacaggaccccggatgccaccggaaggcaagcctccaaggcggacccagcgcgaccaaagacccggcgcccgaagagggcgaaccgtcatagccaccgcaggccgaacaggggggcagtgcggcgaccgggactaggtcgacccacctttacaccaactcgaccaaaggtcccgcacatccacgggctgggatccgccgactctatcttggcccgcggacccttcaatggcgccctaccgcgtagcgacaactagcgcacgatcggcaattctggtttatcgatacatctgcggcagcgcgcgacgagcgccccggggagacacctatgccaaacgagagtcagacacagcgggccccaccggcccggctgcagacgcctgcccgccaaccaggggaccgcagggccgcccgacccgtgccctgcacgacacaacgcccgcgagacgcccacaccggagacatgcagcacccagcgaagcgcacccgaggcgcgcaacccagaacggagagcaccccgacgcacggagagcccgacaaagcacgcccacacaccaccgtgccaga

SEQ ID NO: 606396 - DNA, 1315 bp, Homo sapiens
gagaggacgcggaggcgagcaagatggcgcagacagcagggcacccggaggaaagtctgttactacatacgacggggatgttggacaaattactattatggacaaggccaccaatgaagcctcaccgaatccgcatgactcataatttgcatgctcaacgtatggtctctaccgaaaccatggcacatctatcgccctcacaaagccaagtgctgcaggcaagatgagcaagtaccagagcgatgactacattaacattcttgcagctccatccgtccagataaccatgtcggagtacccaggaagcagatgcagagattcaacgtaggtgaggactgtccagatatcgatggcccagtaacgagaactacatgtcacgcgatcatacctggtgcgcacctgtgagaccagatgcatggatgaaaacattaactaagacagcaagaaaggcacattcagcatgatgcacatcgagacaatgacgaggccatggacagccacgtacaccagaaggtccgaaggcatctaggcttcacgagaaacagtcagaggggcataataggcgcgatggggaacaaatcccatgagaaacggcgacaaaggaactagacccacgaagagggcgcacgacacaataggaccagtaggacaaatccaacccaatgaaagaccggggacgcaggccaacgaagggaagaacagaaaaaccaagtgacaccaggaggcaacaatgaaacaggctcgccccgcacacaacaaacgactaatggaggcgacaagcataagagatcgccccaacggagcagaccggagcgaaaccctaacggggaagataatacgaagcaaatcgggacagcgagggcaagagctgacaaacactgagcgcacggataacaagataacgccggcgcgcaccgaagaaaagggagaagaaggaggagcacgacgaccccaagtgaggggacaaaggaagaacaaggcacgggacacacacgatagccaaaaagcagagaagtggacagacgatagcacaccgagcgaacaagagaacgcacaagaacacacaacacaaagagtgatcgacatcacggaacagcgacacatacacagagggaagaaaacgacgaaaacgggcgagccgcaaacacccaacgaaagcaacaaacgaacaacgagcagagacgacacgagcacacgaagagaacaaccacggaacagaagaaggacatcataaaagcgagacagagcgaggagccaaagacagcaccacacagcacagccaaggaagccacgagcatcggacacaacaagcaaa

SEQ ID NO: 606397 - DNA, 510 bp, Homo sapiens
  misc_feature (207)..(207): n is a, c, g, or t
gcttcttgccggtggtggttccctccagcccgaaattgtggcatctccaattcccaacaattagccccatccatcttccctccccctcctgcccaggcagggggtaagcagcccagaagccccgtaactgccccttccccgcatatgcttttgatggggtcatttgctccttcctgtggcctcatcccaactggatcttcccttacnggttatattttccccccgtaatggttggggcccggcccatcccttttcccccttctataatggttgggactaaacgtcccccaggtgggttttccttggcttaaaaatggaaggcgtggtgggattttctcctgggttccctaggccctagttagggcaaaaaaaaaaccctcctttcccttttttccccgttaggcccagatcccccccaaaggcaggagtgctgccctttcccctgggggccgggccttttttctgtgttttttaacccccccttttaggggattaacctggcccttggga

SEQ ID NO: 606398 - DNA, 157 bp, Homo sapiens
tctcaaatgaggcaatagaaagcctctacgaagccctctatggttgactactttgccagaacctgtgataacgtgggtatgatgcataatgacagtattatacatctcgccattattgtcatcatctgccgttcacctgctgtccccggcgtccatg

SEQ ID NO: 606399 - DNA, 127 bp, Homo sapiens
cgggtctggagagcgccagctatcctgagggaaacttcggagtggaacagtatagatgtaattgcacgtcatgaccgctacagaccagcccatctttcgggtcctaacacgtgcgcccgtggtccca

SEQ ID NO: 606400 - DNA, 178 bp, Homo sapiens
ggtcgcactctctatagcctggctagaaattaaaccctcgagattacagatgatcattcgtgagctctcacactgagcggatcatgcgtcggtatctacaaatatgcccatcatttctggggtatgaagactgagagcactacatgggtagaagctggaaatcatcagaagtgactct

SEQ ID NO: 606401 - DNA, 661 bp, Homo sapiens
  misc_feature (150)..(150): n is a, c, g, or t
aatctaggttgggcaaggtaatgggagggcaagcatgctggtggtgacaatggggtctaaaaaaatgccttcaattagtttggcttggtgcagacgttctaatctaggctctgagtctatagtatcatcacttatccaaatgcagagacnatctatcctgcagaaccattcattcccttaagaaatattttatttgtagtcactatggtccagccaccattctaggtgtcaattgtataacaacaaacaaagcagacatttctgtccccatggaacttaactctaatgtattttagatctgccttttgcttatttacctgggtaaataaaaaaaaaagcttttacttttattatgggtgatgtacactaacccgtattagttttcatgccaaaacctcacccagtgagccagactgaaacccaccattttcttgatatgtgagcatggaccccatcctgcaaagagaagaatggataatgagaggcatgtgctggggttcaatttgcagggttcatttgtaatcagctatgaggtcaacttctagtcctatgacattaatagaagcagagacagacacttcattttcagtgtacctctctcttgcttccccaaagcctctgttctaaaagtttagtaaaaccttaacattcttcaacttgc

SEQ ID NO: 606402 - DNA, 240 bp, Homo sapiens
gcgatgtaaatagaggatgtcatgcctatgcgtcagcagtataagggatgccgttagtgcccacaaagatcttacacactttgcacaacttgttactatggcctcctcaggtgtcatacgatgtacagcaaagcgagccttggtgtcatagatcagacggaaattctctcccgtcttgtcactgctgatgacatccattaatccagcagggtaggttatatcagttcggaccttgccatc

SEQ ID NO: 606403 - DNA, 154 bp, Homo sapiens
tagtcagaggagaacgtattccaagaaatagaagcacaggatgccaaggtctagggaagacggaactggcttaagcgcatgtgcactgaccatggacaaacctgtagcgttttgttcaagttgctcagaacaacttccagcagatcaatctccg

SEQ ID NO: 606404 - DNA, 354 bp, Homo sapiens
caacagacacataatatacaccacatgggcctatataagtttactagtaaccacatttataaaacataaaaagagacaggtgaaattaactttactaatatatcttatttaacccaatatatgtagaatgttatttcagacaaaatataaaaatcactaaagaaatatttcctattctttttttcatattacttccctgaaaatccagagtatattttgcatttatagcacatgtcattactcactagccacattcaggtgctcaatagccacatgtgactagtggctgcctttttggatagtcagctctagattttacttatgagatgtacaggatctaaaaacatctttagc

SEQ ID NO: 606405 - DNA, 149 bp, Homo sapiens
atccattgccagccaaaagatttttttttggacccatttgttttgcagaagggtgtttttcccttttccctttttttggttctttttgtctttcctttttttttgtttggggaaatcccttagactctgggggccttttttcccgccca

SEQ ID NO: 606406 - DNA, 259 bp, Homo sapiens
  misc_feature (108)..(108): n is a, c, g, or t
atcatggggttgtttgatcccgtatatgctatgtattccgtgaggccaaatatcatctgaggggccacaataattacaaacttactatccgccataccatacattttnacacgccacatgtctactgattaatcttctaaaatttattgaactacgttcgtcccaatgtatgggatgtgtaatatgtaagttagtaattactgaggcccctcaaaatgatttatggcctcatgggaggacacaatctatgaatgctgtt

SEQ ID NO: 606407 - DNA, 161 bp, Homo sapiens
ctgtaacatctgcctggctaacttcacaaattgaataaaatgtttgatatatattcatttttttaaaatccaaggagaagctgggtgtggtggcacatgcctgtagtcccagctacttaagctgaagcaggaagatcacttaagggcaggacaatcaggca

SEQ ID NO: 606408 - DNA, 253 bp, Homo sapiens
cctcctgggttcgagcgattcctgtgcctcagtttcctgagtagctgggattacaggtgcccatcaacacaaccagctagctttgtgtatttttaatagagacagggtttcaacatgttgcccagactggtcttgaacacctgacctcaggtgatccacccacattgtcctcccaaagtgcggggattacaggcatgagccaccacacctggtcttctaggtaggtttcttacccatgtgattatctagtggc

SEQ ID NO: 606409 - DNA, 182 bp, Homo sapiens
cgcgtgggtcttgtgctggaggcctacatgcggctggacgaggtgctgcccgagctgaaggcgagcctggcgctgtctgagatgctcttcagaggggaggggccaccctgtgcctgcagccgcatgtaccagtaccagatgaagatgaggaagccttgcaaggaggtgatgatgctgaaaag

SEQ ID NO: 606410 - DNA, 150 bp, Homo sapiens
tcgattcagtcaactatgcactgaatgtagctcctaaaatcagttctctaccctacggatgggatgttctaccaagaaagagaagcatcaccatgtcatctagtgttctacacactatagagagttacagttgcccccaacacggatgct

SEQ ID NO: 606411 - DNA, 184 bp, Homo sapiens
agtgagttatttatcctgatcctcattcctctcacccagcctccatcctccaccagaccgtagtgtgtgttgtgcccatgtgtccatgtgtactcatgattcagctcccacttataattgataacatatggtattaggtttgctgctcctcgatgagtttgtaaggataaaggcctccagctcc

SEQ ID NO: 606412 - DNA, 289 bp, Homo sapiens
ggaagggatacatgattttaaaaaagcctgtaagaggtgaaatatgtgatgtttgaagtctctttatagactctttatatatatttcgtgaaacactcatcttagatgaggtgcctttgagccagttcttaaaaatgccagttccgggaagccacctcctttggttccctagggaggaattctctaactcatgcacactcttttaaatatagcgaactctgggttttgagataatctctctacactcacaacactcttgagagcacatcatctctactttataataaat

SEQ ID NO: 606413 - DNA, 310 bp, Homo sapiens
atttagccgggatggactcgatctcctgacctcgtgatccgcgcgcctcgccctcccaaagtagctgggattacaggcgtgagccaccgcgcccggcccccccaattactcttaaaggtaacatcgctattgtgaacctaagatcagctttttgagatgccttttcaggtgtaatggataatactgagtgtcagctcgattggattgaaggctacaaagtattgatcctggatgtgtctgtgagggtgttgcaaaagagattacctgtggaaggcagatgcacagttaatctggtggcacaatctaatca

SEQ ID NO: 606414 - DNA, 543 bp, Homo sapiens
  misc_feature (3)..(3): n is a, c, g, or t
  misc_feature (14)..(14): n is a, c, g, or t
  misc_feature (33)..(33): n is a, c, g, or t
  misc_feature (52)..(52): n is a, c, g, or t
  misc_feature (66)..(66): n is a, c, g, or t
  misc_feature (118)..(118): n is a, c, g, or t
  misc_feature (177)..(177): n is a, c, g, or t
  misc_feature (247)..(247): n is a, c, g, or t
  misc_feature (292)..(292): n is a, c, g, or t
ttncttggtccctnccccaaaaatgcaatggtnaagccctccctacccttgncccccttctggatnactcctaccctgagatgcccatctctattgttttgccccctgattaaactcnagcagagggagggggacccctgcaagagggggaacatggctccctcccccactcccatncccctccccaggccagccccacaggtgtcctgcctgcatcaacctaaatgggtgccccagtggtgagaantcctgactgtgctttaggaatagatcacattcctagctatgcacnagtgcacgcctgtaatcccaacaatttgggaggctaaaacccaggagtttgagaccagcctgagcaacatactgagaccccatctttccaaaaagtatttaaaaattatctaggcatttggcacatgcctgtggtcccagccacctgcgaggctgaggtgagaggattgcttgagcctagtagttcaaggctgcagtgagctatgatcatccactgcactccagcctgggtaagtgagaatttggttcaaa

SEQ ID NO: 606415 - DNA, 428 bp, Homo sapiens
  misc_feature (25)..(25): n is a, c, g, or t
  misc_feature (78)..(78): n is a, c, g, or t
  misc_feature (96)..(96): n is a, c, g, or t
  misc_feature (136)..(136): n is a, c, g, or t
  misc_feature (147)..(147): n is a, c, g, or t
  misc_feature (197)..(197): n is a, c, g, or t
  misc_feature (236)..(236): n is a, c, g, or t
  misc_feature (246)..(246): n is a, c, g, or t
  misc_feature (248)..(248): n is a, c, g, or t
  misc_feature (273)..(273): n is a, c, g, or t
  misc_feature (321)..(321): n is a, c, g, or t
  misc_feature (325)..(326): n is a, c, g, or t
  misc_feature (333)..(333): n is a, c, g, or t
  misc_feature (339)..(340): n is a, c, g, or t
  misc_feature (342)..(342): n is a, c, g, or t
  misc_feature (346)..(349): n is a, c, g, or t
  misc_feature (352)..(352): n is a, c, g, or t
  misc_feature (359)..(359): n is a, c, g, or t
  misc_feature (362)..(362): n is a, c, g, or t
  misc_feature (364)..(364): n is a, c, g, or t
  misc_feature (387)..(387): n is a, c, g, or t
  misc_feature (390)..(390): n is a, c, g, or t
  misc_feature (404)..(404): n is a, c, g, or t
  misc_feature (408)..(408): n is a, c, g, or t
  misc_feature (419)..(419): n is a, c, g, or t
  misc_feature (422)..(422): n is a, c, g, or t
  misc_feature (426)..(426): n is a, c, g, or t
  misc_feature (428)..(428): n is a, c, g, or t
gtccacgtgaagaaaacagaacacntcaagattacatgatggggaaacatgtaggggctttgtctctattgaaaaatntgtcttacagttgttttngtattttattttaggcaaaagtcaacaactctagcttaantggagtaggcnatactcagactctgaggcctggtaaggattctgtgataaagtaggattgntttgatagtattaaaaaatttagttttcattcttcagcntacttttcanancattcaagcacacagaagagttganagaagagtacaataaatacgtgtttacgcttttaccacaattttttantgcnntttcttngcgttnngngtgnnnngcngggccantcngncggggcgcctctcttcagaatanggnccggctctgcgttnctgnataaccataanacnatcncn

SEQ ID NO: 606416 - DNA, 1256 bp, Homo sapiens
ggcctgaccacgcagttcttgggtctgtgctgctggcctggggttgtggttgaggccgggtctccgctcctgtgcccgggaagatggtgctaggtggttgcccggttagttacttacttctgtgcggccaggcggctttgctgctggggaatttacttctgctgcattgtgtgtctcggagccactcgcaaaatgcgaccgctgagcctgagctcacatccgctggcgccgcccagccggagggccccgggggtgctgcgagctgggaatatggcgacccccactctccggtcatcctctgctcttacctacctgatgaatttatagaatgtgaagacccagtggatcatgttggaaatgcaactgcatcccaggaacttggttatggttgtctcaagttcggcggtcaggcctacagcgacgtggaacacacttcagtccagtgccatgccttagatggaattgagtgtgccagtcctaggacctttctacgagaaaataaaccttgtataaagtataccggacactacttcataaccactttactctactccttcttcctgggatgttttggtgtggatcgattctgtttgggacacactggcactgcagtagggaagctgttgacgcttggaggacttgggatttggtggtttgttgaccttattttgctaattactggagggctgatgccaagtgatggcagcaactggtgcactgtttactaaaaagagctgccatcatggcccagggaggcgggtgaaagctccgtcttctgaattcatctctacaggctcaaaactcctctttgatatcagacctgatgttattttccttcttttggagggcatttgtttggttaagaaggcttctttggactttggaatttcaacccagattttaccttgcagacggaatgacaagcaaaaagtgttgtggggaatcaaatttgttcctttcctcatgcacaaaacataaaggatagtggcgagtttacaagctgtggatgggtttccatagtcttcctttctgtacattgctatatcttcagtcctttggagcaagtggacctaacaagttgagcaaaatgaatatttggatccatgttcctcttgtgaccctgagtcttcatgcaaggagatctgaagctgaacaatgaaaatcttcagcagaaatagaaatggccgtggattgtaatacacactgaaattctgactttctgaatttaaatgtagaataaattttaccaacttgga

SEQ ID NO: 606417 - DNA, 175 bp, Homo sapiens
  misc_feature (123)..(124): n is a, c, g, or t
gcgtcacagttgcgcccgcgtgtttaattttgaattactttaaaattgtaaaagaggaattgttccggggtgatgtgatacagacgagaaccaggtgcagctgggctcccccactcacctggnnctttctctcagcctttgtggcatggttggtccccgcaactggtacggcggg

SEQ ID NO: 606418 - DNA, 1645 bp, Homo sapiens
ggcctgaccacgcagttcttgggtctgtgctgctggcctggggttgtggttgaggccgggtctccgctcctgtgcccgggaagatggtgctaggtggttgcccggttagttacttacttctgtgcggccaggcggctttgctgctggggaatttacttctgctgcattgtgtgtctcggagccactcgcaaaatgcgaccgctgagcctgagctcacatccgctggcgccgcccagccggagggccccgggggtgctgcgagctgggaatatggcgacccccactctccggtcatcctctgctcttacctaatcacgccattttttaacatctctttttgatcaaacaagaaaaggcatttgggaaatgcaaagaggactgagaatactttggcttaaattttgcccccagaatcttgttgtttgcctactgaagagatgaaaccatggcagaagtagaatccttatagaaacaggaccagaaacacctcccttctccaacaaaaggttcattttggtggctgtccgtttgacctgctgtgcttcagtttaattggcttggaaaggggtcagcagggtgaaaccgaaccccagaaaacttgatgaagaaatgtcttttgcccgttttgattacgtgcatgcaaacagcgatttgcaaagaccgtatgatgatgatcatgatcttactggtgaattacagacctgatgaatttatagaatgtgaagacccagtggatcatgttggaaatgcaactgcatcccaggaacttggttatggttgtctcaagttcggcggtcaggcctacagcgacgtggaacacacttcagtccagtgccatgccttagatggaattgagtgtgccagtcctaggacctttctacgagaaaataaaccttgtataaagtataccggacactacttcataaccactttactctactccttcttcctgggatgttttggtgtggatcgattctgtttgggacacactggcactgcagtagggaagctgttgacgcttggaggacttgggatttggtggtttgttgaccttattttgctaattactggagggctgatgccaagtgatggcagcaactggtgcactgtttactaaaaagagctgccatcatggcccagggaggcgggtgaaagctccgtcttctgaattcatctctacaggctcaaaactcctctttgatatcagacctgatgttattttccttcttttggagggcatttgtttggttaagaaggcttctttggactttggaatttcaacccagattttaccttgcagacggaatgacaagcaaaaagtgttgtggggaatcaaatttgttcctttcctcatgcacaaaacataaaggatagtggcgagtttacaagctgtggatgggtttccatagtcttcctttctgtacattgctatatcttcagtcctttggagcaagtggacctaacaagttgagcaaaatgaatatttggatccatgttcctcttgtgaccctgagtcttcatgcaaggagatctgaagctgaacaatgaaaatcttcagcagaaatagaaatggccgtggattgtaatacacactgaaattctgactttctgaatttaaatgtagaataaattttaccaacttgga

SEQ ID NO: 606419 - DNA, 1267 bp, Homo sapiens
agggaagaacaaccttagggctaggtacgaggctgggtgttaatcggccgagggttgtggttgaggccgggtctccgctcctgtgcccgggaagatggtgctaggtggttgcccggttagttacttacttctgtgcggccaggcggctttgctgctggggaatttacttctgctgcattgtgtgtctcggagccactcgcaaaatgcgaccgctgagcctgagctcacatccgctggcgccgcccagccggagggccccgggggtgctgcgagctgggaatatggcgacccccactctccggtcatcctctgctcttacctacctgatgaatttatagaatgtgaagacccagtggatcatgttggaaatgcaactgcatcccaggaacttggttatggttgtctcaagttcggcggtcaggcctacagcgacgtggaacacacttcagtccagtgccatgccttagatggaattgagtgtgccagtcctaggacctttctacgagaaaataaaccttgtataaagtataccggacactacttcataaccactttactctactccttcttcctgggatgttttggtgtggatcgattctgtttgggacacactggcactgcagtagggaagctgttgacgcttggaggacttgggatttggtggtttgttgaccttattttgctaattactggagggctgatgccaagtgatggcagcaactggtgcactgtttactaaaaagagctgccatcatggcccagggaggcgggtgaaagctccgtcttctgaattcatctctacaggctcaaaactcctctttgatatcagacctgatgttattttccttcttttggagggcatttgtttggttaagaaggcttctttggactttggaatttcaacccagattttaccttgcagacggaatgacaagcaaaaagtgttgtggggaatcaaatttgttcctttcctcatgcacaaaacataaaggatagtggcgagtttacaagctgtggatgggtttccatagtcttcctttctgtacattgctatatcttcagtcctttggagcaagtggacctaacaagttgagcaaaatgaatatttggatccatgttcctcttgtgaccctgagtcttcatgcaaggagatctgaagctgaacaatgaaaatcttcagcagaaatagaaatggccgtggattgtaatacacactgaaattctgactttctgaatttaaatgtagaataaattttaccaacttgga

SEQ ID NO: 606420 - DNA, 1039 bp, Homo sapiens
gataggatgaacagtatgctcaacgaatagaaacgaaaaacgatcgcatctatctataattgtaagcatgatgacctgtttactagaggcatgcgtgatatcgacttgtctagtttccgttgcatttgggccgcctgtgcttgcctcatttagtcgacttgactatgctggtagtgatacatagaaagacaccatgacctgtttaatcccagctttggtatgctgcgaagggtagactctatgcgatgttgcaattttatcatgacagtgacagtaaatgtccctgtcccatacgaggagagggtggaactagaacaccgatgattggagatgaatcatgatcacagatataaacttcctaatatttactcactctctacgatgccgactcgacctttaattttatcgtgtggactcgcgaacgtgtcatgccggttatacaggactactgattaggtttctgctatatgagtgaccaacatcgattgtgttctgctagataaatccataatcacctggtctaatatgtctagacagactcctggtagactttggtcgtgtgtgattattggcaccatggtctttcttaaatacacaatacagacctcattcgcgtgtgcatgttaacaaatatgggtgtctcgcgtgacttcaatctacaagtaggagggacggggattactgaggttgggggatgcatcttcttccactgatgtgtctcgtatgatttatccagtgttgtgcatgtttgtgatatgcccagaattgatgagcccgttgaattttcatcccctgaaactccaatctttaaccatctgcttgccagatcttttatgaatttccccacgaatgcacgccatgctggtagtctactgctgagaacagtcttgagcgcattgcggatctagtccattttagttgactgcattgctgctttcaactttcatttcgtgtgtcaatttgtctcccattttggtaccgttgactgtggtgtgcatgacacagttttttttgtaacagaaagccttgggccatatat

SEQ ID NO: 606421 - DNA, 1177 bp, Homo sapiens
gtttttctttgatacgggagttcctccttcctctcgcccctactctttctggtgttagatcgagcaaccctctaaaagcagtttagagtggtaaaaaaaaaaaaaaacacaccaaaggctcgcagccacaaaggggatgaaatttcttctgggacatcctccgggttctcccgttactggatcgtctggctccctaaagtccttcgtggaagcttttattcctaagaggagaaaatcagtcaccgggcgaaatcgtggctggattacagggagctggggcatgggaattggggagactggactggcctatgaatttggctaaacttaaaagcaagctgggttctctggggatataaataaggcatgggactgggagggaaacaggttggccaaatggcaaggggactggggtggccaagggttcatacctttggtgggtagactggcgagaaaccggagaagattatttacaggctctggcaaagaaggtggaagggcagaaattgggagatggtcagtatttaagtaaataatggctgggtggtagtctatacatcagattcggttggctacacaagatcctcagatggaaaagacttcggaagttcaatggtactgtgcacatttctggactacaagggcatgtcttccgtgcaatgacgaagaataaccatggccatatgggtccctggggggcttcggacagcttggaccatgtctcggtcctctttttaatggtttactggtcaagcaagtttggtgctgtgggatttcataaaactttggacgattaaacggtggctttaaaatacttggggttcaaacacatgttgggtctcaaatttggtaaacctgcggctacccaaaatctcagtcaacgtgtggggcccatctgtaagccccgggagagccggggaaagacggcgggtcgcatggagacatcagagaggagagaaaaaagatatatcaaccagcactaaagattgcaccaaccggggaggaggccccaggcaggagcggcggcgaacacacacactcatggtgccgacagagtgaaagaagacaagcatcattagataaaagcaacgaggtgtgataacagaagacgagagcaatacaactcagggagtaggacaccgtccacgcagaagcgcaaacatagactcactacccgcgc

SEQ ID NO: 606422 - DNA, 2425 bp, Homo sapiens
  misc_feature (1762)..(1762): n is a, c, g, or t
ggcctgaccacgcagttcttgggtctgtgctgctggcctggggttgtggttgaggccgggtctccgctcctgtgcccgggaagatggtgctaggtggttgcccggttagttacttacttctgtgcggccaggcggctttgctgctggggaatttacttctgctgcattgtgtgtctcggagccactcgcaaaatgcgaccgctgagcctgagctcacatccgctggcgccgcccagccggagggccccgggggtgctgcgagctgggaatatggcgacccccactctccggtcatcctctgctcttacctacctgatgaatttatagaatgtgaagacccagtggatcatgttggaaatgcaactgcatcccaggaacttggttatggttgtctcaagttcggcggtcaggcctacagcgacgtggaacacacttcagtccagtgccatgccttagatggaattgagtgtgccagtcctaggacctttctacgagaaaataaaccttgtataaagtataccggacactacttcataaccactttactctactccttcttcctgggatgttttggtgtggatcgattctgtttgggacacactggcactgcagtagggaagctgttgacgcttggaggacttgggatttggtggtttgttgaccttattttgctaattactggagggctgatgccaagtgatggcagcaactggtgcactgtttactaaaaagagctgccatcatggcccagggaggcgggtgaaagctccgtcttctgaattcatctctacaggctcaaaactcctctttgatatcagacctgatgttattttccttcttttggagggcatttgtttggttaagaaggcttctttggactttggaatttcaacccagattttaccttgcagacggaatgacaagcaaaaagtgttgtggggaatcaaatttgttcctttcctcatgcacaaaacataaaggatagtggcgagtttacaagctgtggatgggtttccatagtcttcctttctgtacattgctatatcttcagtcctttggagcaagtggacctaacaagttgagcaaaatgaatatttggatccatgttcctcttgtgaccctgagtcttcatgcaaggagatctgaagctgaacaatgaaaatcttcagcagaaatagaaatggccgtggattgtaatacacactgaaattctgactttctgaatttaaatgtagaataaattttaccaacttggagtactgtatgagtattttcagtagggggaataaactcaaaattatatttgttttgcagaaacctagtcatttgaaatgagccatcctattaagccctcttttgtctccattatgttccagaggcagtatatgcagtgcaataattttttcattccacttatgttttgaaagccagcggcatcagatgtgtgagttgagctattcctcctggcagaattgtccaatctaaaaatcagcgtttaccagcccatgctaataaaattaagatttcatacaagtttctgtaaaactattcttcatgattagctctccctgtgggctgcagcagtcagaaagagataacagccacacctctgcattcccaggtcaccaggaataaaaggaaatgttccagattgtaagtggttttaaaaactcagttctcatcgtttgcaatctaagttgaaagaactattaaatataaaatcaaaggtgggcaatgtggccaagtcaatggaagaggcttnactcagaataacttacaaattctagaaacaaggtagaactcactcagtttacctaataataattgaatttaagaccaaatatcacagttgaaataacttccctggatacattctatcattttgtagctttcctaagaatttcttgctttatcattcctgattaatcactgtttttacattattaaaggtggcaattttctgtaaaaaatttaaaacagatgatcctattctgtcttgaaagttctgtaccacactgaccttaaccttgcttataacataacaattggtaaacttttaattcataatctttataccctaagatagtatttattaaatttttatgggtcatgaagaaactagaccctctccccagaaaaatctacgtacacagaatttacatagaacttgggttcatctacacaatttatgcatgaaataaaattgtactggtaccctataaatttatacaaataaaagagtttaagggagttcaaggatgccatatgtatattttaaaaaaatttctaagggaagtctaaaaaacataaattataatattacccaaaataagatgctacttttcacctaaccaagtcctgcctcatttcacactttaacctcctaagtatattcataaccctaccaaaagttgttttctttaaa

SEQ ID NO: 606423 - DNA, 216 bp, Homo sapiens
  misc_feature (26)..(26): n is a, c, g, or t
  misc_feature (101)..(101): n is a, c, g, or t
ctgggattacaggtgtgcaccaccanacccagctaatttttgtattttcttagtggagatcaggtttcaccatgttggtcaggctggtctcgaactcctgncctcgtgatctgcctccctcgaactcatgacctcgtgatctgcctgcctcggcctcccaaccatctgttttcccaaggaagaatgtgaacctcagcctcagagaactgtctctga

SEQ ID NO: 606424 - DNA, 1302 bp, Homo sapiens
ggcctgaccacgcagttcttgggtctgtgctgctggcctggggttgtggttgaggccgggtctccgctcctgtgcccgggaagatggtgctaggtggttgcccggttagttacttacttctgtgcggccaggcggctttgctgctggggaatttacttctgctgcattgtgtgtctcggagccactcgcaaaatgcgaccgctgagcctgagctcacatccgctggcgccgcccagccggagggccccgggggtgctgcgagctgggaatatggcgacccccactctccggtcatcctctgctcttacctacctgatgaatttatagaatgtgaagacccagtggatcatgttggaaatgcaactgcatcccaggaacttggttatggttgtctcaagttcggcggtcaggcctacagcgacgtggaacacacttcagtccagtgccatgccttagatggaattgagtgtgccagtcctaggacctttctacgagaaaataaaccttgtataaagtataccggacactacttcataaccactttactctactccttcttcctgggatgttttggtgtggatcgattctgtttgggacacactggcactgcagtagggaagctgttgacgcttggaggacttgggatttggtggtttgttgaccttattttgctaattactggagggctgatgccaagtgatggcagcaactggtgcactgtttactaaaaagagctgccatcatggcccagggaggcgggtgaaagctccgtcttctgaattcatctctacaggctcaaaactcctctttgatatcagacctgatgttattttccttcttttggagggcatttgtttggttaagaaggcttctttggactttggaatttcaacccagattttaccttgcagacggaatgacaagcaaaaagtgttgtggggaatcaaatttgttcctttcctcatgcacaaaacataaaggatagtggcgagtttacaagctgtggatgggtttccatagtcttcctttctgtacattgctatatcttcagtcctttggagcaagtggacctaacaagttgagcaaaatgaatatttggatccatgttcctcttgtgaccctgagtcttcatgcaaggagatctgaagctgaacaatgaaaatcttcagcagaaatagaaatggccgtggattgtaatacacactgaaattctgactttctgaatttaaatgtagaataaattttaccaacttggagtactgtatgagtattttcagtagggggaataaactcaaaattata

SEQ ID NO: 606425 - DNA, 343 bp, Homo sapiens
  misc_feature (264)..(264): n is a, c, g, or t
aacataagcagagtttcggcactgtcatgtgactctgggcacgtcacgttaacgtcgacaaagctatactctgtctgtgctgtccacgtaggtatgatgaccacgctaagctcccagttagcttggcagggccgggagcctgcactcggcttctgctctggggtagtagagtccggccctgtcagctaaggggtgctgctctggcagtggggtgggtctcctatgagctatgagctgtgctgggagatgcccggagtggaaccngagcaggacttaggtgaggcaggcacaacagagaaggcccagtacccgtccctggcatgctaggctcgcagaggccact

SEQ ID NO: 606426 - DNA, 1451 bp, Homo sapiens
ggcctgaccacgcagttcttgggtctgtgctgctggcctggggttgtggttgaggccgggtctccgctcctgtgcccgggaagatggtgctaggtggttgcccggttagttacttacttctgtgcggccaggcggctttgctgctggggaatttacttctgctgcattgtgtgtctcggagccactcgcaaaatgcgaccgctgagcctgagctcacatccgctggcgccgcccagccggagggccccgggggtgctgcgagctgggaatatggcgacccccactctccggtcatcctctgctcttacctacctgatgaatttatagaatgtgaagacccagtggatcatgttggaaatgcaactgcatcccaggaacttggttatggttgtctcaagttcggcggtcaggcctacagcgacgtggaacacacttcagtccagtgccatgccttagatggaattgagtgtgccagtcctaggacctttctacgagaaaataaaccttgtataaagtataccggacactacttcataaccactttactctactccttcttcctgggatgttttggtgtggatcgattctgtttgggacacactggcactgcagtagggaagctgttgacgcttggaggacttgggatttggtggtttgttgaccttattttgctaattactggagggctgatgccaagtgatggcagcaactggtgcactgtttactaaaaagagctgccatcatggcccagggaggcgggtgaaagctccgtcttctgaattcatctctacaggctcaaaactcctctttgatatcagacctgatgttattttccttcttttggagggcatttgtttggttaagaaggcttctttggactttggaatttcaacccagattttaccttgcagacggaatgacaagcaaaaagtgttgtggggaatcaaatttgttcctttcctcatgcacaaaacataaaggatagtggcgagtttacaagctgtggatgggtttccatagtcttcctttctgtacattgctatatcttcagtcctttggagcaagtggacctaacaagttgagcaaaatgaatatttggatccatgttcctcttgtgaccctgagtcttcatgcaaggagatctgaagctgaacaatgaaaatcttcagcagaaatagaaatggccgtggattgtaatacacactgaaattctgactttctgaatttaaatgtagaataaattttaccaacttggaaaaaaaaagaaacaagaaataagaaggaaaagaaaaacaagaaaaaaaggaaaaaagaaaaaaaagagggggggattaaatacgggggcgaatccactttataagagccagtgtattataatagggggggtaagggggaaaactggtggggccctgtggggttgccccaaggataatttgtgctgggttgaaagg

SEQ ID NO: 606427 - DNA, 1439 bp, Homo sapiens
ggcctgaccacgcagttcttgggtctgtgctgctggcctggggttgtggttgaggccgggtctccgctcctgtgcccgggaagatggtgctaggtggttgcccgaatcacgccattttttaacatctctttttgatcaaacaagaaaaggcatttgggaaatgcaaagaggactgagaatactttggcttaaattttgcccccagaatcttgttgtttgcctactgaagagatgaaaccatggcagaagtagaatccttatagaaacaggaccagaaacacctcccttctccaacaaaaggttcattttggtggctgtccgtttgacctgctgtgcttcagtttaattggcttggaaaggggtcagcagggtgaaaccgaaccccagaaaacttgatgaagaaatgtcttttgcccgttttgattacgtgcatgcaaacagcgatttgcaaagaccgtatgatgatgatcatgatcttactggtgaattacagacctgatgaatttatagaatgtgaagacccagtggatcatgttggaaatgcaactgcatcccaggaacttggttatggttgtctcaagttcggcggtcaggcctacagcgacgtggaacacacttcagtccagtgccatgccttagatggaattgagtgtgccagtcctaggacctttctacgagaaaataaaccttgtataaagtataccggacactacttcataaccactttactctactccttcttcctgggatgttttggtgtggatcgattctgtttgggacacactggcactgcagtagggaagctgttgacgcttggaggacttgggatttggtggtttgttgaccttattttgctaattactggagggctgatgccaagtgatggcagcaactggtgcactgtttactaaaaagagctgccatcatggcccagggaggcgggtgaaagctccgtcttctgaattcatctctacaggctcaaaactcctctttgatatcagacctgatgttattttccttcttttggagggcatttgtttggttaagaaggcttctttggactttggaatttcaacccagattttaccttgcagacggaatgacaagcaaaaagtgttgtggggaatcaaatttgttcctttcctcatgcacaaaacataaaggatagtggcgagtttacaagctgtggatgggtttccatagtcttcctttctgtacattgctatatcttcagtcctttggagcaagtggacctaacaagttgagcaaaatgaatatttggatccatgttcctcttgtgaccctgagtcttcatgcaaggagatctgaagctgaacaatgaaaatcttcagcagaaatagaaatggccgtggattgtaatacacactgaaattctgactttctgaatttaaatgtagaataaattttaccaacttgga

SEQ ID NO: 606428 - DNA, 819 bp, Homo sapiens
gggtcataaagtcgtagacgaaggacccctggagcgggattttttaaaatacggccagaggggcattcctaggttgttagcccttcccagaggcctgtggcatgccggggatggccatcactgctgcccacggggctattccactgcagtgcagaccgggcgatcctgcttccaaagatcatggtgtaacaactccgtgggtgccatccatggtgccctgatagtcatgttcgaatgccctggacttctaccactgttgcttgtgttattgtgtctgatgtgctcctgtgtggtgtgcttgccccgatgtcccccagtgcttccttgctgttggaagacattgggttgcactagcttgtcctgcaactgtggttgccttcttgcctgacccttggtttccaacaacccctgcttgcaatcagcaaacccactgggtgacaacccccaagcgcaccactttgtggcaaactgaaaatggcttccaccattggcccgaatgattgtgaactaaacaggggtgccatgttgggcccattggttcccaatggcaataccgggtcacatggttgttccctgtgaacttgccaccctgtggatcccccgggtgatggccccccccttgaagtttcgtggatatccataacacaatggggcgcttggttcgaactgtcctattggccctccagtgtttggtgcgaacacatggtaaattggtgctgtatgactatgacccaccaaatatttgccccaaagagcatgcccacagctcatgggcctgtgcaattaccctgaatacaacccttggccaccttgcattgc

SEQ ID NO: 606429 - DNA, 1542 bp, Homo sapiens
ggcctgaccacgcagttcttgggtctgtgctgctggcctggggttgtggttgaggccgggtctccgctcctgtgcccgggaagatggtgctaggtggttgcccggttagttacttacttctgtgcggccaggcggctttgctgctggggaatttacttctgctgcattgtgtgtctcggagccactcgcaaaatgcgaccgctgagcctgagctcacatccgctggcgccgcccagccggagggccccgggggtgctgcgagctgggaatatggcgacccccactctccggtcatctctggtcttactaaacttgttgtttgcctactgaagagatgaaaccatggcagaagtagaatccttatagaaacaggaccagaaacacctcccttctccaacaaaaggttcattttggtggctgtccgtttgacctgctgtgcttcagtttaattggcttggaaaggggtcagcagggtgaaaccgaaccccagaaaacttgatgaagaaatgtcttttgcccgttttgattacgtgcatgcaaacagcgatttgcaaagaccgtatgatgatgatcatgatcttactggtgaattacagacctgatgaatttatagaatgtgaagacccagtggatcatgttggaaatgcaactgcatcccaggaacttggttatggttgtctcaagttcggcggtcaggcctacagcgacgtggaacacacttcagtccagtgccatgccttagatggaattgagtgtgccagtcctaggacctttctacgagaaaataaaccttgtataaagtataccggacactacttcataaccactttactctactccttcttcctgggatgttttggtgtggatcgattctgtttgggacacactggcactgcagtagggaagctgttgacgcttggaggacttgggatttggtggtttgttgaccttattttgctaattactggagggctgatgccaagtgatggcagcaactggtgcactgtttactaaaaagagctgccatcatggcccagggaggcgggtgaaagctccgtcttctgaattcatctctacaggctcaaaactcctctttgatatcagacctgatgttattttccttcttttggagggcatttgtttggttaagaaggcttctttggactttggaatttcaacccagattttaccttgcagacggaatgacaagcaaaaagtgttgtggggaatcaaatttgttcctttcctcatgcacaaaacataaaggatagtggcgagtttacaagctgtggatgggtttccatagtcttcctttctgtacattgctatatcttcagtcctttggagcaagtggacctaacaagttgagcaaaatgaatatttggatccatgttcctcttgtgaccctgagtcttcatgcaaggagatctgaagctgaacaatgaaaatcttcagcagaaatagaaatggccgtggattgtaatacacactgaaattctgactttctgaatttaaatgtagaataaattttaccaacttgga

SEQ ID NO: 606430 - DNA, 410 bp, Homo sapiens
  misc_feature (1)..(1): n is a, c, g, or t
naggactggttacatctcagtatgagtggcgcattatgacgtaatccgccctgagcaagaatgtcctcccgctctcacgtaatcatatgactagccatgagctatgcgactacactcttatgcacacaaggcgttcccaaacacgcattcgtagggtttctcagcaatgtgctcattctgcagatgatgcaagtatccgctgtcatacactttgttccaacaggcgtcacacctgttcagagtcgacatgtaatgcgttccctgatgatctgccacatgcatactgtctctcaagacagggccacacctcgggcaggcgtgggccttcctgtaagacacacctgccataggagtcctgaaaagagtctctctttgtatatatatacgctgctaagcaggtcaggcctaat

SEQ ID NO: 606431 - DNA, 366 bp, Homo sapiens
accatgcctggctaattttgtatttttggtggagactgggtttcaccatgttggccacgctggtctcaaactcctgacctcaggtgatccacctgcctcggcctcccaaagtgctggcattacaggcgtgagccaccgcacccagccaacccaggagtttgacagcagtttgggtaacatagacctcatctctacaaaaattaaaaaaaaaaaaataggcaggtatgggggcatgcaccagtaatgccagctattctcatgaggctgaggtgggaggatcaactgagccctaaagttgaaggctgcagtaagctatgatcacaccactgcactccagccggggcaacagagtgagatattggactc

SEQ ID NO: 606432 - DNA, 1335 bp, Homo sapiens
ggcctgaccacgcagttcttgggtctgtgctgctggcctggggttgtggttgaggccgggtctccgctcctgtgcccgggaagatggtgctaggtggttgcccgcttgttgtttgcctactgaagagatgaaaccatggcagaagtagaatccttatagaaacaggaccagaaacacctcccttctccaacaaaaggttcattttggtggctgtccgtttgacctgctgtgcttcagtttaattggcttggaaaggggtcagcagggtgaaaccgaaccccagaaaacttgatgaagaaatgtcttttgcccgttttgattacgtgcatgcaaacagcgatttgcaaagaccgtatgatgatgatcatgatcttactggtgaattacagacctgatgaatttatagaatgtgaagacccagtggatcatgttggaaatgcaactgcatcccaggaacttggttatggttgtctcaagttcggcggtcaggcctacagcgacgtggaacacacttcagtccagtgccatgccttagatggaattgagtgtgccagtcctaggacctttctacgagaaaataaaccttgtataaagtataccggacactacttcataaccactttactctactccttcttcctgggatgttttggtgtggatcgattctgtttgggacacactggcactgcagtagggaagctgttgacgcttggaggacttgggatttggtggtttgttgaccttattttgctaattactggagggctgatgccaagtgatggcagcaactggtgcactgtttactaaaaagagctgccatcatggcccagggaggcgggtgaaagctccgtcttctgaattcatctctacaggctcaaaactcctctttgatatcagacctgatgttattttccttcttttggagggcatttgtttggttaagaaggcttctttggactttggaatttcaacccagattttaccttgcagacggaatgacaagcaaaaagtgttgtggggaatcaaatttgttcctttcctcatgcacaaaacataaaggatagtggcgagtttacaagctgtggatgggtttccatagtcttcctttctgtacattgctatatcttcagtcctttggagcaagtggacctaacaagttgagcaaaatgaatatttggatccatgttcctcttgtgaccctgagtcttcatgcaaggagatctgaagctgaacaatgaaaatcttcagcagaaatagaaatggccgtggattgtaatacacactgaaattctgactttctgaatttaaatgtagaataaattttaccaacttgga

SEQ ID NO: 606433 - DNA, 1193 bp, Homo sapiens
ggcctgaccacgcagttcttgggtctgtgctgctggcctggggttgtggttgaggccgggtctccgctcctgtgcccgggaagatggtgctaggtggttgcccggttagttacttacttctgtgcggccaggcggctttgctgctggggaatttacttctgctgcattgtgtgtctcggagccactcgcaaaatgcgaccgctgagcctgagctcacatccgctggcgtcatcctctgctcttacctacctgatgaatttatagaatgtgaagacccagtggatcatgttggaaatgcaactgcatcccaggaacttggttatggttgtctcaagttcggcggtcaggcctacagcgacgtggaacacacttcagtccagtgccatgccttagatggaattgagtgtgccagtcctaggacctttctacgagaaaataaaccttgtataaagtataccggacactacttcataaccactttactctactccttcttcctgggatgttttggtgtggatcgattctgtttgggacacactggcactgcagtagggaagctgttgacgcttggaggacttgggatttggtggtttgttgaccttattttgctaattactggagggctgatgccaagtgatggcagcaactggtgcactgtttactaaaaagagctgccatcatggcccagggaggcgggtgaaagctccgtcttctgaattcatctctacaggctcaaaactcctctttgatatcagacctgatgttattttccttcttttggagggcatttgtttggttaagaaggcttctttggactttggaatttcaacccagattttaccttgcagacggaatgacaagcaaaaagtgttgtggggaatcaaatttgttcctttcctcatgcacaaaacataaaggatagtggcgagtttacaagctgtggatgggtttccatagtcttcctttctgtacattgctatatcttcagtcctttggagcaagtggacctaacaagttgagcaaaatgaatatttggatccatgttcctcttgtgaccctgagtcttcatgcaaggagatctgaagctgaacaatgaaaatcttcagcagaaatagaaatggccgtggattgtaatacacactgaaattctgactttctgaatttaaatgtagaataaattttaccaacttgga

SEQ ID NO: 606434 - DNA, 1379 bp, Homo sapiens
  misc_feature (220)..(220): n is a, c, g, or t
ggtcagacggagctatgtacgccctctttgctcgtggtgccaggctcgctggagcaagcgggctcgtagaccgtgcaccggtgccattgagtagatgataagggaatgcatccgatggggcctacgagacaggtgttggtgcactgtagactgtgacacgacgggcgtcgcgacgtagcgagtggccagctggaaggcacgtgctctgcacgtacccagntgtggaagcagacgccaaggagtgaagagtccgcttctcgcgtggcggacattagtgtcaagaagagcgattgctcaactgtgaggctgagtgagtgatgcatgagagagagcaaatggccatctgagagacggtagaatccattgcttataccgtatgcgacgaagatccttgtgacatggtgttcacggaaaatggaagacatgtctggtttcatgcaagggtagaataagtgagactcgcgtatgctgtccctgctgattcgcttggacactgagtttaagaggggacgagaagtgaggccggttcatgggcgcgaagaggtggtcgcatcctgcgacgtcaaaccgtacttgcaggaggtttattcggtcccagaaaaagcatccttaggccaagcacgcatgcacattcgatccgagtagaggactaagcctaggaggtcgctagacttaaatgatctcgcaaggaagcccttgggtagcaatcagacatcgcagtgtggggtgtgcgctcgcactttttcattgcgcgcgaagacaattcgcgcgtctcccgtcacataacttagccgcttccaagtgcaatagggcaccgccgacgggttaattggaacacacggtcccaccccaacgaatctgacacaatgtgcacttaacttggtggggtgggcgaagctcttttggccgcctatgggggaacacttgggcaagttcttcaagcagatttagaggttatgaagccttggcaacaatttccaccaaaggaaatcctttggccaataggtaaacagggcggagccacgagaggatgtatacacagaggcacttttctatggcttacccaaagaggggcgccatcttgggaagagtcgcggagacagaccaaaagttcgttttcgtaagagcggggagtaggagagaccagattagataggaacgagcacggacaacattgggtagtggcgatccgccagtgagtgaccatctttggggccccagtagcgcaaatttaattttcgcgaagggaaaacgcatagatatgtcgacacgaccaggttatgttctttggcacaagattttggccttaactcccgaggaagtaagaacttagacgtttacacgcaaattagtcggaccctcccagatgtcggagccaa

SEQ ID NO: 606435 - DNA, 503 bp, Homo sapiens
  misc_feature (5)..(5): n is a, c, g, or t
cactntgggaagctgaggcagaggattgcttgaggttaggagttcaggaccgtcctggacaacatagtgagaccctgtctttatttaaagaaaaaaaaaaaagaaaaagctgtttgtctttttcaaccaatgaaagttaaaatcaagaaatgggaggccaggcacggtggcttaagcctgtaatcccagcactttgggaggacgaggcaggtggatcatgaggtcaggagatcgagaccatcctggctaacatggtgaaatcccgtctctactaaaaaaatacaaaaaattagctgggcatggtggcatgcaactgtagtcccagctacttgggaggttgagacaggagaatcgcttgaacctgggaagcggaggtcacaatgagccgagattgtgccactgcactccagcctgggtgacagagcgagactccgtcttaaaacacacacacacacaaatttaaacttaggcaatatagtgagacctcatctctacaaaaaatc

SEQ ID NO: 606436 - DNA, 749 bp, Homo sapiens
cagaagggaagggtaaggatggagagctcctctgtcactcgccaagtcactacctctatgcatcatttctgtgctggctgaggtgtgccaggtccccacacacgttttaagttaggctctcttgtcacctgtctgtccttggggaatttgggctgccctgtctttcctgtatagctagttttgtggttctttctgacagccatgtgctgtctttcccccccaggagtgggaggagcggcgcaggcagaatatcgagaagatgaatgaggagatggagaagattgccgaatatgagcgcaaccagcgggaaggggtgctggagcccaacccagtacgcaacttcctggatgatccccgacgtcggggtgggcccctcgaggagtctgagagggatcgccgggaaggcagccgccggcatggacgcaactggggaggctcagattttgagcgggtgcgctctggcttggaacaggagcgacagggccgcagggctggcctgggcagtgggggcgacatgacgatgtccatgacgggccgggagaggtcagagtacctgcgctggaagcaggagagggagaagatcgaccaggaacgtctgcagcgacaccgcaagcccaccggggcagtggcggcgggagtgggatgccgagaaagaccgatgggcatgttcaaggatggcccaggcgctaaccaatgaactgtccccaccgtatgattgaccaagttggggaaaacaactaaagctccaa

SEQ ID NO: 606437 - DNA, 415 bp, Homo sapiens
cgggagattgtgtgcgttctggatcttgatcgcttctggtcactggggattctctttacgggatcttcgtcgagtcactgaagtcctgggacggtgaccgtctccggctgacttgtgaagttcgagatctggacctacgtcggcttatcaagagggttctggacctggatcgccggtgagtggctggagaggctcgagatctagagcgtttccacggggctggtgatgtgcgtgagcggagaacgcttccgactggttgggggtgtccgagagcggcctcttcggcgtcgagaggaggtccgggaactttcctggcgggcaggtgaccttgagtgataaccagaggctcccctccggcggcgagtaacccgcgaacttgacctggtccggtgtcttcggcgttaggccgatctga

SEQ ID NO: 606438 - DNA, 369 bp, Homo sapiens
gccgtttcccccggaggccgggccctcccggaaaagccgggtcctccagaccccgaggccttgctttcagaggggggggcccccccccctggagagccccgcccctaagggtctatgagtcctcaggggtcaagttcagaaacggcccagccagacctaaacccccacgcccccaaagtggattgcccccagacaagaactcccgtgggggcctcccctttattcccccccttgagggggcccccttactgggggggggtccttgcaattccagcgaatcgggggccaggccagggcgtccttgctccctgccccctccctgttttgggccctttttttacctacataaacccccgccttcccccccca

SEQ ID NO: 606439 - DNA, 220 bp, Homo sapiens
agcgtataagtccactccgtaaatcagatcgtatactcgcagtcggagtatcaagtcaccgtgagctcaccatagtctaatagaaaataagcgaaaccaaataaattcaagcacggcttattacaattttactgggactctattttaacatcctacaagcctcagagtacttcgagtctcccttcaccatttccgacggcttctacggattcgtcggtca

SEQ ID NO: 606440 - DNA, 884 bp, Homo sapiens
cgtaacaaaggtgtgttctgtaacgtggtgactgtgggtaagttgtcgtctataaacaagtgttgcccagaagagtgcccgcctgtgagagtcggccgtttccagaaacattgggcctcgcaatatagatggcgcccacgtttcagggggatggctccatgtccgcaaactgttctcgggttaatgccacccccggtcgttcattaacttggttctgcgaggcaagaaaaccatgctgttggccaacacaggggaaggtgtttttttaaaagacccaggtgaagtcggttaataatgggcgtcgagaccaaagcttggggttttaaataatgggaaaaggggggggaaatgagaaagcggccgttttacaagatggaaaaaaggttgggggccctgaaattactggacgacagttcctctctatcggtgcggcaataccgagatttctcccaacgatgtcacgccttttccattcttggttaaaaaaagcactgctgttggcccagtttttttatcaacccactttgtttaacacccacaggtatatacggcgaggcaacataacgctacgtgtggacaatcgtttgtaaaagcccgtgttctcccccacgaaaatcatgtacaaactatacgtgtgcagggtggtatgggagaacactaccgcaactccgcttgtcgataataatttagagagtatgtcgagagtcaccacccgcttgaatgactattggctgatctaccactggcctctcctgttcttgcagggtgtgatctcctctctagcccaccgggtggttaagtcctttgatgattaaaaaaagtagggcgcgaaaaattaattttcctctggtttccgaaaaaaagagaacccccgtcccacaaca

SEQ ID NO: 606441 - DNA, 394 bp, Homo sapiens
atcagacgatcccggtgtgcatacaatattgctgcgtggaattgaatcggcattgttcctacaggtttgtctctcttttttttactgtcattcattctctttctggcaggacgtcacgtctgtgtgagaaggccatcatgtgtagagtgcagcatttgggaccgttcgtcaaaagacaaaaacggaatgttttctgactttagagaaacgtggtgatgtctgaaggaagatggaatgagtgacagaaagctacaaacgagaaatgacattcagctttgtataataaaaacacctattaacattcatcacaaggtacagaaaactttaagcctccaagaggccatcggcccaaatggaggcctgaggtcagaacttaaaatggtatagtagaagg

SEQ ID NO: 606442 - DNA, 352 bp, Homo sapiens
  misc_feature (26)..(26): n is a, c, g, or t
  misc_feature (58)..(58): n is a, c, g, or t
  misc_feature (242)..(243): n is a, c, g, or t
  misc_feature (261)..(263): n is a, c, g, or t
  misc_feature (301)..(301): n is a, c, g, or t
  misc_feature (313)..(313): n is a, c, g, or t
  misc_feature (347)..(347): n is a, c, g, or t
ggttgaggctgttgatggcttttgtntgccatcaattggggtcagaatagttcacaancccgttagccaagctctgccctgtgatcttgtcccgaaccaacttgcaggactcgatgtcgccaatgctgccgaagagactcttgaactcatcctgggtcatgttctggggcaggtagttgacgatgaggttggtcttgctgtcgtcagtggctccatttgtcccaaggagttggcgttgggcnnggccggccggccgggctnnnccccacctgagactccatggcccccagtatctgagtgncgattcttgtgntgcggcgggcgcggtccgtgttgaggggggctcnggggg

SEQ ID NO: 606443 - DNA, 605 bp, Homo sapiens
gcacgagctgcgggccgcacatagacgtcatctccatggggatgctgacccaggcggccccagcccttgatttctccctcaagctgttggccaaagaggtggctccagtgcccaaaatccactactcctaaacctgaagaggatgacacctgccatgggttaacgaggctcctcatgaccctttgggtcacacgtctttacggtcagtggcctatggggcacatttggcactagcttgagcccaactctggctctgccacctgctgctcctgtgacctgtcagggctgactgcacctctgctcatctcagacttgctaatctgcaaaatgtgtctaatcaaggatcaaccgcatggggctctggcgtgataatgagcacatattgaggggacagcaaatgttagaagttgcctgggacatttcgggcaccaatggctacccccgtaattccactctttctgaggcttaagcaggaagatctctttgagtttatgagtccaaaacctgtcctggcaacatggtgaaatcccctttattcctgtggattaaatatttacctgggtagcgtttgctcatacccatgactcccaattctcttagggggc

SEQ ID NO: 606444 - DNA, 160 bp, Homo sapiens
ttccattctccagtgcctccaatatcacgctgtgcttccacagattagccgccaggtgcttcatgccctgaatgttcttcaacatgacatcgccgattctttggtaatctctgatttgggcatttgagcgtgccttcccacagggcaagtcgttggggtc

SEQ ID NO: 606445 - DNA, 769 bp, Homo sapiens
agcggggtgagaggaagtgatcgctcccggaggagcgacgagccgatgctggccgtgacgcacgcgtgagacatgcacatcctgcccgctgccggtcccgccatccttcgggaggcctgtgcttgctaccaatcgcgtagcacgtccgccacacggcatcctgtccgcctggctgtctgcgcggataccccaatgtgtcctggcgctggtccgacgcagcgtccacgtgataactcgaagcagttgtcgtggatcgaacagaaggtgtcgttaatacaagccttgaggctaggacgcgcaaataaatgcgatcggcttatacggcatcacgactactggactgaaggacgacacgaatactgggaacgcgaaacgacgcgaggaacggaacagacctgaatctgacggtcgtgacctattgcattggcacgacaccgcaatacgaaactcccgttgtacaaggaacgaaactctgaattctggggatcgacgatgaccgaggggacggagaactagaagagcttatttgctgttggcaaaaaggcgacgtttggataatcatcgaatgcgaggatggaccgtccctcctcagttcgcccgaaaatcaccactaatgtgtcttctcgcaatctctttctggaaacaatcgacggttgaaagcaaaacggtcaccacaaggttggcacacgccttcgtggaaagaccctacaatgagcgttccaagggggctgaattcttgtgggggcccgatttaaagaccaaatggaac

SEQ ID NO: 606446 - DNA, 134 bp, Homo sapiens
ggacgaggagtgatgaagaggccgcggcggagcgcctggctctggaatgggccctgtgtgcgcggacgcaggacttcctgctggtagcacatcctgcatcctccgtctgtgtcttgtcctagtggtacctgagc

SEQ ID NO: 606447 - DNA, 581 bp, Homo sapiens
gggttcatgcaccaaggcttccaccccttaatgtctttctcgcgcccgggttttttctgcacccttggtgcctgggggttcaaccccagccaaaagttgttttcggttcacctgtgcgaggcctttttattgggctctcgggaccaattggggagcctcctcttctgcccactgatgaggacgccatttcttactggcggctgcgcccaaatattctcccatggtcggggggacatattaaactgtcccccaaagggaccctggggtgttcttggccccaaaaacaatcacgaaatcccaagaggatatctcccagaatcttttgcccaatgttccgaagacatcctctgtgccttaacaagactccccaataattgggcacagaaatggccaaaacacccccagctcacatttcggacacctcgtggcgcctgtcccttagaaatacattagcttctctgtttctacatcttgtcgttttccaaagaaatctttgcctttgtaggccccccggccgggaaaccaaccgggggaggggaccccaaggggtttttaaaaaaaatttaaaggtcccaaaaaaa

SEQ ID NO: 606448 - DNA, 859 bp, Homo sapiens
gagtgttgagggttgctgggtggctggttgagacagcgtgcagtactgggaggctaggtgagggtcgcgaggttgcccgagcttctgagcgagcgcggtgcttttgggaacgctgggacgggcgatctgcgtgctgccaggatgctggtgccgaggcgcggtggctgcgtgctgctggctgccctgtgaagtgggaagttacacgaaggtccagccagcgtttctgaggcaatctgaaggcaaatcctgtttagaacccaggcgaaggttcccgggtgacccgggctctcaccagcccaattgtacccttgccgtcctccttgagggtgcctgggagccttaagcacttgtgtgctcttggcctcaacactggggatgccacttgactcccagttgtccgaggggcttccaggtggattctccgagggcccatgattgttagaaagcttcgccgcaattggggtgcaccaagggagcaggccttcaaccattgcgtgcttgggcattggactattctcaccaatgcttggccaggactcccataaccagggttccctgggcggtgcagtaaggtcgagcccaagttgcacagggaatgtacgcacaggtcccattcgggagtcaaaagtgcccagacatggccattgaagcacttccagtgaccctcatgggcgcccttgagaggttcaccgctaatacttgtccacgcccttgtcggtctacgcccttttcgtgtgacccagcttggtgatctcaccgtggcaaggccacctcagagggtcaaacgttccctgttggagcccattggctggctccccatgatgcggattccgcaaggttgttccttccagttccttcc

SEQ ID NO: 606449 - DNA, 300 bp, Homo sapiens
  misc_feature (173)..(173): n is a, c, g, or t
  misc_feature (183)..(183): n is a, c, g, or t
  misc_feature (218)..(218): n is a, c, g, or t
  misc_feature (287)..(287): n is a, c, g, or t
tagtagaaccaggatgccaccgaagaagtaggaggaggatttcggcgaggaggacgaagaggaggtctaaggtagagcccccatcacctcaggctttctcagctcactgagccgtcttactcaactgcccctcttcctctcccacaaaatgtgtgtgtgctgcctctatctcngttcggtgtntcttcttctggggggggtctagaacagcgcctagnacatagtaggtgctcaataaatactcgggtgttgaatgtctcctctctcataccactctgggaaaaccnaggtttcttacca

SEQ ID NO: 606450 - DNA, 164 bp, Homo sapiens
ctcaacgaaatgtggaagtgtcagaacatgcttcggagccatgtacgcgaactattggatttgcacaagcagcctacatcagaggctaactgttctgccatgtttggaaaactgatgaccatagcaaagaatttgcctgaccccgggaaagcacaagattttgt

SEQ ID NO: 606451 - DNA, 553 bp, Homo sapiens
  misc_feature (553)..(553): n is a, c, g, or t
taaaccagggatgtctgttgaaataaaacattcagtctgacaaaaaaaaaaaaaaaaaaaaaaaaaaaaaaaaaaaaaaaaaaaaaaaagaaaaacaaaaaaagagcaaacaacaatgagacaaaataagtaatgagtcgtacacagtatttatctgttgacacacaatcgaggtctcatatatcgaggagacgcgctgtttgaaaatgacgcatgtgacctttgtattaacacaccctttatgtggaaaacactgtaaatagaacatttttacaaagagaccctattcttgggggggagacaccattctttgtgggaggagcaagaacctacccacaccgaggagaagtaatttgaaccacatccctccataggagagagaaaaaatatctacacctcttcgtgaagcgtagctaaataacgtcgttgtcaaaacaacctatcagacctcagcattaagcaaacttacgcgaccgcattagacaaatatgtcggggatattacacacgaacgctatctgacctttcaacaagaattttttatcccagggggn

SEQ ID NO: 606452 - DNA, 602 bp, Homo sapiens
  misc_feature (333)..(333): n is a, c, g, or t
  misc_feature (337)..(337): n is a, c, g, or t
  misc_feature (403)..(403): n is a, c, g, or t
  misc_feature (419)..(419): n is a, c, g, or t
  misc_feature (436)..(436): n is a, c, g, or t
  misc_feature (549)..(549): n is a, c, g, or t
  misc_feature (602)..(602): n is a, c, g, or t
ggcacgagccggcaccaccatgtcgaaggtttcctttaagatcacgctgacgtcggacccacggctgccgtacaagtactcagtgttcctgaaagtacacctttcacagcagtcttaaagtttgcagcagaagaatttaaagttcctgctgcaacaagtgcaattattaccaatgatggaataggaataaatcctgcacagactgctggtgagtatttgaagctattctaattacacttgacagtattttaaccataatggagctgtttttagggattatataccagtctttacctgtgtgtctgagtaataagttgtttcattgggtatatngatngtagatgttttggctacaagtacagaaacctaatagggttaagcatagagtattatatatatacanaagtctgagatagatngcttctaatgagtattntgactactctaaggagtgtagatatgactgaagtgtcatagtggatattaagaagatcattaggctatattttaaatagcatacattcagggtgagtcatagactcaacgaantatcaggttatgtgctgcagaacagtaagtgtatctataagagtaactttaan

SEQ ID NO: 606453 - DNA, 416 bp, Homo sapiens
  misc_feature (298)..(298): n is a, c, g, or t
  misc_feature (328)..(328): n is a, c, g, or t
  misc_feature (354)..(354): n is a, c, g, or t
  misc_feature (378)..(378): n is a, c, g, or t
  misc_feature (383)..(383): n is a, c, g, or t
ggcacgagccggcaccaccatgtcgaaggtttcctttaagatcacgctgacgtcggacccacggctgccgtacaagtactcagtgttcctgaaagtacacctttcacagcagtcttaaagtttgcagcagaagaatttaaagttcctgctgcaacaagtgcaattattaccaatgatggaataggaataaatcctgcacagactgctggaaatgtttttctaaaacatggttcataactgcggattattcctagagatccgtgttggaagttgttaatatctgctacttggacatacnattgctttcagaataaatattggtattttntgatgttgtaaaattgaaatcaggcntttaacatactatgaaaacaccangagtnaatgattaatgaaaggtgactcatctgtccctt

SEQ ID NO: 606454 - DNA, 146 bp, Homo sapiens
tctagaggatcgcttagaagacgacagaaggggtgagtgtggggcatcaggcagagaaagagaagggaggaagtgggaggataggagccaagctggggcactgaaccttgactagccccactcctgtccagctacagcttctgtac

SEQ ID NO: 606455 - DNA, 760 bp, Homo sapiens
  misc_feature (8)..(8): n is a, c, g, or t
  misc_feature (75)..(75): n is a, c, g, or t
  misc_feature (83)..(84): n is a, c, g, or t
  misc_feature (88)..(88): n is a, c, g, or t
  misc_feature (90)..(90): n is a, c, g, or t
  misc_feature (97)..(97): n is a, c, g, or t
  misc_feature (112)..(112): n is a, c, g, or t
  misc_feature (116)..(116): n is a, c, g, or t
  misc_feature (126)..(126): n is a, c, g, or t
  misc_feature (138)..(138): n is a, c, g, or t
  misc_feature (140)..(140): n is a, c, g, or t
  misc_feature (156)..(156): n is a, c, g, or t
  misc_feature (270)..(270): n is a, c, g, or t
  misc_feature (288)..(288): n is a, c, g, or t
  misc_feature (290)..(290): n is a, c, g, or t
  misc_feature (321)..(321): n is a, c, g, or t
  misc_feature (348)..(348): n is a, c, g, or t
  misc_feature (363)..(363): n is a, c, g, or t
  misc_feature (371)..(371): n is a, c, g, or t
  misc_feature (396)..(396): n is a, c, g, or t
  misc_feature (527)..(527): n is a, c, g, or t
  misc_feature (646)..(646): n is a, c, g, or t
  misc_feature (699)..(699): n is a, c, g, or t
  misc_feature (742)..(742): n is a, c, g, or t
cagccacntacttaaattttgatagttacctctgtttgttcaacacgccttgctcttttcctcttttggttttgntttgttcnngttntngtggggnttgcgccctggtggngtgncacgccgtgngatatcagtttntnggcgagctcggctgtngctcagacccctgctccgggggtctcagccttcctttctccgtttctcctctccttaagcctggcaaacactcggattcttctgccccccgccccctggggcccttgcccctgngccaggctaaggaagcgnancccccgaaggaggggcccttgcaaagccagngctcgccgccggacggtgcctcccggnctcagggtctccgcnggctgtcngagcccggtaaaacaccgctcgggnagtccttcgtcccgggaggcaccagcgggatgcttgcgcgactattccttgtaccatgggcgcctaaatcctaaagaaagtggggagcacttccactcgggggggctggagcccgtgtgcttgtggcttanaagacaccagagtccgacccgggccggcctcgggcagggagcgccggcgccggcggccgtagccctgggggctgatcttgctcctgggggcgacgttgtccttgtccttatctgtgaantggtagatctggtgtgccagcttctgcaccgtgcacgtcccgaagcggcagcnaaagctccggaagccctggaagttgttcatgctctggcggtangcttgactcggatgcggg

SEQ ID NO: 606456 - DNA, 360 bp, Homo sapiens
ccaaaaaagggggtttcccccccttatttgggggagccccccacggtttaaaaaagggggggggggaataaaaggccggggtccttggggaaaacccccccctttttaaaaaaaaaaacccaaaaaccaaaaagggggcccccccgaagggtgggggttaaaaaagggggccgtctttaattatggggggcccggatccccccggccccccctttttaaaaaagggttgttaaaccccccaattccccccagggatttttttggggggggaaggtgggggcccccttacccaaacccggggggggaaaaaccccccgggggaaaagattttttttttaaaaaaaaatttttttcccggga

SEQ ID NO: 606457 - DNA, 805 bp, Homo sapiens
gattgcggatgacgccgctgctgcgggggggcccgggggccctggctggccctgaggatggtggaatcgctggtggtcttccgcgatatggtttcgagtcgatgtggcgctccgtgggtcctgggtgctcgcgtgccgtggtatggggccgaggcccaatgccgacggagcctcgcgggagcgacaaggtccgatgagtaatggagctggatgcctcgtggatgcctaatgttggtgccgtcttggctcaatgtaggccatgaaatgaatcaaaggtccgctgtagagagaatctactcatcttcattccactggcaccaattgatggagagtcagagaatcagttgagtattcttcctggcgtggcctcgtcttatggactcgacggttttgaatgacttactcgccaggtcgcaagaaagtaggaaccacgtagcccgagtgccaagcggtcaaccagttgttcaatcggcatttagtcgactagtctgaggtgaggtacaagttgtggcactgtcggtcgtgggtagttaaagtagctccaaggaatggttgagtcagcggacatcctgtgagttgccactcatcctggaccgtgctctccatcgtccccgtgctcatagggcttctggggcgcgcgagatcgggaagccccactttgtcccttgcggcggttgacattggctgtctgcgagctctgttgctggtacagcctcatccctgtagccaggggcatctgtcctcgtctcgtgtctgtgctaagaagttgctcttgatgggtggtctcgatgagctgttgcactca

SEQ ID NO: 606458 - DNA, 355 bp, Homo sapiens
  misc_feature (37)..(37): n is a, c, g, or t
  misc_feature (54)..(54): n is a, c, g, or t
  misc_feature (78)..(78): n is a, c, g, or t
  misc_feature (169)..(169): n is a, c, g, or t
  misc_feature (216)..(216): n is a, c, g, or t
  misc_feature (300)..(300): n is a, c, g, or t
  misc_feature (302)..(302): n is a, c, g, or t
  misc_feature (315)..(315): n is a, c, g, or t
ttcgaagaaaacgccaaaatcccttccccaagagctnaattccgcccttccctngtgtacctccggcctttttggaancccagcccctattcccctaaataccttcgttttccctcaattgaaccccttcagtcttccaacccccagggttagagggggttcggacganccagattagatttccggtgggttaggggtctggagtcccctctcctngaagtctctccgcttgctcctgtggagacctaaggggtcccgcacccgacagagaggggtggccggcgggatttttcacttgtngntctctgcgggganagggcgagagcccctaacacaagcctgagtcttgggggac

SEQ ID NO: 606459 - DNA, 232 bp, Homo sapiens
gggggggcccccccccccccccccccctttggttgcccccaagcctggggagggggccccttttcaggggggccctggggaccggggaccccccttgggggtcccccctcccccccccccccctggggggtttttttcctgggggccccccctgcccctgccccccggttaaaaaaaattcaattggtttttttttttggggcccaataaaccccccccgggttttccccca

SEQ ID NO: 606460 - DNA, 1189 bp, Homo sapiens
  misc_feature (136)..(136): n is a, c, g, or t
  misc_feature (182)..(182): n is a, c, g, or t
  misc_feature (209)..(209): n is a, c, g, or t
  misc_feature (231)..(231): n is a, c, g, or t
taatgatattggaagaaggtggtaggtaggaataagtggttgtgtgtgtggtgatttaggtagaattgtgtggattataaggagaagctttaaagaaaaagacaaatgaagaaaggaattttataggagcgacgangaacaaggaggaggaaggaagaggaaaaaagaggacagcggagggngggaagtggagaaaagagggggggagnagcgggaggaacgcacagagcnccgcgcgttgcacctatatgatgctatgcatataagccgtttgacgagacgaggtgaggtggacgagaatgatgcgcagagaccatctcagtacctcatcaatcatatatccataactgatttgtaagtaaaccacattacatcattaatattcctctattatttatcttcgtgaatcgtactcgctgcgtcgtgctataacggatgcagcaaggaggcgtcagctgtccatagcatgtcctaccactcaactcctacttcttcactagcatcgaagcgcacaaaacagtcgttaacgacgtctatagcggcctccccccccacctctcctccacacatctctactgagacgcctcgtcgactctcataggaaaatgtcatttagcgtcagagagtataggtaatactcgtcggcgtcctcttatcacttctgctgtccactgtcatgctgtcttcatttctttcgactatctcctctgctttcgtgtcggctgtccatcggttcggttacgtccgcactgtgtttcgtcggagtcgacgcgttttatcgtgcgattcgatcgcaacgaagaataggatataacgttacgagctaacgagtggttctagttttgttgttcggataggtcactgaggcttacatatcgtgccaacgtcaggacgtaatgtcgctgtcgctcattatgactcgcgctaggtaatgatcatccatcctcggtggcgttacaacagacagatatcgcactctggcttccacgtttacctctgtacaccctcctgcgtcgtccgtgtcggcgtcgcctcatgggccagactataccgtatggttgtgtccatgcattataacagcgacgtgactgtgtatattctatggacggagccgattaggagtccgaacagtgtctgtcgctgtttccgcgctgcctgtctctacactccacaccgtagactcatacct

SEQ ID NO: 606461 - DNA, 316 bp, Homo sapiens
ggaggcagaggttgcagtgagccgagattgtgccactgcactccagcactccagcctgggtgacagagcaagaccctgcctggagaaaagaaaaaaaaaaaaaaccccggggcttcacatttaacacacagggacacagggctcagcagttgttttccaggtcagctggaagtatctccgacccaaagctgtgaggggggcacctttaggtgggaaaggaaggtaggtgggggtagggtgaggatattagacagcttgcagagaccaccaagaagggggaatgcaggctctcccagaatgccccacagatccaatg

SEQ ID NO: 606462 - DNA, 104 bp, Homo sapiens
ctgtacttaaagtgtgaaggacacaggaagcttcattcttcctgagtgcttacaggaaaatgtgctcagaacaggcccgaattcccttagcaccagcacgtatt

SEQ ID NO: 606463 - DNA, 708 bp, Homo sapiens
acaggaccacaggatggaggcgaaattaaaattgctaatgaagtttcgggcaccattgtcattgataacatcttatcaggagacagcgttttgagatcaaccggtctgaccaaaatttattaggcgggaatttcctcttcctaataagcctgggagtgctgtgggagactggagtttatttcacctctgcaatctcgaccaaaagagacagatacgccccgcgggggccagttcagagacctacccctaggtgcgcattctctttctcagggacgttccatgctgagaaaaagaattcagcgatatttctcccatttgcttttgaaagaagagaaatatggctctgttctgcccggctcaccggcagtcagagtttaaagttatctctcttattctctgaacaattgctgttatcctattcttttttcaaggtgcccacgtttcatattgctccaacacacatgctggacaatttgtgtagttaacgcaattattacagggtccctgagacgatatacattccttctcgggtgacaggattaagagattaaagcaaagacaggcataggaaatcacaaggatattgattggggaagtgataagtgttcatgaaatttttacaattatggtcagagaatggccgcaaaactagcattagaaaattcgaaaggtcttattttgaggagactaataaaggtccatgaaatc

SEQ ID NO: 606464 - DNA, 1157 bp, Homo sapiens
ggggttgcaggcacccgccattgcgcctggctagtttttggtggggacggggttttgccgtgttggccgggctggtctcgggctcctgacctcatgatctgcccgtctcggcctcccggggtgctgggattgcaggcgtgagccactgcgcccttcctatcacttatcttgtcatgcttacattattccccacaattttaggttttaaatttttattaatatatcaaaggggtgaggagcgccgggatgtcaccgcagtgcgggtggccacaaggacgtggaccatacaaagctatcacgagggacaatcgaacataggaaactacagatgccatacagccaacccgaagaacatacaagcggacttacggggtgaaatatagaccccacatgtgtgtcaccccctatcagcgcgcacccagaaaaagatattacatagagtgggttcccctctcaaatgacggggacaaaaagagaatgcacactcttcacaattcatatctcgtggaggcccgtataaagccccagaaaagctcacattagtagaagaacaatatacacaaaacatttcacgacagacatataatatgcaccgcgcgcccaaacagagagagtttagagaccacaataattccaggggagaccccttacacacaagcgaaacgtcgccccacaaaatgagcgaacagaacatgcgaaggggggccacaacaacaatacatcacaaaggctactacggacacacaaaaaagcgagagatcctgaaccaagaaaatattaccaacataaatctaccggacgaacattctctgaagaacaacaacgaagaacaccaaagataacaggacgtaacaccgcaaactaggcgactgagggcagcacacaaaaagtgagcaccccgggaggaacccccacagaaggcacatagcaaacacacgcacttgttgaaccaccactgagacgcattaacagagggaacgaaccacacaacgtaatactggggcactggcaatcaccactatgtataagggaaacgcaccactccaccctaatactatccagctgaccatcagctggagaacccgaatatgagaccctgagagaacaccagtgaagaagaggagtgcagaaaacggaataccacacgattgactaag

SEQ ID NO: 606465 - DNA, 116 bp, Homo sapiens
aaaaaaaactaataccggtccgtatgaaacctgtatcaacccttcatcaaacctcatcacaccctaatctctcattgcggtaagtctgtgtagtggtctattgagggtttcgatga

SEQ ID NO: 606466 - DNA, 429 bp, Homo sapiens
accctgagaccctagcaaggctcctccatcagctgagagctgcttccactcaataacacttcgcactgattctccaagcccaggtgtgatccgattcttctggtacacccaggcaagaacccaggatacagacagccctctgtccttttgataactagagggtctcattgacctggttaacacaagctgcctacagacggcaaaactaaaagagcaccctggaacacacgcccactggggcttcagctgtaaacattcacccctagacacggctatggggttggagcctgcctgtctgtatgctcccctagaggtttgggcagcagggcactgaagaatcaagccacacccccatcgcacaccctgcgagggggacaagggaacctttctcttttcagttggtcttaataaacactgagtaaagtgaaa

SEQ ID NO: 606467 - DNA, 710 bp, Homo sapiens
cacaccggtggccagttctgcaatcagcatcctttcaacaactcctgttgacaacagcacacctgtgaccacttctactgaagcccgttcatctcctacaacttctgaaggtaccagcatgccaaactcaaatcctagtgaaggaaccactccgttaacaagtatacctgtcagcaccacgccggtagtcagttctgaggctagcaccctttcagcaactcctgttgacaccagcacccctgggaccacttctgctgaagccacttcatctcctacaactgctgaaggtatcagcataccaacctcaactcctagtgaaggaaagactccattaaaaagtatacctgtcagcaacacgccggtggccaattctgaggctagcaccctttcaacaactcctgctgactctaacagtcctgtggtcacttctacagcagtcagttcatctcctacacctgctgaaggtaccagcatagcaatctcaacgcctagtgaaggaagcactgcattaacaagtatacctgtcagcaccacaacagtggccagttctgaaatcaacagcctttcaacaactcctgctgtcaccagcacacctgtgaccacttattctcaagccagttcatctcctacaactgctgacggtaccagcatgcaaacctcaacttatagtgaaggaagcactccactaacaagtttgcctgtcagcaccc

SEQ ID NO: 606468 - DNA, 214 bp, Homo sapiens
gctcccaggaagcccgaaacggatcctgattctggttattgaggttcaaatgcagacgtggggctgcattgcctcccccttgatccctgaatgtgggcgtctcagttcttgagagccttaaacggtaatgaattgtggtgctcacccataagaggtatgaaggagggttcggaggtgtcccttgcacaacttcagtcatgagtgcgcgcgttta

SEQ ID NO: 606469 - DNA, 327 bp, Homo sapiens
gtttatatgtaaataaaactacccatggcccccccccttgcccaaggggttcaaaaaaacgtgcaatataggttaaaaaaatgtttattgaaactttttcccaggctgcccttataattaaactagtggtggggcaagcaacatttgtttcaagtagatcaggggctagcaaacctaaaaggcagcaaacagcctgcagtttgctcaatccttaaaaaaacatggttcatacaacatgctttttctatgttttaagtgtgactttttaaaaaaacaagtgttttgggcaaatttgggtaaataaaaacataattttcccccttgtta

SEQ ID NO: 606470 - DNA, 115 bp, Homo sapiens
atttcgtgaattgaggccatgttcaggtgctaaggtagttcgcctttgacacagaagattgagatagtttcctagatataggtgcagataagtcagcgttgcagtggtgacgtgt

SEQ ID NO: 606471 - DNA, 430 bp, Homo sapiens
gcacgagatggtttagcactatcccccttggtactgtcctcacaattgatagtgagggagttcttgtaagatctaattgtttaaaagtgcatagcacctctctcttcactctctctcttgcttctgctcccaccacgtgaggcacctcactccccctttgccttctgccatgactggaagcttcctaaggcctccccagaagcagatgccagcatcatgcttcctgtacagcctgcagaactgaactatgagccaattaaatctcttttctttataaattacccagtctcaggtatttctttatagcaacatgagaacagactaacacaccctccctggaagggaagggggtatgcacaatggaatgagtactcactctgttaatttccgtgacagctggttgttaaaaagagcctggcacctccctccc

SEQ ID NO: 606472 - DNA, 760 bp, Homo sapiens
ggctccgcgtctgtgaggtccagtggccgccaggcgcgatcagatctgggtgcgcggagagcgcgcatggcggtgtgggaccgcggaccggccccgggaaccggcgccgaggctctagcgctggcggcagagctgcagggcgaggcgagtgctccatctgcctagagctctttcgtgagccggtgtccgtcgagtgcggcacagcattctgccgcgcctgcatagggcgctgctgggagctggccctggtgcgcggggtcttgttggggccagcagcctgagcgcccccttcccactgccctgtccgcagtgcctgtgagccctggcgccccagtcagctgcggccaaccgggagctggcggctggtggccacgctcctgcggcgcttcagccctgcccgcgtgtgccccggtgagagcacgggtctcaggcggacgagggcccagggcagcgggcttgcccgctgcgggccagcgatggcagaacccttcaagctctactgcatggagcgaacaggaaatgcgaccatctgcgatgggtgtgcagaacggagcacgggaaggcaccggggaggcaagcggttgttggcggttggactgagggcgtgtgcaggaggccaaggaggctcttggagtccaagggtgaggggtcttgaaagaaggggaactgggatggattgtgagggtgttccggggtcaggggaagagaggagtagaaggaggttggtgaaaagattggagggagagaggaaaagggggga

SEQ ID NO: 606473 - DNA, 1073 bp, Homo sapiens
catcacagcgctaagctcgcactgattaattacctgagtaggcctagaaataaacatgctagctattattaccagttctaaccaaaaaaataaaccctcgataccacagaagctgccatcaagtatttccatcacgcaagcaaccgcatccataatccttctaatagctatcctcttcaacaatatactctccggacaatgaaccataaccaatactaccaatcaatactcatcattactaatcataatgggctatagccaataaaactaggaatagaccccttaacacttctgagtcccagaggtaaaccaaggcaaccctctgacatccggcctgaattcttctcaccttgacaacaacactagaccccacatcttcaatcattataccaaaatctctccctcacataaaacgtacagccttctcctacacttctctcaatcttatccatcatagcaggcacagttgaggtggcttacaccaaacccagatacgcaaaatcttcgcatactcatcaattacccaacataggatgaataatagcagtctagcggataaaaccttaaattaaccatcttaattaacactataatataatcctaagtacgtaacgcatccatactactcaacttaacagtcccagaacccagaacctaataatatagtggcacctgaaaccagctaccattgctaacagccttaatacatcacactactctcctagaggctggcccggaaaccgggtaaggccacagtgcgccatatcgcaaaatacaaacacaaagccaactcatcccacacaaaccacaaaccgcattaacctataagttacaaaggccaaacaagaaaagcaaaaaagcaaacgggggcgctgacccaaagacataacacaacgttgaggcgcgccaagagaacaaagaagactaaagacacgcagacagcgggcatccaacaacgagaggacataacaaggtgtatgaataccagccactacacggcggcgacgaacgaaacaccgagcagccgacaagcacacacaaacaaaccgacgtagcaccccctcctactggac

SEQ ID NO: 606474 - DNA, 172 bp, Homo sapiens
ggcagatgcctcatcgttctgcagaatgtggggggtggggaggcaggccacacggaaatgagtgctgctgcctgtatgagaggcctggggcatggactgcgccctctgccctgcgcaggactcagatgacttcgaggccctgtgcaatgtgctacgccgtcccaaagcacag

SEQ ID NO: 606475 - DNA, 118 bp, Homo sapiens
  misc_feature (66)..(66): n is a, c, g, or t
  misc_feature (73)..(73): n is a, c, g, or t
atttgggagtaggaagtatcttggagctgaatggacagattggaggagagtgaatatagccatggnagcccanataacaatgtcccctttgaaacacagagagtttagggcagagaga

SEQ ID NO: 606476 - DNA, 139 bp, Homo sapiens
  misc_feature (74)..(74): n is a, c, g, or t
  misc_feature (81)..(81): n is a, c, g, or t
  misc_feature (85)..(85): n is a, c, g, or t
  misc_feature (116)..(116): n is a, c, g, or t
gtaacagtcaatttgtgaccaatgaaggggggtggaaggtaaaagaaggcattttccaagtctgagttttcaanggtactngaangggtttaagaaagaaatttttaaattggagnggttttgcaaaattttaaaaggg

SEQ ID NO: 606477 - DNA, 154 bp, Homo sapiens
tttatttgatgcacacctgatccgaggattgtataaacggctaggctagaggtggctagaataaatagtgaggcctagtgttgaggttgaccagtgggttgggtatggggaggggggttcatagtagaagagcgacggtgagagctaaggtcgg

SEQ ID NO: 606478 - DNA, 124 bp, Homo sapiens
gcggccgactactactactactgctcgaattcaagcttctaacgatgtacggggacatgcataaaggaaatcaaatgttatttttaagaaaatggaaaataaaaactttataaacaccaaaaaa

SEQ ID NO: 606479 - DNA, 219 bp, Homo sapiens
acccatagtaaggtcgacgtcgccatacatggatagatctctagaggtcgaccaggactccaccttagcgagtatttggaggtcacgcacggtgctcactgtgtcgacggaacttgtacagggagtgcatgcacctgcacgtggtgaatacactgtcgaccatggctccagtcttaacagatattttggaggtcagcacgtgtgctcactgtgtctgac

SEQ ID NO: 606480 - DNA, 797 bp, Homo sapiens
  misc_feature (583)..(583): n is a, c, g, or t
ttccctccccagaatcaagctttagcttgatccatgaagagcccatatcactaagatggcatatatgtgatctgggcatgtacctcctctgcctacagccaggtttagcggcaagactttccccgcttagcgagccttcagggcgtgagttctgggttgtctagaggtcaaggacggcgtcctctagagcgcctaggaagccagagccccaagcaggacgaaaaagaggcgatacacacagcagtgtgaatagcctggccaccagccatcctccctccacctcaagacccccgatttgtccagagactaaaggatccagagagcagctccctttctcaggagcttgggcagtgccccagggagtccagggtttctctgcagatgtgcggagcgggaggcgggggtacgagcgagatcacacgggggagttcctctgatgtcggttcagggattgtacttgtcttacatttgtatgagacagggtctgtgctcttgtcccccaggctgggagtgcagtggcgtgatcatagctcactgcaggcctctatactccgtgggctcgaggcaatcctcctggcctcangccttccgaagctagctgggcacctacggtgcgcgccaaccgtgcctggtaacttttcatttggtccgtagggacggggtctcgtgggtggccaagggggggtctcaaatgtgtggctccagcaattccactgtctgtggcttcccaagtgctgagattgcagatgtgagcccacgtgcttgggcggattgtttggaacaccctgctcttcctg

SEQ ID NO: 606481 - DNA, 371 bp, Homo sapiens
gaggtccagatgatcactcactattccgtttctaaattttctgggctattctatttattcttccatgtgaacactaagatcattttatctaattctccattccctaaagaatcttccatgggagttctaatgggactcccattaaatttatatatatcagtcttctcattcaggaacacagtacagttggcccgtccatatcttggggttccacatccatggattaaacaaacctctaagtgaaaataggtggaggaaaaaaagccatctgtactgaacatgtacagattttttttttccggtcatcactctctgaattataaagaataacaactatggacatagtatttccacggaggtgatcttcggca

SEQ ID NO: 606482 - DNA, 256 bp, Homo sapiens
  misc_feature (59)..(59): n is a, c, g, or t
  misc_feature (80)..(80): n is a, c, g, or t
  misc_feature (126)..(126): n is a, c, g, or t
  misc_feature (176)..(176): n is a, c, g, or t
  misc_feature (186)..(186): n is a, c, g, or t
ctcaatatccatggggaattgtttccatgaccctctacagatatcaaaaccaatggatnctcaagtgccttatataaaanggtgtagtatttgctcatagcctacatacatccttctgtatacttnaaatcatctctaccttacttataatacccaaaacaatgtaaacagttgtnatactatatngtttagggaataatgacaaggaaaaaagtctgtatatatttggtacagagggaacctttcatttaaaaaa

SEQ ID NO: 606483 - DNA, 341 bp, Homo sapiens
  misc_feature (6)..(6): n is a, c, g, or t
ggtgancctatcgcggatgatgcggaggtgatcggattacggatgatgcggaggtgatcggcattccggcatgatgcaggagatgatcaggcttacgcgatgactgctggaggtgcatcggagttacggcatgatagtggaaggtgatcgcgattacggaatgatagtggagagtgatccggattacggcatgatgtggagagtgatcgcgattacgagatgatgctggagagtgatcgcgattacgagatgatgcggcaggtgatcgcgattacgcgatgatgcggcaggtgatcgcgattacgagatgatgcggagagtgatcgcgattacgcgatgat

SEQ ID NO: 606484 - DNA, 1420 bp, Homo sapiens
tctcggtcgtgcacccccctaaagagcttggtgcaggaatttagctgtgttgtcctgaccctcaggacaaactcatctaatgcaggctcagcttgtactgaaggctttgtaaacaaggaaagttctgtagggtatcagcatggcatttccagagagttcttaatctacagatttatcaagaaccagaaccccatggacgtccctgagggagattgagccaacctggatttgaggaaagaatgagataatgtgtgctcaacgtgtaacagacaccccagaagtcaagtggcagaaggttttatatgagcggcagccgttccctgataactatgttgaccagaggttcctggaagaactccggaaaaacatctatgcccggaagtaccagtactgggctgtggtatttgagtccagtgtggtgatacagcagctgtgcagtgtctgtgtttttgtagtgatctggtggtacatggatgagggtcttctggctccccagtggctttttgggaccggactggcatcttccttggttgggtatgttttattcgatcttatcgatggaggtgatggacggaagaagagtgggcggacccggtgggccgacctgaagagtactctggtctttatcactttcacttacggtttttcacctgtgctaaagaccctgacggagtctgtcagtacagacactatctacgccatggcagtctttatgctgttaggccatctcatcttctttgattacggtgccaatgctgctattgtatccagcaccctgtccttgaacatggccatctttgcttctgtttgcctggcctcacgcctcccccggtcactccacgccttcattatggtgacgtttgctatccagatctttgcactgtggcccatgttacagaagaaactgaaggcgtacaccccgcgaagctatgtaggggtcactttgctttttgccttttctgcctttggaggtcttctgtccattagtgctgtgggagccatactctttgctctcctgctgttttccatctcctgtctctgcccttactacctcattcatctgcagctttttaaggaaaatattcacgggccttgggatgaagctgaaatcaaggaagacttgtctaggttccttagctaatctagggaccttcatttcattattaagaccagcggaaagacttcgagcctaaccggtgcaacatttaaaggcaggggtccactcttgaagcagccgactgatctagatggtagagctgagatcagaagaaagcatttaaccaagggcttaggggagggtgcttgtccttcagttattttgtgactgaaaaagctttctggtgctgttatgaattattgtcctttattccctgtaacaaatgatgtaatgtgggttctgcttattaaaaaagtaatatcc

SEQ ID NO: 606485 - DNA, 1074 bp, Homo sapiens
ggctgcccatgtcctgctggtgcctgctgcctgctgctccctgccgctccctgccgctccctgcatgcctgcccctgcctgcctgccctggagccccgcgtccctagtgcctggctcccgcctgccctgagacccgcccagcctgccccagctcagcctgccagagaagatgcgtgctgctcccggaatggttcctcttgctctttggccctgtggctccttagtgaagtgccgtcagtgcccatgataccagagtcctgtgaatggccgcatgtacctagtgggctgctgccccagactgctggcctggatgctgggtgcccccggccatgcatgctcccagatgccaaggtcttcgtgactggccataggctgtggtgcctgctgacctgcgacgctcgtggcctgagcctgaccagaccacaccgggggctgctaggcccctggggcaggggtgcaagcctgtgggctgttagccctgctggcagcgacaccaaggagtgaagccgtaccatcaaggtcgtgctgcgcgccaaaaagatcttcggctgcgggggaccttctactttacgggtgccataccctcaagttattctgctgctaggtgaccggcaagatcgtggaccatgtagaacaggtaccttcagctgtgtattaccgccacaactcgtccagctgggcaactcagtgtcagcatcgtgccgcctcaaagcgtgtcgagtcgcacgagtctggctgcccgggccatggtccccaagcctctgcacgtttacgctctcccctgcgaccgtgttggatcttggcgctaggtgtgccccggtgcggattgcaccctcacctgcgcggctccgtggcttgggggctcactctggtagccaatgctgtcgctgttattgtcttgccctgcctgggccaaccagccgcgctcactcgccccttgccatgaacacaacgggcggagaccgacgtacgttacaccagcacgactcacgcccacaaccagacgtaattacgcaagccagccgtgtcccagatatttagctccaacagtgcctaaatccccgtacccccctc

SEQ ID NO: 606486 - DNA, 902 bp, Homo sapiens
ggaccttgagccctcaggagacgatattggcggtctctctgtaggctgagtgccgttgcagggtgccctacgaggtcgagctctgtggcttcgaactccagtggtgagacctgctcatatctcagaatgtcttcaggagcgagctatcccagaatggtgtggaggtgcagcacatacagctgtgtcaccgacgtccgaccattctggctccacaggctgcatctctcctgcgtggggctagcgagagggtgttcagtgtttttgctcctgggtctgcttccggctgcttacttgaatcctttgcgtcgtgtgatgagacgtacttccgctgtgcattgcgtgatcctcatctcgttcactggtcactgtgggccctttgtgacccagggtgtgttactgccatattgtttcatggcgggatgccatcggaagaagagctgcccaaggagcgcgggctttttatggcgacttgtcaagctttacccgttttgcctggagttattgtctcattctcaactactcacagatggggggccttctgtcctagtcgtgtgcgccagtgtcctgtggaaaggctctggacctttgtttgaactttccattaacttgtgtaagcaatagtatgtgatggcctctatgcttcttgctttgtggtcatggccttttcatagtctcacgataagggatggagataccggtaagtccattggtcgaacaaggctttcttcgtcgttgatcacgagattattgcaggaatggactccttgagtgaccaaggtgtgggacgggacttatagtctaacgtgggagaccggggcatgtccgggggagcaagggagcctccagaggtcaaaagacccagaaaattgacatgaattgaacgctggcccagtgatcaaacc

SEQ ID NO: 606487 - DNA, 240 bp, Homo sapiens
gttccctttgtctgtgtgtggtagagcacagctgtgctatattcaaactcaaaattttgttacatctaagaaaagacttcacatgatgtctgaaaagccagcttagcaaagagggtaacataaaggtgctaggtctgggcttggtataatcccacgacaccgaggcccacctcctgggacaatgtggtagaaggacagaccccttccctccgggtgtctgtatggagacaaagggaaaca

SEQ ID NO: 606488 - DNA, 474 bp, Homo sapiens
caccaatcttaccatggacactgaaattcgcatagagtgtaaggcgtacggatgagaacatgggtacagtgagaaagaccgttttcagggacgttattgatgtaaaaattgaagttaagagctgatccacaagcacaaatctttccacactagccatcttaatcaagttaaacaccaagatacaaaaacaacaaacctaatagatcttgaacaacacttgtcatacgtatgggaccctacacttaatcatatatgcttacaccactagactatccctgcacttcaagtacggcgaagaaaaggataccactcccaagctgtagccacacgagcccaccaaaacctactaatagtcacatacctgacaaactggaccacacaggaaaacagcaaccacataggagacccataggggcaacgcggccgcacaccacacccggccaaacccatgaaagcaccagaaactgaactggc

SEQ ID NO: 606489 - DNA, 615 bp, Homo sapiens
  misc_feature (27)..(27): n is a, c, g, or t
  misc_feature (61)..(61): n is a, c, g, or t
  misc_feature (71)..(71): n is a, c, g, or t
  misc_feature (82)..(82): n is a, c, g, or t
  misc_feature (86)..(86): n is a, c, g, or t
  misc_feature (121)..(121): n is a, c, g, or t
  misc_feature (124)..(124): n is a, c, g, or t
  misc_feature (126)..(126): n is a, c, g, or t
  misc_feature (133)..(133): n is a, c, g, or t
  misc_feature (137)..(137): n is a, c, g, or t
  misc_feature (145)..(146): n is a, c, g, or t
  misc_feature (149)..(149): n is a, c, g, or t
  misc_feature (153)..(153): n is a, c, g, or t
  misc_feature (159)..(159): n is a, c, g, or t
  misc_feature (162)..(162): n is a, c, g, or t
  misc_feature (172)..(172): n is a, c, g, or t
  misc_feature (177)..(177): n is a, c, g, or t
  misc_feature (184)..(184): n is a, c, g, or t
  misc_feature (201)..(201): n is a, c, g, or t
  misc_feature (204)..(204): n is a, c, g, or t
  misc_feature (240)..(240): n is a, c, g, or t
  misc_feature (242)..(243): n is a, c, g, or t
  misc_feature (251)..(252): n is a, c, g, or t
  misc_feature (256)..(256): n is a, c, g, or t
  misc_feature (261)..(261): n is a, c, g, or t
  misc_feature (264)..(264): n is a, c, g, or t
  misc_feature (271)..(271): n is a, c, g, or t
  misc_feature (278)..(278): n is a, c, g, or t
  misc_feature (296)..(296): n is a, c, g, or t
  misc_feature (316)..(316): n is a, c, g, or t
  misc_feature (322)..(323): n is a, c, g, or t
  misc_feature (331)..(331): n is a, c, g, or t
  misc_feature (342)..(342): n is a, c, g, or t
  misc_feature (352)..(352): n is a, c, g, or t
  misc_feature (376)..(376): n is a, c, g, or t
  misc_feature (378)..(378): n is a, c, g, or t
  misc_feature (382)..(382): n is a, c, g, or t
  misc_feature (384)..(384): n is a, c, g, or t
  misc_feature (484)..(484): n is a, c, g, or t
  misc_feature (521)..(521): n is a, c, g, or t
  misc_feature (551)..(551): n is a, c, g, or t
  misc_feature (603)..(603): n is a, c, g, or t
tacccatctcacacaccttccaccctnttttcaatttctcactttctccatcatccaattnacttaaatcnaactaaattcnaatntcaatctccatctacacaaccatattcccaatctnatnancaatatncttnccatcttnnttnccanaatcanctnccattccctnaactnacacaanaacaacttatctccctnatnccaaaaatgcacctactctttcctctaactctggtnanntcattctnnagtnacatnatngactccncacacancttcataacctcttcatngactttttatcttcaagccnatgacnnaaaaatanttatattccantctaagccanaaatccactacccaccacatttcnancacnancctacaaatttgagagaatcatctctaagcaaaatgtcctcagatctgcaaatgagaaattcacaagcgcacaggaattttcttgaagatggagaaagtnatggcttttttaagatgcctctctcttaactctgggnggattttaactacaactcttgtcctctcgntgatggtattgctttggatttgttgtgcactgttgctacagctgtggagcantatgttccctct

SEQ ID NO: 606490 - DNA, 824 bp, Homo sapiens
  misc_feature (167)..(168): n is a, c, g, or t
  misc_feature (178)..(178): n is a, c, g, or t
  misc_feature (180)..(180): n is a, c, g, or t
  misc_feature (198)..(199): n is a, c, g, or t
caccaagtgccggaagcggaagctggagcgcatcgcgcgcctggaggacaaggtgaagacgctcaaggccgagaacgcggggctgtcgagtaccgccggcctcctccgggagcaggtggcccagctcaaacagaaggtcatgacccacgtcagcaacggctgtcagnntgctgcttgngngtcaatggtgacacgccnntctgaacgtcccctgcccctttacggacaccccctcgcttggacggctgggcacacgcctcccactggggtccagtggagcaggcggtgggcacccaccctgtggacctaggggcagccgcaaaccacactggactccggccctcctacccgtgcgcccagtccttccacctcgacgtttacaagcccccccttccacgtttagttctctggtactgtctatttattcctgctggaaacagacctcgagttcatattgaatataatatatccgtgtatttcaacagggcaggggaagagggggcgatcgcggcggagctggccccgacgcctggtactcaagcccgcgggggacattggggaaggggacccccggccccctgacctcccactcatctgcacccgtactgtggcaaaacgcaaacacgcacttagtcctctaaagaggtcgaatgttaacgacagtgtaacggcgtaggagtgtgataaggacctatgcaattgaaatctatataaagtaaagacagaaaattgggaacatgtaggaaatatacaaacaaaacagaaagaaacaaatatagtaatagtacagaaaaacaacaaacaaaaacagcaagaaaagacac

SEQ ID NO: 606491 - DNA, 416 bp, Homo sapiens
cacgaactgagggcgctgatggacgagaccatgacggagttgaaggcctactctgaactgtaggaacaactgaccccggtggcggaggagacgcggtcacggctgttcaaggagctgcatgcggctcacgcccgtctgggcgcggacatggaggacgtgtgcgggcgcctggtgcagtaccgcggcgaggtgcatgccatgctcggccagagcacacgggagctgcgggtgcgcctcgtctatcacctgggcaagctgtgtaagcggctccttcgcgatgccgatgacctgcacaagcgcctggtagcgtaccaggcctggtgccacgagggcgccgagcgaggtcttaacgccattgctcagcgctctggggcccctggaggcaggggcgcgtgcgggccgtcctgtgggcttct

SEQ ID NO: 606492 - DNA, 285 bp, Homo sapiens
acaccactgagtcatatacaattctctttttttttttgagaaaactattttcaataccagtgaaatttctattgctaaaaagccagcactttaactgattatttaaaattctaagagacattggaaactagtctgaaatttggacctaggaacactgatgaaatacaattggaattttaactgtctctgggttgtttacattcaaaaattctttacttttccttctttcctatttcaaggtttcagcaaggtaagtcaagtgtttttgcgtgacaaggtgagttg

SEQ ID NO: 606493 - DNA, 912 bp, Homo sapiens
gctctccccgagcgccgctccggctggcaccgcgctcgctccgagtatcaggctcgtgctcatagctagcagccgtcgtcgtctccctctccagatacgccatcatgattatctaccgggacctacatcagtgacgtatgagatgttctccgcacgatctagaagatccgggagatcgccggacgggttgtgcctggaggtggaggggagagatgggcagtaggatataaggtacaattgatgactggttcataagagggataatgcctcggctgaagagtcccgagggcagataggtaccgtacagcaatagtaatctactggtgtagatattgtcatgaaccatcagcgtgctaggaaacaagtgtcaacaaaagaagcctacgaagaagtacatcgaaagattacatgaaatgcaatcaaagggaatacttgaagaacggagaccagaaagagtaccaccttttgatagacaggggctgtagaacaaatcaagcacatcctgtgctaatgcaagggactaccagttcttttatttggtgaaaacatgaatccagatggatggtttgtctattggactaccgtgaggatggtgtgcacccatatatgattttctttaaggatgggtttagaactgccacacactgttaccaatgtggcattatttggatctatcacctggtcatcataactggggtctgctgcatccaacaaaccagatttagaacaatggctgatggtaccttgagccctcattattttgacggagtaatgggggggcgtgtgtttagaaaaatgtctggtgggcgtcaaacagggcttttgaaaaaaaaaaaaggcgaattttttacacctactcttgaccccacaggggcatgggcggaacgctgttttacgccgcgcgcgtataac

SEQ ID NO: 606494 - DNA, 449 bp, Homo sapiens
  misc_feature (371)..(371): n is a, c, g, or t
  misc_feature (382)..(382): n is a, c, g, or t
  misc_feature (429)..(429): n is a, c, g, or t
tcagctccctcctctctggtactcacctgccaattccagctgtcttagccttgccaaactcccagtctgtcttctcagcttagcatggctgctgcattccacttctgcttgggttcctcccctaccctatacccctgtccataaattgttaccaagtaggaagattggagagcttaccttttctcacagctcatggtcctatacctgttgttctaatgcctgaaatagttggttcatatgctttaattttctagttgtttatagccagagggcaagtgccataccatttggttggatggggaagtagaaacttgccctttaatgagtgtaccatgtattttttaacacaatgtggccctcacacatgtggntccctctatcnaggggtgtggttgttaaccatttcatctagtgggatttctaagtaantccttcaagggttcaggaat

SEQ ID NO: 606495 - DNA, 1001 bp, Homo sapiens
tggaaatgcaaatggaggctgtcaactggtgtaagagaaatgagggctccgtatagagcagctttcttcctgtagatgttaatgcataagtaatcatctcgtgttcactagatagaagcggatgaagaataaagaaaaagcaagttctttgatcagtgtactcagacaggaagggataggcacaagtgacaacttcatgcaggctttccgtgaatgtattggaccagatgtgccgaactggaggtgtgacatccctttggtgaaatcctatgttagcacagtttgcagcctcgtgccatcacttgcagagctggtgagcatttcagagagcatagctcaaccactagaaagtggctacccatttgcctctcttcctacttggtcttcaggcagttagcgttaacattacaagatcgagaatggttaacagaactttttcagactaaagcaaggtcaatatgcagaaacgtgctcccagagcatggatgcagaataaggaccgcatgttgggtaagattgggaaggaatggggactgggtttcttattcccatctcctcaaatgcgggaaggagctgttgaagcagataaagtcggatccagtccctcaaagcatatattagatggctgagagataacatctctccgaacttcatgtagattaagggtgggtgacatctgtatgactaggttttaccagtgtcatttctagtgaagtagactgctcagggatgaaacgatttatactctgtctgcaagaaagtgtgagaggaaaagaggactagtatttgagcgtaaggagaagttttctggtgacgtggactcaaagtcgggcgggtggtgtcaggggaggtgttaaagacatcacaaggatgtattggtgggggtataaggaaattaggaagattgggtggacataaagtgtgaagaaggtgtggaaagggttatgtgaaaaagagagaatgaggggtgggaggaagaaggagattggtgatagtagaag

SEQ ID NO: 606496 - DNA, 151 bp, Homo sapiens
cctcgggtctcctgtgtgcaccttctcagaacccttacgataccacatgcctaacatcatgcctcacaactggacttcgatgctcgatgtaggcagatggtggtgtcctgggtggcttttgtattctaccacccgaacccactagcagaga

SEQ ID NO: 606497 - DNA, 446 bp, Homo sapiens
tatgtgggatggtagataattaaaacaagaaatgatgatgacatgagatatatggtaaatgaggaaaaatgttaaggtgctttaagggcaattattgagagtaagaaaaggcttctctgagaaaaatgagttttatacttattcttgggggatgattagggcaattagaagttaattgggtaaatgggtaatgggtgtagtgggttatatctggtaatcctagcattttgggaactccgaggcaggtggatcacttgaggtcaggggtgtgagaaaagcttggccaacatggtgaaaccccatctcttctaaaaatacaaaaactagccaggcgtggtggcacctgcctgtagtccaggctcctggggaggctgaagcaggataatcgcttgaaacaggaggtagaggttgcagtgagcaaagatcgtgattcagtctcaaaaaaa

SEQ ID NO: 606498 - DNA, 354 bp, Homo sapiens
tcactggtctttatcagctagcaaaagatcaagtttaagcccaaggaggcaggagaatggcgtgaacccgggaggcggagcttgcagtgaaccgagattgtgccactgcactccagcctgggcgacagagtgaaactctgtctcaaaaaaaaaaaaaaagcccctgtccacacctccagcagttgccaacacgcccggctaattttttgtgttttcagtagagacagggtttcaccatgttagccagaatggtctcgatttcctgacctcgtgatccgcctgcctcggcctcccaaagtgctgggattacaggtcgacgcggccgcgaatttagtagtagtagtaggcggccgc

SEQ ID NO: 606499 - DNA, 431 bp, Homo sapiens
ctggcattctgcaaatcagttgccgtaatgcaggatcctcgggctttattgttcatggtctgttgtttttatgcaaaccatgatgttttatataagcttatagaatctgaagtaggtagtgatgtcccagcttgttctttgcttaagatgctttggcattaagggtttgtggccattactgcagtaaaaggcctggtcatgttctgggcttacagtctttaggtggggaagtctgtggcccacatgtccaacaggctgtgtgtggcacctgcaggctttgtccctgtggagcaggtgttactccctcatcaatttaggattattttatttatttcagtgaaaaatgtcaataaatttatagggtgcattaatctgtagattgtttggggttgtatggacattttaccatattattttcattcataaaaaaa

SEQ ID NO: 606500 - DNA, 143 bp, Homo sapiens
atcacctcgtaccttcagcagacattgagaagtcacaaaggaattggcattgacatatccattatttaaatgatgggctgtggcatatgaagacgtataaatgagcctcagaaggaatgcacttgggctcaatatgggtattg

SEQ ID NO: 606501 - DNA, 186 bp, Homo sapiens
  misc_feature (90)..(90): n is a, c, g, or t
gctttttgggggaaaattttttccccttgggggtggaggcccaaggcctcttggaactctttttaacctgtttaaaacccggaagggggntgccccgttttttaagccccccccgccagggccgggtttgggtttccccctttccagcccgggggagcttttttaatttaaatgggtttccgggga

SEQ ID NO: 606502 - DNA, 1408 bp, Homo sapiens
  misc_feature (1408)..(1408): n is a, c, g, or t
cacaggtgtcgtgagaactaccccttaaaagccaacaatgggaaaggaaaagactcatatcaacattgtcgtcgttggacacgtagattcgggcaagtccaccactactggaccatctgatctataaatgcggtggcatcgacaataagaagcacttgaaacacattttgacgcaacggaggcgtgcgtgagatgggaaacgggctcctctcaagatactgccatgggtctgtggcataaagcgtgaagacgcgtgagccagtgagatcggtgggtactcagcgcatatgaacttagtcgtcacatgtgttggcgtagagattctcgatggaccaaggcaaaagttcatctcactggtggaacatattgaactctggaagtgcaccctaggtatctaccacgtatgcacttctttactcaaagaaaagcaattgatatactatggtgacgaatctcatggctagactcggtagcgtcgtcctggtagtctgttagcgtcgctttggtgttgggtcgacatgtctgaagcgctcggtactctgccaagcaactgcggcagaccgctgagagcatgccctgtcttggacttacacacgtagggtgctgcacaacaatctaagttgctcgcgagttgagacgaaaatgggatgtccacttgtagcctagccttacagcccagagagagatatgacggaaagttgtctaaggcaacatgtcgagccactgtgacacttcaagagaaattgggctcatcgaacccgtacacgggtagcataaagtgccaattgctcggttcggacatggttgaacaagctatgctagtgagcccaaagtgctaacatgcctgaggatcaagggatggcacaggtcacccccgtaagggattggcatctggcaagtgggaaccggcagcttggtttgaggcccggggacctgcattcctaacatcaaagacgtccactggacaagaccttggggcgctggctcttcccaggaggttaccgacagtcggggggaaggtgaccgtggccctggaggccgcagtgtcaacaagggggagcctataaaccacgggaagatgttggtggcccccataggtgccacgacacaaaggctatacacggggagacaaaacgagggcggtaaacatgggactcgaaagcatggtgagaacaacaccctcgggggacaacgaacgcttccagctactacaggctatcgttacaggacaatagcagcgacaaccgaggatgcgtagcgaaacaccctacgtaacgcaggccgctggacgagatcaacgcagcaacgaacacgcatgatcgtctgagccgacgatcgaacaaagacgagacacatacggtggcagctaatggtagctacagagtctctctcaacggtctagagctan

SEQ ID NO: 606503 - DNA, 1334 bp, Homo sapiens
atctatggttctgccctgacagattctccatatcggggtcacagggacgctaagatcgctacctgcgactttcgattgaccatgctgatcccgggtggtactttccagccgccgccacagccgggccccttcatctgaagaatgcagccattcctaggatccagggcgctattgcagtgcacacaaggaccttctcatacagggacagccacaccttgctccctgttaccacactcattcctgcaatacggagcgacaaagctctcgtcatggacctgactcccttgaggaattcgttccaggttatctatatatccctaaaccctggtgtcaccagtgacccctatgctacatcgcgaactcgggacttcatcttgtaacgcctctgtatctcacacgcacaccctactactgctgcatccacgcgcacgagcaacccttacacctgcgcccctatcaggctactagcgctgtacactggatcctactggaccatcaacaacacttcatggctccccgtctccgccttgccacgcccctctactggctctgactcacaccctcacactgacgcccacagaaacgtatgccacccaaactaagtacccgcagcgcccacaccgcaacggccttcgccacttcccaacccaccacttcccagcgaaacttgcaccccttgactacatggacgacacggttcaccaacccacgggcccccttgtcttttcccccaacaaaccccgccccatttcaacccttctgacttcgcactcgctcggccccaaggcggacacttagcccactttggccctacattgggcgccttccggcacacagtttcacctcttcaccccgccggccacacccgaaccctgagttctctagcacccgttccatctttcacaccgcgggcacgcgtacacccagacactaccgcccccccgcgccacacccgcgtccacacctatcctactagctccgaccagccacccaactgaacacgtagtctccaccagcggacacgaccaccacaccccctcgctccctacccttggctctagctaaacatccactcctaccttcccctactctccccccaccaaactccaccacacacgcctgcacaccctatcccaacccacattcctccacactaacaccttttccctccaccatcgcctcccgcccccaacaacccatcacaacagaccaacctcccaccacacactatctccaaccacacactccttctctcccccaccactcctatccacaattcacacctagatacagactatccctaatcccacacaaccaccacctattcaccgcat

SEQ ID NO: 606504 - DNA, 201 bp, Homo sapiens
ataatctggattatcttgccctgacgtttccgtcgccaaagccaatggctcttccatcatcgcctgcatcagacactgatgccggtgcgcttgctggcttaggggtcgacacagctggtgccggcgttggtgctgtttcagtcggcgccactggtccctgccatttaatttccggttcgacaaattcagtagccggcgcgg

SEQ ID NO: 606505 - DNA, 287 bp, Homo sapiens
gcgcaacacacacattacccagaatcagccctgtagggttgtgttgggcgaagcggctggagttcattctctcacccccttatgttggtgtatggcgtgtgacagcagttctacagacgctctgctgtaggggtcatggatgacgcggctctcttggctcttaaaggcaggcctctctcttcttgcctttaaagaatcctccttcctcacacctggcctcctctggcttcagcttctcagcagcaggaacccgccttccacaacgacactatcattactatgctact

SEQ ID NO: 606506 - DNA, 371 bp, Homo sapiens
cgagaagagtgtgcaacaagctgtatagctattacagctaaggttccaagctgtggttcttcgttatgtgtgggtctacatgtctagatgtgtttatttgtatgtacacctattgttatacattgtgtctaccaaattggcttacaagtaaaagagcactcataaataaagtaaataagtttaagcaattttcaagttcacctgacttaagtataactttgctaaacaagctgactttaaaattattggtagaataaaaacagaaatgtaggaagggcacagtggctcatgcctgtaatcccagcactttgggaggctgagctgggtgcatcacctggggtcaggagtttgagatttaaaatgctactact

SEQ ID NO: 606507 - DNA, 1360 bp, Homo sapiens
  misc_feature (762)..(762): n is a, c, g, or t
  misc_feature (939)..(939): n is a, c, g, or t
tgctcacctcacaccgtcttctgttgtgtggccgcccctctgtatgtgtatcgatcgtcgcccaaaccacacggagaatcggctctacaaataaagagggaaaaatggggtgttaataaaaaagaaatgatgatataaaagagggggaaatcttctgctgcacaacatttctctgtcgccccgcccccgccggtggtgttgaccccccacgaacaactatgtctgttccccccgcctttgggttgaggcccttcccccccccgcgttttattttaagggaagggggccctccccccgccccttggcgcgcccaacagggtggagaaccgaagcaagaggtggtttttaagacggggcccccgcgggggttaagcccccgtttataccccgttgcgccacaaaaggggttaccgccaatgtaagaattgccagaccgtgttggtttgcccgtgttagatttttagggggcaacagccgtcggagagttggaaaattggggcgttccccacaacggaagggggcttttcacagagcttgttgtctgccgtttgaaacgtgtgtggtataaacccacagctggagaaaatgtggagcccctggccccccgttggaaagagaagcccgccgggccacattgacacccctctgccacaggactccgaagggataagaaccccccttatttgggagagccttctatagtgttttaattaaaattgcccacacacacggtacccctttacccacaatacccccccacgngtgtcctataaacactaccccacaacacctcggcacttataaaaactttttcgggtttgtggggcgacccttccgcgagtgccacgagatcccacacctctctccgagagtcacgtgacaactgcgctaaagagactttcacaccacgtcacaaaagcgagaactatctaatagacntcacactgtgagtcccccactaacaccttgaggcccacacggagacacacacgttatcccctatagggagtataccacggcgcacaatcctaatttctagaggtcccacaaatcacaccacaataggggttatacgaccctccgaatgttggagatccacggaacacttcccgaatgggccacgcccgcgctatttaaaggtttcgctttgttcacacacgagattaaagtcctacgtgattctgaggttcacgaccggaggtaatccacggtcggtttctatctaacttcaaattcctccctgtacgaaaggacaccaagaggaaaataaggcctaacttcacccaagcgccttcccccgtaaatgatatcatctcaacttagtattatacccacacccaccccagaaccgggtttgtta

SEQ ID NO: 606508 - DNA, 119 bp, Homo sapiens
tgtacggcaggagctcatcagcaattgagtgagcccatcagattcgttatggatgaatgtgtgattactggaggcattgatgcagacaccagagtccagagctggtacgtggtacagca

SEQ ID NO: 606509 - DNA, 215 bp, Homo sapiens
aaaaataaagtgtttgctgagagaatgagttggattgctggacttcaatgtgtgtggattcagtttgtgacttaaaaatgaaaccagtctattgcttgtgtggcttttctcaaaatactgttattccattacctatctcttaccccaagagtagtcacattcttatttctggttattttaattcctggtggtatatttatgtgataatgtgatag

SEQ ID NO: 606510 - DNA, 322 bp, Homo sapiens
aaatagtgggtggggaagcgtcccgagaggttagagggggttggggtagcacccttatgctctgatcagtaccgcaaaaacttcttgttgaggaggaagatgagaaggtcgacattgactttggccttgtagaagagtttcatgacagccacaccctcatactggagcggcaggagatcctgatagtgaagctgaaatcgctccatgtccacacccaggaacttggcatttacttcaaactttcctgcctcatctcccggcgtgatgtcaaagatgacgtttctgaagtgagaggcgggaagatcttcaatttccaccaaga

SEQ ID NO: 606511 - DNA, 247 bp, Homo sapiens
tcgtaaactacgacacgtggagtatgctagaacatgaactgcacttctttctaggtcctgggctctacacctagcacataattaaaatcccaaacttacaaggttttcaacaaaagtaaagtttactaaaagttaacagcgtagccaagatggccgaataggaacagctcctgtctgcagctcccagcatgatcgacgcagaagacggctaatttctgtatttccaactgaggtacctggttcatct

SEQ ID NO: 606512 - DNA, 326 bp, Homo sapiens
  misc_feature (51)..(51): n is a, c, g, or t
  misc_feature (53)..(53): n is a, c, g, or t
  misc_feature (61)..(61): n is a, c, g, or t
  misc_feature (68)..(68): n is a, c, g, or t
  misc_feature (95)..(95): n is a, c, g, or t
  misc_feature (113)..(113): n is a, c, g, or t
  misc_feature (152)..(152): n is a, c, g, or t
  misc_feature (174)..(174): n is a, c, g, or t
  misc_feature (176)..(176): n is a, c, g, or t
  misc_feature (178)..(178): n is a, c, g, or t
  misc_feature (190)..(190): n is a, c, g, or t
  misc_feature (202)..(202): n is a, c, g, or t
  misc_feature (214)..(214): n is a, c, g, or t
  misc_feature (232)..(232): n is a, c, g, or t
  misc_feature (258)..(258): n is a, c, g, or t
  misc_feature (264)..(264): n is a, c, g, or t
  misc_feature (308)..(308): n is a, c, g, or t
gcgttggggactgttttctctcggaggccgagagcggaccgcgtctgactnangcgggcancacagcngccccctacgctccctccctccctccnccgcgccctccccgccgncaccagccgtccaacgccaaccgccgctccaggggaggngccgcggctcgacgagagccgnancnaggcctgcgtcnggcccaccgccngcgccggagcgngagccggggcctcagcgnccccgccctctccccgcctcggccancgtccnacgggcccccgagcgtcgcgccaatggactcaaaacaagggctnctacatatacaagttaga

SEQ ID NO: 606513 - DNA, 136 bp, Homo sapiens
cgtttccatactagcaaaatactttatttttataatgataaaacaaggaaagtaaagatttctttttggggttcctccgagttggtgtttgtcgaagaatatggggattaataggttttttatgaacttttgctga

SEQ ID NO: 606514 - DNA, 297 bp, Homo sapiens
gcaatcagtctaattggttgctttccacaatcagaggctgaagtgaagttacaaagttaccctcctatgcaaatgtctgattggttttggaaagcaatctatcagaggtactttcaattttctatctgccaagcagaaaggcagggtggtttgcaaagggagtagcctctgtccttttgttgcttaggtgttgaaagttggggttttccttttgatttagttctaggaattcagggtgaatcagccttgggttccctgcctccagaccctattctcctcctcaggctcactgcaacc

SEQ ID NO: 606515 - DNA, 958 bp, Homo sapiens
ggtcggaaaatcgggtcgcgatagtagatgttatagatcagaacagggcttgggtcgatggaccttggcattcaaggtgaggagacaggccatgcctttcaagtgcatgcagctcactgatttcatcctcaagttgccgcagagggcccaccagaagtatgtcggcggacaaagcctggtggaaggcagactagtctaaataacgaaagagtgggcagccgacactgcatgtggccgaaacgaagatctcgtagagccagagtacataacgcgatacagcccaccgaatgaccgattgtgcgattcgtgttgtgaaacgttgattgaggggcagaaagcaaaatggaggacactagaataagtcgaacgaatagagagttcaagaacgcttcatgaggcacgctctcctgataagcttctgccaaacagagcatccgtggttaccgtaacgggtgtagctcgtttagccattggctggcttgcattggcatggcgtgtcgtagtcatgccgtagtctaacaagttcccagacatcagaagcagtcaccgtccgctgaggtaaccatgggggcttccatgtccgcacgaaaggggtttaccctgccgcatgacacaggtccaacaaggggcaagcataagcagtaggccgtggctcccaaagaaagctctagggaaggggtcacatgatgctccagaccataaaaagctactctggctaccaacaacgtcgaatcctggctcggacaaaggcatcaagtggcaatcaatttaccgaaggtaagtaagaagcgtttcttgtttcgaacctgtttggcatacaaacaataggagtattattcgccaggggaaacaattacccggggagttggaagcaggtggaggtatatggaatggccccagggccatatgtttttccggaacccattttttttttcacacttgggtaaatttggcggac

SEQ ID NO: 606516 - DNA, 116 bp, Homo sapiens
aagggacacatgaagaatccctgctaaaaattaaccaacagaaatagaaactagaacaggatatgactacagtcagatgaaggtgatgaggggtagtatgcccagccgatctagcc

SEQ ID NO: 606517 - DNA, 291 bp, Homo sapiens
acattataccaatatcaaggaacaaatgtcagtcaggcaatggcagatattacccagaactcttgctttcctggaatgctatttttacatctttcagcagtaaggtctagctcacagtctcaagtggcatctcatgattctcattcattcagtgaatatttacagaacacccactataagaaaagtaccatataagcacttggaggtacaaaatgaagaggcatcatggctgcccagaaggcacacagagcccaactaaagaaagcagaaaaaccagtcaccaaaattctt

SEQ ID NO: 606518 - DNA, 202 bp, Homo sapiens
caacgcttggtacttgtggtgtgcctggggatctacaaaggcaaaaaggaaaaaaaaggagaaaaaggagaaaaaaagtgggggggttctataaattaacgaacaaaagattgatcagattatttgaagaggaacctcatcatatcccacactttttttctcctttttctccttttttttcctttttgccttagtcacagct

SEQ ID NO: 606519 - DNA, 161 bp, Homo sapiens
gggcgtcgatctagaggaccccctcaacgctttatacttccgtagtagataatattaagtatgcagggacctctagagctaaggaagtataaagcgtggaggaagtataaaagcgtggagctcaacgctttatacttctccccggcgccgtcgcctacgca

SEQ ID NO: 606520 - DNA, 334 bp, Homo sapiens
gtgaatctacttctgatccttacctttgttgctgctgctgttgctgccccctttgatgatgatgacaatatcgcggggggcctcctctgtgaggagaattctgtcccctaccaggtgtacttgaattctggctaccagttctgcggtggctccctcatcagcgaacagtgcgtggcgccagcaggtcactgattcagtcccgcatacatgtgagactgggagagcacaacatctaagtcctggagtgggaatgcaaccgttcatcaatgcagccaatatcatcacccaccccaaatacaacagccggactctggacaatgacatcctgctggtc

SEQ ID NO: 606521 - DNA, 142 bp, Homo sapiens
cgaagcgcgtcttgagtcgtcaagggcttgctggttggtttcagctgttaaacaacaacaacaacaacaaaaaagaaccagaaaaaagaaaacaaacaataaaaatctgtctagcgagacagaaagagcgggtttacaatag

SEQ ID NO: 606522 - DNA, 329 bp, Homo sapiens
  misc_feature (50)..(50): n is a, c, g, or t
acagagaccgagacttcagcttcaaaaagaaaccctggccgggtgcagcnagtcacgcctgtaatcccagcactttgggaggccaaggcaggtggatcacctgagctcaggagtttgagaccagcctggccaacatggtgaaaccccatctctactaacaatacaaaaactagccaggcctggtagtgggtaccagtaatcctagctactcgggaggctgaggcaggagaatcgcttgaacccggaaggtggagtttgcagtgagctgagatccagccactgccctccagcctgggcgacagagcgagactctgtcgaaacaatttaaa

SEQ ID NO: 606523 - DNA, 739 bp, Homo sapiens
  misc_feature (739)..(739): n is a, c, g, or t
ggctgctttcgcctccgcctgtggatgctgcgcctctccgatacgcaaatgaaggtgctccttgctgcgctctcatcgcggggtccgtctgcttcctgctgctgccgggaccttctgcgggccgatgagaagaagaaggggcccaaagtcgccgtccaggtgtatttgacctacgaatggagatgaagatgtaggccgggtgatctaggtctcttcggagaagactgttcctaaacagtggataattgtggccttaggctacaggagagaaggggacttgtggttactggaatcagcaaattcccatcgtgtaatcaaggacttcatgatgcaggggggagacttgagcaggagagatggtgcaggaggaaagaagcatcttaagggtgagcgcttccccggatgaagaattccaaaactgtaagcttattacgggcccttgggtggcgttgagctatggccaaactgcagtgcaaagaacaccggtgtggggtccccagttcttcatcacgaccagtcaagacagccttggctagataggcaatgccattgtaggtcgtaaggcaaatgtttcttagatgcggcatgagagcgttggtgctgggaaggtggggaggaggcaacgtaaagacccttagggctcggggataggaacctctgattggtattgtgatcatctgcacaactgccgggtagactgagccctggtggaggaagcccttatgacatcgcccaaggn

SEQ ID NO: 606524 - DNA, 787 bp, Homo sapiens
gcgggatgagctggctgacgagatcgccaatcattgcagtcggctaaggagccctggcgttagaggagaacgcggcgtctggaggtcccgcatcgccccagactggaggaggagctggagggaggaggcatggtgcaacagcggagtctgatcaacgaccggctgaagaaggccaatcctgcgagatcgaccagatcaacaccgacctgaacctgtgagccgcagtcactgcccagtaagaactgagaatgctcggctagctagcttggaaatgccagaacaaggagcttaaggtcaaatgctgcagagtagatgtgagggcactgtcgattcctaaagtactaaggtcctccatcgagcgtcctcgaggccatgattgctcagttggaggagcagctggacatagtgagaccaatgagcgctcatggcagtctgctaacaggtgcgtcggaccgagaagaatctgaaggatgtgctgcttgcgatggtggatgatcgcagcgtgaggaactgccgagctagtataaggaccaggtcgataatggcatctaccctgccttgtaagcaagattcatagctggcagactggaggaggccgaagaggaggcccagcgggaccaagcgtcctcccgcgcggtaaactgcagtcgcgagctggaggacgccactgagacggcgatgccatgaaccgggaagtcagctccctaaagaacaagctcaagcgcggggacctgccgtttgtcgtgccccgcgaatgggccggaaaggcgcggggatggctccgaga

SEQ ID NO: 606525 - DNA, 104 bp, Homo sapiens
aggctgattgtgttcgcttcattcattacccccacaatcctagtcctagccgccgcagtactgatctattctatttccccctctatgattcccattcagcctct

SEQ ID NO: 606526 - DNA, 366 bp, Homo sapiens
ttgaaaacaaagccatttttccccctttttggattttttaccccccgtttggagtgatggttcctgtagaaaggtaatagccctcccatgtgctcctcctcttgcaaaggccaaaaaccatgtcccccggatgttttctttatttcggctttggaaattgagacccccccccggtttcccatggcctttctaaaagaaattggtttccccaaagtaagaacagttttcccctatcatgggtggttaccaaatttccatccccgggggccaagcggggcaacaggaggggcggttggatcccattgatctggccccttgtttttcttcaggtaagatggctgcttttttgttttcttatccggaaca

SEQ ID NO: 606527 - DNA, 847 bp, Homo sapiens
  misc_feature (608)..(608): n is a, c, g, or t
gcttcgatgccaagaacatgatgggtgcctgtgacccccgccacggacgatacctcaccgtggctgctgtcttccgtggtcggatgtccttgaaggaggtcgatgagcagatgcgttaaggtgcagaacaagaaacagcagctacttggtggaatgagatcccgcaatagaatgtcaaagacaggccggtacgtgtgacatctccagcttcgtggccttctaatgatggcagtcgatcctttcgattaggcaaatagacacagcctaatcgcagggagactcttgcgaagcggcgatcgtcgggagacctagattcgactgtccaatgttccgggtcgagaaaggccgtgtcctcccatcatgggtagcacgagtggcggcagagagcaaatggtacgaaggatggtagattcgacgcgagggtcgtgcagaagcaactaatgaacagaaccttcggatctcgtgaagctcatcaagcaaggtcacccaggcatggccaccgcgagaagaggaaggaggcatttccggctgacggaggcccgaagacaggtaggctctaaggtgcacgagcccactcgaatcacgcgtcacgtgcattcctcgaggtnttacccttgatggccagtcgttagcgtcaatcgttgccaccattttcccattcatcgcacgtctaggagagttgtgatgcttttggcatggccatcatactcctgtggtatgaataggtatattatttctttcgtggaggcggaggtatcgtaggaaactagtggccatggccgacagtaaggtagggccggcttcgagaattaaaattacgtttggtttttgtttcgcacacgacaga

SEQ ID NO: 606528 - DNA, 930 bp, Homo sapiens
ctcagatacagatagcgaattagggtaaagagcaataactaagaggtaaatatcacattaatctgtattatccattctctcatagacatctgtgcctcaaattgtgaatttcaatatgacctgcgtcaagtcttctgatctcagtataacttcagatacagatagacacattagtcagctgattggattacgagggagtaaccgacaagatatttattgtaaataaagcaacatgattcataataaacagaggaagaatatctagagagaacccactcttaacgctagaggagccctctcctgcaacatcacacataaatgtggctattccaaaattagttagtcccttaaggttgtacttaaaagagcatgtcgaaccctgtatgtgaaggaaaaatggcgcatggtccaaataaagttgaagttgtgagacacagaataacaccaaccaggacataacaatatacaacacacaagataggaaacctgaaacagatatataggataagaagcacaccacggaacacattaaccttcactcatatgtagtatataggtatgcgcaacagattcctgtgggggacgtggagccgtgagttttttccatttgggaaagaagttcagtggtcccattgtttaaactccacctcaaatctcaaaggtgtcgagggccctacaaaggaaaaatggagagcctctatctggtggatgcttatggtcccctctgagactgggccatgcatgggtctggcaaacacaacctttctgcttgtgctttcaacaaaagtaaatgtgtacccttttcccaacccttggagtgaaacctcaggggaagtcagctgcttccatcccaggggtgtggcaagacctagcacaaagggaagagcaaaatcaggaaaggaattttgggaaaaggtgaaataagcggaa

SEQ ID NO: 606529 - DNA, 730 bp, Homo sapiens
gtgagcaggcgtggagtaaagggacttgagcgagccagttgccggattattctatattcccctccctctctcccgccccgaaataatctattatcagcccattactcccaccctcgctcgcgtagccaatggcgagagccgtcggcggcactcagtcccattccatctcctccgtcgtccttcaggagaccgagccgatacgcagcccggcgagagggggagcccaggagcctgccccgccctggggacgaagagctagcagatcctcctgtgcggtgcacgatctgattttctggagcagatgtgaagaagaatggggtaatgtcttaggccaccacgctgatcatgctgctttccctggcagctttcagttgtcatcagtgtggttatcttacctcatcctggctcttctctctgtcaccatcagacttcaggatctacaagtccgtcatccaagcctgacagaagtcagaagaaggcatccattcaaagcctacctggacgtaacattacgtctgtcctcagaagcttttccataacttacctgacatgctgccatggtgcacatccaatagggcccttgcaactcatcattacgctcttactggtagaaaatctggttgactccttgaagatggatgtttcatgtggagatgacaattatggggtgcccacacatcccttctaatcttgtgaatgacattacatagccgatggcacaaagacaaca

SEQ ID NO: 606530 - DNA, 506 bp, Homo sapiens
tcatcagcagagtacagcacatgcgcactgatcgttgtcgcggccagccaacccttccttgctgaagcatgaacacgacttcagctgaaaaagtggagaaggttgtcagcccgccgcgagaaatccgtagtgataagaagcttccaagcggggtctaggctaggactttttatgaagaacgctatagcaccgccaatgatgaagcccccgatcaggtttaccagcagcgtgccgattggaagatttgggaacaggctgttgagtttgagtgcgagaagccagcgtgcgacacagccaacagatccaccgatgattaccgcgagaagagagctatacatagtgtcagtccatttcctgaagggataattggaaagacacgcacgagcctacgtccctttccagggttcgtaggcatcattagccagaggcggttgaggaggaatgccatctccttgcatgtagcttagcagtcggcttcggggattttcaacgccccaacgattggg

SEQ ID NO: 606531 - DNA, 863 bp, Homo sapiens
  misc_feature (37)..(37): n is a, c, g, or t
  misc_feature (61)..(61): n is a, c, g, or t
  misc_feature (80)..(80): n is a, c, g, or t
  misc_feature (84)..(84): n is a, c, g, or t
  misc_feature (86)..(86): n is a, c, g, or t
  misc_feature (95)..(96): n is a, c, g, or t
  misc_feature (99)..(100): n is a, c, g, or t
  misc_feature (105)..(105): n is a, c, g, or t
  misc_feature (112)..(112): n is a, c, g, or t
  misc_feature (124)..(124): n is a, c, g, or t
  misc_feature (130)..(130): n is a, c, g, or t
  misc_feature (136)..(136): n is a, c, g, or t
  misc_feature (142)..(142): n is a, c, g, or t
  misc_feature (203)..(203): n is a, c, g, or t
  misc_feature (209)..(209): n is a, c, g, or t
  misc_feature (214)..(214): n is a, c, g, or t
  misc_feature (219)..(220): n is a, c, g, or t
  misc_feature (323)..(323): n is a, c, g, or t
  misc_feature (363)..(363): n is a, c, g, or t
  misc_feature (365)..(365): n is a, c, g, or t
  misc_feature (392)..(392): n is a, c, g, or t
  misc_feature (394)..(394): n is a, c, g, or t
  misc_feature (398)..(398): n is a, c, g, or t
  misc_feature (557)..(557): n is a, c, g, or t
  misc_feature (669)..(669): n is a, c, g, or t
  misc_feature (756)..(756): n is a, c, g, or t
  misc_feature (770)..(770): n is a, c, g, or t
  misc_feature (773)..(773): n is a, c, g, or t
  misc_feature (777)..(777): n is a, c, g, or t
  misc_feature (826)..(826): n is a, c, g, or t
ttgaacacctactttgtgctaggctttgttgtaagtnctggggacacacaaaaaaaaaacncaatcctgccctcgagganctcncngtctagccnnggnnacacntaggttnacattgattttnaaattntaaaanttattnaacaactttataaacttcatttgcaatcaaacaaactttgggtgttatgaatggatggtanaccggnctgcngtccnntgccgtgaaaaaccatctgcttcgatatcatgtgacttctgcgaaggcagtgatgtggttctgtacagatgttaccttttccaaaggactttctactcgaggnatgctgatcattggcatctgtgccagattatccatgtgtntntgctcattttctgcttgtctccctttnanattnttcaccacgcacacaaccagaaatactgctatagatattccaaccagaaagcctgctataacatctgaccaatgatttcgatattctgctactctgttgagtccagtaagaaatgccaaacacattaagcccaagcatagaactggcttagcaagtctngttcccttggctttgtttgtgttggtgatgtacatggtcagatacatagctgcatacacactgagagctgcttctttggatggaaaggtttttcgggctctcatgatgaganctgggttgccagtacaggcctcttccccactgatgaattgtgtatactgctgacatccaagtgctgtataattgggctacacagggnaaggaatgtggggncanattnctgtgactacttgtccagcatttacaaagatatctgtagcaaacagtcnaatgtataattccaagaatcggacagtcggcgcacag

SEQ ID NO: 606532 - DNA, 638 bp, Homo sapiens
cgtgacgcgctgtgctgcattgcgggtccccattgccagaagctggaggctgtaatggttccattgcctgtgccctgcctggccgggtcggagcaacctgtgccgatgatgaatgagcccctgccatgcccaacccctgccatgggttgcggctgccctgccgtgtgctgcccgagggtggtgctcagtgcgagtgccccctgggtgcgtgagggcccttctgccagacgcctcggtgcagtgacggctctggtgcccttcctggctagacttcaacggcttctcccacctggagctgagaggcctgcacacctttgcactggaacactgggggatgaagatggcgctggagagtcggagtaccttggctacagaggcccacagcggcacctggtactaaaaagtgggcagaatgaccggactggcacaggggagacacacgatgtcactggcactgcgggactacacgacactgaaagttcagctaaacgacctgtgacaagagggcagcggtcatcaggagcagagaagacagtaaaacctgagagcctgtaccagtatatacagtggagagagaacgggcgtaaggatgcactgagtgtggccaacggcccacgagtgtcggagggagtccccgg

SEQ ID NO: 606533 - DNA, 561 bp, Homo sapiens
cagtgacagcagctatactttccaactttagaataaccctccctccacagctacacaaaagcacacaagctgcaaccctcctgatgtccacttgcacaaaccaacctcagggcttctatggtgcagtcattattttttaaccatttacatgtggactggtataaatcttacgttcctatcttttttcccattgtgtcgctgatgaaggttctgagtattgtgtccctgttttctgcacaagccctgtggtgtttattcatcatgctgtaaggcacggtgatttttttagaaacacacgggttgcatcatagcaggactcagtgcattgactttttatttagatatattgctggactcggtaagatttaattaagatgtccatgtctagctcgtgtatatgtaaaaagtagaggctcctctttaaaggctttactccccgtctaattaggaataatactaacttctcttagaagcataatttattcaaagacctgtgctaacattcttaaatatctgctggccgtaatgaggaaatcaaagtactttatgttcttagctcgc

SEQ ID NO: 606534 - DNA, 312 bp, Homo sapiens
gacacaacctagggtcagtttcgcaggtttaagccatttaccaagatagttgtaggtaaagaagggcagatttattagagaaattgtgaaaatatgttgcagtgggcagctcagcagagaaggggctacctgcaaagaggcaagggctggaggaaagttttatagagtcctgctgaagggtgctacgtgtggaatgaggtcattgtgcccgcaggttgtttgtgattagctgtctctaacaattgttcatacaataattgttcattattgttctcaacttggggctctccccaacctggggacccttcctta

SEQ ID NO: 606535 - DNA, 488 bp, Homo sapiens
  misc_feature (11)..(11): n is a, c, g, or t
agagaatactnttttgcctgacaagcaacagccctcttccccacaaagcaggacagttccttataactaagagtaagttcacttacacatgattaagaaggaagaaagaaatattataaaggagagaggaggcggagtttttcaagatcgacctaaagattaactttcaggtcagcacgagtgaagcgtggtatcttgagcttgaagggctctgaattcaggaaaggaatgagtactttttccagagaacactggagcttgtggagttccattgatgcattggattaacactgcatggctaggatcaagaatcctgaaccacattggttgacagtaactgcaggccccatgtgaattgtgctggcaatcaggctctgccagctacaagtgtcaatatcattcagagagtgtctatatatatgagttgccgccatatcattcgtctatatattcccttcccctccaggaggctcggtcaccatgcacac

SEQ ID NO: 606536 - DNA, 392 bp, Homo sapiens
ttagcaatcgagctcggtaccggtgtttcccttggtctgttttaggggtaggttttttttttcatagtctatctctgtcacccaggctgaatgcagtggcagaatctgggtcacggcaacctccacctcccaggttcaagcaattctccggcctcagcctcccaagtagctgggactacaggagcccgccaccacgcccagctaattttttttttttttttttaagtagagagggggttccagggtgtaagccgggagtgtctcgatctccgtgacctcttgatccgccgtgcttgggcctcccaagggtgcgtgggataacaaggtggtgagctagggcgccggcccacccatttcctctttccagaggggaggcaggagacaaggggaac

SEQ ID NO: 606537 - DNA, 910 bp, Homo sapiens
agcggggggacgccagaggtagcagctaccagcagcaatggcagtgactggcgtatgtgcgtgcgcggacgtaggcttggctgtgtgggtgcgtgaggaccatagcaagcccgaggctatcggctcggatcagtccgacgaatagtctgaccgggagcgcgggctccatccgggaagcctggtggggccattcgccaaagagcagagcagcgctgaacgaggaacgactactttccgcgtgaggctcagcggtgtcccaacgtaccagaccctgggatactaacccaataggaccttaccaatacctataaaactagccacattctgcaccacaccccgtatccctaacactaggtagcactatggtgtacgctccccattaccacacctaaccaggaagcataccctggcgcccactaagtacgcgacgtacataacaccttgacacacacatatgagttgctccctgtacacagctcatgcaacacctgtactacgggggcaccatcgccaggagttaagccgcactagacagccaaatacatagcttcatccatgaagcacccccccctaagaccacctggtttataccataacaccgcactcacaacaaacatacacaaacacaacaaactcacccaacgggccgttcaacacattaccatacactataacactacatctaaaaccaaatccatagctcccgcagtacggtatggtccagctcatcttggtttccaccttcagcagggtctcacgatcagctcagatacagacacactcgtcgccacgaatgaaattttccttgccgggtcgcacagaggactgaggcatcctagctcagttccccggaacccgggaccgcagaaacagatagcctggcaggtcactgcaagtgacacttaggcac

SEQ ID NO: 606538 - DNA, 267 bp, Homo sapiens
ttcatcgatagtagtatccgcgcgtaatatcttcagggaccagacactgtgtcacctggagtgaaccgatccttgattagctgtgggaccatcagtgcggggatcttgagtacaccatgaagacaagttgagcatacggcttccacatgtgggccatgccagagcaatactccacaagcacactttgggaaaatagcagtaaaagctgatctttggggtaaagcacaaattcacgatcactggcacaggcattcatttgggcatagc

SEQ ID NO: 606539 - DNA, 606 bp, Homo sapiens
tcaatgaacacttgagtagatttttattcaaagaagataatataaatggtaatactaaaaaaaaaaaaaaaaaaaaaaaaaaaaaaaaaaaaaaaaaaaaaaaaaaaaaaaaaaggggggggcccaaaaatacccccggggggggccaatggcccccccatgtttttttgatcaaagggggcgccccctaaaagagaggagggcgactatatataaaaaagccagagcgagagagcggggcgcgcggttaaaaccacagcccgtgggtgaggggaaacaacggtgcgcacggtgggagccaagttgtgggggaggagaggaccccccaacttctctgggggggggggtgccaaccaatatgtgtggcgcacaacaactctacccctcaacaggagaattattaaaaccgcgcccacgggggagggaaaaaaaataaatacacatttcagacggcgcgttattatgtgtggtgtggtcaaaaccaaccagcagggtaactatagttgtagtgggcgcagaagagaaaatatggtcggctcaccagagaggagattgttacttagtgcagaacatattttctccgcggggggtgtagaaaaaaaagga

SEQ ID NO: 606540 - DNA, 1414 bp, Homo sapiens
tctaccaagcccttataatattcacttaaaacagtatgaggcaacaagcaatacataaaactggcatttttaactgttacgaaaaagattttggttagtgttaatctggctttgattataccatattttctaaaatctacttctggcgaataacatctgctattacccactctgggtcccacatgtacgattaaatacaagctcagaagtggcaggtgtggacaggagtggctaacaattaacacttaccagtggggcaaaaggaaccaaacatttacacggagttgccgacatatgcaagcctcactacatagcgtttcacacactttacattaacagcgttgacacccataagtactaggtatatcacgttaaccgggccaaacattggcatcaaccgaccagttagagatctagtgtccacacactgttcattcgcgctagtaagagttacacaatttgggtgtgaaccaacgaacctacatcttctttgtgcccagagagaaccagcaaccttaacaccgtggttgcccactaaataccattcacatgtccacaattatcccaacggcttccacgacgtacgttgttggcacaattatgagccccagtgagaaaagcgccacaaaacgagggaacatcagatccacgcggacaaaactcgggaggaggcccagccggagaccacacacacgtggcgaacgccaaccatatgcggcccagaacaaacccactacaaaaaaacgcagggataaagcaatcaacctacggacaacactataacgaatgcgcggaacacaacaagcgggtccggcccaaaacaacacaatctactgagacaaaacaaaaacgtcgccagactatacagcacgttaaacacacgaacaacagttaagcctcaaccaacggtggcaccccccaaaatacagagcaaccgacaagtggtcacatacaaacaccaagacaaaccgtcaccggggcatacgaacaagcgagcacagagcacaaccaagcgccctacaccactgcacgcaccacgcagatgatgtaaccgaccacagaacacacaggaaaagagcacaccctcccaggaaacgattatacaccaaaaaagaagaccaacaacaaaaaggccttttacggcagtaatacggagaaataggcaacgtcgacactgaagctcaaagccacaaaacgcggcacaaccacgcagacacaacccatcatgagccaaagcagagcacaccatcagaccgtagctaaagatataacattagcacgcaacaacacgccccgagaccaaccaccacacacgacaacacacacaagaagcacgaaaaacccggagaagcaccggaacacgaacgacgcggagtcagcgcacacaccaacagcagagacgctaagccacacc

SEQ ID NO: 606541 - DNA, 263 bp, Homo sapiens
tttttttacattgcctgaatttgaagtttattgtagaactagagacccgaaacagcatggtactggtataaaaacagacacatagaccaatgtaacagtagagaattcagaaatgaatccacacatctgcaatgaactcatttttgacaaagctgccaagaacatacattggggaaagaacagtcttttcaataaatggtgctgggaaaactagatgtctatatgcagaataatgaactagacccctatctctcaccatataa

SEQ ID NO: 606542 - DNA, 848 bp, Homo sapiens
cgggagtactgcgacgcggcctggagtcggccttgtaggggcgaatggtgcatgggagatctgcggctgggcgcagtcttgagcgccggagcgcgtcctgcccttagcggggcttgccccagtctgcaggggcacatccagcgcgctgtggctgacagcagcctgctgcgcgccggtgagtctgcggtggtctgcggcagcacgcacctgcgctggtgcgaccagctgcaaggtcccctgcccgtgctggtgcgggcagcaaggtgcctggggagagtggtgcgggtgcaaggctggggggccccccaaaaggggccacccttctttgccccagtgctggacttgccagcttggacaaatgtctacaggacgaggcccacggttactacctgtgcaggaagctgaaacaaagacaatcttgggagtgtgcccgagacgttaccagaaacctgtctccagtggggctcttggcgcctatggctctgtgtgtgcttgcttattggacacaaaacaacgggggattaccgtgtggcaccttgaaacgaaagcgtctccaagaacccattttcaggtccactcatttcatgcgcaaaaggaaccctacgcagagaacctgcgggttacttaaaccatattgaacacaatgaaaaatggtgaatggggtcatggtagggaacggttataatacacccttgcaagggctctcctgggagggaaatcccaaggatggtggtatctgggctgaaccatcatcatgggggggcagaatcatgaacacaaacattggtcgaaatggtcacgaaagcttaaccagaatgaaacaggtaccaggtaccttattctacaca

SEQ ID NO: 606543 - DNA, 138 bp, Homo sapiens
agttgcatcgtagagttataggtgctcgccggagtgtaagttatgcaaggatgggcattttgggggaaaaatactaatcctaaaatcggttacctccggggtctttcagatgtcataaagcagtttgactaaacgggg

SEQ ID NO: 606544 - DNA, 375 bp, Homo sapiens
ggctataaatatttttaaataacagttgtattgagatataattcacagaccataaaattcacccaactaaagtatacattttaaaagtttttaggccgggcacggtggcttacgcctgtaattccaacactttgggaggctgaggcaggcagatcacctgaggtcaggagttcgagaccatcctggccaacatggtgaagcccctctctactaaaaatgcaaaaactagccgggcatggtggcgcacacctgtaatcctagctactcgggaggctgaggcaggagaattgcttgaacccaggaggcggaggtagtggtgagcaaagatcgtaccgctgcactccagcctgggtgatagagcaagaccctatctca

SEQ ID NO: 606545 - DNA, 303 bp, Homo sapiens
cagaggatcgccagtatctgtgtcccatcagcataataaataaaagtcataggttcaacaacagggtttaaagaaaaatgtcttcagctttaatgcaagaacttcaggtttctttttcttccttttgttgggaaattattttcctgagcctttggtttaacggtatattgtaaactttgatgttaaagaaaaaatatacatttacaaatggtgagattttaatgagaaattttctacgatgtatacgggcttatttttaaaattaaaacggggtttccgtcggcactgatgggagaagactgg

SEQ ID NO: 606546 - DNA, 812 bp, Homo sapiens
tactgctggacgcgctgggtctgcaatgcctccgtgagcgcactgtcggacagtcggctccctcgttgaccgaatcaccgacctctctccccagctgtatttccaaaatgtcgctttctaaccaagcttgactgcatggaccacagcttggcacgttcaacatcgggacagctgcggtcgttcatcgcagcatgtccgcacttcacatgttcctcatgcacatgacaccaacccagcataaccaacaccacacccagcagtgattacaggcttgctgtcccaatgcatcaaattctgcttgtgcacaatggatgccaatgtcggtagtccttatgcagccacctagtgccgtgacttgatggtgtgcccatgcctgacacagtactccttagagccagttgctgtagaactcacaatctctgctgggccaggatgttctgttctatgacaggactgtgtaggcccagcaagtggcagaacagcctgtgccaacccagctgctgggtctgtcatcctgtctggctgcaacctccgcttttcatgtggagtgaagtcacgtggacaggtgaccacagatgcttcttgcgaccaatggttaacatgccgtacccagtcaacatagaagctctccgagcttctcttctccaaagccttactgggcactagtctattctcacttatttcactttgggcacctgatttcacagagcccatcctgcttcactggttagtcagtcaatatgactccaccatggtcctgttgcgcacacccactgccccacagatatgtacatactttcgccaatgtcctt

SEQ ID NO: 606547 - DNA, 366 bp, Homo sapiens
gactctagaggacccccacaccacctagtcaaggaacaatggcacaaaagtcagagaggttagcagcagttagagtgatgctacagagtgaagttcaagcatttggcacagtgtggatgacctcgggccccatttaacagagaaagaatttcatgcagtctagcagtgacacactttgaaagctcttaagaagggagcaggccgtggccggcatatgcactttagcaaaggccacgttggctatcatagggagcacagggatccagagctaggaccacagactgggacttgggagtccaagagaggacggtgctgctagtaattagaaggggaaagtgaaactacactaagggcaaggggttttgc

SEQ ID NO: 606548 - DNA, 379 bp, Homo sapiens
cacgaggtcagaaggcacaggaggtggttgctgtagcaatcatcttttattttatttatttgagacggagtctcgctctgtcgcccaggccggagtgcagtggcaggatctcagctcctgacctcatggtccgcctgcctcgccctcccaaagtggtgggattacagggattaccgtgcctgggcagcagtcatcttttacaatgaacaaatagggctgggcgcggtggctcacatctgtaatcctagcactttgggagatgggcggatcacgaggtcaggagaccagcctggccagcatggtgaaacctcgtctctactaaaaatacaaagattggctgggtgtggtgatgcacgcctgtagtcctagctactcggga

SEQ ID NO: 606549 - DNA, 378 bp, Homo sapiens
taggacttggcctgggagagccagagtttcggaattttcttaactatcctttaaaaaaaaagtccactgtgtagagaacatatatgcataaccataggtcaataatatgtctccataagaaacactaatattgggaaaacatgtccaagacctatttccaaaaataatttagggtgaaatctctaatatttatacaagtagcaacaataaatgcttaataaacagtatatagggccataccagacctggatgcagatgatacagactcctttattacataatcaggtaagtgtaagaaatggccattggacacaatccatttggtacctgacccttatgaaatatatgtataccagggtagaaccgacgggggaccct

SEQ ID NO: 606550 - DNA, 140 bp, Homo sapiens
agcacagtcactctacattcccaaccatgcctactcagtatccactccataccacagcccttggccagccatctgcacccacttttgcttgtagtcatggccagggcaaatagctatgcagagcagagatgccttcacct

SEQ ID NO: 606551 - DNA, 258 bp, Homo sapiens
gtcagcatctgtcactataattgtcggcgaaatcaatgtatgcgtatgtcctgtatatgtctgaaattagtgctaaagctggaaactgtgtttagctgtctcagctcaattcttagaaggatatgtcagagccaacaatgcagaattatctttactctttaaatggttcttcacccactttggtttgcctttttgttttgttgtgtctgtttttcgtgggaaacaaaggggcgggggactcttaaagacgaccagccg

SEQ ID NO: 606552 - DNA, 682 bp, Homo sapiens
ccgaaagatccggaggcctcctgccgccgtcgggcagggaggccggcggaggcggggccgtggccgccccgagaggcgcccaggcggcggaggaggcggccagcttcttctttcctcgcacagcagggggcccctgctcgagtcccgcgtcgttcatggcgcgcggttcccgagattgctgcagcatgcaggaggaggaccgagcaagtcatccagggtgccctttgccctctgtaagtccattaaatcttttgaagaggcagcttgtgctggtagagtcgccaacgtgaaatggggaccaaaagtgagtattatagaagactggtgggcaggagcccaacaagcgtgcagggttggtcctgcagccaggtgtctgatgtgccccaggcctgggaagctgatgaatagctgagatctgtatctgtggacctgaatgtcgatccctcgcttcggaattgacatacctgagtgcgctcagtgagagagacaaagtcaaatttacaggtggacacaaagaacaacactgcccacgtattcacagcccagaagtttgcttgttacaaggggaacatgacgaatttgtgtggctaacatgacactctatttgaaacaccagactatgctgcggctatattccacctgctcctagaagccgaattgatggtcctcagagaagatggaa

SEQ ID NO: 606553 - DNA, 506 bp, Homo sapiens
tacaagtagactcagtggacccacgcatcgctaaacgtcttaaccaatgccttcctgctgcggtcacgccctcatccaacaccttacatgttccgcctggacaatcggtatcagcccatggaaccccacccccgtgtccccctcagcagggtcttttttgcctcctggagggtcgtgctgcaatgtggcattgactccatcctccgtggcctcattggcctcctttgccaagctgaatctgtcagaaccacatcgccgtggatgacatccggtaccgattgtgtgagcgggttatgaggcttaggcctggacctgtctgccctgaacatgctgcaccgagggaccacgggctcccaggatacaatgcctggaggcgcttcttgtggcctcccggagccctgaaactgtgggccagctgtgcacgggctggggaacctgaacttggctagaaaactgatggagcagtatggcacgcctaacaacatcgacctctggattggcggcgt

SEQ ID NO: 606554 - DNA, 179 bp, Homo sapiens
cgtttgtggatgcacagcctgtatacaacgtcagtgctggggtgttgaaggtctcaatacatatctgggtcatcttctcgcggttggccttggggttcagtgggagcctcgagtcagtcagcacgagggtgctcactcgggagacaacacgacagctcaattgctcaaacgccttctga

SEQ ID NO: 606555 - DNA, 413 bp, Homo sapiens
gtggactctgagggctaccgataccggcactgatgcggaaggggcgcggagggcagatggccgcggtaggccgtagttgctaacatggctcatagcatagacggcggatacctgttcgccgagcccatcgagcttgacaacccctttgaggacccacatgcgatccatcaccgactcagccggcagtatgccacgctcgacgactacaaccctttcgagacccggtagccaacaccagcctatgagcctccagccgctggccgattggcttcaccctcagctcactccttgcagccctcgagaaagctcagccccacagaacctaagaactatggcttatacagcactcaagcctcagttgcagcagtcacagctgagctgctgaagcaggaggagctcaatcggggcagagg

SEQ ID NO: 606556 - DNA, 175 bp, Homo sapiens
ggtagtgaggaattccttaagactcagtgttatgtttcctagggctgacataagaaagcaccacaaaccgggtggcttaaaacaagcagaaatgtattacattacagttctggaggctggaagtccaaaattggtgtcagtagggtcatgctctcctgaaggctctgtaggagga

SEQ ID NO: 606557 - DNA, 115 bp, Homo sapiens
cagctttttgtttttttaaaaaagctaaaatggaaatggattttatcataaaggaggacatcgtttttttctccaattaaaacatgttcattgtataaaaccccaaaagcggcta

SEQ ID NO: 606558 - DNA, 497 bp, Homo sapiens
ggcacaggacctcaaagatttggagcatcaccccactctactggttaccaattgctgtatgggtccattttcatgctgctgataaagacatacctgagactgggcaattacaaaagaaagctttattgggacttacagttccatgtagctggggaggcctcacaatcatggcggaaggtgaaaggcacgtctcacatggcagccgcaagagagagtgagagccaaatgaaatgggtttcccctttatcaaaccatcagatctcgtgagacttatgcgctgtcatgagaacagcaagggaaggacttgtccccatgattcaattacctgccactgggtccctctcacaacacatgggaattcaagatgagattggggtggggacacagccaaaccatatcaaaggtagtatatccttctggtttggattggtatttccctgatgatgttgagcatcttctcatgtgcttattgaccatttatatgtatcttttgaaga

SEQ ID NO: 606559 - DNA, 104 bp, Homo sapiens
atggagagccaggggagaacaaatatttgtccatgggaaccagtaatcatgctctaaaggaccaatttccattcgcaatcccattccatattcctatttcatgc

SEQ ID NO: 606560 - DNA, 179 bp, Homo sapiens
acatgctaagattcacacagtccaagcgcctactatactcactgatccaatacactgaccaacggggcgggttaccctagggataacagcgctatcctattctagagtccatatcaaccatagggtttacgacctcgatgtaggatcaggacatcccaatggagcagccggcaaagaca

SEQ ID NO: 606561 - DNA, 207 bp, Homo sapiens
tgcgtgtcggtacctgcatacctcggcgtatgcaggggtttgatcatgactctctggaaccacaatctcctgggctcaagcgaccctccgacctcagcttcctgagtagctggaactagagctgcacaaacaccatgtcgtagctaaatttttatggttgccagttgtttgttttaatgtttggtagagcacgaggtcttgactatg

SEQ ID NO: 606562 - DNA, 1058 bp, Homo sapiens
ggggctccgtgttcctactggacatccagccgcttgtgtgtctgcctactagggtctcatggggttatctataggcatagcggtgtggcgcgtgcgcacggtcagcgctgatcttgcggaactgcaacatctgggcgggaaggcaggagtgtttgtcctcacctaggtccatgggcacaggcctcgcatagggaccacggcacttctcttcccagcacttccctgccactcactccctgtgtaagtatcatgcacttcaaaaatgtacgcaggtgacaaaggaggctaaaccaagaagttcctgaactatgatttacacaaatcgctcactgtccaccaggtaaattgaagaccccttatacaacttctgaatctcttacttctatatttcatgtcctaccatatctacttcagcgggccaacactatggcacagtgaacggagaacgagcacagacgttcgagttcaaagccctaaggacaattcagcctgatcacttaaccagtctctgacttcaagggcactaacgtactacctacctaccaatacttggaccatcactatactggatcactttcctctaatcagattgcacactataccatacacttatctccatcacctggttcacaacctgtacaccaatttatctactccctcacatgttcactggataggtacctggcccttaaccgaccggtcacgcgcttaatcaacgggatcacagtgcggtcctctggtactctaccgagagtcccacagacgcactgaccctcacgctcggctttggcggctccaatcacatactccgttgtaacgtgtgtttgtccattggcaacctatatttgcaagacggtgatatttggcatggcaggacaaccactacacatctggccaatccgcgtcactcgcatgtgcaccgacaggcgcctactcgccccaacgtgcgctatcaacagcgcaatctaaacacgaacaatattcaacgcagtctcaccaccgcaggcgcgcatactaccaacgtccagcacatgtcagatctaaccacacgcctccag

SEQ ID NO: 606563 - DNA, 120 bp, Homo sapiens
cacccagcatcttcagctgacgaacaatcagaattggtttggtatagaatggggtctcctcctccggcggggatcaagaaggtggtgttgaggttgcggtctgttagtagtatatgctga

SEQ ID NO: 606564 - DNA, 210 bp, Homo sapiens
tgggtggaatcgccatccattccaggatttcacttcgagagaatcaggagaggcttccttaggagttcccgtcgtggtgcagtggttaatgaatccgagtaggaactatgaggttgcgggttcgattccaggccttgtcaagtgggttaaggatccggcgttgccatgagctgtggtgtaggttgcagacgtggctcagatcccgcgttg

SEQ ID NO: 606565 - DNA, 739 bp, Homo sapiens
aactaacgacagctatggattatttgcggttgtgatgcatagtggcattacaattagtactgggcattacactgcttctgttaaagtcactgaccttaacagtttagaactagataaaggaaattttgtggttgaccgaacatgtgtgaacataggataagccagaaccattgaatgaggagcgaagcaaggggtgtggttgagaattataatgatgcaagaacgatgtcaattagagttggtggcaagatacacagccaagtaaagtttcgaacaaaacaaatgtccaagctattggacttcttggaggacaaacagagcaagagcagagttatgagctatacaacaaagcctctaatcctgataacggttgctagtacagcgttcgctgaaattagaacattctgagactagtgatactactgggacccatgaattctgataggaaacaaggaagtccagtgaccaatactaggcattaatgattgagtcggagttctgatgaagcaaagatttcatacgtagtgcaaagcttagaggagtatgaggggaagtggtttgcttttccgatgattctgaatgtcaagagttcctgaatgagaaggactcgtctgaacttctctgttccccttctagcatcttcctacattctacctccttgacttgcttattttataagacattaatacgagtgagtgtatttgccttgggtatatatctaaacaatgcatacaacttg

SEQ ID NO: 606566 - DNA, 254 bp, Homo sapiens
tgattctagaggatcccttcggggtggtgatccccagacattatcgggggatgctgaagaagacaactcaggaggctgagaggatcctgctccgaacacagacaccattcactccaaaaaattggttccttgctatgctctctgtggtacatggcaacttacgcaaggatgtaaagccagaaaacaagcagtaactgctatgcctgacaaaactgtggctgcacacatctgtactcgtcaatcaacaaacccgg

SEQ ID NO: 606567 - DNA, 675 bp, Homo sapiens
agcgggccccagtcactgagccgccgccgaggattcagcagcctcccccttgagccccctcgcttcccgacgttccgttcccccctgcccgccttctcccgccaccgccgccgccgccttccgcaggccgtttccaccgaggaaaaggaatcgtatcgtatgtccgctatccagaacctccactctttcgacccctttgctgatgcaagtaagggtgatgacctgcttcctgctggcactgaggattatatccatataagaattcaacagagaaacggcaggaagacccttactactgtccaagggatcgctgatgattacgataaaaagaaactagtgaaggcgtttaagaaaaagtttgcctgcaatggtactgtaattgagcatccggaatatggagaagtaattcagctacagggtgaccaacgcaagaacatatgccagttcctcgtagagattggactggctaaggacgatcagctgaaggttcatgggttttaagtgcttgtggctcactgaagcttaagtgaggatttccttgcaatgagtagaatttcccttctctcccttgtcacaggtttaaaaacctcacagcttgtataatgtaaccatttggggtccgcttttaacttggactagtgtaactccttcatgcaataaactgaaaagagccat

SEQ ID NO: 606568 - DNA, 951 bp, Homo sapiens
caggagctcagctggcaggcaagtgacccagcaggagctgcatttgctgactgacaaatgggtggcggctgaggtccacccccaccctcaaggagggaaggcaagagacgtgtgttcccacccgaggacagcagcaggacctctcttccgggcacaggatgaagcaggacaatctgacttgaggaaacaaaacaaagtcacagccaaggatggtctggctcctgccctccaggctccagaggccgctcctgaagctgccgggactcctgcaggcacccctacaaggctggggtgcttcacagcctggggtctgcgggggcagcctccctcggcaaaccccaactccaggctgcctttgggagcaaccggacggcacgcgctgcccagggtcagagctccctacccacccctcctgtgactctgagcggccgacccagcctaatggccacagtcctgaggctggcaggggcagggagggccaccacttcggtaccttccccaggtactgctccttggggacaggtgacaggggccacagcctattccctcggcacccaggaccctgcctctaagcaaataaaccaacaagcatccacatttgcctccaggccacaggacccttcgggaccaggccagctctgttcaccagctgcgttctggaggcagatggccacagccctcttgggtggcaagggttaaaccacacagtggtaaggaccccgcacacaggcgctggccggcacacacgccttcagggtggcggcagcaaggcagcaacaccagcaccggccttggtccccaacgctgacccagcagacagaagaactcgcctctctgcctagggatgaacggcatccagccaggactcatttcccaggaacagccgggttggcctggcactccagaactttggtgcttgcctgtgccctctgtcccggcctgcccgaaacg

SEQ ID NO: 606569 - DNA, 122 bp, Homo sapiens
ggggacgttgtcacgggtttagggtcggggacagagcggtgaccctggccaggatggcattgtctcctgtacccagcccctaggatgggtgggcgttactgctgctgctctcagctgagcca

SEQ ID NO: 606570 - DNA, 159 bp, Homo sapiens
gcggccgcctactactactactgcttgaattcaagcttctaacgatgtacggggacatgtgaagtaacaaactggtttttggtttttttttccccttcagttttaatgttatgtgtaatgtatttaaacccttatttaaataaaacttgttttcagaaa

SEQ ID NO: 606571 - DNA, 1319 bp, Homo sapiens
agcgggccccagtcactgagccgccgccgaggattcagcagcctcccccttgagccccctcgcttcccgacgttccgttcccccctgcccgccttctcccgccaccgccgccgccgccttccgcaggccgtttccaccgaggaaaaggaatcgtatcgtatgtccgctatccagaacctccactctttcgacccctttgctgatgcaagtaagggtgatgacctgcttcctgctggcactgaggattatatccatataagaattcaacagagaaacggcaggaagacccttactactgtccaagggatcgctgatgattacgataaaaagaaactagtgaaggcgtttaagaaaaagtttgcctgcaatggtactgtaattgagcatccggaatatggagaagtaattcagctacagggtgaccaacgcaagaacatatgccagttcctcgtagagattggactggctaaggacgatcagctgaaggttcatgggttttaagtgcttgtggctcactgaagcttaagtgaggatttccttgcaatgagtagaatttcccttctctcccttgtcacaggtttaaaaacctcacagcttgtataatgtaaccatttggggtccgcttttaacttggactagtgtaactccttcatgcaataaactgaaaagagccatgctgtctagtcttgaagtccctcatttaaacagaggtcaagcaataggcgcctggcagtgtcaagcctgaaaccaagcaataccgtcatgtttcagccaagcccagagccctaagattacaaacaactatggccggaacctcctcagctctccctctgcagagttccctaccctaagagaatgttaccacctgaacagtcctcggtgaatctgagaggagaggatggggtaaggcagaagcaccagctgtactactagaagggagcttttggtggtagatcccctggtgtctccaacctgactaggtggacagagctcaaagaggccctcttaccgctagcgaggtgataggacatctggcttgccacaaaggtctgttcgaccagacatatcctagctaagggatgtccaaacatcagaatgtgaggccaaccttctatcagagttaaacttttgacaagggaacaaatctcaaactgatccatcagtcatgtagctagctgtagagcttgcaacttaatagcagcagctgcccaatgccatgtgaagtaacaaactggtttttggtttttttttccccttcagttttaatgttatgtgtaatgtatttaaacccttatttaaataaaacttgttttcagaaa

SEQ ID NO: 606572 - DNA, 1511 bp, Homo sapiens
gcaggcgtgagccatcactgcccagaccgagggtatctttctagtaccaatcagaacttagatgactgaggtgtaatggacaaatcctatgcacaaagtgagggtatctgacatatgtgggcgggagtcagctccattattaggctacttcatgcacgtaaagtcaaactaacagtagcttcaacaatcgacttctcaatcactgcagatatgggcactgctgagggctcatctgcggatgaccgaaccactgcacttacacgaacaagaacagattccgctcgtcgaccacagggcccgccaagtgaaaagcaacacgatgtgacactacaagcgctcgacgtgcaaaaacctcgagacctccccaggggttaccacacggacgcagaaacagtccccatgggactaggaacccaccctcacaacctcacgccgtcggggacacctaaccacgggcaaacccacggcccccaccccaacaagccccccacacctcacagcaccgacggcgaccacaccacagctcacgccgcaccgcgcctagacccacccacacgaaccagaccaccacacagaccacgaatcaccccacccgctatcgacgccccaaacacaggcccctcaccacaccaacctgtcacccgaccaccacccaaggaacacgggccaccggagaccccagcacaccacgcccacccggagcaccacacgccgccaagcccagccccaccaacccctggggcaccacaccacccccgctggcgccctacaacctcaaacacacaacgcgcagatctccagacctgcgcgccgtcccccacctgcccgcaacaccccgccccacccacacgaccacccacaccggccacgccagcccaccccaacatcccgacccacacaccacccaacaaccatcaccccccccaaccccccagacgcccaccaacagcaccccccagcagaccgacctccccacacccacccccgcgaccacaacacctacggaaacacactcgagcgcccccaccaaaacaacaaaaaacgccacacacgtcacacacaccgaacccacaccccgacaagcacacaccacacacaaccccgcacaaacaccacccccccgagcacacaacacaacccccaaccacccaccaacccacaccccccccgcaccacccccacacaaccagacaacccaagaccaacacaccaaacgcgcagaccaccaccccatcacaccacggcccccgcgccaccaccacccaacacacgacacctcaccccccgaccccacccgcccccggccccacacaccgagaaagaacacaacaacaccgaccccaccagcaacacccacaacactaccaccacaaacagcacccagccccacacgacctacccagccagccggccacaaacagacgcgcccaaacaacaacagaccgtcacaacaacaacaccacccaaaggcaccgcgacgaccaacccaaaacaccgcagaccataccccc

SEQ ID NO: 606573 - DNA, 2172 bp, Homo sapiens
agcgggccccagtcactgagccgccgccgaggattcagcagcctcccccttgagccccctcgcttcccgacgttccgttcccccctgcccgccttctcccgccaccgccgccgccgccttccgcaggccgtttccaccgaggaaaaggaatcgtatcgtatgtccgctatccagaacctccactctttcggtaagctatgggaaaggtcgcgggcccgggtggggcagcggggccttccgggcccggagacgtgttccgggaagttgccaagcgctccgggccttcgtaagctcgggcaggggaaacttgaccagggtcgcagggcagcgggatcaaggcctgggccccggggtcggaccctgagcgcgaccggaaggagcaggcggtaggtcagcccttgggcgggcccggcgtctcagtggcgcatttactaatggctcctgggcctcctcgggccacacccgcccctcccgtcaccattgcgtcacgtccgttacgtcaccacccgttgtcacggatccggagggaaaggcggtgccagccctaagtggcaagcgggtgcaccaatgggggtgggaggcttagccccgcctcgggagctcgggttccggcgggttgcatcagctgggtgcggcacgagtggcagcccggactcccccgacatgtgatcggcttcccagggagggcgggaggcccgggcgttccccgagcctggggaagctggccgtcccggactgacctgctcggggagagccagcaaaggacacattcggcctggcccaagccctgacgatttcagtgttgttttctgcacgcgcaaaacacctggggaccgaggggatggcagtggcatcctatctttgacagctctgaacgagcttaaccttttttttcagacccctttgctgatgcaagtaagggtgatgacctgcttcctgctggcactgaggattatatccatataagaattcaacagagaaacggcaggaagacccttactactgtccaagggatcgctgatgattacgataaaaagaaactagtgaaggcgtttaagaaagtaggtcttcagtgagattttgggaaagtcataatggatttgtccacaagggggtgccagctgtgttgtatgtattgttagcggaaggggtgataaatgcgttcatgctcttgctaggcctaattcgttttcctttgtgcttgcagaagtttgcctgcaatggtactgtaattgagcatccggaatatggagaagtaattcagctacagggtgaccaacgcaagaacatatgccagttcctcgtagagattggactggctaaggacgatcagctgaaggttcatgggttttaagtgcttgtggctcactgaagcttaagtgaggatttccttgcaatgagtagaatttcccttctctcccttgtcacaggtttaaaaacctcacagcttgtataatgtaaccatttggggtccgcttttaacttggactagtgtaactccttcatgcaataaactgaaaagagccatgctgtctagtcttgaagtccctcatttaaacagaggtcaagcaataggcgcctggcagtgtcaagcctgaaaccaagcaataccgtcatgtttcagccaagcccagagccctaagattacaaacaactatggccggaacctcctcagctctccctctgcagagttccctaccctaagagaatgttaccacctgaacagtcctcggtgaatctgagaggagaggatggggtaaggcagaagcaccagctgtactactagaagggagcttttggtggtagatcccctggtgtctccaacctgactaggtggacagagctcaaagaggccctcttaccgctagcgaggtgataggacatctggcttgccacaaaggtctgttcgaccagacatatcctagctaagggatgtccaaacatcagaatgtgaggccaaccttctatcagagttaaacttttgacaagggaacaaatctcaaactgatccatcagtcatgtagctagctgtagagcttgcaacttaatagcagcagctgcccaatgccatgtgaagtaacaaactggtttttggtttttttttccccttcagttttaatgttatgtgtaatgtatttaaacccttatttaaataaaacttgttttcagaaa

SEQ ID NO: 606574 - DNA, 90 bp, Homo sapiens
ggtcagccatcattactttatcatcatgatcaacaggaaagaccactgtcctcacccaatccccttctgtcgtcttctcaaaaccgtata

SEQ ID NO: 606575 - DNA, 275 bp, Homo sapiens
  misc_feature (20)..(20): n is a, c, g, or t
  misc_feature (74)..(76): n is a, c, g, or t
  misc_feature (95)..(95): n is a, c, g, or t
  misc_feature (97)..(97): n is a, c, g, or t
  misc_feature (104)..(104): n is a, c, g, or t
  misc_feature (106)..(106): n is a, c, g, or t
  misc_feature (111)..(111): n is a, c, g, or t
  misc_feature (113)..(114): n is a, c, g, or t
  misc_feature (120)..(120): n is a, c, g, or t
  misc_feature (152)..(152): n is a, c, g, or t
  misc_feature (191)..(191): n is a, c, g, or t
  misc_feature (209)..(209): n is a, c, g, or t
cttgctcctcagaaccagtngggaagaagagggaaggcaaagaaagaaactgagcatagtaaacacagcatttnnntgtaggctcttatttaacntngtgtgtntntctcntnntatgtntgtgctttctgagtaagtattgactgggaaangagaagaagtcatcaaagtatactgtgccattgcagcanaggctggcccagatttanacctcctgtgggtaatctaactgtgcagtagataggatcggccatatgacgaatgagatcaatagg

SEQ ID NO: 606576 - DNA, 1001 bp, Homo sapiens
  misc_feature (342)..(342): n is a, c, g, or t
  misc_feature (394)..(394): n is a, c, g, or t
  misc_feature (463)..(463): n is a, c, g, or t
  misc_feature (566)..(566): n is a, c, g, or t
  misc_feature (600)..(600): n is a, c, g, or t
  misc_feature (655)..(655): n is a, c, g, or t
  misc_feature (698)..(698): n is a, c, g, or t
  misc_feature (761)..(761): n is a, c, g, or t
  misc_feature (840)..(840): n is a, c, g, or t
  misc_feature (871)..(871): n is a, c, g, or t
  misc_feature (919)..(919): n is a, c, g, or t
ctgctcactatctcatatcactcctcaccttcgtgttagtatttggccgcggattttagcaatgcaccagtcctgcacatatcagatcagaatgaacagctttgtgtcagacttcggaagacctctggagccagattaggtcttatctcgccaaggcaaccacggagtccatgcctctcctttcactgctcactccatagaggcggaaccgctcggacaacagccaaattcttgccaccacaccacacacccccaactgagacctcccagattcagcacagacacccctgaccaccgggcacaacgacgtgagcaccataacctctgcttatcccagagccnacctcccccatctcttgtaggtcacgtcaacttcatgcttatttctgtgacncaatcctatccttctatttgtctctccattattcccctcccctccacaacacctccaaacccctccccnccacctacgcctcaccacacaccgacccctcacacccccacttccacccgcagccggccatcctcacctcttacatggattgtctgatctcatcaggatgctnacggagcgtgcttctccaacctttctccgtcgtnaagccacgacagataatctagggacggttgtatacgtagcccccacatcctcccncccacggcttgccctcagcgcccccccgcgttttatctgagtntatctagatatataccagagtagttgtgtgacgtttgatccccctccctcacctctcgttctntatcccgtgcatagacgtctgatacagtttctgcaagaatggacgagggatcaccgtccaccttctcatcgtccgcacnccaccttcacctcaccctcgatcagtcgcgntattcgacgtcaatcgtcctctccaccacacgtaccttccgcagcatncccagcgtacatacgcgccccgagacgcccgactacacgccttacatcctatcgcccgttacgtgtaagtaggtgctctcag

SEQ ID NO: 606577 - DNA, 819 bp, Homo sapiens
  misc_feature (777)..(777): n is a, c, g, or t
  misc_feature (779)..(780): n is a, c, g, or t
agcgggccccagtcactgagccgccgccgaggattcagcagcctcccccttgagccccctcgcttcccgacgttccgttcccccctgcccgccttctcccgccaccgccgccgccgccttccgcaggccgtttccaccgaggaaaaggaatcgtatcgtatgtccgctatccagaacctccactctttcgacccctttgctgatgcaagtaagggtgatgacctgcttcctgctggcactgaggattatatccatataagaattcaacagagaaacggcaggaagacccttactactgtccaagggatcgctgatgattacgataaaaagaaactagtgaaggcgtttaagaaaaagtttgcctgcaatggtactgtaattgagcatccggaatatggagaagtaattcagctacagggtgaccaacgcaagaacatatgccagttcctcgtagagattggactggctaaggacgatcagctgaaggttcatgggttttaagtgcttgtggctcactgaagcttaagtgaggatttccttgcaatgagtagaatttcccttctctcccttgtcacaggtttaaaaacctcacagcttgtataatgtaaccatttggggtccgcttttaacttggactagtgtaactccttcatgcaataaactgaaaagagccatgctgtctagtcttgaagtccctcatttaaacagaggtccagcaataggggctggagggtcagctgaaacaagatacgcatgttcagcaagccaaagctagantnnacatatgcggacttcatctctcggagtcctacctaaaag

SEQ ID NO: 606578 - DNA, 735 bp, Homo sapiens
  misc_feature (731)..(731): n is a, c, g, or t
agcgggccccagtcactgagccgccgccgaggattcagcagcctcccccttgagccccctcgcttcccgacgttccgttcccccctgcccgccttctcccgccaccgccgccgccgccttccgcaggccgtttccaccgaggaaaaggaatcgtatcgtatgtccgctatccagaacctccactctttcgacccctttgctgatgcaagtaagggtgatgacctgcttcctgctggcactgaggattatatccatataagaattcaacagagaaacggcaggaagacccttactactgtccaagggatcgctgatgattacgataaaaagaaactagtgaaggcgtttaagaaaaagtttgcctgcaatggtactgtaattgagcatccggaatatggagaagtaattcagctacagggtgaccaacgcaagaacatatgccagttcctcgtagagattggactggctaaggacgatcagctgaaggttcatgggttttaagtgcttgtggctcactgaagcttaagtgaggatttccttgcaatgagtagaatttcccttctctcccttgtcacaggtttaaaaacctcacagcttgtataatgtaaccatttggggtccgcttttaacttggactagtgtaactccttcatgcaataaactgaaaagagccataaaaaaaaaacaaaaaaaaaaaaaaaaaaaaaaaaaaaaaaaaaaaaaaaaaaagnaaga

SEQ ID NO: 606579 - DNA, 152 bp, Homo sapiens
  misc_feature (36)..(36): n is a, c, g, or t
  misc_feature (141)..(141): n is a, c, g, or t
gtccgcagctgctcccatcagtgatgcccacccagncacggaaacgacatggtttatatatgtggtgtcctggtattcggcatagatgcctccggtgtagttagccagtctttctgttgccattattccacagctgatggnacgcaagatgg

SEQ ID NO: 606580 - DNA, 746 bp, Homo sapiens
agcgggccccagtcactgagccgccgccgaggattcagcagcctcccccttgagccccctcgcttcccgacgttccgttcccccctgcccgccttctcccgccaccgccgccgccgccttccgcaggccgtttccaccgaggaaaaggaatcgtatcgtatgtccgctatccagaacctccactctttcgacccctttgctgatgcaagtaagggtgatgacctgcttcctgctggcactgaggattatatccatataagaattcaacagagaaacggcaggaagacccttactactgtccaagggatcgctgatgattacgataaaaagaaactagtgaaggcgtttaagaaaaagtttgcctgcaatggtactgtaattgagcatccggaatatggagaagtaattcagctacagggtgaccaacgcaagaacatatgccagttcctcgtagagattggactggctaaggacgatcagctgaaggttcatgggttttaagtgcttgtggctcactgaagcttaagtgaggatttccttgcaatgagtagaatttcccttctctcccttgtcacaggtttaaaaacctcacagcttgtataatgtaaccatttggggtccgcttttaacttggactagtgtaactccttcatgcaataaactgaaaagagccattaggcaacttatgatgcggccaattcagctcactggcaatcgccttaaggagcgatttctgccggcgttac

SEQ ID NO: 606581 - DNA, 562 bp, Homo sapiens
tcgtgccgaattcggcacgagcaccgaggaaaaggaatcgtatcgtatgtccgctatccagaacctccactctttcgacccctttgctgatgcaagtaagggtgatgacctgcttcctgctggcactgaggattatatccatataagaattcaacagagaaacggcaggaagacccttactactgtccaagggatcgctgatgattacgataaaaagaaactagtgaaggcgtttaagaaaaagtttgcctgcaatggtactgtaattgagcatccggaatatggagaagtaattcagctacagggtgaccaacgcaagaacatatgccagttcctcgtagagattggactggctaaggacgatcagctgaaggttcatgggttttaagtgcttgtggctcactgaagcttaagtgaggatttccttgcaatgagtagaatttcccttctctcccttgtcacaggtttaaaaacctcacagcttgtataatgtaaccatttggggtccgcttttaacttggactagtgtaactccttcatgcaataaactgaaaagagccat

SEQ ID NO: 606582 - DNA, 699 bp, Homo sapiens
ggagaaagggtggccagtggtcttccaaggctccatgcgcagggcagaaggaggaatataatcctatcccaccctcccattctccgtagtgtggctgccctgtggtgtatccctctcctcatccttttttgttttttttttggtttttggagaacggggtttcgctttggtcgcccaggctggaattgcagtgctgcgaatctcggttcacgtgaacctcgcgcctccgtggattcaaacgatattccgtgcctcagcttcccaagtaacctctcttcatctctatatccagcctcagactcttcccgcctgaggatggagcggggggacaccgcggggcgggagagaaggcctgagatgagagtgcagggccaacacaggctcctcagggagctgtcgccgggaggcccaggcaggggcatcagaactccatgcaggtccgtgacagccctcctctgaggctcgggtactccctctctgtgagccttccggtggatctcaacagttgaccaacacccaagtgtgaggcactattgcagagccatcgaacagtgtgacacttgggagccagacgtgctcctcagttagaatctcagctccaccttggctagttctgggaaccctggatgactgattaccttccatgtgtctggccttcctcatctactaaacgggttcctcctaagggtcatggatgaa

SEQ ID NO: 606583 - DNA, 585 bp, Homo sapiens
agcgggccccagtcactgagccgccgccgaggattcagcagcctcaccgaggaaaaggaatcgtatcgtatgtccgctatccagaacctccactctttcgacccctttgctgatgcaagtaagggtgatgacctgcttcctgctggcactgaggattatatccatataagaattcaacagagaaacggcaggaagacccttactactgtccaagggatcgctgatgattacgataaaaagaaactagtgaaggcgtttaagaaaaagtttgcctgcaatggtactgtaattgagcatccggaatatggagaagtaattcagctacagggtgaccaacgcaagaacatatgccagttcctcgtagagattggactggctaaggacgatcagctgaaggttcatgggttttaagtgcttgtggctcactgaagcttaagtgaggatttccttgcaatgagtagaatttcccttctctcccttgtcacaggtttaaaaacctcacagcttgtataatgtaaccatttggggtccgcttttaacttggactagtgtaactccttcatgcaataaactgaaaagagccat

SEQ ID NO: 606584 - DNA, 109 bp, Homo sapiens
  misc_feature (77)..(77): n is a, c, g, or t
  misc_feature (93)..(93): n is a, c, g, or t
  misc_feature (96)..(96): n is a, c, g, or t
gcctccattccggccgtgcacatcaaccaggccacgaatggcggcggcagcgccttcagcgactactcgtcctcagnccctccacccccagancanccagcgggagctg

SEQ ID NO: 606585 - DNA, 624 bp, Homo sapiens
  misc_feature (10)..(12): n is a, c, g, or t
  misc_feature (19)..(19): n is a, c, g, or t
  misc_feature (55)..(55): n is a, c, g, or t
  misc_feature (103)..(103): n is a, c, g, or t
  misc_feature (116)..(116): n is a, c, g, or t
cgagggattnnncagcctnccccttgagccctcgttccgacgtcgttcccctgcngcttttccgcacgcgctgcgcttcgcatggcgttcaccgagaaaggantcgttcgtatgtncgtatccagacctccctctttcgacccctttgctgatgcaagtaagggtgatgacctgcttcctgctggcactgaggattatatccatataagaattcaacagagaaacggcaggaagacccttactactgtccaagggatcgctgatgattacgataaaaagaaactagtgaaggcgtttaagaaaaagtttgcctgcaatggtactgtaattgagcatccggaatatggagaagtaattcagctacagggtgaccaacgcaagaacatatgccagttcctcgtagagattggactggctaaggacgatcagctgaaggttcatgggttttaagtgcttgtggctcactgaagcttaagtgaggatttccttgcaatgagtagaatttcccttctctcccttgtcacaggtttaaaaacctcacagcttgtataatgtaaccatttggggtccgcttttaacttggactagtgtaactccttcatgcaataaactgaaaagagccat

SEQ ID NO: 606586 - DNA, 1284 bp, Homo sapiens
tgagaccgtttccggcaatactgatttgcgagttatcgaaggggtgggactcgatactcacctatgtgtagtgcctaactattcgatcacacatgaagcagaaattctcaggaaaagtgttgaaccagaggccgccagatgcgatgccagtataatttgtcaaaaaaactataaaacaggtaagggtgtacggattatcgccaggagagacaatgagaacatccaaggtggataccgtgagaaatcactcggaggtggcattagtctatgcaataggcactctatagaaatttggagatttaatggagaagacgtgaaagagataatttaagggacatggctagatagttattgacacgcgttatcgagtatttttccgagtacacgcatccacattgagtacacaacaaaatgatacttaaagtgccagggcatagagtatatgttcgcgtgggcatagaaaatagataggcgacaacaaaaacttgttttaccagtggtagacacagtcgaatctcgtcctcaagatactgcatgtaccatcacaaagtgacactgcgcaagacagtctctatgtcagactgtgaatatgaggcagcagtgagctgatacaagtgagacaacaatgtgtggccttcctcacactctcaaagctgcaaatactgtgctagggccatgtgaagcgattgggaatacgaaaggaactttgggtaaagcgcgaagagtacaatagtggacaactgctctcatcatggtgtagtcaaccataaagacttggtgaataggttttcgggtcgaaaattaaacaattttaacataaattcgttaaacataccacaatggtttggttatactgggtgtattttactttggctatatacaagggggcgagtacgttaaacttttacttggttaacaaaacaggttggggaaggttgcccaccacttgtttaattttaacgcaaattggtgtttttaaaaaaaatacccaagcgcggggaagaacacttaccacaaggtgggggaaactgtgtttgaaacacggaaggggccggcggggggaaacagtaacaactggggcacttcggggggggttactaggtcccgtttaatacaacaggtggtgacaaccttttgacaacgggtgacttgtgcccggggaggacaccaaagttgggggggcgaaggcacgatgtggcaataaacatgaacaggggttatagcccctaaaagttttttaaaacaggggacaatattttaacacaggcagagtagggaacaggg

SEQ ID NO: 606587 - DNA, 244 bp, Homo sapiens
ttacgtgagtgacaaggagcaccaggagccttgcctgacttactgtctgttggtaggatgtgacatatgaataatacaaaatacccgtcatggtttgactgtgcagattaaatcacgtgctatgactacatgccttgactgccactcttcttgcttgacccttagccaactataaccatgtcttccatggaacacataccagtgttttaacatttgcttgacggtattcactaccgtgcttgtc

SEQ ID NO: 606588 - DNA, 468 bp, Homo sapiens
  misc_feature (288)..(289): n is a, c, g, or t
  misc_feature (304)..(305): n is a, c, g, or t
  misc_feature (319)..(319): n is a, c, g, or t
  misc_feature (335)..(335): n is a, c, g, or t
aaatccaattaacaattttacaacataagatagaatggagacctgaataattctgtgtaatataaatggtttataactgcttttgtacctagctaggctgctattattactataatgagtaaatcataaagccttcatcactcccacatttttcttacggtcggagcatcagaacaagcgtctagactccttgggaccgtgagttcctagagctggctggtctaggtgttctgtgcctccaagactgtctggaatgactgtattgccaccaacttggggggggggggnnttttttttttttttnnaaaaagggaggggnaaaaaaatttttgggnttttaaattaaattaattgggtgccctttctgatgctaagactccagaccttttgtttttgctttgcattttctgattttataccaactgtgtggactaagatgcattaaaataaacatcagagtaactcaaa

SEQ ID NO: 606589 - DNA, 234 bp, Homo sapiens
gcctggctgtattcactcgccaccaccacccttggccccaagtcgcagagtccagtgtgtcattcttacacatttgtgtcctcatagcttagctcccgcttaggagtgagatcatacgacgtttgattttccattcctgagttactgcacttagaataatggtctccagttccatccaggttgctacaaataccccttttttgttcctttttatggcgagtgaaattacggcca

SEQ ID NO: 606590 - DNA, 1144 bp, Homo sapiens
gtaatcccagcactttgggagaccaagatgggcggatcacttgaggtcaggagtttgagaccagcctggccaacatggtgaaaccccgtctctactaaaaatataaaaattagccgggcgtagtacatgcctgtaatcccagctactcccgaggctgaggcagaattgcttgaacccaggaggcggaggttgcagtgagctgagatcgcgccgctgcactccagcctaagtgacagagtgagacacgttaagaagaaaaaaaaaaaaaagggataccttcatttcgggactcaatatcctagatccaagggacgggaaattaggggaagggcttcacccggggggatcaagataagaagatcccatacttcttcccagggtaagggagggcctgggggcagggtcatggattcaaagctggactgggaatgggcagaaactggctgagaggccacccttgcagatttggtggccttcaaagatggggttccatggagtctcagagaggacaaagactggtcagcggggtggatttggccatgattattggaactagagctgggtagaccacgagcttctcagatggcaggggcagatcctccatcggtgagaatccggcacttgacagtggtgtcctgagagtggtgtcctgtggcagttgctgcgtttctcaaggcccatctggaaaggtcttcggcggggccttccttcaaggtggccttctttttatcccaggtcgtctcttacttgcaactggtaccctcctctaaaaaattcttcccttttgggcctgagcacagggatacaaaactcgtgttacctcgggggggaccaggtggtgttgttagggggaaaaacgcagcgacaagttgtgccggaaaccccacatttgtggcgaactatgggacatgatgacggggagaacaaggaggaggtatgaccaagcagacatagaacaaatttgcagaagcaggcaccgaagttgagcacccataaggtgcggtgagaaatactatcaaggaggcgagcagcggcataagaagaggggctgaatactgatccaccagcgtttgctcttcttttctggttgtcgtagcgaccctcttcgcggcgctgtatcataagaggagggggggagggggtc

SEQ ID NO: 606591 - DNA, 309 bp, Homo sapiens
  misc_feature (156)..(156): n is a, c, g, or t
cggcgtgtcggctctgtaattgtgggggaggtactgagaggtgagagccagacacaggaagtggccggccacagccacagcgaggggctgctcggcagtggacacctgcttgacgacctgcacccgggcctcagacaccagaaacatctggatggntgtgcgatagacagagatgatgcaaactgctacacagaaggggagcccactcacagggttctcgttcagtgcaaacgtggctgcccccttgatgcgggcccccgaaggcactggctcgaggttcagcatgttgaccaggctgatggagctgac

SEQ ID NO: 606592 - DNA, 173 bp, Homo sapiens
gcagtgttggatccatggaatgtctacatctgcctgaggcccagtagcccaagaggcgtggtgcaggagatagcctggacgcttgtgagtatacccggattcatgactgatattctgggcgcctggggctcccagcttctgccgctggcagctagtcctccaacgtctcagtc

SEQ ID NO: 606593 - DNA, 414 bp, Homo sapiens
tacttccgtgtaaacacagatgcagagatatcagcagtaagaaaggccacgtgaggaagatgctgcggcatgcggatgcctcagccatcgtggagtacgcatacaatgacaaagccatgtagagaagcagaggaacatgctgacggaagagctcaatgggaacacattgcagcatttacaagccagcagatcacccaactctggacaaagtgtaagaggtacagccagaaaaataagaacatattctggatgaaatgaaacagattctaaatccaatgggccaaaaggaagcagtgattaagcactcataggtgcataaagtatactaggactaaaaaacctatgcaccccccaaactcagatcagacatgatagcagccatccgcgaagcggaggtctacctggcacaaaaac

SEQ ID NO: 606594 - DNA, 492 bp, Homo sapiens
cttgaaatcatgctttgcagcaacatggattgagctgaaggccattatcctaagtgaaacaactcagaaaaagaaaatcaagtatcatgtgtcctcacttatatgtgggagataagtagtgaagacacatgtgatcgggcacagtggctcatgcctgtaatcccagtactttgggaggctgagacaggaggatcacttaagcctaagagtttgagacaagcttgggcaaaatagtgagaccccatctctacaaaaaacatacaccaaaatttagctgggcatagtagtgcgcacctgtagccctagctactcaggaggctgaaatgggagaattgcttgagtctgggaggtcgaggatgcagtgagccgtgatggtgccactgtactgcagcctgagtgacagagcaagaacctgtctcaaaaaataaaaaaagaaatcctgatcctgtcagttgcaacaacatggataaatctgaggacattatattaagt

SEQ ID NO: 606595 - DNA, 955 bp, Homo sapiens
  misc_feature (147)..(147): n is a, c, g, or t
taaatagatgttcactgatatacgattagtgtgtgaggatgctgcggaggcgtagagcatgggaagcgccgtcgtacccccgtatgtttacccactatgcggctgccacggaagcaggcgcatactttgtgggagtcgcccaatttngtttaacctaataagatcgtgtcggtcgacaaaattcgggggtttgcccctccccccgggtcaatgaatacttaacaaacggttttttcaaagagggtgaaaacaggggcgttcattattggctacctaacaatattcccgccgtgttagtcgaaggagaacacgcttgttttgtgctgggcacactcccgccgctgcctcttgtggttaacacctctctccccgctggttccaaaggacaaaggttcgagcctgtgtcgtaccctcccccctgcgccccctctgtgtggtgcgcccagccgccggtctagttctgtcggacaaaatcagctgcccggtattttcctgtaatgggccgcgtcataaaatggttaatccccccagggtccccaactctttgtttaaaagtacccaagcgcgtctttgatgtgtccactgttatctcctgtgcgagcttgcggctccccgtgcccgaaatgttgggaattttttgctcgtaatcaaacggggtcttcttctcagggcaccccacaccgggcgcttttttgcacggggattcggccgcaaaagctcttcttgggtggggggggaaatgttgtacccactgttgtgtgtgtccagctcttgtggccctcaagagcggttcccattgccgctccccccgtcacgtccggtttgcgtcagaatcacacacattgtctggcccatgcgtggccccctcgagcccccccaccccgggtttttttcccatgtccaaaaaaaaaatttttcctttctcccaaataacaaaaaaaacaaaacataaaaa

SEQ ID NO: 606596 - DNA, 349 bp, Homo sapiens
  misc_feature (51)..(51): n is a, c, g, or t
  misc_feature (102)..(102): n is a, c, g, or t
  misc_feature (189)..(189): n is a, c, g, or t
  misc_feature (271)..(271): n is a, c, g, or t
gggacttcaagaaaaaatctgaatgggaaaaatgacactagaaggaaaacnccacacattttatgccagagaatggtgtgttttctaaaatatgtttcgggnggcgaaatgtggctttcaaaaaaaagtgaccttttcttctttgaaactttttgttttgacaggaataattaagggttgggaaagaancacaattctcagagaggtttgcaaccaggagagacaaagaagtctcagtagtaatcatgatcaagagctttaacagccagcnacatttaagaatgtattagtaacagaaattatatgtctgtgaatgtgtctcaactcaaaaaagaacacgcctcccccc

SEQ ID NO: 606597 - DNA, 374 bp, Homo sapiens
acaggggggaaagtcaatctaaaaggataatcttttagacactctctactaatatcctaagaaggccagaacaattcctcttttcttatctttttaaacgagagaaagaagggcaagctccccagaatcttagaacctgaaaaggtccttaggaaactatctagtccaacatctttgtcttacgggtagaaaaaagtaagtgcaaagaagatgaatgtttggaacctaggctctaaagaagttgtggcgtcagagttctgacccaatccaatgctacctctatcccaccaaattttgcctttctttggattaacaggtcaaccaaatcactatcaattcctcctctattaggccatctggtatcccaacctatg

SEQ ID NO: 606598 - DNA, 171 bp, Homo sapiens
  misc_feature (154)..(154): n is a, c, g, or t
  misc_feature (156)..(157): n is a, c, g, or t
tgctctctttctttctttctttctttctctttctttctctttctttctttctcgctctcgctctctcgctctctccctcgccctctctctctctctttctgtctctctctctctctctctctctctctctctctctccttctgtcgtcttctcncnnccgtatagtagtag

SEQ ID NO: 606599 - DNA, 144 bp, Homo sapiens
caggacacagctattccaatcagattttgggtattattgttacaaccttttccttcacctctgcgatcatggtgatcaagctaaagctgcttattttctggcgcacattcgttctccagtgtaacagggaaaaacaagtgaacc

SEQ ID NO: 606600 - DNA, 204 bp, Homo sapiens
tgcccacacggagaaacctgtctctactaaaaatcaaattgggctgggcgcggtggctcacatctgtaatcccagcacttgggaggccgaggtgggcggatcacgagatcaggagatcgagacaatcctggctaacacagtgaaaccccgtctctactaaaaatacaaaaaaattagccgggcatggtgttggggataacatca

SEQ ID NO: 606601 - DNA, 956 bp, Homo sapiens
aaaaagctcagcaaccaagataaaaaatattttaaagcaatattttgttttgggatttttttttttggagaatcagagtatcgcctcgtggcccaggcgtggaggtgtagaggcgagactctcggcctcacgtgaacccgtggtgccttccccgggttcagaggcgattctccgtgccacagaccctccgtgagatagcgtggagattacagggcatgtgcgcccaccatgtgccacagcttaaatttttctcatatttttataggtaagagacatgtgattttcacccactccgtgggcataaacagtagggtgaaacaccaccattactcatacctaagaaaataacaaaaaaatatagacgcggggtggtgaggagggatgggacaccgtggcggatccgcggagtgcatgtgggaagcgcatggagcgcgggaagacaggtgcgcggtgaaacacgtgtggaaggcgggaagacatgtgcgaggtggagcccggagaagtggcgcgccacgtggcgactccaagccgtgggtcaacgaggaggcgagaacttccgctctcagaaaactaaaatataagattaactataagtatattgtaacttacaaacacaataaaacacatctaagacgtggtggactaatacctagatagccgtccctcttagagggtcaggggctggagcctagagggtgaccattctcccaggggccagcacataatatacaagaggacaccaaagaaaagctcagacatcccaaaggtgcatgaagactgcaaggcaatgagccaagggagcctgaacctttacagacaagaagtaagaaaaaaaaatcaaaaataaatggcaaaaaatcccatgatcgaggacaaggactagagagagaacaggcgggaagacacacgaactagaggaaggaacccatgaccacagaggtacgaaaacaatagcg

SEQ ID NO: 606602 - DNA, 263 bp, Homo sapiens
cttattttgggtctgtaatgggtcaggctctttcttcagagggaagcctgcttgtggcttctgcaggttggggagggtcttgcgttacccaggcgtatggtactgaaggggtcataaagggcaagtccgtgcagctggctagtgcagctggcctccaggagtgtggcccagtttgagggctgtgcctgccctgcggtctaggctgatgggataattctcagtgagggcggggtctcacaggcttctgtgggtgaatggccgtg

SEQ ID NO: 606603 - DNA, 309 bp, Homo sapiens
  misc_feature (105)..(105): n is a, c, g, or t
  misc_feature (234)..(234): n is a, c, g, or t
ggagagcaggcggagcaaggcacgagtctcaaagggccgcaggtccaggggcttgaacatcaggcccttgtagaatttcaggaggatatcattcagagtctggtnaaaaacagtgagaacacgggcaagggattaccggacgaccgggatctaagagagcagggaggccgcaccgcctgtcactttggccacgcgcagaagggacagctccaccttcaggtaggccagctgggncagcagctcctccttcttcttcccgcgaagatctcgagccttgatcttggccaatgctgcacaagccgcgacgac

SEQ ID NO: 606604 - DNA, 335 bp, Homo sapiens
ttcttcttctcttgagacagagtcttgctctgtcacccaggctggagtgcagtggtgtgatctcggctcactgcaacctccacctcttgggttcaaacgattctcctgcctcagcctcctgagtagctgggattacaggcacgcgccaccacgcccggctaattttcgtatttttagtagagatggggtttcaccatgttggccaggctggtcttgaactcctgacctcaggtgatccgcccgccctggcatcccaaagtgctgggattacaggtgtgagccactgtaccctgcctggtatgtagaattttctaacaaatagtttagtgcttctc

SEQ ID NO: 606605 - DNA, 224 bp, Homo sapiens
gacatctcatcatttgcatacaggatttgcgtgcaagtactatattctaccaaccacgtgagtagactcaaagtgtgatggttgagtttaacatagtcttctttgtatcgaatccaactggctgaccttgtaaccattctagaggctgaactgtatgaagacctcgagtaccattcacaaggtgctagtcaagagactttaggagcagattcacagtgtcaaca

SEQ ID NO: 606606 - DNA, 308 bp, Homo sapiens
ggcccacagtacttttatagccctgtaggataactataaaaccccagaacttgttcttcctatctagctgtaattttgttttttaacaaatctctcttatcccctcctccctctaccttttccatcctgtaactattctgctttttatttctataagatcaactttttagcttctacatgtgagaacatgcagtgtttaatttaacatgcagtgtttaattccctgttccttatagcggccttttttttttttttttttaactcattaattaggtttactgtttactatgggcactgtttggactctg

SEQ ID NO: 606607 - DNA, 462 bp, Homo sapiens
cccgatcacgcacatgaatagctcattataaagaagggccttctgattccccctgctcccaaattaaataaaaaggaacagtcatttgttttcatggaaaaaaaaaaaacaaacaaaaacaaaaaaaaaccagaaccatcttaagcaaagtttaacatgaactttatataaaataaagtacaatttccacttaaattcagtcttcaaatattttttatgggaaggccatgcatggccttcatttatggtatttcaaatcacggtacttttactttggtgaaaacactgccggcattttctagtacaaaaaaaacctaaaattggtttcaggaatgtagagaattatccaatttaaatagcgaaaaagtgcaccatatttactgctgcacggcagtcatctctgcaattcccatgtttcttaaataactatctggtcagataacacacaatataaagagcaat

SEQ ID NO: 606608 - DNA, 351 bp, Homo sapiens
agatggctgaagtgcagtcaccatccttagggagaggcgagaaagacaggccatagagctgaaaattacaacacagtatggcctggcaacagtggaactcagagcaagaaacagaggagggatccatcaattctggggaagtttcagaataggagggagcttcactccacgcagaggaaggggctcctgcaaacactggaggaaagaacatcctctgtgacgtcacagagtatgaggctcctagttctaataggattggatgggggttgtgctgctgtgagagatgcagtgttgctcacattatcttccaaatggattcactttcattaaaatgacaattgttttacagtc

SEQ ID NO: 606609 - DNA, 684 bp, Homo sapiens
tctggctgaagaaggttcattgcaactaagtttacgacccccaacactcggctctgaagggactcctccaaatgatcagcagttcaagaccacttaggcccagcgtccacggatgctacaaagccttaggacaccataagctcatgtcccctagaatccaggcctctgagcttataaccatcactcagagtggccttatccgttgcaggagcaccatcagcagcctgttaggtctcattgttcgctgttacacaatgactgttgttgctcccagcttcattccccacccctgctagtgcctctgccaaccatgttcacaggcgcttccatagcactacagccaatgcatcatgtaataataaggttctccgtcctattaacgttccctgcgacatgaaagccagagtaacccacatggccctacatgctatgtatgcgactgcctacagtatagtacaggtccgtgcctgggctcagttaccacgtgtcagatttgcaccctctctcatgtagtaagcgcgaatttagtcacacctaaggaagatcacatgaatttctagattacaagtgcatgttcccaagcagcctctcccatctcccaggtttatgacctcgcatacccctgtatatttttctcactgtcacttttgtgaaccctctcaacgccttaatttaaacttgtat

SEQ ID NO: 606610 - DNA, 123 bp, Homo sapiens
  misc_feature (2)..(3): n is a, c, g, or t
  misc_feature (122)..(122): n is a, c, g, or t
gnncctggtgagctcagatagtctcctctgacactgtgtaagaagctgtgaatacctaacttccccagatgttgcgaaaagttgaaatgtgtaattgttttggaataaagggggtaacaatng

SEQ ID NO: 606611 - DNA, 341 bp, Homo sapiens
taccacagtttaaaaaaaaaagaaaaaaatgcacaatcttttggacaaaagaattaaaggcagaaatttaaaggaaaaatacatattcaaagaacatagggaggtataaaaaaaggtttctttctttttttgagttttttttggtaggtaggttgttttcctctaatcttgcttagagtcccttactaggaatattgaatagccaggcctatgaactggggggctgtcccatttgcaggggtctcacctactttagtaaggggcgaaatcggttgtagccccctggtttaaacctgccacagaggcaactcattacttgcggaaggggcagaggctggagg

SEQ ID NO: 606612 - DNA, 346 bp, Homo sapiens
ggtggcgagccggtgcatctgtggcgaacattcgacgttactacgacattcttgcctgggtgacccagccgcagctggagggcaaccaggtggtggaaggcaacctgcatgtgccgggcgtggacaagaccaagccgccacaagacaccccacaactctgatcacggcagcccgcacactgcaaatccctgtgggagccggggcttgcccgcgatagcggcctgacagtcaaggtcatagccgcctgccggaccgctatcgagggcaagcgcggctcccacatgtgatcatcgtcgcctaataggacggagagcagatgaagtaccccacgccgtcaacagcatca

SEQ ID NO: 606613 - DNA, 274 bp, Homo sapiens
tgcatcagcctcctgagtagcggggactacagctgtgcaccatcacacctggctaatttttgtatttttagtagagacagggtttcaccatattagccaggctggtctcgaactcttgatgttgtgacccgcccacctcagcctcccaaagtgctgggattacaggcatgaggcaccatgcccagcatcatctgaacttttctaggttatttgttaccagcaaaaagttgggatctacacatatggtaaatttacaattaaacgagttacaaag

SEQ ID NO: 606614 - DNA, 199 bp, Homo sapiens
gacatcgccaaaataggtagactgtataaagcaataccattcacaacaacagcactaattattggaagcctggcattaacaggaatgccttatctcacaggattctactcaaaagaccttatcattgaagcagtaaatatatacttcacaacaatcctaatcctaataccaactatctccctaattgaaaacaaaatac

SEQ ID NO: 606615 - DNA, 696 bp, Homo sapiens
  misc_feature (3)..(3): n is a, c, g, or t
  misc_feature (66)..(66): n is a, c, g, or t
  misc_feature (98)..(101): n is a, c, g, or t
  misc_feature (122)..(122): n is a, c, g, or t
  misc_feature (144)..(144): n is a, c, g, or t
  misc_feature (155)..(155): n is a, c, g, or t
  misc_feature (163)..(165): n is a, c, g, or t
  misc_feature (170)..(170): n is a, c, g, or t
  misc_feature (177)..(177): n is a, c, g, or t
  misc_feature (185)..(185): n is a, c, g, or t
  misc_feature (189)..(189): n is a, c, g, or t
  misc_feature (193)..(193): n is a, c, g, or t
  misc_feature (207)..(208): n is a, c, g, or t
  misc_feature (210)..(210): n is a, c, g, or t
  misc_feature (226)..(226): n is a, c, g, or t
  misc_feature (388)..(388): n is a, c, g, or t
  misc_feature (406)..(406): n is a, c, g, or t
  misc_feature (508)..(508): n is a, c, g, or t
  misc_feature (511)..(511): n is a, c, g, or t
  misc_feature (514)..(514): n is a, c, g, or t
  misc_feature (524)..(524): n is a, c, g, or t
  misc_feature (527)..(527): n is a, c, g, or t
  misc_feature (570)..(570): n is a, c, g, or t
  misc_feature (578)..(578): n is a, c, g, or t
  misc_feature (583)..(583): n is a, c, g, or t
  misc_feature (596)..(597): n is a, c, g, or t
  misc_feature (599)..(599): n is a, c, g, or t
  misc_feature (617)..(617): n is a, c, g, or t
  misc_feature (695)..(695): n is a, c, g, or t
gtnactgacgcttacgactcacaggtcctcggatccacgagcgcgggagaggaagaccgacatgtnagctgcttgtccccatccatgcggccgtcctnnnnacacagagccctccgtggtgnccggggattggattggagccangacctcacttnctcctctnnncctgnccctgcncctcccancacntggnccacaccctgcaanncnccccaatggtctggcnctgggtggcgatggcgtccaaggtgagggtcccctacatatggcctggctccgtgcatagcctctggctcctgggggcagtccttctgatggaagcgtactgcaacggcctaccaaccactcgtaccactcagagagagagtagccaacagggaggagaatnagatcctagcccccagancacctgaacggaggtgaagcatggagatggacgggcacctcaatcgcggcttccaccaggaggtcttccataggcaaagacctgggtggctttgataaagangangancgcggcgganganagaagctgatggatcatcttttccaaggtggatgtgaacactnaacggaanatcantgccaaggagatnnancgctggatcatggagaanaaggccgagcacttccaggaggccatggaggagagcaagacacacttccgcgccgtggaccctgacggggacggtcant

SEQ ID NO: 606616 - DNA, 265 bp, Homo sapiens
gtttgtcgtcctcgcaagcagactcaccgtgcctggggcggagggatgctttggatggcttaatcgtcgtggctacgttggcgcatgagttgttttgcacctgtgactgcttggaggacccccgccggtgtgcggccgactcctatcgccagcgtcctgtcattcgtgctggcaccttttgcctgctgcattgacgagtgcttgcgtgctgttacctgtcccacgggaagttgcgttcggttacatgttgccttctttgagccca

SEQ ID NO: 606617 - DNA, 95 bp, Homo sapiens
  misc_feature (83)..(83): n is a, c, g, or t
ctctgtgtaggcagaggggtgtgcaacaacaggaagaactgccactgcgaggcccactgggcacctcccttctgtgacaagtntggctttggagg

SEQ ID NO: 606618 - DNA, 170 bp, Homo sapiens
  misc_feature (71)..(72): n is a, c, g, or t
tagtgcattgggagatgtgcaacttcctgaaaatcttttctgtttctggagtacttcaggggtggcctctnnccaggagcctttgccacagtgctcccaccagccccacctcatccgtctgtttgcagagcctcatctacaggttcccagcgttgccttctttactcact

SEQ ID NO: 606619 - DNA, 239 bp, Homo sapiens
  misc_feature (4)..(4): n is a, c, g, or t
tttntctcaaaccaccattcacttttttacctatttaacaaaccttcactttcttcacattcatcccataaactaaattataataataataataataataaataatatataaattttcttaattaatttaaataaattaaataaaattcattttttctccattacatctttcatcatacttttcattttaaactttacattccattatatatttacataatttatttaaatttcttaat

SEQ ID NO: 606620 - DNA, 1544 bp, Homo sapiens
gcagaggaccgcagctggcaggcagctgggtgtggggtgcgttgtggctggtgtgggcaggcctcagttttggtgtgccaagtcaggtctgcattgcagctatgtgtaaagtgctgcaagggcacagctcctggtgtctaagagggacgagagtccctgagatgtgaagacccgcacttccccgagtcccagacacacctccacagataacccaccaagggacaggagcactatccacaggtacccacagacggcaacgcatggctcgaagcaacaacacagcaagcgtcagacatagatgcagagaaggactggcacgatgactgggcgccaagcaattgggcacatgcaccaatatctcccaagaacgactgtaacaatcgggaactgctggcctcaagggacgatcacactatcaaattgtataccacccgtttgacaccccaacaacggcggcaccagaagcaacagatgcacgcaagacctgtgagcacacgcgtgggcgcaagctccccaagatacctaggactgtcactgagccaacatgacacgtagcaacaccaagacggaaccccaacacaagagaatctcaggaagcgaacattgagactcagggcaacgggccaccgctagacctcgtacgccaccatcacccacaagggagaccacaccaacagaactagaggacacagactacttgaaacaacaccaggcaagttacccaaacagaacacgccctagacagcctcgggcacaaaacttatcaggccccacacaactttcgcctcaggcaaccatacaccaaatcacaagcgacaaaatgccgcatcacacccagcccgacaccacacatacagaaacatgtacccaaacattccctggcccgcacgcacgcggtgccacagcgccccatgtagaacacggcgaccgccagatgaacaggggaaggtacaggacaacacatagtcaaccgatcacatacacacatgcgacgcccagcagccgccgaacaacagcaaactgctcggcacctagcaacaccaccgactcgacgcaggacccacgcaacaccaacaggtcggcattcacctcagacaagcggaaacccagcgtcacgccgtcctccggccacacgcgcagccatcaacacgcccgcgaccacagcactcgaacgaccctccactcagcaccacagcaccacccgcacttcggaacagaacgtgaatcaatcacacacaccgcacagcagcgagaaaacaacagaatcgaccgcaagcaagcacaaccggacggacagcgagcactgggatcctagccacacaccgaccaacacgcagcgtaaagactacctataaccaagcacacaagcagactatgaacaccaaccaccacacgacccacaatcacacgcgcacaacagaccgcgccacgcacacaccaacaacccagccaacaacagcagcagaacacagacacaaagcacacacaagatagcacaggaaccagctaccagcagaagacacagagcccaacgtggacgacac

SEQ ID NO: 606621 - DNA, 196 bp, Homo sapiens
gatacgtattgttatagcgccatttgcgagaagtcatcggatgaccatgtcagagtaatagtagtgagtcatgtgagcgatagatgaggcgtcgtctgaggcgtctggtcagtagtgcaatgttacttataatactgtagtgagccgaagtcgtaggcaggcaacaaggtgctagactgtgattagaacaatttat

SEQ ID NO: 606622 - DNA, 110 bp, Homo sapiens
cacgaggtggactgagatacatcttgatccccgtcccccagcaataatcccgtaacggagggaccactgcaggccggaaacatttccaagagtttacgaaggtcgcggta

SEQ ID NO: 606623 - DNA, 595 bp, Homo sapiens
accctattttttgacacttccatgtttaaaaatacacatggaaaaaaaaaaaaccctatatgcttacggtgcacctagagcttttttataacaacgtcttttggtcggtggtttgggattcttaaaatatatataattctcatttagtgccctctttaagccagaaatctcattacggcttcattttggtaataacattcaactttagatattttccatatatgggcacggctaaaactagaatatagcatctttcatatggggtacggaaccaacaaggaaactttcctttaactccctttttacactttatgggtaagtagcaggggggcgaaatggcattcatagatcatttctaggcaaacatggtgaagctaatgaccaaccggttctacctatatgcagcctcttcatttactagaaatggggaatcagggcctctgtgaagagaaacacagtcaccatcctgccattaagctgtatccatatatggcatttctgtatctgcgtgcgtatggccaaaacacaaccacacacaacaaacacaaacacaactcttaggcccccccgaccccacaaaactatcttcacacag

SEQ ID NO: 606624 - DNA, 184 bp, Homo sapiens
tggaaatgaagtctcactctgctgcccaggtggattgcgtggcactaatctctgctcgtggaacctccgcctcctgagtcaagcgattttcctgcctcagcctcccaagtagcggggattaagggcttgtgccaccacacccatctaattttattttattttaacgtagagagtggggtttaac

SEQ ID NO: 606625 - DNA, 174 bp, Homo sapiens
ggttctagtctaatggtaccagttcttctgggccacatgggcctggtgtaaacacgcaggtctcaccagtctccatgttgcagaagactttgatggcatccaggttgcagccttggttggggtcaatccagtactctccactctgactggaagagtggagagtactggatagac

SEQ ID NO: 606626 - DNA, 315 bp, Homo sapiens
tgactctagcggatcctaacggtctgttacctggggcacctgcaatgatccaacgcgttcctgcaacagttctgtcagcttgcaacagctgctcagcttgatctggtgagcaacatgaatatctgctagcgaagcacccgtctgatgcgacggcggtacgctacgaagtgccgggcaaaggcttcttctggtgttgatctgccaacgatgagcgtacccggttcttgctgtagcttgttcgcgggttgcggttgtcctccaccggttgggttgcatgggtggctgtctgtccatcaatcgccattatgtcggtga

SEQ ID NO: 606627 - DNA, 1027 bp, Homo sapiens
  misc_feature (1010)..(1010): n is a, c, g, or t
gtcaccataagcttttgatagggctttgtctttccctttctcatacatttttctgtcctagagaaagtgggagatttaaaaattatgtattctgtctttgcttgggtactgtgaagtcaggtatatttgtagagttgggttagcgaggtagtgacaatttccttttaaagatgtatatcttctttctccccaattctttccaaagaaattactgatgctgaggaagatcctgaggataaagcaacaaacgcagtctggaaccagtgacattaaagacctgaaccctgcacctcatcttgggacaattctaagggctacctgagttccacatattatcaaggactcagctgaatcttttgatggaaaacttgagaccagcgtcagagctagacaagggccatggagggccaaggtcatggcagagcctcaattgtctccacagggagcggttatggacaacctaagagtcttgctctgttgcctaggctgaagtgaagtagtgtgatctcggctcgccacaacctctgcctcccaggttcaagcgattctcctgcctcagcctcccgagtagctggaactataggtcatctaggggaaaacagaagtatgaggattgagacttcttctgaaaatcagtgagtggctctctgcagtggttacagaaatgccacagcatggactccctcctgtaaactggctctgctgtcccagcagtgacggaaagcactcaatttgttttctcttggaagagacagagtggctgtcagtttactgcaatattttggactgcctggaaaattcaatgtacaacaggagaaaggagaggcaggagacagactctggaatagaagtcaaagacaaagaggctcgtaaacatcaagattctggggctaatctagccattcacagctttagaaccatggacagtaaaacttaaaatatatactatgttctaaccaccacaaggttattcactctagcaactaaaaaagcactggcctcagcaggcngcattcaggatccgagc

SEQ ID NO: 606628 - DNA, 281 bp, Homo sapiens
gggttctaggtgtgagtcaccgagttgagcccctaaacacatgtttttctttttagagacagggtctcactccagcctgggtgacagagcaagaccctgtctcaaaaaaaaaaaagctgggcgtggtggctcatgcctgtaatcccagcactttgggaggccgaggcgggcggatcacctaattagccgggcatggtggcacatgcctgtaatcccagctactcgggaggctgaggcaggagaattgcttgaacctgggaggcggaggttgcagtgagctg

SEQ ID NO: 606629 - DNA, 263 bp, Homo sapiens
actaactagctagcaagcacgcttgctcctcagtcctagcaacatcaaacactagtacctaggaatcctagtctgctgctgtcttcctagatacactgaatccacttgtgtatagcacctgaatctgctgtcaattaatgctagtcctcaggatttaaaaaataatcttaactcaaagtccaatgcaaaaacattaagtaagtaattactcttgatcttaaattacttccgttacgaaagtccttcacatttttcaaactaag

SEQ ID NO: 606630 - DNA, 393 bp, Homo sapiens
  misc_feature (16)..(16): n is a, c, g, or t
  misc_feature (190)..(190): n is a, c, g, or t
  misc_feature (367)..(367): n is a, c, g, or t
tactactactaaattngcggccgcgtcgaatggaggtggggcacagggactacaggtcaatggaggtggggcacagggactacaggtcagtggaggtggagcacagggactacaggtcaatggaggtggagcacagggactacaggtcaatggaggtggggcacagggactacaggtcaatggaggtggngcacagggactacaggtcaatggaggtggggtcacagggactacaggtcaatggaggtggagcacagggactacaggtcaatggaggtggagcacagggactacaggtcaatggaggtggagcacagggactacaggtcaatggaggtgggggcagggactgcttcagtttctgtcnacgcggccgcgaatttagtagtagta

SEQ ID NO: 606631 - DNA, 456 bp, Homo sapiens
  misc_feature (16)..(16): n is a, c, g, or t
  misc_feature (190)..(190): n is a, c, g, or t
  misc_feature (430)..(430): n is a, c, g, or t
tactactactaaattngcggccgcgtcgaatggaggtggggcacagggactacaggtcaatggaggtggggcacagggactacaggtcagtggaggtggagcacagggactacaggtcaatggaggtggagcacagggactacaggtcaatggaggtggggcacagggactacaggtcaatggaggtggngcacagggactacaggtcaatggaggtggggtcacagggactacaggtcaatggaggtggagcacagggactacaggtcaatggaggtggagcacagggactacaggtcaatggaggtggggcacagagactacagggcagtggaggtggggtcagaaggactgcatatcaatggaggtggagagcacagggactacaggtcaatggaggtgggggcagggactgcttcagtttctgtcnacgcggccgcgaatttagtagtagta

SEQ ID NO: 606632 - DNA, 943 bp, Homo sapiens
  misc_feature (352)..(352): n is a, c, g, or t
  misc_feature (368)..(368): n is a, c, g, or t
  misc_feature (528)..(528): n is a, c, g, or t
cagactatgtgcttgtgaaaaggtcgggtaataaacagtgcaagtcattacagtggttttattcccgaatgggtttttttggtcgtttgttttttggctcataactggtccttgtggtgccctcgtggtgcatactgtctcatgcaaacacgaagtactagtatcgcttaattcttctctgcttccacgactgatgagtcatggccattcgggatatgtgacagcatgtttagcagactaccgatacaattggccaccgtagagaggacaatacatggaccctacaagcaataattggtccacactctatacagcttgtcattttaggactctgtgcgcgtccacagtaaanagagtttggctagganaaggcatgtgtgatgtctgtgacagatcggtgggataactgcttcatgaggaagatgcagaatcctcttaaaccgttgtggtggggcgcttatgatgtatatgagtgggtcgcggtaggccttcatttggaaggttttctgaacaatcctcgtgtagaanaaagctcggtttctatcaccagtcagtgatccactccactagggagacgtgcacgagagaatgatataagcagtgatcaatagcatagaactcggtgggaaaatctacaactactcgttgcgacccgtggggacccatctgcccacgagggcatctcccaaggacaaggtcactttgcccctagcctttcgacgaccgtcacttttgagaagtattagaccctggggagccccatcaggggggcagaggggacgcaactacgcacctgcgacccggcagtggcaaacacacttgcgagggcgtaaattgcggctggagcacgaacttggcaaggaattgccaacccttatgtagatttgtcggccccggggacagtgggggtggtgccagaaaccacgcccagtgggacggggca

SEQ ID NO: 606633 - DNA, 405 bp, Homo sapiens
  misc_feature (16)..(16): n is a, c, g, or t
  misc_feature (190)..(190): n is a, c, g, or t
tactactactaaattngcggccgcgtcgaatggaggtggggcacagggactacaggtcaatggaggtggggcacagggactacaggtcagtggaggtggagcacagggactacaggtcaatggaggtggagcacagggactacaggtcaatggaggtggggcacagggactacaggtcaatggaggtggngcacagggactacaggtcaatggaggtggggtcacagggactacaggtcaatggaggtggagcacagggactacaggtcaatggaggtggagcacagggactacaggtcaatggaggtggagtcacagggactacaggtcaatggacatggagtacagagactgcaggtcaactgaggcagaccacaggacgggtcgacgcggccgcgaatttag

SEQ ID NO: 606634 - DNA, 179 bp, Homo sapiens
ctccgagatctcgacggataggggatctgacgtacaagcgctaacataagcattcttaattcacagctagtttatattatcctaactactaccgcattcctactactcaagcctaaactccagcaccacgaccctactactatctcgcacctaaaacaagctaacatgactaacaccct

SEQ ID NO: 606635 - DNA, 472 bp, Homo sapiens
gggtcagctgctgtgctccaacgtcggtcagaaaatgaagagtttgttaaagtgggaagattggggccctctgattattttggtgaaattgccctactgatgaattgtcctcgtgctgccccagttgttgctcgtggccccttgaagtgcgttaagctgggccgacctagatttgaacgtgtttttgggccatggtcagacatcctccaacgaaacatccagcaggcaacacgttttgtgtccctgtctgtttgaaatttgcctcctgggcctccctttttttcctctccccaatccatggttcactcatgcaaactgctttattttccctacttgcagcgccaagtggcccctggcattgcagcttcctgtttgtttatatattgaaaggtgcttttattgcccccttttcaatttggagccttaactaaatggtcatacccagtttaataaatagaaagagttttatgga

SEQ ID NO: 606636 - DNA, 1301 bp, Homo sapiens
gacctcgaagtctgagcatttgttacggggaacgcgtcaacgcggtgagtagccgtctggtcgtggctgccactgttccgctctctcggctcctcctgaaatcccgtacggccactcagtgtccgatggaggtagcatctacacgagtgccacgttgggcacgagcgtcgtgcggtagattcctacagtaagtcctaatagccgtggcatgggtgcagcatcgtaacgtagctcttagtcgacacaacaggacaatcggcagcaccgactgggcgacgaggccgaatgatggaccaaggagcgatgagggagggagggagcatagacatcccgtagcgaaacaacctgtcgtagcgaatagtagatgggagacagctgggacgagcgacgatgcccggcgggcagtgtataccgtagacgttggaaaaggccgaacagtcattggatgaacgtacgcgacgtgggcacgcataccctgcacagcatccgttccgacccctagagcatgcatcatcaagcacggcgaatggaaggatgctagcccacatagacctatgcccagagcggcgagctaagcaaccaattgaggacaaatgggcagaatccattgtggaggctaatgttcgtatagagcaccccgacatttgctgcgacaggccttaggtcgtagaactcaagggtggacaacacggggttgctttcaagcgggtcctttcatatgggttattgcgcaccatgactatatggggttgcgggggaaaccttgggtggacctggggggttcggaacccattcccccttaggttaccaaattggggaaatccggttaccttcgttccaaggagactggcagtgtcgattggtggccataaaggaaagaatgtcgcaataaagcgtgggaacgagtattccatacaccaattattgaaaacccagcggggatagaacccccacggagggttattcccagaacaagtggcaatggttagggtttgaaggcccccgttaaaagaaaacgtcacaagtacgcctttgcaagccgaaccacaatagaaccgaacccccggtgggggagcgccaccttccttgacgtctttgtgggcccctatgccagttgtcggtaaggaaccaacacttggaaggagcccacattctgaaatagaacagatacgttggtgcaggttcagcgaaacaaggcgttgccggatagaatcgaagggcggcgccgaaaagcgttaaacaggtgagagagccctataaaaccctggggctttatttgaaggcccccggacatatggtgg

SEQ ID NO: 606637 - DNA, 119 bp, Homo sapiens
agcgatagactgtgcgacatggatcgactgtattaaacaagcatcggaagccgtgtggtgtgacgcgattgatttctgccagtgtctgaatgtcaagtgaaaattcatgcagcgcggta

SEQ ID NO: 606638 - DNA, 232 bp, Homo sapiens
ggtagtcccagctatgtagaaggctgaggtaggggaatcgcttgagcccaggaggtcaaggcttcagtgagccatgatcacaccactgtactccagcctgggtgacaagacagattgagactctgtctcaaatcagacaagaccaaaccagccagctaaccagaggacaaaagaacctgttgctgagacccagtcttcagagcgacactagcttcttcaccttgctctcttg

SEQ ID NO: 606639 - DNA, 638 bp, Homo sapiens
tgattttgtatatttattagaaacaggctctccctctgcgtctccctccccacagtctccctctccccctctttccacggtctccctctgatgccgagccgaagctggactgtactgctgccatcttggctcactgcaacctccctgcctcattctcctgcctcagcctgccgagtgcctgtgattgcaggcgcgcgccgccacgcctgactggttttcgtatttttttggtggagacggggtttcgctgtgttggccgggccggtctccagctcctaaccgctagtgatccaccagcctcggccttccgaggtgctgggattgcagacggagtctcgttcactcagtgctcaatggtgcccaggctggagtgcagtgccgtgatctcggctcgctacaacctccaccttccaactcgctgccttggcctcccgtgccgagattgcagcctcttgccggtcgccaccccgtctgggaagtgaggaccgtctttgcctgggcgcccatcgtctgggatgtgaggagcgtctctgacaggccgcccatcgtttgagatgtggggagtgcctttgcccggccgtgaacccgtctgggaagtgaggagcgtctttgccccgcgcgcccctttgagaagtggg

SEQ ID NO: 606640 - DNA, 211 bp, Homo sapiens
atctagaggatcccgggtcacgaccaggagccgcaggcgcggtgaagagcgctccaggccaaggagggaggagatcatcaagacttaatccagggaggaggagaccaagaaataaaacctcccatttggtctggtacattacgggcctcgtgtgataacattagatcagccattaaaataagaacaggccttaatctggcgcatgtgccta

SEQ ID NO: 606641 - DNA, 198 bp, Homo sapiens
tggaatgggctcaaggttcctgagacacccgcttcctgcccaaacaggtgtagaaagataagcctgttacattgtcataatgatgtggggtgaccttcttggggacccgggggctggtgtgatggacctgtgtatgtatttacaactctcgtcataaaaataaagctgtctgtactggtttaaacaaaaatataaaaa

SEQ ID NO: 606642 - DNA, 463 bp, Homo sapiens
acgtacattccaaaggactttgcgaccctctaccagggatggggtgtcaacggccctgggttggagcacaaagggacactccggacgcaggcccggccaggagagttcgtttgcctcgagtgcggaaaaagcttcccccagcccggccccctcagggcccccatgcgggccccctcaggggagagacccttctaacccaggttccgtcccgacagtgcctcttagaaagggaacctaaaggcgtgtttcccacgcccccccggtccccgtaacggcccttagcagtacccccccgatgtccccgcagcctcccccctgtgacctggccgctccatggaagaaccgccggggaactcctgagccgaccccccccctccccagcccctgccctggagtggaaactgaaggccgatgcccccccctgtttaacgttccgaaataaatgaagatgctattttctaga

SEQ ID NO: 606643 - DNA, 934 bp, Homo sapiens
  misc_feature (934)..(934): n is a, c, g, or t
ctcttgggtgactatgtgcattgtcgatgagcagtaacattttgaaaggaatctttttttttctgagcagtaggtctcaacagtaggcataaaaagatttagtaaaccatgctgtaaacagatgtgctgtcatcagggctttgctgttccatttctatagcataggcaaagtagatttagcataattcttgaaggtcctaggatttttggaatagcagatgagcattggcttcaccttaaagtcaccagcatcattagttcctagtaagagagtcagcctgtccattaaagccaggcattgacttctctgtagagaaaatctgttgtttagtgtagccaccttcaatgatcttagctagatcttccatataacttgctgcagtttctacatcagtacttggtttttcaccttgcacttttatgttatagagatggtttatttgcttaaacctcatgaatcaacttatgctaccttcaaatttttcttctgttgctttctcacctctctgagccttcacagaattgaggagagttagggccttaaactagattaggcttggcttaagagaactgttgtagctgggtaacagagcgagactccgtctccagaaaaacaaaagagagaaagcgccagggtcttgctatgttgcctaggctggtcttgaactcctggggctcaagcgatcctcctgccttggctcccaaaagtgctaggattacccggcgtggaccatgcacacgggctaatttgttcaaagcacctacgcatgttccctgggattatgttcagctgcttgaaggattcaggggtcctcccttcatgagtatactaatctgggcctaggaatgcacatgttcttacgcacagttcacaaagaatcttgtaagaaaaatctaaattaaagaggaaaccttaacaacttggatggacctn

SEQ ID NO: 606644 - DNA, 309 bp, Homo sapiens
gcccctttgtttgtcaattttctgccatttggaatgactgtatttacccaatgcctatacccacattgtatctaggaagtaactaactagtttttgattttacatgctcataggcagaagggatttgccttgtctcaaatgagactttggactgtggacttttgagttaatgctgaacttagttaagactttgggggactgttgcgaaggcatgattggtttcaaaatgtgaggatatgagatttgggaagggccaggtgcagaatgatatggtttggttgtgtgcgcacccaagtatcatgttgaatt

SEQ ID NO: 606645 - DNA, 300 bp, Homo sapiens
  misc_feature (199)..(199): n is a, c, g, or t
  misc_feature (206)..(206): n is a, c, g, or t
  misc_feature (230)..(230): n is a, c, g, or t
  misc_feature (250)..(250): n is a, c, g, or t
atggactcggggctcatggactcggggctcataaactcggggctcatggactcggggctcatggactcggggctcataaactcggggctcataaacttaaaggtgtaaaatggggtttcaccatgttggccaggctggtctcaaacccctgacctcaagtgatccacccgccttggtctccaaagtgctgggattatangcttganctaccttgcctggcctaacatgtnggggcaactttggcaggcancctcaggcacagttcgaacactctggccacacctgttttgccctctgacc

SEQ ID NO: 606646 - DNA, 178 bp, Homo sapiens
gagcgccgggccaggctgaggaagcgtcaggctcagctccagtcgaggaaggagtacgagcaggagctgcggtgatgacttgaatgtggagcgctacgcgacagttctaggaccaggacacaagaaggaccagaggctccagccaccccggacatgtaagataggcggtgtcatactt

SEQ ID NO: 606647 - DNA, 839 bp, Homo sapiens
  misc_feature (256)..(256): n is a, c, g, or t
  misc_feature (278)..(278): n is a, c, g, or t
  misc_feature (291)..(291): n is a, c, g, or t
  misc_feature (300)..(300): n is a, c, g, or t
  misc_feature (322)..(322): n is a, c, g, or t
  misc_feature (342)..(342): n is a, c, g, or t
  misc_feature (364)..(365): n is a, c, g, or t
  misc_feature (378)..(378): n is a, c, g, or t
  misc_feature (388)..(388): n is a, c, g, or t
cagagaaccccgtcaaacttgaaattgttcaaaaccgaagcaggtaaaaggtggcatgacaaacactgggcttcctagacttttgttttaaagtattaaatatgacttgaaactgactttattcacatactttgtacagtggagcattacccactgtgtttgtggttacagttagagtgaagtgacacaagtgacatgcttgttccagtgggtcggaagccccagaccttcacaaggcattgaccctttttgcccntgaagtttttgggtgtcccaanaataacatctaangatataccncatgtacctacgagcttactcnctttagctattctatctttntaaattatgttgcattcaaacnnatagttgtttttntgacaatacnctgaatgacaaacacacctgagaaattcctgccctttaaaaattctcaaagttactttttctctgcctcagatagaagggatctataaatactgattagaaacagtacaaaattgaagtttctcctgttgggttcaaaacagcttaatataggggctggtggctggatgcagtggctgacgcctataatcccagtactttgggaggccgaggcaggcggatcacttgaggtcagaagttcaagaccagtctggccaacgtggtgaaaccccatctctactaaaaatacaaagattagctggacgtggtggcaagcgcctgtagtcccagctactgtggaggctgaggcaggagaatcgtttgaacccaggagacagaggttgcagtgagccgagatcgcgccactgcactctagcctgggtgaccaagcaagactatgtctctaaataaat

SEQ ID NO: 606648 - DNA, 314 bp, Homo sapiens
tagttttgttttttcagataagagttttgctgtgtcacccaggctggagtgcagtggcacgatctcggctcattccagcctccacttcctgggctcaaacagttcttattgcctcagcctcccaagtggtgggattaaaggtgcaagccaccacaccaggctaattttaatttttttgttgtttttagtaaagacggggtttcaccatgttggccaggttggtctcaacctcctggcctcaagtgatcctcctgccttggactcccaaagtgttcatgtcaccatgcctggcctggaattttgctttaaaaagg

SEQ ID NO: 606649 - DNA, 1525 bp, Homo sapiens
cggatccttgtaacctagtaggacacttatgcgtgctgatggaagcatacgcctcacagacatgctgttgtggctcctagaatcgttgctagtaccggctcctgcgttctggcggagttcgtggcctagcatcgtagcgtggtgtccttgcacaggattccaggtggggttagtcactagacgccacgtgctggaggaagtgagcaaccgtgttacgcatgtactacgacacgctgagtgcacctcgctataaaccagtcacggacaactaggtcgtgcgtactacaagactcactgtactcgtcgactcctcgaaataccatcttacatgcactgggtaggtccttaaggtgaatggactccatgtgagccacggacggtgtgagatgccaaggcctagtcatatgacgttcttgatacgtaactcttagccatcgggactggaaggtgagtacgttagaccgggacgtctccagtaaggactgaagtgcctctcatcggatcgcaagggcacagaggcaacgcacgtacacgacacctgcgcagacggtgaacggacgtgcacacgaaatagcaccgcgaaggacattaactaccggaccagacaccgcgaagcgcttacaagaaagtgcatcgcatcgggaactcgaacagccgatacacatgcgaatagaggaccccacgcatatacctaatgagagaaacggtttgacatacaccgtaatcccacgccagttatatccaaacacttcccctgtttattgttcgccattaaacagccccaacaccgagaagagcggcacgacaggaacgatattgtgggacgctcaataaaaagcctaatggactgcgttgcgagtaaacgcttgtgggtgtcgtatataccggacgttggagtttcgataccaatagaaccgaatatagatccccacgctgatagaggcattaacgtcggtgaagacggaagttcagtgccatggcggccaatgcacaggcacatcgttagagtacgacgtactcccaatcacgaggacaaggagtatgggtacaatttgtgctcacacatctatggccgcgatttcactctggacactaacttatctgcgccagttttaagtgtccttagccaccacgaggctcccgtcacgaccaaagtaagactggatagcacgccgtcaattaggccacagagccccaaattacgtactgacagtttgcggcacgggcacattacacccataggcaattttcccagtattatcccataaaacttaattgtccttaagtactaatcagcgcatcgccaaagccttctcgttgaaaaaaagatcaccccgatgctcctagaacctaagaactacctatttgggcgtgttgcatagcaaacaactgcacttgtgacaacacattgctattgacacgcgtactgattggtcacaacatatcagttatcaagacacacaaacacaacctacgggatcatatcacacagacagtgattcccaacatttcaggacaccaaaat

SEQ ID NO: 606650 - DNA, 737 bp, Homo sapiens
gtgattcccgagcagcgtgcaaaagctaagcgagttcctgtccagtgcatagatcctgtgaggatgcagtgtgccccccatgagcccacaacttagggcccagccagcaagtaccaggcggtgcccctcaggtttgttgaaccgcaagcagtccagcccggcgaggattgtcggggcctcaccggaccactgtttagcctggtccccagtgcaaatggcgatgctgacaactgctgtgtccagtgggacacgcctaagtgaagatcatggggtagtgctacctatctacgttggacccctagatggaatccacgcgacgactgtccataacatcagcatgtcgtatcccccccgagggccagaactgactaatgcattcagtggggcaaggttggggtcttgcgggcaaagtcctcgtctcctttctaggctcgactgtgtgcgggagtatgccgacaggtctacaggagggctgtcttcgtggaaggcaggaagccctttcccttgacaggccgaagactaagagacgagggacccccaaggcccaagacggcggggagacagcggacccgaacttgggaatacatcacgggcacagtgaagaagggcccacgttgggccccatattgccttacgacatcaaataacccaattgggtttgcctacaatgtggcccaccttgttggacggaacgaacgagtccttcttttgagaagtctcctttcaaagaaaacaag

SEQ ID NO: 606651 - DNA, 102 bp, Homo sapiens
ttcactggtgaaacagggtgtcagcaaggcgcttaatcatggcagcagggtcagggggggggcaggggcagcctcacgtcccagtcccccttgttgggcatg

SEQ ID NO: 606652 - DNA, 121 bp, Homo sapiens
ataatctggcacggccattgggttgaagaacatttgtggacagaacaatggaaggtgacggacagaatgacacaggtgctttacaaacaggcatccgtaaatgcgggttagggatgctgtg

SEQ ID NO: 606653 - DNA, 336 bp, Homo sapiens
  misc_feature (55)..(56): n is a, c, g, or t
  misc_feature (137)..(137): n is a, c, g, or t
  misc_feature (159)..(159): n is a, c, g, or t
atacacaaatcaatatatgtgattcatcacatcaatggaactaaaaacaaaaacnnatgatcatctcaatagatgcaaaaaaggctttcaataaaattcaacatcccttcatgttgaaaacctcaactaattaggcnttgaaggaagatacctcaaaanaataagagccatctctgacagacccacagccaacatcatactgaatgggcaaagctggaaacattctccttgagaatctgaaaaagacaaggatgccaattctcaccatttgcacttcaaaatagtatgggaagtctaaccaggacacataaggcaagaacaaggagacacaggtgc

SEQ ID NO: 606654 - DNA, 533 bp, Homo sapiens
  misc_feature (6)..(7): n is a, c, g, or t
  misc_feature (399)..(399): n is a, c, g, or t
  misc_feature (435)..(435): n is a, c, g, or t
  misc_feature (440)..(440): n is a, c, g, or t
  misc_feature (460)..(460): n is a, c, g, or t
  misc_feature (498)..(498): n is a, c, g, or t
  misc_feature (512)..(512): n is a, c, g, or t
  misc_feature (529)..(529): n is a, c, g, or t
gcgatnnggaggaggaggaaatcaccatcaatgcctggtttggtccccagggaaccatctccccactacatcaggatccccagcaaaacttcctagtgcaggtgatggggaggaagtacatccggctgtattccccgcaggagtcaggggctctgtaccctcatgacacgcaccttctccataacacgagccaggttgacgtggagaatcccgacctggaaaagttccccaagtttgccaaggccccattcctgtcctgcatcctgtctcctggagagatcctgttcatcccggtgaaatactggcattacgtgcgggctctggatttgagcttctcggtcaagcttctggtggtcgtagccaggataggagctgaaaggggctgacattgcagacagnatttcatctgttcactaattttcctggggtcctggnaatcnatagagacaagcaggactgnaactgtgttcctgaaaaagccttcaattgccaattggnaagcccttgggggnttaaagcttccagaaantgga

SEQ ID NO: 606655 - DNA, 100 bp, Homo sapiens
cccttgcgaggttcatattcaggatcctgggcaggaaacccatgcacgtcgttgctccaacttacaagattatggcatttagatccagataccgtattat

SEQ ID NO: 606656 - DNA, 291 bp, Homo sapiens
  misc_feature (6)..(7): n is a, c, g, or t
gcgatnnggaggaggaggaaatcaccatcaatgcctggtttggtccccagggaaccatctccccactacatcaggatccccagcaaaacttcctagtgcaggtgatggggaggaagtacatccggctgtattccccgcaggagtcaggggctctgtaccctcatgacacgcaccttctccataacacgagccaggtgggcactgggggtctggggtgacgttgcaggttctccccactgccctggagatgatgacgtcctttgctttcttcaggttacgtggagaatcccg

SEQ ID NO: 606657 - DNA, 859 bp, Homo sapiens
aagcagagggtgatactaaataacgtaaagggggatcaggccacgccggatgtgctccgataaccgggatatgtggcacaagaatggttgtaatctagataggtactagtgtttggaaagccgagtagtcagtcctcaaggggaagattatctttgagtatacatgatgtattcatggggaatagctgagtttgaggtaattgtttagcaaaattctgtttcagagtgatgtgaaaacaagaagaagttatggaaattcatctgatgccagatatgtatgatggatagagggacaccaggaaaacattcaccgaagaaatgggtacgaatgcaatccatactgcgttggcgcatatgtcctcactcacaatgtgcgtggtggattgactgccaggtgacaatgtcttgctcttaccgcactgcagtacattcggacaatgtgctattcatagtagaagggtaaaccatcaaagacggtggtaggctgaaccatgattgaagcaagtgagatgaaatgtgttttgtctacacccacaggaactggtctggatgtgccttcaaccagatgaactgaggtcatggctgggacatatacctcttgactgggaaatgtggccctgaattgacatggagttccattaaattgcagatgttgtctccattacctttaggtatagtcaattcaaacgtattgaggataggttcaataacgtaaactattctctaggggtgcagaatgccctcgttcatctttgatatttcacaagcggagggagatcaccaacaaaaacaccttggcgggggccgggctttggaaaaattcaaagacatttgggggggggggcacaaagaagagaca

SEQ ID NO: 606658 - DNA, 314 bp, Homo sapiens
agctgcaagtctagaaccgagacacatataaaagatgattttacatggaaccagccaccttgaaaaatattctgaaaaacatgatttaactttagaaaataaaacttttcatacttaagagataacatgatgcaaacgttgcttgttggcctgactttccaggactaagaccctctgggaatcaatggggctcggtgacatggcgtaacctgctactggggtgtggtctcagacacaaagatcacactggatgttggcctacagaggcaggattctctcattgctggatgactctagaaattaagcctttgcaa

SEQ ID NO: 606659 - DNA, 562 bp, Homo sapiens
  misc_feature (530)..(530): n is a, c, g, or t
actttcaccctgccatcaaaggatgtgtttcagccatgtcacaaaatcatataggtgattgccatctccttctccgatattaccccctgcccaccctgccgcttttaccgtatgggttcctttgggtgggtgatggagggtgatgtgatcagccatgacatcagcatgctggctgtgaccccggaaagatcgggccgccattgtaaatctcagccagcgctcgcaggtgtccggggcttctctggcagaagccatgtctctcacatcatgtgccagcctccaccctcacgccatttccagggaacagactgcgggtatgtagcagtgtagtctttaacctgctctgatacatattcagagtatggattgttgtttagaaagagttgcatgtttaaagagtttggtactagcttttcattacttggtatctagattatcataatggggctaccactttccttggttttatatccatttcctcttggaagtccttgttgcttatgtgacctgttggttgttccccggactgngcacctgcaggagtcagggcagacggcagatg

SEQ ID NO: 606660 - DNA, 595 bp, Homo sapiens
cactcggggctccctctcgtggtcgacaggcgctctctgcacacgcctgcagtgctccaccgcgagcacgagagtggagcccccgcctgctgccctgtttgcactcgtgcctgttgtgcctgcttagtggccctgcgagccccgtcgtcgacaatagttcggtggacggcagtgcggggaggcgcatggcaaccgaaggctggacgtgtcccaatgctgcaaagtcgaaacatatgcttttcgtaccgaaagaatgactcgctggacgaattattatcaatggcttgtgaatagcttgcggcaagacacatgatgtgtgctaaacgaacgtccctcaagcatgcggaaccagtggcgtgtcaactaactgttaaagagaatacattgagcacgccaggagcaccaagcttacgtgatgtggagatagcatcggaaaaccctcgtacaggtaaatacccctgtttacgaagggagcaccaagcattgaagcaacgctatcaaccaaatggaaccagtagatagtgctgctcataactcgtccccgtgccgaaatacatcggcgatgtaaaacgtacctgactattgacaagtacag

SEQ ID NO: 606661 - DNA, 510 bp, Homo sapiens
tgatcaggagataggacacagccaccttaataaaaggaagaagatactaaaaatctgtcaaacccagcagtactcaaggcctagagctccatttgttttttatctgcctacttcacacacctgacgatatgttgtcggatcttattattggaatattgttgtgtctgcctaagaatgaaactttcactgccatttttatttcaatatttgtggctgagaacagaaaggaggacttatttgggattacaggaagcaaaggtagaatttctggccaataacaattgtacgtttagaagaatttggggcaacacttgctttcattgtaacacgccacctggtcacaagattatggggaaataaatatatcgtcttcactttattttttttgttgctggagattattggtatttactaaaagactggacatttactgagaggtcacattggctcaggtttctaatttctaatttctaacccattttccaaataaaagagaagtgcaaaaaaaaa

SEQ ID NO: 606662 - DNA, 1149 bp, Homo sapiens
  misc_feature (918)..(918): n is a, c, g, or t
cgtgtgtgtgctggccatagtggacctctacaatcaaccccgtcccccgtagtgtctggctggccttctacccgttggtgtgcttgggtggttcctgtgtcattggctccatcctatgtgggctttctacactcgcggactatgccgatactgagccctgcctcggtgccctttgtgaccgctcggctcgttcttacagcgcacttgtcgggcgtgggtgctcttgcgagtcgttcatcgaacccgggtcgagtcgattatgcgatgagattggtgtgtcacaccatctgttgtcctcactatcatctctgggggtcttccaattgcaggagttgttcttctgtgttaccagacatgtatgcatctgagctgtcctacctgggtatggcagtgcgcctcgatgctcttcccaaacagtatgggcaaatgcatgacattggttggagacgcttgggccccaatagtcgaaatgcatcaatggcatgcgcgatccttgatgtcgcggccacagtgggcgcaatgctccgcactagcgtctcggcgttgctccttgtggctcgttgtatcattgctcgcttgacatgttccgaaggtgccgcaatttcaccaaatgagaagccgcaccgtgtcaaccagagttccgatctcgttgtgcaagagtcgtaaagggaagctacacctaatttgtaactcgctacatctccaacggagatcagtcgcctctttcagtggatttaccatctggtgaccccttggtcctaagataagacacctctgtgagtggccaactgagccccttaaggactggggcgtgggaaaccctggcacagtcttgggctcgaatttatcattcctttttgtacaccccaagggcaaagagaagtgggcgcaaggcacgggtactgttcgttggtcggncgtggccatagttggtgttcgccattgtcgttgtgccttcgttgttgttgcccagtggtggtggttgtagctgttaggtcgggcggggggttttaccccagagtgttctcggggggctagggcgcccccgttcggcacggggattcggggcctttggggggcacccccaaaccggcggcagactggccccgcgccactggtgttaagggggcgcacaggtccagggggggg

SEQ ID NO: 606663 - DNA, 601 bp, Homo sapiens
  misc_feature (30)..(30): n is a, c, g, or t
  misc_feature (44)..(44): n is a, c, g, or t
  misc_feature (56)..(56): n is a, c, g, or t
  misc_feature (68)..(68): n is a, c, g, or t
  misc_feature (80)..(80): n is a, c, g, or t
  misc_feature (184)..(184): n is a, c, g, or t
  misc_feature (233)..(233): n is a, c, g, or t
  misc_feature (235)..(236): n is a, c, g, or t
  misc_feature (356)..(356): n is a, c, g, or t
  misc_feature (358)..(358): n is a, c, g, or t
  misc_feature (371)..(371): n is a, c, g, or t
  misc_feature (447)..(447): n is a, c, g, or t
  misc_feature (452)..(452): n is a, c, g, or t
  misc_feature (465)..(465): n is a, c, g, or t
  misc_feature (468)..(468): n is a, c, g, or t
  misc_feature (476)..(476): n is a, c, g, or t
  misc_feature (485)..(485): n is a, c, g, or t
  misc_feature (505)..(505): n is a, c, g, or t
tcacgccgtacccgagcgcgtgggtgcgangctcaggacatgtnccggcccctcangtcggaggtatnggtcgtcgtgtnggccgaggaagacgcccgccgggagggtcagtccagctttgcggatgtcgacggcatcggcccagcgtgccgaaccataagtcgtaaccagccgcgactgccgngaacgccataccgacatggcgatggcgacgagtaaagcgaacaaaccgntnncacccgcaatcgcaccgcctgtgtcgaagacgtgcggcgcgtaggcatcaaagaagaaccaccattcgaacaagcgccacgggtgataaaccggtacacctagaagatcgaaccagggcnanccgaggcgtactngatagccaagggtcgctgctgtccattgtgtggcgccccagacgccggcgatcacgatgccgattaccacagcganctggncgaacagaacgtncgncccttgcntgacctgtnctccgatttctcctgcgctngtgtctcattgaaaagcgtgcacacggggtgtcgcaggcgtaaggaatcggtctgggctagtgccggtcagagaaccgtcgcaggacaatgatcga

SEQ ID NO: 606664 - DNA, 316 bp, Homo sapiens
agcagccagatggggttttaggcaaataccccccaaactgcccagccaggtccccatttcaaagggctttccccggagcaaaagcagtttcgtttgtattgtcatcccccccatcaactttttttttcccctcccatgatgtatgccaatatcattattttcgttatttggaaacccgtcatcatcatcaatgtttcgtgaatttttgggggttatttttaacatagcatgtaaacagcccccccccccaaaaaaaactagctcaggataaacatttttaagagtttttcataggggcttatagtttgccccccca

SEQ ID NO: 606665 - DNA, 510 bp, Homo sapiens
  misc_feature (210)..(210): n is a, c, g, or t
  misc_feature (237)..(237): n is a, c, g, or t
atgtagctatctagtgtgttgtttagggagacagggtttctctctgtggcccaggctgaaacagagtggtgtgaacatagctcatgtatccttgaaaaaccaggctcaaagatcctcccacctcagcctctcaagtagctaggactacaaggcacatttttaatttctggtagagacagagtctcactatgctgcccaggtttgaactgnaacttctggcctcaaggggtcctcggnccttggcctcccatagtgctggtataacaagtatgagccatcacacccagcccattgccggttgtagttgtactatgggactaccgtgaggatggttgtgaccccatatatgattttcttaaaggatggttcagaactggaaaattgtaacaaatgtggcacttattgtggatctatcaccggtcatcataacgggcttcggcttgtaatccacaccacaccaggacttaagacactggggactgatgtcatctagagctcttcatttatttg

SEQ ID NO: 606666 - DNA, 155 bp, Homo sapiens
aggtgatgaagcccagagcaggaggcatctgacccttgaagtatcccatcgagcatggtattatcaccaactgggacgacatgggagaagatctggcaccacaccttctgacaatgagctccgtggtggcttcccgaggagcaccccaccctggt

SEQ ID NO: 606667 - DNA, 292 bp, Homo sapiens
  misc_feature (2)..(2): n is a, c, g, or t
  misc_feature (281)..(281): n is a, c, g, or t
gnttttggaatactcagtgtatttgcatcatagaaaatgtctgactgtttgcaaaataatattctgttttaagaatccatcttacctctctttaagtttccatacacttgagagccaacacaacatatttattactaaaaagatgctttgctagaaactcaaaaaccagcacttccttttggcacttcctgcccagttttctcttttgctttaaatgaacatcatcatatggaattggaataggagagtatgagtacgggcagagaagtggatcagaaaanctagaatgagg

SEQ ID NO: 606668 - DNA, 307 bp, Homo sapiens
  misc_feature (178)..(178): n is a, c, g, or t
acaatgtttccctttcagctcaactgcagaatagtttagaacagactttttgatttcacaatactgtttccacacttacttatatctgtaactttctaactttaagggaattccgcttatttgacatttaactacctcagatatgccaccaaacctgttttcatcattagttattttnaccttgtctactttaaaacagtgaaattattaggttaaattatgtttttatccagttactctaagataccttagtgtttgtctacttattacaactcaccaaattactgggttttatatggcctttggg

SEQ ID NO: 606669 - DNA, 416 bp, Homo sapiens
tagagcagaaccacttcccaatcacaccccatgaccattttctggacactcaccagcggggagcccagcacacacaccacgcagtcagccttgactgggtctctgacactaacatgaaattaggttaatccaggtgtttccttcccgaggcaggaaacaccatgaggagcagcacaaaggcactgtgatccagggctggagcacggacagaggcaccttggagaagcctgtgacaaacccaaagcttctgcctcaaacaggccccaggagtggggacagcgaggtaccctagtgtggccaggggcaccccaatacagacaccctcaccctctcctccaaaactcaccagctcctacgtggccagcccgaggctcactgcagggcttcccactcataacgcaacttcaaaaaaaaaa

SEQ ID NO: 606670 - DNA, 355 bp, Homo sapiens
agtttgatgtagcgattagcgatcaaatgcatccggctcgtaagtagttcagcatgcaagcgtctcactataggcatatcaaatcgttgctctggagcgtcatgggtccacggtgagagaactatgtgattagtcacaagtctcaatagagtctccggctatacgtgacatagcctattcagggacatcattcatagttcatccataatagcagtacggactcttctgccgatactatgcaatggctatgatcagtcaggccataatatgctcagccctgtatctatttactcgtggaacaaccgcactacagagtgattcgcaactacacacatgcatggaaccacaagcgtgt

SEQ ID NO: 606671 - DNA, 141 bp, Homo sapiens
ggcgtgaaccactgcacttggcctgttttatttttaaagaccctgtttttctccaaattattgatcacatgaactgcttattgttaccaataacgtatgtgtgcacctgtcatttcctttacaaactcaggatgggctcct

SEQ ID NO: 606672 - DNA, 374 bp, Homo sapiens
gctatgaatttttctcagtttgctgcctagtataaaaatttagtggataaagattcttggccgggcgtggtggctcacactggtaatcccagcactttgggaggccgaggcgggcagatccgaggtcaggagatcaagaccatcctggctaacacggtgaaaccccgtctctactaaaaaatacaaaaaaaattagccgggcacggtggcgggtgcctatagtcccagctacttggaaggctgaggcaggagaatggcaggagcccggaaggcggaggttgcagtgagctgagatcgcaccactgcactcgaacctgggagacagagcgtgactccatctcaaaaaataaaaataaaaaaatattctttactgt

SEQ ID NO: 606673 - DNA, 104 bp, Homo sapiens
gatgcatgcatgcagtgcttgcatacgtgcttatctatcttcacaaccacgggcctgaggagctggtgcggtctgaaggagctcaagcacgctatgcaggcgtt

SEQ ID NO: 606674 - DNA, 210 bp, Homo sapiens
aatcaccatatataggtaaatcaggtagcttctctcacatttgtctctaaatgcatatcttacgttcacaatcccccaaagatggggaaactctactgataaaattcaacactatttctccaaaatccatggttcaggtaaataaggaatagaaaatttaaatgttatggtgcttagtagggtagtttaaaataatagtggaagtttacc

SEQ ID NO: 606675 - DNA, 907 bp, Homo sapiens
gggtcaggagaagtggacacagggacgcggggctgtgtggagttgctgtccgaaggatgggcggggaggtaacaagaaataccgtgcctgaggttggatgtggggaatccatcccgtggggctcagagtgttgtactcgttaaaaaaatggatcattcgatgtggtcttacaagtgcactctaataacggaagcttgttgcggtgccatagaccctggttgaagaaatggccatcgtgcttcaattcgactgcacaccggtaccgacaggtggtacagagtcccatatatgcgcgtgcccctgtggggactgaacgaagggatgccaaagttgagttccctgtaggaagatcagcattttcatagacaaaaagcggatcttgacataaatttcagatagaaatatgagtgaccacggaatatacgaattgcaaaaaatgagcagtctttctgggggagcaggttccagaatgggcaagttcttgaggtgattcgcttcaaaggccagggacagttgtggccgagaaagaatggctatgtgcatagagtggaaagagttggagttattatctgaggaaaataatggaccgaaagggaattttaatttcctggtttgggcttcggacccatggtaataaacgcgtgtaatcgttgtcccggcaaacatatagaccactagaaaaataacactgtttggcgcccgccctccaaaagtttaagcacatcttgttggggcgcgccaggacgcctgctagccatggccacaccggtccaacaaacacgggctgagaagtgcggggtctcacaacaaacccccgggccagggttagcaaccaggagggtcggcgtaggacccagggcaacagcaaccgccccgtgtacacccacaccctgcgccgagcacccac

SEQ ID NO: 606676 - DNA, 133 bp, Homo sapiens
catggcgaaatcggaacatcactcgcccatcaagctcttgggcagcagtgctgtaatcagtgcaacacatttatctagtataaatgctcccatccccaggcagcaatgtgctatcgaaacttctaaaactagg

SEQ ID NO: 606677 - DNA, 184 bp, Homo sapiens
ggagaacttaaaatgtggtaaagtaagaaatgttaaaaagtccctgtttttgtcctgcaaattttagttctatttctgggttaaataagggattttctggacacagattatgagaagttgtagctctgatgtctagctgtagtctcctccgatctgctgattgcattattttaatttgctcttt

SEQ ID NO: 606678 - DNA, 152 bp, Homo sapiens
gcgcgcgttcgatagcctgggagcacaagaatgggtacaatgtagttcatgatatcctgcagcaattcaagccgggaaggggccaagatttgagtgcttcagttccaggagcagactatccagcttgagctctccaacaagccggtcggact

SEQ ID NO: 606679 - DNA, 459 bp, Homo sapiens
aattcggccattatggccgggaagtcttctgcttgttggtgctggttactggaagatgcagccggggagacacagggtagaaggggcaaagtcttaacttaggaccttgaggaagtaaaggggtaatattctaggatataagttggaccacaagttgaaaccttgagcacaggcttccagaagccgttggaagttgccgccagaagctgtaaccatgacgggggaacttgaggttaagaccatggccatgaagccggggtaaaccttgaggatcacaggcagaatcgccgatggaactgatggtttggaaattaatctgggccagggaacagacaagctgaacctgcatttaaaccttggtttaagcgaatccaccattgccgtgaactaattgaacggaagcaactgggggcaggaccaccggaaggatcacttgtgcttaagccaagggtaagaggt

SEQ ID NO: 606680 - DNA, 348 bp, Homo sapiens
  misc_feature (38)..(38): n is a, c, g, or t
agtccccctcctagacattccagataattgtccaaagnaaggaaaggctttagtggtccctgagtggattaaggtagatatgggggtgatgtggtatgtgtgtagtgtggaggctgagagggaggaaggtgatgaaacgagcaatacaaaaaataatttgagagcttgggcaagataagtgagcccgtctctataaaaagttaaagaaaattagccagctgaggagacttgggagggaggattgcttgaacccaggagttcgaggctgcaatgagctatgatctgccatagcactccagcctagactctgggtgacagtgggtaacagagcaagaccctgtcaaaaaa

SEQ ID NO: 606681 - DNA, 199 bp, Homo sapiens
atgacagatacgaatcgagctctttacccgatgatgtaatcttggcccgatgagttaaatctggcgagtgagtaaatctatgggcgatgagtaaatgttggcctggtgagtaaatgtcggtctctggcggcgggatccgtcatcggccaagatttactcatcgtcaatatttactcatcgggccaagatttactcatcg

SEQ ID NO: 606682 - DNA, 108 bp, Homo sapiens
  misc_feature (4)..(4): n is a, c, g, or t
cggnatggctgtaatgtctcttccatcatatgtaatatcagtggaacaggcagcgctactcaagtcctaaggatcctcagtgatcagtgatcacatggccactcaata

SEQ ID NO: 606683 - DNA, 332 bp, Homo sapiens
tactctggctcagggctataccggcgcctcctccatctaatacactgatcagctatatactgctgcctcctcctctgaatacactgatcagctactatactgctgccccctcctcctctaatacactgatcagctctataccgctgcctcctcctcctctaatacactgatcagctcatatactgtctgcctcctcctcctctaatacactgatcagaacatatactgctgcctcctcctcctctaagagaatgatcagtgtcgtcattctgctgcctcctcctcctccattatactgatcagaactatactgctgcctcctcctccaccaa

SEQ ID NO: 606684 - DNA, 151 bp, Homo sapiens
  misc_feature (81)..(81): n is a, c, g, or t
acacatgagggactggtactgaagggccaggcgctcccattgacgttggtgcatccctggctacccaagaaaaatggccgntcaatcaacctgcgaggtgcactcacactcgatggtcacctgagaccgcatggcgatgcctgggaaggca

SEQ ID NO: 606685 - DNA, 145 bp, Homo sapiens
acctagaggatccctattctaatcgtggtgtgtctatttgtaggatacactcgactctgtttattgaatttaatggtccctttctttgatggtgcttgcacggttttctaggtagaaattatttcacttattatacatgggtacc

SEQ ID NO: 606686 - DNA, 111 bp, Homo sapiens
agctgtcggtatccctgtgctggtgccacactgcctcatgcactgactgtttttaagtaagccgtgcaccattagtatgtcaattcttcctgctcttcttatccatcaaaa

SEQ ID NO: 606687 - DNA, 1159 bp, Homo sapiens
  misc_feature (154)..(154): n is a, c, g, or t
tgtatgtatgcatatatgatgtgctcgtgctctatagtgatgtgtactggtgtgtatatcgtctcttgctatgatgtctcattatgaatcatgtcgtgtgtagatgtatatgtcatgtgctttatcctatggtcgtgtgtgtaatgtatcctanatacttgtgttctctgtgtctcaggtctatgattgtgtttctgtgatatctgtgtgtgtcagtgtggtagtgttatcatgtgtgctcactatcatgtatgtttggtatagcatgttactgctgttatcgttgtcattatctatcgtgcctacttatttcagctgttctctgatgctactggccatatttgtgtttaagatgtatcttatgtctgtgatctggtgctattagtgaatctcaactgtgttgttcaatctctagagtgtactgtatgttgtagaataagtctgttgtgaaggttgtcattatctatttgtatagtgttactagcggatcgatatgtgtagtatctgcactgtcgtctaatcatcatcctggataaccggttgtcttaaggacagtggacgttctcgaccttccctcattccatgtccgaggttccggcatccaacgtcttgcctttctgcgtttcaagcaggactagcgtattgacttctatgaggacgcacgtccctcactctgctatcatttggcccagcggaccttcctcactttgtatttctacaagaaataccaagaaaccatgactccatccgttgttccttcttccagtgcgtctgggatactccgtcacctacatcttccaccagcttctggacatgcgggagcctgtgattgattttcggcggccgcccccttaccaccccaagcagaagcgcttcccccaccggcagcccctgcgctacctggaccggtacagggacagtcatgagcccacctatggcatctactaaggagccagagtgtgcgcatttcagagcatgggatttatcggcagcaagagtaaagacacagctccagagtgccacactttggggttctggtccctccttaagcagccccccttttttgccccctcccgttagagcccaggggttggagtgaaagttactttcaggtggtggggtggggaatgtgaataaacatgaattctttcccggaaaa

SEQ ID NO: 606688 - DNA, 414 bp, Homo sapiens
tgtacgaaggttacaaggattaagtaacactgttccaagtgtcgctaaaaaatgtttttaatgaattatgtggcaattccggggaatgttctcaaaatgaaatattcatactttattaaaagtaaattagtatgttggataagttgcgttgtttgctgtatatcttctgacgtggaaggctcacagtttaaaacacaattagtggtaaaatcgacacaggaaatgtccagtacagaaagtaccagccacagtaccctcataactccatctccttccccaggcatcactctttccagccacttcaatcctaaagcagtgagaccctcattttaacacacagagcctccctgcctaccctccttccctgtaacgtgagctactgtagtccatttattagttcttcggttatgcttc

SEQ ID NO: 606689 - DNA, 80 bp, Homo sapiens
ggagagaactagtctcagttttttttttttggtcccaagtgtctttttgtaagaggagaataaacaataaggaattactg

SEQ ID NO: 606690 - DNA, 139 bp, Homo sapiens
gtagcgtaggagacgcgtcacctacgcgtcgagaacgaacgtgtcttcacatgtttacaagatgaaataatagataaaagctatactccatctaaagatagagacatgcctcgaaattgggcacgcaaggggcaacccc

SEQ ID NO: 606691 - DNA, 354 bp, Homo sapiens
gagatagagtctagaggaaccatggctctaactgggtcaagtcctcctagctctgaatctaaggctgcagagctgtcctttggactgtagtctcttcatgctttccagagttagagccttgatcacggaacattattgtgtgcagaagaatactgtacctagtactaaagtctgttcatcttggatttttctttagctccatcagtccttccttgctaatctctaatcccctgaagcctaacacagttactaatgtgttatgccttaacctcttttatctttccacattggtgcttctggatggggctctctttacttactgcttaggcacatagtcaccttctgtggactacc

SEQ ID NO: 606692 - DNA, 656 bp, Homo sapiens
  misc_feature (33)..(33): n is a, c, g, or t
  misc_feature (51)..(51): n is a, c, g, or t
  misc_feature (97)..(97): n is a, c, g, or t
  misc_feature (131)..(131): n is a, c, g, or t
  misc_feature (185)..(185): n is a, c, g, or t
  misc_feature (207)..(207): n is a, c, g, or t
  misc_feature (223)..(223): n is a, c, g, or t
  misc_feature (232)..(232): n is a, c, g, or t
  misc_feature (238)..(238): n is a, c, g, or t
  misc_feature (247)..(247): n is a, c, g, or t
  misc_feature (268)..(268): n is a, c, g, or t
  misc_feature (302)..(302): n is a, c, g, or t
  misc_feature (321)..(321): n is a, c, g, or t
  misc_feature (324)..(324): n is a, c, g, or t
  misc_feature (591)..(592): n is a, c, g, or t
tgaggagctgctgcgacaggccactaccttgtncgagatgtgactcccgtntgtcccaaggcttcccagagcgaatcctgtgcggctgcaggctgcngtggcgttcgagtttccggcgtccggaaggaccngagctcttctcgcggatccagtgttccgtttccatgcccccaatcatcagagcnggagccgacagatatgcagggnaaccggcatggccaanagccgcggngactcnggcatcganctggggcacgcacctactccntgcgtgggggtgttccaacacggcaagggtggangatcatcgccaacgaccanggngaaccgtcaccacccccagctacgtggccttcacggacaccgagcggctcatcggggatgcggccaagaaccaggtggcgctgaacccgcagaacaccgtgtgtgacgcgaagcggctgatcggccgcaagttcggcgacccggtggtgcagtcggacatgaagcactggcctttccaggtgatcaacgacggagacaagcccaaggtgcaggtgagctacaagggggagaccaaggcattctaccccgaggagatctcgtccatgnngctgaccaaatgaaggaggtcggatagctgtaccaggctacccgggctcgcctatacgatcctc

SEQ ID NO: 606693 - DNA, 635 bp, Homo sapiens
  misc_feature (6)..(6): n is a, c, g, or t
  misc_feature (99)..(99): n is a, c, g, or t
  misc_feature (101)..(101): n is a, c, g, or t
  misc_feature (106)..(107): n is a, c, g, or t
  misc_feature (179)..(179): n is a, c, g, or t
  misc_feature (188)..(188): n is a, c, g, or t
  misc_feature (196)..(196): n is a, c, g, or t
  misc_feature (210)..(210): n is a, c, g, or t
  misc_feature (223)..(223): n is a, c, g, or t
  misc_feature (226)..(226): n is a, c, g, or t
  misc_feature (228)..(228): n is a, c, g, or t
  misc_feature (406)..(406): n is a, c, g, or t
  misc_feature (425)..(426): n is a, c, g, or t
  misc_feature (441)..(441): n is a, c, g, or t
  misc_feature (456)..(456): n is a, c, g, or t
  misc_feature (464)..(464): n is a, c, g, or t
  misc_feature (468)..(468): n is a, c, g, or t
  misc_feature (484)..(484): n is a, c, g, or t
  misc_feature (494)..(494): n is a, c, g, or t
  misc_feature (569)..(569): n is a, c, g, or t
  misc_feature (627)..(627): n is a, c, g, or t
tggtgnatgggataaaaaggggttctaaaacactattactagatcatccaaaccctacaaaagacacttatgcatcaaaattcttgaaaaaggaccaantncctannccctccaccctcccctcaaaatacccatgttcataaagaacaaaaccttatcagcttaatccaataaaaaangtgtcatanaataattntaaggcaatggttntatgaagacaggngangnagcaggctgaaccgcattcactgaccctatctctcagctgctcctcctcactagtcaggtttttcctgtgtaccccacttcattatttccatcatgcttacctctctgtttactggacattccccttgatctaataccaaacttagccagtctaactgtaactcagatgttaatctgnccacttcctggttagaacnnatggttgttgttgtnacagtgattatttantactattntganttattttaacaatganttactttttntcccatccaggcatgaagaagttaaaacctggaactcactgaccctgtgttataatttagtgctaaatgtaagcnacaacactggagcattgttattttatcaagacacctgaacatagcaaaattaattttnttcatttt

SEQ ID NO: 606694 - DNA, 501 bp, Homo sapiens
  misc_feature (110)..(110): n is a, c, g, or t
  misc_feature (221)..(221): n is a, c, g, or t
  misc_feature (224)..(224): n is a, c, g, or t
  misc_feature (233)..(233): n is a, c, g, or t
  misc_feature (285)..(285): n is a, c, g, or t
  misc_feature (361)..(362): n is a, c, g, or t
  misc_feature (378)..(378): n is a, c, g, or t
  misc_feature (382)..(382): n is a, c, g, or t
  misc_feature (384)..(384): n is a, c, g, or t
  misc_feature (409)..(409): n is a, c, g, or t
  misc_feature (436)..(437): n is a, c, g, or t
  misc_feature (451)..(451): n is a, c, g, or t
  misc_feature (484)..(484): n is a, c, g, or t
tacccctgtaccccagtaacttatggaaaaaaatgaatgacagcagagtcctcatcagaaccaatattcctcctgaacatagatagaactaaacaagattttgacaaatnaactctaacaacaaattacatagataatatgttatgactaaatgggttatcccaggtgtggagggttgatttaatgtttgaaaatcaatgaactaaaatagaccacctcantanacagaaaanttatttggcaaaatccaacacccatttctgataaaaactctcagcaaactgngaatagaaggaaacttcttaccctgataagggcatatatgaaaaaacctcagctaacatcatattgactgaatggnntgctcttaagaatagngacnangacaaaggtggctgctctctttacnacacctgggccggattttttttaactnntttaatttcagtanggctaagttggtcatctactgggatttcttaancctaattttgcctcttg

SEQ ID NO: 606695 - DNA, 318 bp, Homo sapiens
acatatctctccgacacattctcactttccattaatcatctctaaagggggtaaacaaggaaacctgctgggtgaaaacaggctgttggcaattcctgagatcatgtgacccattctctaaagactagactatttaacttaaatcagtgagaaactctgtgcagtagtgtccttgtatataccaaaacttcatgtgccttctcctgaacctgcaagctgtgggcaggtctgggggcagaggccgcatacaccgaccttacgtccaacctcagtgactgcctggagcaagagacctgaggtatggggacaaaaaggagg

SEQ ID NO: 606696 - DNA, 453 bp, Homo sapiens
gcagtggctcacacctgtaatcccagcactttggggaggcccgaggcaggaggattgcttgagcccaggagtttgacaccagccatagtgagaccctgtctctacaaaaaaatttaaaagttagccaggcatggtggtgcacacttgtaatcccagctgctcaggaggctgagataggaggattgcttgaacctgggaggtcaaggctgcagtgagccatgatcacaccactgcactccagcctgggcgacagagcatgaccctctctcaaaaaaattttaaaagttagaaaatatatttctatagtgcaataacaaagtgatttgtgcagggaaaactaaaaattctggagacattttttaagctcagcagtatttgcataaagaaatatttataatgtgaaaacaaagtacttcatttaattttgaaagatgtattaagcaaaaaaaaaaa

SEQ ID NO: 606697 - DNA, 1255 bp, Homo sapiens
  misc_feature (356)..(356): n is a, c, g, or t
  misc_feature (428)..(428): n is a, c, g, or t
  misc_feature (500)..(500): n is a, c, g, or t
gggcagcggaggcagcgcgctcgtcttctgcgggctctcgtggtggccctctccttttcgtttgccggaaacagtggcctccagtgtgtggtgtgtctctgagtggtgtcatctacaggtgttcaagccgacgatgaagaggtggcagtaacgtctgcaagcgccaagaaggaggtcgaagaaagcgcagacgaagggcgggcgctctttcgtgccatgagtgacggacctaagaagaacagtctattctcgctggacggatgggcagagggacgatccttggggtgggggcgagtgctgggctcgagatcgtgctcgacggaatctcgcgtcacgccgacgcgttctgtgcgagngattggcttgctcagtactagacggtactagccgcgtagtgacctcttctactgatgtgcaatccctagtgnagtatccagacggaaggagccataggacacgcgacggactcgtggggtggatccgatccttttcgttggggntcgccccgtagggtctgggcgaacccctcttctaagggaaggcaagacactagtattgtgagtgccagccctcgccaaggaagcgccactcgaatgacacgaagcatgaccagggtgctcgacatgcactgaagtttgctagacgctagagacgttgcttacgaggggagggtccagacggtaactcgcctagcgaaccgcttgggcgagacgagaggcatggggcggggtcagatggccgatcagtctgcccctgggaaggggcaaatgccttttggtgaagcccccctgtcttgggggccccctgaccctgggaggccatctggggaagacccctagacctgccgcttggggggttgcaaggcctggacccactgtcctggccaggaccgggagggggctggggggggatccccagcagggtggtgaggggccaattccccttcatccccgagattggccaaactgaaccactcgaaaccccctggattttgctttcttccgttccattcccttggcacgttctgggcctttcgcaaagctggggtttggatcttttggattccctcttgtgggcttgaagctgaccaaggtttccccccagggcacccccaggtgtggggggagggcctgccattcttgtagacagagattccccattttctcaagtggtcttccccttccagtgtggagacttctatacggcaaatagacttctggcgtgctcgatatgcctgggtaatgacaggtggttc

SEQ ID NO: 606698 - DNA, 328 bp, Homo sapiens
cgtcgattgatggtacacagtcttactgcggctctacaccctcagtctgtggagaccgacgcctcaccatagttcaggctcaatggaaacacaggtttccccggagtaccacaaaaccaggcctcagtgagaaatctaccactttctacagtagccccagatcaccagacacaacacacttacctgcccgcatgacaagctcaggcgtcagtgaagaatccaccacctcccacagccgaccaggctcaacacacacaacagcattccctggcagtaccaccatgccaggcctcagtcaggaatctacagcttcccacagcagcccagg

SEQ ID NO: 606699 - DNA, 411 bp, Homo sapiens
  misc_feature (30)..(30): n is a, c, g, or t
  misc_feature (57)..(57): n is a, c, g, or t
  misc_feature (86)..(86): n is a, c, g, or t
  misc_feature (399)..(399): n is a, c, g, or t
  misc_feature (402)..(402): n is a, c, g, or t
  misc_feature (405)..(405): n is a, c, g, or t
ctgaagattaacaggtgtgcaaccaaccangccccaagttaaatttttgcccttttnaagtgaaagacagggtctcgctatattgncccaggctgatcaactcccagcctcaattgatccacctgcctcagcctccccaaagtgcctaggattacaggcatgagccacccacgccctggcctcttttttcaatttctttttttgagacggggttggggggggtctcactctgtcacccatgctggagtacagtggcacgatctcagttcactgcaacctccgcctcctgggaccaagcaatcctcccacctacaggcacaccacacccggctaatttttgtattttttgtagagacacgagggttttaccacattgcccaggctggctgcaatccaatnttnatnagcacg

SEQ ID NO: 606700 - DNA, 407 bp, Homo sapiens
tatactgccccttctttccatctctgccccctgcatctgtagacaaatgcttaagtcagcaccgactcagccaggatggcagttacccaaggccacgccgcgccactgcttctctccctctcgtctgctgtgtctccctccctcccgtgcatctgtgagttcttcccagttctgcccacattcagtctccctgtttgcacttgtctgtggccagtctcctggaagagctacagggaactcatcctgcccccgctctttcccctcatcctgtcttcatccttcccatgccacgaaccccttgctctgtgggaacgccggcggctcacccgcgcaccccacctccttcccctcatcctgtcttcatccttcccacgccacaaaccccttgctctgtgggaatgcggccg

SEQ ID NO: 606701 - DNA, 756 bp, Homo sapiens
  misc_feature (697)..(697): n is a, c, g, or t
tgaagatctacacgttcaacaaagaccacgaccgggtgaagctgggtgtggacacctatttggcaagtacctggacaacatccacctgcaccccgaggagtgagcaagtaccggaagcatcaagctgcataacaaggtgtttcatgagcgcattaactgcctggaagggacccacgagttttttgaggccattgggttccttaaggtgttgcttcccggccagtgatcaggatggatccccgtacgtgagttctatgttgcttgagcagaagaccacctttggcccagtccccagtagtcctggagaggcacaaggaacagtctgctggcttgcgtgagtcccgtgcgcgccaagctggactaggcagtcgcctgctgtcttccagccctcgcccctggcctcgcatgttcgaactgccttggggttacttcgttcaagcctctacagtcgagagagagatcagagcgggcagcacgacggcgtcatggtccagaggctggtgcgaggcgcgctgacggtcgtgcttgcggagccaaggtcccgattgcgcggcagagaggcacggagctcagcgggggccatgtcgccagagtaccgacttacaacgcattgcttcgcgcggttgctgccatcccgccgtactggacttgcgcgtccgtgccagcggccatctcattcttagccggctactggcgnagccggggccttggtggggcggagtgttaccgcgtgttccgttcccgtgcgagggcccc

SEQ ID NO: 606702 - DNA, 540 bp, Homo sapiens
acacctcctctcttaaactctagttactgaatcgcactttgtcttttccaaaacataatattctgagctcagcagacacttccttatgcgctgttacgcatggtagcgttgctggaattacagtaagaattatcatctgccaggagccagttcaacccatttctgatataaaaagccattttagtactttgggaggcagaggtgagtggattacctgaggtcaggagttcgagaccagcctggaccaacagggtgaaaccttgtctctactaaacatataaaaattaggcttggtggcgcacacctgtattctcagctactcattaggctgaggcacaaggatcacttgaatctgggaggcggaggttgcagtgacccaagatcaccctagcctgggtgacagtgtgagactcaaaaaaaaaagaaaaaaatgaacttttacctcgagagctccaggaagccttgaaagagttttaaggagattgaactgatggggatcattacttggtagttgagcgtaaagtgctcaggggaaggtgg

SEQ ID NO: 606703 - DNA, 418 bp, Homo sapiens
gagacagcctgggcatcagcacgatcccgtctctacagaaaatacaaaagttagctgggcatggatggtgcatgcctgcaggcggagctgcttgggaggctgaggtgggagggtcgaaggaagggcggaagggaagacgggaaagaaaagaaagaaagagagagagagggaggaaggaaggaaggccacgggaaagacggcaggaagggcggaaggaaggaagaaagcaaagaaagaacgggaaagagagacagcagaaagaaaaggaaagaaaaaaaagcaacgaaaggaagcgagcagcggttcttaaagtgtggctcagggcccccaagagaccctttccaggagcatctcgtgatttcacatggctttttcactctccataagtgtacaatggggcacacattatggcaggggg

SEQ ID NO: 606704 - DNA, 805 bp, Homo sapiens
aactcattatgaactacataggtgtggctctgagctatgatatcaattggcttcctacgagttgtcagcgtgtgagcacaccatgatatttggcagataaggcaattggagatgtacgaccacatgagcatatttcgagctccgctagccgatgatatctaatacggcatatcccccaccggcgtcaagagtgatctaaagaccttgacatcgtatacactcgcacgtgcacagacacgatgaccgatgatctagttgccagtgcctgctggatgccctaggattcatctttcttttcaccgtagggtggcctgactggcatggtattagcaaactcatcactagacatcgtactacacgacacgtacctacgtggtagctcacttcccactaatgtcctatcaataggagctgtattgccatcataggaggcttcattcactgatttcccctattctcaggctacacctagaccaaacctagccaaaatccatttcactatcatattcatcgggttaaatctaactttcttcccacaacattctcggcctatccggaatgcccgagtactcggactaccccgatgcatacacacatgaaacatcctatcatctgtaggctcattcattttctctaaacagcagtaatataatactttcatgattgagaagcttcgttcgaagcgaaaagtctaatagtagaagaacctcaaaactggagtgctattgatgcccactacaatttgagaccgtaataattagaaaaggaggatggacccaagggtttaggacccgtggtcatgtag

SEQ ID NO: 606705 - DNA, 469 bp, Homo sapiens
tggctgctgtatagagttttgacagttataacactgtctaaaccacggcagtctgcgattctgtttctggttgtgcggaatatgcagccacagacacagatcgaatgtgtgatcttgtcctaatctactttatccacctgtaaaaggaagacgattggaattatccgaaggagactgactctgtcctcctccatctgtaaagatgcttaacaatcattttctccaaatcaaccacctaaacacattacaagacaatgtttagcttctggctttcagaaacccaatggtaagggtcagtttagttctggcacaaagactgctgtgtgccaccctaaacgtacctcatcttgcgaagtttcttgggtaagccggggttagcactgatttggcatatcgccattatagaaagtatccagggccagacattacacacctgggttctgactttggcacaggcctcagaaagcct

SEQ ID NO: 606706 - DNA, 415 bp, Homo sapiens
gtaccactacactccagcctggcaacagagctagactctgtctcaaaaaaaaaaaaaaaaaaaaaaaaaaaaatttttcgggcgcggccttgggccctcggaaaaacgtttttaaacccttccggtgggcgcgcgcgcgcgggcgcccaagtatggtgaacgtgtggacactggggccatataacgcgtgtgttcccttaagggggctacccggggccttggcattatggtgcgttggggtcttctctccccatattaaaacaacgcgcccgggggggaacccgagggcgtgctgtggaaaaactcccaagaatgggggggtccaggagggcgctcttaagggggcttcattctaacacgggaggtctccaagccggaggcccgagatttcaattttaccccccgtctggggggc

SEQ ID NO: 606707 - DNA, 138 bp, Homo sapiens
ttgcacgtcgggggggtgtgcccagctctgaaggtgtctggatcagtcggggaggggtgctcagctctgaccatgtctggatacagtcggtgggggggtgccctagctctaaccatgtctggatgcgtcaagggggtg

SEQ ID NO: 606708 - DNA, 107 bp, Homo sapiens
gactgacctgctccagtccagatctccatccgctccgtgcccatggagcgggaacatgccaatgtctgaatccagccagagggaaggtcgctggagagggtgagaat

SEQ ID NO: 606709 - DNA, 208 bp, Homo sapiens
tcacgcgatctcctgcctcagactcccgagtagctagggattacaggcacacacacaccacgccacggctacaatttatatatgtgtctttttagtagagaaggagttacgctatgttggccagactggtcttgaactgctgacctcgtgatccgcccgcctcggactctcaaagtgctgggattctgtgtgtaatgtgcacctccac

SEQ ID NO: 606710 - DNA, 913 bp, Homo sapiens
tccctccccccgaaaaaggggggtttggcccccgaaaaagggggtggccctttttcctttgtgggtttttttccccccttttggttcatctttattactttaatttcacacaatgttcaaaaaagggcctggggggaagcggacgagtgggggacgctcggacacccgcgtggagtgtgggggtgcgtctatgagggggaacccgcgctgtgtacaagcaagaacaaaaagatgacagggtgggccctccttccatgaaaagccagtgacgcgtgtttctcccgcggaatttccgcgccccagaaggaaaaaaaagcacgaaggcatcacatattatctagcgggcgacacggaggggcgtggaagtgagagtggtgcgcaccccaacattagaggggacaccgcttatcccccgggagaaaatatggggcgaacgtatggcgaggacccaaaaccacagaaggggcatggcgccccaccactacataaccccgccataaccctgtggagcgaacaccagggagtggtctacgcgtcctgtgggcatcaaaggggacaagcgctatgagcgcggaataacttcacaaacaaggtggtataatccccccagcgaccgaacagcccagcccgcggggttgattaccccacccccgcgggttatgtggagaaaaatatacacgaccatcgggattaagaaggacaaaccgctgcggaaccacaacacaagaacagaccaaacacaaccaacaagagatggggacgcgcggcacaaaacgagacacgatgaacaggcgacagacaagatgagcgccgacgacgacatagtatggaaaacgcggcccccaacagggaggagatatcaataaacgcaacaagtagacggcttaataacagtcggaggaaggaaaaagag

SEQ ID NO: 606711 - DNA, 110 bp, Homo sapiens
cctgtggtgcattggtgtgtgtgtgtgtgtgtgttggcaagggtattgtggcggtgcagtgggtcatgctgtctccgctcatggacgcgagcaggttgctcacgtgcatc

SEQ ID NO: 606712 - DNA, 102 bp, Homo sapiens
gtgtgctggacttacggccttcctaagtgagtctttggaagtcctttgactgaacgataaccacctcgcacacagtccctaccctcgcgtttgcctcactga

SEQ ID NO: 606713 - DNA, 407 bp, Homo sapiens
ccctatatcgggtgtcttactgtgccaaaacataaatcttagaagcaagtagacccttcataactatcattgaagctgctgaagtagtgtttaggatcctccatggcagttagtgaatgtagaagtacagtgttaaagtgttgtaaacagttactcagtgcaatgtatagcctgagtctatccataatggctatatccaatttgacatcacgttatggatcagtacacaatgaaaaaccaaagaaccacagtatatcttattcttaactttggtaaaccatgtataatgggtaactttttagttttcccaaaaggctgataaatttcaatattttgaatacttcattgttaattttgagtaggcagaggtaaactaaccaattaccataatgtttaagtactaagga

SEQ ID NO: 606714 - DNA, 154 bp, Homo sapiens
tatttatatctggaagtgatatcatattacaactgatagatgctcaaccacgtacaaatataactcaactgtgtgctgcttacagtcagtcctccaatctgactcacctggtggagacactttcgggctttgtcatattcgctcctcaggcagt

SEQ ID NO: 606715 - DNA, 843 bp, Homo sapiens
tttagtatgaaagttttcaagacgcctacaagtggaaaatgcactcctcccagccaaatcaagcttcgccagattccttacagctgtgtgcagtgaaatgactaatgaaagagccctctgctgctggtggaactttcacatatggcactgttatgccactcagcaggacccgaccctggtatttacatattggatgtcaccccaaaagcccctgaccagggggtttccgggatgtaataagaatgccactctgggctttggaaggtgcaccgtatgcacacccatactatagggcaggggttagcatttcagacccctgttcctcccttgacaagcaagtgcttttctccagggaagacgttcaggttcattcatagatccattggtgccgtgggcagctcagtaacaatagctctgctgcctaccagctgctggtggaggtgttgagaatacctaatgaggaagtcagggcccctgcgtgcttcagcagagctggatgcctggcatggcaatcaatggacacaaacctttggataatttccgtccttggcggtgtgttctatagcataggtatgaagtgggtgctctgggagctcagaagaggggcttttctcttaacttatgggtggccagggaaggcttcctggagctcaaatgactgagtggagtcttcaacattaaaaaaaaaaaaagaaaaaaaaagtgcttccctcccacccccagttaaaaaggtaatacacctcattgaaataatttaaactttacagaaatgtgttcctttaaagttcagagagtaaagaggaagtaataaagctgaaatagtagaatttctaaaaaaaaaaa

SEQ ID NO: 606716 - DNA, 606 bp, Homo sapiens
  misc_feature (1)..(1): n is a, c, g, or t
  misc_feature (236)..(236): n is a, c, g, or t
  misc_feature (244)..(244): n is a, c, g, or t
  misc_feature (332)..(332): n is a, c, g, or t
nagcttaatgtcagtgtcgagtaaaagcagtaatccatctcatatctgatctcatcagctatgctcactgatcactctcactctcatcagctctcgcctttccatgctgatactctgctcagtttgagagatgagactcatgactcataattctatttcccattgaatttatctgatcttctacctcctctattcacagaagatgtcccttagccttcaacttgtgccctacttanagtatttntagtgaagtgcaaagagcatttgctctatatagaatgcctctgtaacagtattgtacctggttgagcacacctgcaatatcatcatcnctgataattccttaccatatcttttctatgtttaggtttgttagatatacatatacttaccattgtgttacaactgcctatgtaacctaggagcaacagactataccaggggtccccaacccctgggccacagactggtacctttgtggcctgttagaaaccaggccagacagcaggaggtgagaagccagagagtgaagcttcatctgtatttacaaccacttcctatcacttgcattaccacctgagctcagcctcctgtcagatcagtggc

SEQ ID NO: 606717 - DNA, 175 bp, Homo sapiens
ggaaggctaaaacgcggtagctaaactgcagccaactttggttgtgtgtggaaaaggctttagccatggacaggagttgctttggagagatatcatcccctgttaatccgggaggcagaggttacaaggacttcacggaaacaagttcttaggaaaagagttttacttcaggcat

SEQ ID NO: 606718 - DNA, 800 bp, Homo sapiens
aactgaataccactctgtaattgcaaaaaaaaaaaaaaaaggttgccgctgtttggtggactttctgaatgcttctaagtaaatacaatttttttataagtatggtggcccttttcataggtctgaaattttctcttctggaggggaagctagctctttggctttggcccatttggaatccacttgatttatcacggtgtttatccttccatatagtagctaataaaaagctttggtctacacaccctgcatatcataaggggggtaacgtcagtggagatagtttcatccattaattggaacttccaaaattcttgatcaagttaagaaattttcacattagcccatttacttttaccaaccggaagagtaatcaatctactcaaagctgtgggattataagaaatcaaccttttggaaaggtctgtccttgagggactaattagaacaccgtttgttctacccttatacatgagggactctattcttaaactcccattaccattgtatgccagtaatatttggcagtcccacattaaagaagacctgagattgtattccccaaaagcgtgagcttaaaatacaagacttgccatattaaatttttggttcgacatagctctcagagacggctatgaaaatgcgtggctatagatgtctttccccattttatcctaaacttttggactggctccaggaaaccgagacttcgccattaacaggtattttcaattaaatgtgcgccagccttttacaaacacaaagatgcccattctcacaatagcggtaaatttcctata

SEQ ID NO: 606719 - DNA, 551 bp, Homo sapiens
gaatatagtcagccccaagactgccgggctgcgtgagccttcagggaaaggccgagctgcgccgcctgctgaccaaggtgctgcagtgagagtggatggcttgcggatgagtgcacaggccgagcagtcctgtgagaagactcgctcctagacctcacgcagccaggataaggaggacatatgccatgtgtggtcacaagagttagggcgatcgattgggctagatatgttagcgacacaccacacgtgagctcgccctagcgggtctccaggggtgccctagcgcgtctagaaacagtgagggctagagtgcgaagccccgtccgggatttatacaactcaaaccattcgggcagatgtatgcactcacccaaggccgagttcccataattggggttggtggtgtgagcagcgggcaggacgcgctggagaagatccgggcaggtgcctccctggtgcagctgtacacggacctcaccttctgggggccacccgttgtgggcccagtcaagcgggaactggaggcccttctgagcgagcagggctttggc

SEQ ID NO: 606720 - DNA, 150 bp, Homo sapiens
atacacctgcttacagtatcacgaagtgttctggaactgaaccagatgtgagccttcaaaagcagtgcaattggctcagtattcacagggaaagctgtgagggaagcgaaatgtggtgattttaaagctgttaatagtggtggtatcacg

SEQ ID NO: 606721 - DNA, 937 bp, Homo sapiens
  misc_feature (17)..(18): n is a, c, g, or t
aggtgacagaatctggnncacacacgctagtgcgcctcgatatgtccgttgaacgccgtttttacgatacggatatatcctcctgggtatacctatgtgggggccaccgcgggaatgtccacaatggcgcgaaactgttcaaggcgttgtgaaacttgacccgagggtttcacgtgctttcacataggaagttaagaaactcttgttggtggttttttttagcccctttcctgaatagcaggcgtgctctctaatctatggagatcggccccgcgccccagtgtttcgttcctccctcagtggtaggcctctgttttctacaggcttcccccacaatattagatcttctttggggagaataaatcgttttgaaggggttaaatcattcttaaactcacgggtttcggggacactttatcttgttaaagaccggggaagaatttcggtgttgaaccaaccaaacaagggttgaaaaaacgtaccttctgctggtatcaaggagtgctactgctgctctcaccagcccacggcttgccatggctaaaacaagtgcagggaccccgcgctggtttaagttaagtccccggagtggagccaaaatgactatagcggcgcccccatattcggtattcattctcctgggcgcggcgcatttacgtggccctcctccttatgtagttgttttagtcccaaacacatgttcctgccgcccctgggcctaaaatggctacaaatactgtctctgccccacgcaaccaaagtttgagcaatttcgccctgcagagtctggcgctgtggtgataacaaaagcctctgtgacgccgccgtggcattataaatgaaagaaagacggtcgggtgaagcacttcttggacgccaccgatttgccaggccatcccgcccggaccaccgggcaaccccttcttgggacaaaaca

SEQ ID NO: 606722 - DNA, 878 bp, Homo sapiens
  misc_feature (394)..(394): n is a, c, g, or t
ggatggaaactcagaactggcataccgtgtgagtcctactgaccccgtgactacacactgtggcagccgcgagggtgtccatggacacaatgcgaagctgcctggttgtgtgcctgccttgctttggactcctgtactcattctggacggctagtgatgggggtcgctcctgcctgaagtagatgctagaatggctaggaccccctgaaccgtgaagagtggcagcggatcacgtgcgcctgactatgacgtcagccacggaagggcgctactgtgcgaagtgagcgcatctgacttgatagggaatcccttgtatagcttgtgcggctggatacacgagagtctcctcaatagcctggactctagatgagcagacagtgacaccgttgtggtncgctccggtggctgtccaatggctgagcacgacagcaagctcaagcgggcggttggcgcagtagctggtaggagttagcccttgatatcgttggcaaggggcgcaaaccgactgacatctcaggcctggctcaaacgatcgagtaagaggaagaatacatgctccaatggggtctgttagagctctatggagaagatcggtggtgctccgatgaaatatcctggagggatcgcatcgtcatgatgctgtgctggcctagttgggacgtgcttggattgtactgtcgtagtgggggtaatcgacggtaggctccagccgtcaactccatcgagaagtacaacccgagggaccaacaagtgggtggcgcatctgcatgttcaccgggcagcagtgtggggtgtgggggtctggaagctgctcaaatttcccggcgcatcctccccgaagctggtcggtgtctccaacaggctttgaccactacaaa

SEQ ID NO: 606723 - DNA, 137 bp, Homo sapiens
ccctacaatcttccttacccccaggcatacctcctgtcaccccgaggtgttcctcagattgtagtcacttttgacattgatgccaatgagtatcctcagatgtctctgactgtgtgacaatgagtacgcggaaaaga

SEQ ID NO: 606724 - DNA, 132 bp, Homo sapiens
gtctcatcttctggaatcccacgtagttttactcactagtcttacactagattctcagacacaagtgattctcctgacctcagcgcgtcccgagtagctagggattacagggcgcctgccaccacgcctggc

SEQ ID NO: 606725 - DNA, 140 bp, Homo sapiens
cactccgaggatcccttagcgctcagtgtacctgtgtcgtaggcatccagacgtgacgggcaccggatgtcacctctgccatctgagcgtggtcccggctcagctcccacagagagctgtggcgggttttgtgcagcgga

SEQ ID NO: 606726 - DNA, 818 bp, Homo sapiens
ggacgttgtgcgatctccatcagctgtatagtaatactcgtgcgttggaataaggagtagtcgttccttgtggtgctgtgcttctctcctccagcgggcaagtattgggtggtgtcgtccatcgttcctctcccggcagccagtggaggccgcgcgtgcgatatatctcctccggcaatccagaagtaattcttttctttttcccttgaagcgaaccacgcatcttgtggtggcagaaggaggacaaaaattcttcctccttgtttgtgcataagataagaggaaaaaactagtacggcggtggtttcgagactacaaccactaccatgtgggggtgccactaaaagagacttttgttccacgctcatatttgttgcctggacactagtctattgcgtgtgtgacaccccagctgcccagaggacactgctctggggagccttcgtccccctcgttttcattgaatatgactcgagagcctagggtgagacttctattcccccgccaccgccttgtgtgtccagacaaatatatgtgtgtcgcccagctgcgcgtttctcttctgccacacggatattttcattcgtgcccacaaagccccgcgcttatgttgttttcatatacaagaggggactcaccccccactggtctcagtgcgtagtacatagaacatttcgttggagaacgggtcctgcgacaacgtgagaatatggagagacacgggcggtcgagaccactggaagtatcggggggaccacgacgaaacataacacaccgctggaaccggaatccccccatttaaaaaaacacacaaaaca

SEQ ID NO: 606727 - DNA, 334 bp, Homo sapiens
  misc_feature (51)..(51): n is a, c, g, or t
  misc_feature (91)..(91): n is a, c, g, or t
  misc_feature (116)..(117): n is a, c, g, or t
  misc_feature (142)..(142): n is a, c, g, or t
  misc_feature (144)..(144): n is a, c, g, or t
  misc_feature (153)..(153): n is a, c, g, or t
  misc_feature (166)..(166): n is a, c, g, or t
  misc_feature (191)..(191): n is a, c, g, or t
  misc_feature (193)..(194): n is a, c, g, or t
  misc_feature (226)..(226): n is a, c, g, or t
  misc_feature (243)..(243): n is a, c, g, or t
  misc_feature (272)..(272): n is a, c, g, or t
  misc_feature (306)..(306): n is a, c, g, or t
tcccctcctccgccccagcgcgcgcagcggcgcgcggaaacgcaggcaagnagtaataggcgggtggggcaggcggggcagggcaggcagnacagaaggtggaggcagccaccccnnggcggggatgaggaagcggcgccanangtggagggnaaagcaaggcggngcgccagcaagggcggaggaggccngnnggccaaacccgaccgggagcgcaagggaagangatgaacgatgtaaccnatgtgccacggccacggggaggagaaaancgaacagcaggggggcgcaaaggaaagagggaanaacaaaatagacctacaaacggggccgg

SEQ ID NO: 606728 - DNA, 360 bp, Homo sapiens
ggaacaagtccacggggtccctgcaggccaacgtgcagcggctgaaggggtaccgctccaaaatcatccttttccccaggaagccctcggcccccaagaagggagacagttttgttgaagaactgaaactggccccccagctggccggaccggttttgcccgtccggaacgtttttaagaaggggaaagctcgggtcatcactggggaagggaagaatttcaaagccttcgctagtttccgtttggcccgtgccaacgcccggcttttcggcatacgggcaaaaagggccaaggaacccgccgaaccgggttttgaaaagaaaaaataaagccctcctggggacttggaatccgtcggca

SEQ ID NO: 606729 - DNA, 917 bp, Homo sapiens
ttgacttgatagtgatgctggttagcttcggtcgtcttcatgtatgcctaaataggaacaggaggagaattatgagtgatagttccagtgtggcgaatctacggaggacacatgttgtcagagcccatgtttgatgacgcgataagcaagattcgtgtaagagaataactggaagatgtattccattgtcaagaagagtacgagtatcagctagccacgagatcaagctgagagggtgcaactctcatggaatgacacctcaggaaaaagaggaacagaagtaagtgttctcagagctcctgattctttctatgtaacattgcgatgaacagcttgaaaaacatgttctgtctgcataaaattatttgactgtaagttttccccaatggttctgtgcatcgttgtgcctttttaaattacatctccaaggtggctcaaaaggccttgacacagggacacctgcgacatatccaggatatgtgtaaccagcgatggtgacttgagcttgccaagacctgtgattccttgccaggatacaatcgagtgagaaataaagaacacatctggggaagtgggaatcctggagtttatgccattgcaatattgaaaacacatcgacagtgccagttattattgcaaataataaacttcctgtcgtcatcgtattctgtggaggtgataaagtgtcagatcaagtaacagattaattgttgttaacagctcttttgttgaatagtttgtggaaacaaagagtcttggtgcccaaaaggggtggcggggaacaattgttgcgcaagggaaattccgccccggggttagaggaattctcctggacaagctccggaatttttgtaaagcctataaaaggcttgggttgcaacattgtggaaagagcgttaaggaggagagaaggggga

SEQ ID NO: 606730 - DNA, 289 bp, Homo sapiens
taagacatgggcgggggatgttggccaggctgggctcaaactcctggcctcaagtgctcgtcctggcttggcctcccaaagtaatgggattataggcatgagccatgggcccatttaactcttgagtctttcttttgtcgtggatgccgatggcctgtggctgaacaagaatctggatttttaggaaccagtgacctttgaagatgtaacactgggttttaccccggaagagtggggactgctggacctcaaacagaagtccctgtgcaggggagtactgcaggaagag

SEQ ID NO: 606731 - DNA, 210 bp, Homo sapiens
  misc_feature (164)..(164): n is a, c, g, or t
  misc_feature (172)..(172): n is a, c, g, or t
ctataatgtgctagtgttagtagatattttctaagatatcactggaatttctgaaatgagaggccttgcagtgcctagtaaaatgacatgttggcattgcaagttgctttcacttcgtggctctacggtgatacggcattcatttggagtaaagacttatgctnttgctatntaaaggctttgtatactttttttggagagtctccgtcg

SEQ ID NO: 606732 - DNA, 100 bp, Homo sapiens
caatggactgacgtgactggtggctcacttgtgcccactgccggcaacaccagtgccaggaaaaggccaagggaatgtctgtttctaacaaatccacaaa

SEQ ID NO: 606733 - DNA, 189 bp, Homo sapiens
tggcaaattagcgacggacgggctgaagattttcttactattccctaagcaaaagtgtgccttacgttaggaatgtttatttatttgcgtatgcctttctatccactgtaagccctatgcatcttgcatctacggtggtcttatttaaatttaaagctgatgattgtgttgcttctatataatatagcg

SEQ ID NO: 606734 - DNA, 229 bp, Homo sapiens
  misc_feature (34)..(34): n is a, c, g, or t
  misc_feature (38)..(38): n is a, c, g, or t
  misc_feature (51)..(51): n is a, c, g, or t
  misc_feature (88)..(88): n is a, c, g, or t
  misc_feature (97)..(97): n is a, c, g, or t
  misc_feature (210)..(210): n is a, c, g, or t
gatcctgaagagcgctgagggacgggtgcttcgncgancagcaccagcganacgtcaaactcatgagacagatgctaatggatgccgncctccctanttgtccactgccccagccacatcatccctgtgcgggttgcagatgctgctaaaaacacagaagtctgtggatgagctaatgagcagccataacatctacgtgcaagcaatcanttaccctacggtgccccgg

SEQ ID NO: 606735 - DNA, 131 bp, Homo sapiens
gcggcatcctcttcaacagtgggagggggcagtgaccatggagtgttgggggcagcctgggaacacctccgcttaataggctgtggttagagacgaagagggactcgcatgtgcagacagccccagacctg

SEQ ID NO: 606736 - DNA, 678 bp, Homo sapiens
  misc_feature (394)..(394): n is a, c, g, or t
  misc_feature (485)..(485): n is a, c, g, or t
  misc_feature (556)..(556): n is a, c, g, or t
  misc_feature (559)..(559): n is a, c, g, or t
  misc_feature (574)..(575): n is a, c, g, or t
  misc_feature (589)..(589): n is a, c, g, or t
attaacatctgagatagtttcttatgcccctttctagtcattcccctttcacctgcctgcctccccgcgagaaaacactgttctgaagttccttaaaactgtaggtttagttttgctgattctagaatttcatataaatggaaacactcaatatgtataaaaggcttctttcattaagcatagtgtgtttggtatttatctatgttgttgcatgtagcagtcgttctttccttttcattgctacatacactgtatgaatataccatgtgaatatactatagtttattttaccattcactgtttgatggacacttgggctgtttttcgtttttggctattataaataaagctttcatagatatttttgtacaaatttcacgtagacatgtgctanttctttctcttgggtaaatacttaagagtggaattatatgtttagttttcaaagaaacttccataacttttttcaatgtggttgtaccatntttatattcctatcaacaatgtgtgagagttgcagttgggctacatccttgctaacattcaatggtgtatnttntcactttttgccatnngggatgagtgtgtngggtatctcatggtttttaatttggaattttttgatggtaattatttgactttttatgtgattatcgggctttatctgctttgtgagta

SEQ ID NO: 606737 - DNA, 895 bp, Homo sapiens
  misc_feature (34)..(34): n is a, c, g, or t
  misc_feature (90)..(90): n is a, c, g, or t
  misc_feature (97)..(97): n is a, c, g, or t
  misc_feature (113)..(113): n is a, c, g, or t
  misc_feature (117)..(117): n is a, c, g, or t
  misc_feature (119)..(119): n is a, c, g, or t
  misc_feature (142)..(142): n is a, c, g, or t
  misc_feature (216)..(216): n is a, c, g, or t
  misc_feature (228)..(228): n is a, c, g, or t
  misc_feature (230)..(231): n is a, c, g, or t
  misc_feature (234)..(235): n is a, c, g, or t
  misc_feature (240)..(240): n is a, c, g, or t
  misc_feature (314)..(314): n is a, c, g, or t
  misc_feature (316)..(316): n is a, c, g, or t
  misc_feature (380)..(380): n is a, c, g, or t
  misc_feature (431)..(431): n is a, c, g, or t
  misc_feature (443)..(443): n is a, c, g, or t
  misc_feature (457)..(457): n is a, c, g, or t
  misc_feature (464)..(464): n is a, c, g, or t
  misc_feature (481)..(481): n is a, c, g, or t
  misc_feature (495)..(495): n is a, c, g, or t
  misc_feature (509)..(509): n is a, c, g, or t
  misc_feature (533)..(533): n is a, c, g, or t
  misc_feature (544)..(544): n is a, c, g, or t
  misc_feature (581)..(581): n is a, c, g, or t
  misc_feature (619)..(619): n is a, c, g, or t
  misc_feature (668)..(668): n is a, c, g, or t
  misc_feature (704)..(704): n is a, c, g, or t
  misc_feature (796)..(796): n is a, c, g, or t
  misc_feature (851)..(851): n is a, c, g, or t
gggcttgggaggagggcgggagggggcagcttcnaggtggaggcatgagaaggccttggcctagccctccagggtcccatactgtggagnttggagnggcaggtctggccttncctngntcagcatagggcacccaggtggnggcacaggtggacacccagcacaggcacctaggcaggggcacaagctcactatccgttagccagcctaatgtgngtgtggagaganannccnngcggnaatccacgttgggcttaatcgtgttaatgccaggcttccagccagcgggacaaacttccccatgctcgtctgtntnctggaaggcctggaccagccgcagagcctcatccacggagcgtgccaggaggcaaatgattaanagtgatctggcgaaggacacccttgccatcgatgataaagaggcccctgtnggcaatgccctnatctgttttcagcncgctgtnatcctcagacaagcgtntggtcacgtcagcnagcagggggatgtncagggggcccaagcctccgctctngtccggggggngtggagccaagccaggggggtgagctgagagtgcacngagaggcccagcacttcacagcccagcttgcggaagtnctctgcacggttgctgaacgcgatgatctcggtggggcacacaaaagtnaagttcagagggtagaaaaagaggaccacgtacttncctttgtagtgcgacagcttcacctctttgaaggcgccatcaaccaccgctgtggccttgaagttaggggctggctttccgatgcgcgcgtnaccggagccatgactgaaagctgcgtgggcaaaggctagaagcacggacgatcanacgcgtggacccgcgttctcagcgccaagtgagcactgggccgc

SEQ ID NO: 606738 - DNA, 87 bp, Homo sapiens
agaacgtttcttttcttgtcttctttcttttgtctctgttttgatgtgctccttgaccttctacctcttttatactaataatcttat

SEQ ID NO: 606739 - DNA, 685 bp, Homo sapiens
  misc_feature (272)..(272): n is a, c, g, or t
  misc_feature (411)..(411): n is a, c, g, or t
gatgctttctatgtcattcggtttggcgcgcgatcccagttatgttacgtgaaacagtagtgtctatgagtcatgtattccctaggcatgtatcgcatgtgtcgattggaactacgttgcttgtgaatgtactctaacatatataggatctagcccgtgggagcaatgcgacgagtatctcgagataggaatcccagatgcgacgttcatggaaggtcgatgagcaggagttctcatgcaacatggtacgatcgcaaatgcggcatgcatcngagtgatgctaagatggtatgcgtcttgaactcttgtaggatgggttttcttttgaatttgtgtcgtactattgggattgagtcttgatccaatgacttggggatttgcgggtatataaagtttccactactatttacnttgtaattggcgagtcgtagtctgctcccgtttaagaatctatgtaactagcttagctttgttatagcttgtgggtgctcatggtgcttgaggtgcattcgactactttagtaataggtatatagtccggtttgctaaagatttgacatgctattatcagttagtatacatgagccttcgttttgtactctttgttaatagtcattgagctggatagacctagttttaatctgggatacaagtataagcgtactccgtggttcttgtaatggtg

SEQ ID NO: 606740 - DNA, 140 bp, Homo sapiens
caaggttctgaaatcagtattaactaattacgcttactaactcagtggctctcataacggcctactttaacgggatattttaaagaaagtctgtgattccaagctgttaaccctttagattatattttctactttatttt

SEQ ID NO: 606741 - DNA, 217 bp, Homo sapiens
ggtcgacgaactcttgacctcgtgatctgcccgcctcaggctcccaaagtgccgggattacagtcgtgagccaccgtgcccagccaaaatttatttttatgtatttatttttaatagagagagggtcttgttgtgttgcccaggctgttctcaaattccttgcctcaagggatcctcctaccttgccctcccaaagtgttagaatacaggcatgagc

SEQ ID NO: 606742 - DNA, 921 bp, Homo sapiens
  misc_feature (122)..(122): n is a, c, g, or t
  misc_feature (156)..(156): n is a, c, g, or t
  misc_feature (203)..(203): n is a, c, g, or t
  misc_feature (215)..(215): n is a, c, g, or t
  misc_feature (236)..(236): n is a, c, g, or t
  misc_feature (240)..(240): n is a, c, g, or t
  misc_feature (256)..(257): n is a, c, g, or t
  misc_feature (273)..(273): n is a, c, g, or t
  misc_feature (292)..(292): n is a, c, g, or t
  misc_feature (311)..(311): n is a, c, g, or t
  misc_feature (323)..(323): n is a, c, g, or t
  misc_feature (330)..(330): n is a, c, g, or t
  misc_feature (348)..(348): n is a, c, g, or t
  misc_feature (351)..(351): n is a, c, g, or t
  misc_feature (394)..(394): n is a, c, g, or t
  misc_feature (424)..(424): n is a, c, g, or t
  misc_feature (433)..(433): n is a, c, g, or t
  misc_feature (447)..(447): n is a, c, g, or t
  misc_feature (452)..(454): n is a, c, g, or t
  misc_feature (471)..(471): n is a, c, g, or t
  misc_feature (474)..(474): n is a, c, g, or t
  misc_feature (514)..(514): n is a, c, g, or t
  misc_feature (523)..(523): n is a, c, g, or t
  misc_feature (542)..(542): n is a, c, g, or t
  misc_feature (559)..(559): n is a, c, g, or t
  misc_feature (566)..(566): n is a, c, g, or t
  misc_feature (580)..(580): n is a, c, g, or t
  misc_feature (612)..(612): n is a, c, g, or t
  misc_feature (620)..(620): n is a, c, g, or t
  misc_feature (628)..(628): n is a, c, g, or t
gcgcctgcccgtcctctcgccgcgtcgccggtgcctgcgcctcccgctccacgctcgcttcttctctcccggtcgaggcccgggggaccagagcgagaagcggggaccatgtgccgacgcangttgacggctctcgactaccacaaccccgccgtnttcaactgcaagagtgaaacagaatttagaaacttcatcgttgggtngaagaccagaanatcaggcactacaagattgangacngagggaatttacaganncatccacagcagcgantggcccaagttctttgaanagtatctcagagatgttanctgtcctttcangattcangatcgacaagaagctatngantggcttcttggtttagctgttagattgaatatggagataatgntgaaaaatacaaggatttagtacctgatanttcaaaaantgtgacaatgcaantaaannntgcagaacattgatcanttntggatgtaaataatcctgattttaaggctggtgtgatggntttggtaanctgcttcagattcaggtcntgatgattacctggtantgcttanggcaattcggattntggttcaggagcgcctgacacaggatgcagtnggtaaggnaaatcaancaaaagagggttacctgtggctttagacagacatatgctaggttctgacacaggagatgcagttcttaatgaagctgctcaaattctgggattggtgcataagggagtccagagagctacggacaaaatcacgaagcctagtagctgttcggcattgggggtccaagaaaggccccgctgtgagtgggggtgaaccttgggggtcgcttcccacttgtacggggggcccccttgccgtggggacacagtgcctcggggggccccacaggtgtttctcacaccgctggttttag

SEQ ID NO: 606743 - DNA, 163 bp, Homo sapiens
cgtctccgactagcgacaggcatggggtagaagatggcagtacgaagagaaggtacccaagggaaaaagggaaaagctgatgctggcaaggaggggaataaccctgcagaaaatggagatgccaaaacagaccaggcacagaaagctgtcgggctagtcgggg

SEQ ID NO: 606744 - DNA, 174 bp, Homo sapiens
tcagcacgcgctaacaagggggcagtcatttaatgcagaaagtccagttagacataaagagacagaggttgtaacaacaggtcttcaagacatatacgtcgcattagtgtcacgagtttagctctctaagacacgctttgtatctgatttagtcttaatgattttcgtacttcc

SEQ ID NO: 606745 - DNA, 679 bp, Homo sapiens
  misc_feature (679)..(679): n is a, c, g, or t
gcggttcgggtgcccattttcgtggtggtgtcagttgtggggttgtgctcagtaacagccaagatgtgggaatctgtgctcttcgtcagatggggcagaggagataagcatgttcccgagcatttaaaaataaggttcgtggagaagcaaaaatgttccaggaggatgatgaaattccactgtatctaaggggtggggtagctgatgccctccgtgtatagagccaccatgattcttacagtgtggtgacaacatatgccatatatgagctgttgtggttcaatttcccaagaagcaggagtgattcagtcatcccagcaatcgctttgttcagtttcattcagtctctatggacccagtaatctgataaataccgagctcttctgggggatcaatatttatgtgatgtgtagtaactgccaccaataaagcagtctttacacaaaaaaaaaaaggggacccaacaacacactgtggggcggcttcggcccaagaacagtttcacaccccatcggtgtggccccccggccaggaggtacgttgaccctggccaacgctgggcccaagagaaccggccagcactgtcggggttcccaccataaaaagcgcgggaaccggctgcctaccaccagggggccgccaacggcctcccggcgcccgcgcaaatccgccgcggggn

SEQ ID NO: 606746 - DNA, 1190 bp, Homo sapiens
agcgggcgggcgctcccgcaggggttcctccaagatggcggcgcagaggaggagcttgctgcagcagtgagcagcagccaagcctggcacacgactgacctgcctctctgccaccctctctggcgcgcttggctcaccctgcaaccgcagctactctgctgactggcaacgggccctgagagccacccgcccagaggacagcctggctcaagttcacgagtgacgaaccaactgcttcctgctctgcggcgctcttcaacgcgctatgatggccaaccgacgtgcacaccttcgtgccccacgcggctgtccgcagagctccctgcctgggccagcctgactgccgagcacgccgacggcccgatgctgccggccgtgtgctgcctgcaggcccttccccatgtgcgcggacacggagctcatcctggcagctaccactcgaacgaaacgaccctagcgcccagacccaagcgccacagactctacccagccacgaccaactcgcccagcacgcgcgaagatcccctccagacacaccacgcctgcaccaccctcacgtaactccacgacagcactccccttgccacgacgcagctccacccaccgcttcacccgcagtggacaacttatcccggcgcaggggcccactgcgccgcttgtcggcccggctcctttctcaacgcaaacaatgcgttctaacgttcgccaaatgtctcggtaccaagatcccggtggcgacttcttatggccaaatcgacccagtgggaataggcgatcagccaaggggtggcaccacaaagcgctggaaaagcgagtggggaacgccacaaaccagacaaggatgcaaccagacgcaggaatgcacagccccccatccccaactgctattccgcccaagcctgggcgccctatcacgaatcggctaggcacaaaaggaatctatcgaaaagcctacgcggtggaggggcaatccacaatcccatgcacgcggcccacaagcaagcaacgctgaccccagggaggggctacccaggcgggagttcgcacagcgggtaaaccaccactcggccaccgccagcgaccacacagcaccccacacgcagtagcaccacgccccaccacgccgcacacccccagacaaacagtccggcggaagacgcgcacaaactccccatggcggccagcaacct

SEQ ID NO: 606747 - DNA, 209 bp, Homo sapiens
gggggggcaccggccacggacagggcggactggggtgaagagaccaggctccttaccacccgtcaacacggccccctttctacgggactccgcgcgcgcacgccccggttgagtttgcaaagccttgtgggtacggtcgctccccggtcacaaaacccagcctgtggagcaggctaggagcaccgctggcggagctcagctcgctgacg

SEQ ID NO: 606748 - DNA, 368 bp, Homo sapiens
tccgaagacagagtggttgtctctggactgcctccaattggaagtcgtgcacggattttacaaggatcatatgcgtgaagcaagtgatgtatgttatgctgatgttcaccgagacggcactggtctcctggactttgaacgccctgaagatatgacctatgcagttcgaaaactggataacactaagtttagatctcatgagggagaaactgcctacatccgggttaaagttgatgggcccagaagtccaagttatggaagatctcgatctcgaagccgtagtcgtagcagaagccgtagcagaagcaacagcaggagtcgcagttactccccaaggagaagcagaggatcaccacgctattctcccc

SEQ ID NO: 606749 - DNA, 408 bp, Homo sapiens
  misc_feature (3)..(3): n is a, c, g, or t
  misc_feature (96)..(96): n is a, c, g, or t
  misc_feature (98)..(98): n is a, c, g, or t
  misc_feature (107)..(108): n is a, c, g, or t
  misc_feature (120)..(120): n is a, c, g, or t
  misc_feature (139)..(139): n is a, c, g, or t
  misc_feature (142)..(143): n is a, c, g, or t
  misc_feature (165)..(165): n is a, c, g, or t
  misc_feature (181)..(181): n is a, c, g, or t
  misc_feature (184)..(184): n is a, c, g, or t
  misc_feature (212)..(213): n is a, c, g, or t
  misc_feature (220)..(220): n is a, c, g, or t
  misc_feature (261)..(261): n is a, c, g, or t
  misc_feature (265)..(265): n is a, c, g, or t
  misc_feature (271)..(271): n is a, c, g, or t
  misc_feature (275)..(275): n is a, c, g, or t
  misc_feature (357)..(358): n is a, c, g, or t
tgnaagaccatgctgcagattggggtgatgcccatgctcaatgagcggacctagctgtggtgtgcatattcccactaccttagtgcatcaactttntncatgaggtnntgacgaaccatnctgggattcctcaccatcngtnntgatctccactttgccaaaggnctggagaggtgatganaanaaccggcctgtgatgtcagggcgtccanngcccccncaccgtcccagcagtgtctgagccctcaatccccaagctgncagntgtcantcangaccccaacaccttcagcccctcttttcccacattcatagcctgtagtgccccctctaacccccagtgccacagagaagacnngatttgaagctgtacccaatttaattccataatcaatctatcaattacag

SEQ ID NO: 606750 - DNA, 110 bp, Homo sapiens
atcgttgggcatatgcaagaacactaaatgtctatcctaattacagacccactcctcacaaactcactcatgggagctctgtgatggattctgggccccattatcttcat

SEQ ID NO: 606751 - DNA, 426 bp, Homo sapiens
actctctggacaagtacacgaggtaatgagtttgataaaactcctcagtgtacaagtcatacatcaccttaggaccatcaaataaatgagcgcatcaaactgacagcgtgagcctcataattttatttctttttctttttctttttttttttggcatcccaaatcccctatcattatcccacccaggagagctgaaatccccgggctggaagcggggcaaatttatttagcagctccggatagtcacttttattttatgggtggccaggaaaatttctctcaccgactctcctggccaaaatgctcagacatgataccgggcagcgggtcagcttatagatgcacttagggatgaaacacaagagggccagaagtcttcaggcaaagacaccaggagacaacagaccttgggataggggtaccccg

SEQ ID NO: 606752 - DNA, 471 bp, Homo sapiens
  misc_feature (185)..(186): n is a, c, g, or t
  misc_feature (262)..(262): n is a, c, g, or t
  misc_feature (280)..(281): n is a, c, g, or t
aattttttttaagagattgagtctggttctgtcatccaggctcgagtgcaacagcacaattatagcttactgcagcctcaaactcctggcctcaagcaatcctcctgcctcagacccccaagtagctgggaccacagccatgtggcactacacctggctaatttttaaaacgtttttgtagagannggatttcgccatgttggcaggctggtctcgaactcctgacctcaggtgatccgcccacttcagcctcccaaagtgntagaattacaggcgtganntaccgtgctggccggacttcttgctttttagcagaataaaatgtttgaggcttatgttacacagtacctatcctgacttggaatcatttttttttcctccaagaagtcctggttccttttaatgggaaatgatatttagagaccacagtctagactaacgggcactccgtatcctctagaacagctatcg

SEQ ID NO: 606753 - DNA, 141 bp, Homo sapiens
cgagcactgaggcatcaggcgcaataccactgcgtatatcactttgtcagcgctcctaaagcaaacgccaccatttaagtgaaagcctgtcctgacatcactggccataaacgcgagtgagcaccacgaatgcagggcagg

SEQ ID NO: 606754 - DNA, 423 bp, Homo sapiens
  misc_feature (137)..(138): n is a, c, g, or t
  misc_feature (214)..(214): n is a, c, g, or t
  misc_feature (232)..(233): n is a, c, g, or t
gagacagggtcttgctctgtcacccaggctggagtgcagtggccaatctcagctcactgcaacctccgcctcctgagtagctgggattacaggcgcccacaaccacacccagctaatttttgtatttttgtagagannggatttcgccatgttggcaggctggtctcgaactcctgacctcaggtgatccgcccacttcagcctcccaaagtgntagaattacaggcgtganntaccgtgctggccggacttcttgctttttagcagaataaaatgtttgaggcttatgttacacagtacctatcctgacttggaatcatttttttttcctccaagaagtcctggttccttttaatgggaaatgatatttagagaccacagtctagactaacgggcactccgtatcctctagaacagctatcg

SEQ ID NO: 606755 - DNA, 1218 bp, Homo sapiens
  misc_feature (1218)..(1218): n is a, c, g, or t
gatatctgtcgacccacgctgtcgcgtgaggagggagaggcgttgctgggtggtgggaaggcgaagggccggctgtgtttgcgtatccgacgacccgaggtacggcgttcggccagagcgggtgtgcggggacctctcgaggacagtgtcagagccgccgctcgaggatgtggtcttcacagcggcgttacgcatacgtagactcgtctccgctcaccgtgcgtcgcgaccagcgctttgccctccaggctcccacctgggaacgccccgtcccttggtccttcctctcctagccatggtgtcagctctggccaggcccaggtgctctgattcccctgttcaggtcccctgccccttcggctgggagacttgcatatcggcctgaagacctccctgcggtttatcccagctcctgcaagggcccagactgcagcggctgtgaggcgaagggacggcagggcgcgtggcgtggttagtgtgctggctccgatccagcgggaacgcactgcgcaccgtccgccctgcacaccgactcggcgggacgcgctcgcagcacaacggaccgcacagcaggtcagacagggtgttctccagcgatggaggccaacacagccgcgggaggccgggacggggcaggtgtacaaagtgacagactgggcataggtaacgataccggcgactctgcaccgaggggaaaaccggagcacgggaaggatccaggcacagccacgacggaacgacggggaccggaatactctagggatggagactggagacagtaagtgaaacccaacgaattgaaggcagaacacggagggactacaggaccaacccgcataccacgagaacaccgaagaagaagacagaaaatcacagaggaaccacaaggacaacaggaaaaagacagaacccgagcaggagaaaaacaagagatagacagagaagagcaacagacaaaagcgagaacacgagcagcaggagaacaacaaaacaacaaaacacgaacaaggggcgacagagaagaaccacgagagcgcagaaagagaagagagaaaaagaagagaaaaagacaagacaataaacagacaaaacagaaggaaaagcaacgaacaaaaatgagcaacagaacgagagacaaaagatcgacgaatcgaacatacacgaagggacgacaaaacggacgcacacaagcgacacgacacaagagatcaactgaan

SEQ ID NO: 606756 - DNA, 236 bp, Homo sapiens
ttcatgtcggatcagtagacactgtggtaagcacggggacggtatcacacaggatgatctcaccggcttggtggcacactcggcatagtcctggtggtctggcttaaaaacattcaaaagaattaacttcttcttggctttctttttctttttaagtggttcggaatttcttggcggctgccgctactacggcgtggtggaacccatcagaaaccgaataagtattggatactggg

SEQ ID NO: 606757 - DNA, 257 bp, Homo sapiens
ctctcagttggtgcgatgttatacactctcaactggagggacagtgagctgtgactccatcatggtggaccagagctgcactgatgagacgatgtagccatctccaatagaactacagaaaagcaaccaaacggatccatatcaggaagacactctgaagagcagagatctccaaaaactacgcatttcaagtgcatactatgcagcatgcatacctgggaactgaagagggggtaccgagctacgaatatacgtaa

SEQ ID NO: 606758 - DNA, 879 bp, Homo sapiens
  misc_feature (516)..(516): n is a, c, g, or t
cgtacaagagaaactcctaagatctcattggcttaacatcaataaaacgttgatttactcatataaagtgcaaggtaggtgtcgggtgacggagaggtcagtcattctgcctctgaacgtcttcacactcaagatgcgctctctcaaaaatccttcctggcgtcattcgcagactctatctaaacagctttcgcatagacgaaggaaagggcaggggagggtgaatgggattcctatgtagaggttctgttatgcggccgaagccgtggcgaatggcgatgctatctaccttgcagatccgatattctagatgtatacctcagctcttgtggtctacaatctcaagtcgttcaaaagaattggtagctggggaacagactcattttgtcctccagctttgtcttggacgccagcgatgatcgagggggacacacataggttgtaggtgatagcaaaccacgcaatgggatatcttgactagtggctggtcatatgcctttgggggatgactcggtntttggaagtggagcaccacatgcgtctccctgtgcagaccttgggtacccactcagtgaccttctggcatacaggcaggttttctaggcagggagtcctccaatctatggagatgccagtggctaaccagaaactccaaggagcccaaaatcttttagcgcaagcaacagggcttttcctagcacagatggaattaggtgggaacaagtccctggggtctactgggtgagcactaaggaaagctgattacatcgtgactcgtgttgttatatcaagaagacggggtgggccaaacaagaagggttttcgaataggcccggatatgtcctggtaattcctggtggcgggagaaggcgtaagaag

SEQ ID NO: 606759 - DNA, 165 bp, Homo sapiens
ccgtcaccaggaacaccaccgcgagcatcgcggacggcccgaggtcgccaagtgtctgcaccagatggttggcgatgagcgtcgtcgtcccggtcttggccaacgcggtggccagcggcaacatgcccgcgatcaaaaccagggtgttccagctgatcaaccggt

SEQ ID NO: 606760 - DNA, 336 bp, Homo sapiens
  misc_feature (41)..(41): n is a, c, g, or t
  misc_feature (69)..(69): n is a, c, g, or t
  misc_feature (79)..(79): n is a, c, g, or t
  misc_feature (83)..(83): n is a, c, g, or t
  misc_feature (87)..(87): n is a, c, g, or t
  misc_feature (89)..(89): n is a, c, g, or t
  misc_feature (97)..(97): n is a, c, g, or t
  misc_feature (102)..(102): n is a, c, g, or t
  misc_feature (109)..(109): n is a, c, g, or t
  misc_feature (114)..(114): n is a, c, g, or t
  misc_feature (119)..(119): n is a, c, g, or t
  misc_feature (127)..(129): n is a, c, g, or t
  misc_feature (141)..(142): n is a, c, g, or t
  misc_feature (148)..(150): n is a, c, g, or t
  misc_feature (152)..(152): n is a, c, g, or t
  misc_feature (270)..(270): n is a, c, g, or t
  misc_feature (275)..(275): n is a, c, g, or t
  misc_feature (326)..(326): n is a, c, g, or t
gcccctcttcttccgtatcagaatccctggtttaaggcaangattacacaagaacacgacgacgcaatnaaccaaattnaagntgangntgtgtggnatggnagaaggnttaantattnttgttttnnnctaggtatattnnaagatnnntntagtcttctcttatgcaattatatttaagggtcagctgttatccttgccctttaacggaaaccagccgtggccaaatctgtcctcacagatccatttctccctggggcagttgcagancagangatagttccttattactctttgctcaaagggagatttctcctgtccttgcntgcatttcgt

SEQ ID NO: 606761 - DNA, 668 bp, Homo sapiens
  misc_feature (21)..(21): n is a, c, g, or t
gctcggtgagtcggggggacncgaggttctcaggggtccacaggtgccagtgtggctcgagcacctggaatgccagaaggggtgtgacacagcaaagtgtctgcacttcttaagatacgtgtacacagcgcatatatacactctaggccagagttcaaataatattattctccatagtagttctcgttctctctagcaagcactcaaggtcaaggatatgataaatatttaggtccacccctccctctcaacatattggagggtgaacaggtgggcacgcatctgacatttcttcctctattcctatagctataaaagatagcatatatatgcttcaatgagtatccaagtcacatacactccaaattaagccatgcacacgtgtttctgggaagggatatggccagcccaggatatttgggccacatgatgggggacattcactgtgccacttgcagcacccctgatctgggaaggggtggccagtgccacagtggactctgagatgaaagggtgtttcttccagtggcctttggcctgtcatcagcatcttccgcggtggcagacagtacaagagttatgacaatgtgactggcacatatatagtttcttccaggcacacgagagctcgtgtgagccccgtagttccatcgtgcaaagggcctcag

SEQ ID NO: 606762 - DNA, 1005 bp, Homo sapiens
gcctctgcacatatcgtcctattggcgtcgcagtgatcgctgacatcgttgagctcggatgcatgttcacgatgaatggtcccggtctgatacggtttcgacgctatcgaagcgagcgcccctctactgggatagaggatgtgcatactctggagctcacagtggagatgtaggcaggagtctatacaaggcatgctcacagtaacgggggctatgacctccattcttgatactcggtgctcaatctcttaccatgatattacggtggggtagctccaagtatcggtactggtgccccagggagagaaataccttccagagaattctatcctctaaggggatgtgctcctgactctatctgaatcgatatctgccattatcttgaagaagcgcagtcgcatggacgatatgtgtgttgagaggcagcggacctgcattgggcactgctcagatatctcaggctgtattcgtgatactagtaggagctcggatatcatctgggtcgcctttcgataggcatactgacgccttgactagatccctaactgtagcaaataggtagctcttgaatcatctacgggctctggcctggtctgccataaatttgctcgtgttggtcctctgggtcacggcaaatgactcgtaggtctggttcaagaaagcgcattacccttttagatggttgcaggggaattaccattgctaatgagtttttggaaagtaacttacggggaggacgtggctcgaagatttagggaagtagaggaatcggtggccatcagaatttgtggcggcatggtggttgatggaccagaaacctgctcagtggggcggaaggtgtgaacagattcccgcggggggagggatttcaggtcggcgtattttaacgcggggggtttttgtttcactgaaggaaaagggtgggattataaatggtggggggagagaccaaatgagattgagatcaagtctctcgggaatggagatagttaaaagacagaggtg

SEQ ID NO: 606763 - DNA, 152 bp, Homo sapiens
ttactgactgcatctgtgcctcccaggttcatgcgattctctgctcagcctcacatcaccacaccgggctaattttgcatcccgagtagagatgggatttctccatgttggtcaggctggtctcaaactcccaaccgtaggtgatctgcccc

SEQ ID NO: 606764 - DNA, 162 bp, Homo sapiens
  misc_feature (5)..(5): n is a, c, g, or t
agtanggaatgatggatacaaagatggttcacattcttacacactatgctgacaatgattgaatctgttcatttttcagaccagttctctggtccgaaaattatgcaagaggaaggtcagcctttaaagctacctgacactaagaggacactgacaacgtgt

SEQ ID NO: 606765 - DNA, 113 bp, Homo sapiens
acatatctagaggatcccagcgctgcgcaatactcaggaacccacccaaactggtcacccctcatgacaggatggctggctttgatggctcagcatgggatgaggaggaggaa

SEQ ID NO: 606766 - DNA, 501 bp, Homo sapiens
  misc_feature (239)..(239): n is a, c, g, or t
  misc_feature (303)..(303): n is a, c, g, or t
  misc_feature (307)..(307): n is a, c, g, or t
  misc_feature (316)..(316): n is a, c, g, or t
  misc_feature (323)..(323): n is a, c, g, or t
  misc_feature (326)..(326): n is a, c, g, or t
  misc_feature (330)..(331): n is a, c, g, or t
  misc_feature (336)..(336): n is a, c, g, or t
  misc_feature (339)..(339): n is a, c, g, or t
  misc_feature (344)..(345): n is a, c, g, or t
  misc_feature (348)..(349): n is a, c, g, or t
  misc_feature (351)..(351): n is a, c, g, or t
  misc_feature (354)..(354): n is a, c, g, or t
  misc_feature (356)..(358): n is a, c, g, or t
  misc_feature (365)..(365): n is a, c, g, or t
  misc_feature (368)..(368): n is a, c, g, or t
gagaggtgggacacggggtcaggagatcgagacatcccggcaacacggtgaaaccggagtctccaccaaaaatacaaaaaatgagccgggtatggtggcgggcacctgcagtcccagccactcgggaggccgaggcgggagaatgccgcgaacccgggaggtggaggttacagtgagccaagatcgtgccactacactccagcctgggtgacagagtgagactccgtctcaaaaaaccnaaagactttatcttatttcctatatgtttgtggtttcagtcctgatgtataatttgaccctagntagnatggttatntgaggangtngccnntacgnttnctgcnnttnnanatntnnngctcccnttngtccttgacgaacttatgacaattccacgaatgcgactacgcagtgtcaagggattctctgtcacacgccacatatagatctcttcctcctcattttattgctcaaaatcgatctcccatatactgtgtcatg

SEQ ID NO: 606767 - DNA, 133 bp, Homo sapiens
actgtctcttggtcagtgacttgtatctttgcaggaaagcttcgtatatgcggcgatatgcaaagccgggtcatgcgcacgcgcaggttttcaacatgcccagtgtacttcatctggtggcggatcaacacct

SEQ ID NO: 606768 - DNA, 143 bp, Homo sapiens
cttaacgactggattactctggtctgaactcaaatacgtatgactttactcgttgaacaaacgatcctttaatagcggctgcaccatctggatgtcctgccacaagcgggttaccgagactcgcaattgcgtattcatggatc

SEQ ID NO: 606769 - DNA, 166 bp, Homo sapiens
caagtgcagtagtcgctcatgacatccaggacgtggtctacctcacgctggccactgactggtccgatagtgagaggggtgttccggtcatgaggaagtggagccgtggggtggagaatgagcgaggagataaggccaatgaggtcattgtccatgtaccctgggt

SEQ ID NO: 606770 - DNA, 206 bp, Homo sapiens
  misc_feature (3)..(3): n is a, c, g, or t
ccntgcagccactgatcttttattctttctatagcctcgccctttttagaatgttacatattgggaattatacagggtatattattttcagatttgcttcctccgcttagcaatatacgtcccagcttcctccatgtcttgtcatggcttcataaagcattgctttttagcactaaataatatttcattgttcagaatgtatctgt

SEQ ID NO: 606771 - DNA, 174 bp, Homo sapiens
  misc_feature (174)..(174): n is a, c, g, or t
ccgcgatccactccacgccgttgatgccagccacgcccagctcaccgatgcgggtcagcatgctggtgcaggccgtggcccatctcatggaacaggtggtcatcgttgtgatgaaggtggccgggcttgccgttggcaccgcggccgagagtttgcacacacaaggtagaacgn

SEQ ID NO: 606772 - DNA, 118 bp, Homo sapiens
catagctgccacaggtctgcctggctgctcttgtgctgactcttgtggcattcaggtattcttgtgatcactttctggaactgtttctccttgcgcacctccaccatgaccagccctt

SEQ ID NO: 606773 - DNA, 135 bp, Homo sapiens
cggcccgcattcactctatgcattgatcttattttatcttcatcctttgtttacaagtgtgtctccccatgctagactgtgaaacggaaaggacaaggcaccatgtcaaatgtatctttcattcatccactttat

SEQ ID NO: 606774 - DNA, 125 bp, Homo sapiens
ccggccgctttttttttaaagaagaagtaagcctttatttccttgttttgcaaataaaactggctaagtaggtagcttttaggtgatagtacaagagcaattcactatcggatgtgctggtacac

SEQ ID NO: 606775 - DNA, 1450 bp, Homo sapiens
  misc_feature (200)..(200): n is a, c, g, or t
  misc_feature (904)..(904): n is a, c, g, or t
gagtttctgacggttgatgcgaaagtaactgccggggtgttgtacctatggctgtccgatggaggacctctcgtgctatcgtatgaatatgtggcgcgccttttcctctactgatacacatggtatcaagggactcgcaagatccactggtctcatagaggaatcattgaagtgccactgcaaacgatcttactatattnaactggcaagacaagggatcgctgttaataccaatatctgaaagtagtagaccaattggacatatgggtaactctaggaatgagtggctatggactaacacgaagttgaatggggtagagtattaaagggaatagagtgggaatgggttgatctttgttgacatcttgacaatgggaatggagggaggcacacgcaatcatttcacaagcaattgcatttgcgtattggattggaatgctacttctatgattttgtcgaaaagacatggaattgtgattggaaacttcgatactcgaaaagtgtatctactaggggaatttgacttggatagattgtggggaagcgactatgtgaaaactctacctaagagtaggccgaggatttggttcccttgtgagccttagagttggacaccttttagattgtgacgtaaaagtataagcttgcgaaagacgacgattattgtcttaatataaaccaggattagtccaatgtgcaagccccaaaattaccacgttaaagttaaggacagccgaagttgggggtaattagcaagccaaggggtgtttgcgttcgagtcagttctgaccatcatttggcatttcattacctagcgaaactatatggatgacgggacagaatcaggtccgctccctctttgggttggtaacacttaattaaaggcggaggcaaaccggtatantggcgcttgtgggagtatttcaacggcacccctgcattagagaccttttcacaccggctttgcgtggatttccacgaagaatggaggcgtctcaaagtagggtataggatctaaccgggagcggggacattggggcctttgggacaaatttgtggtggttgtagagttagacctggatactcattgcaggttggtgaagagcatgaatgttttgagattgggttgacaaagcaccagggttgctaacttttggggaacgtggtagttctaaatgggtgcgtattgggagagataacagggggaggtatggcacattgtacgtgtgtaattgaacaaggttacataactggtatttagaccgggtcggtagtagtttgtgtgtggaacacaaaatgggcctttttcttggtatacaccacattggaggaattgttcggcaaaaaacacaaagttgggggaagaaatagtacctgtgcgagaaatgtcgacgaagtttattctagaagatgtggtgcttctcatgtttatagaaagacacagagaaga

SEQ ID NO: 606776 - DNA, 1744 bp, Homo sapiens
  misc_feature (166)..(166): n is a, c, g, or t
  misc_feature (597)..(597): n is a, c, g, or t
  misc_feature (1501)..(1501): n is a, c, g, or t
  misc_feature (1743)..(1743): n is a, c, g, or t
aggaggccatagggtgcgaacttacctttggtcgtccacgagatggggggttcatcacgtagcaccagacgcctccacctatgctcgccgaaggttcggaacgccgaatcgaggatcaatagatcgtataccgtgagtgctgcatcgcgagaggtgaatgatcagntgtccacttatcatgacctgtggagcctcccaatgatcgaggctcctcatgggctctgatcgtcacaaaagaagagttgcgtgagtgacgatagcgctagagggcgaatcgggtgtgacgtggcgaaagggctcgtggacggacttacgaggtggacaacttgacgcgattcgacgaacatgactaggggccctaggagtatgcaggctggtgcacttcctgtccatctgccactgtagtctaatctagagcagccgcgtcgaatggtagacacacgccaaaaggagaacgatggagatcgaataaacgatggagaagatagaaatttagcaccacgagtagcgcgaaagtcatcgaccctcttggggcagtcgacgaagttcggtccaaacagtttgcggtcgaacgacggatgcggcgtagcccagacncacgtgtcacgcgccagtgaaggacactacgtgcgtgggcaagcgcagtttagaatgagggatccctagggggcgagctatgccccgaaagtccaggttcgcggctaggtagatgtgttgcgtatggggggcagggcaattcacttccattgaacacatccgatacgggatgaaggattcaaaggatggtggggtgggccttgggctaggggagattggggcccccaaggggccccaggggttgtaaacggtccggccatacactgggggagaaccaccatccaaagtttctcccagagttacaacgaagggcaagttccaaccttcttttggaaccaaaaaccgtggggtttggaaacaggcacatcagacggtttcacacttgagagcgcataatacaatcgagttaccgcctaaggaaattcccacagcgaaccctaacattagggcacacaactgagagcgcagagaaagatctacaccggtgagcgcccaaaagcgaaaaacccaggaaccaggcaccaaagaccgttgtggaacaacctgtgccgaaacgacaacgtctggtcacaaccatcggccaaccatacccaccacaagccaaatcggaaccacgactggaacgaacaccccgagacataaacgaaacccgtgggcgagacaacgacccacatctgggcaagcaccacgatgcgacgcataccgagccaacaagcgcgacgcgccatctacgactaggagacgaaccccgcacacgcagaagcgcgacaagcctgcacaagcatcgcgagccgtgccaccccgcagcgcggcgcggggaccaacccgcgagaccacctgccacgtgagcctgccgacgaagcgacagcacaccggcagccagaacaagggagagcccctgaanacacacaggccgcggcgggtgccaccccacactgacgtgcggacgaacacagccgcagcataaaaacagagcagaccgagaacagaacgcgggagaggacgaccagagacgacagacaggacaagacagaccgaagcacgagcccgagaagctgtccaagacagcaaccagcgcaacgaaccccgacaagcacgaccagacggagcaaagcgaacacgcaccgacagaccccaccacgaccnc

SEQ ID NO: 606777 - DNA, 419 bp, Homo sapiens
  misc_feature (57)..(57): n is a, c, g, or t
  misc_feature (125)..(125): n is a, c, g, or t
  misc_feature (131)..(131): n is a, c, g, or t
  misc_feature (138)..(138): n is a, c, g, or t
  misc_feature (164)..(164): n is a, c, g, or t
  misc_feature (262)..(262): n is a, c, g, or t
  misc_feature (265)..(265): n is a, c, g, or t
  misc_feature (270)..(270): n is a, c, g, or t
  misc_feature (312)..(312): n is a, c, g, or t
ggttatggagaagggttaatagaagtaggtatttggtttagatctttagggagtttntttggtggatagtggatacttgaggtaggaggtggtaggggttaagtctaggtaggtagtagtagggntgtaantgagagntgaggctggagaggtagtggttgttntaacttgatcttgtaggttttaggctttggggttatatacttgccctatgaagacagggaacttgtgctgctggtcttagggcatgaagaggaagggntgntgtantttaaagaccagcagggtgtgggccacagagatggtggaggntgcagccgcctccaccccagtctctgtcagttccagcactgtctggtgctgcatcgcagaaacctgaagatctgggtcctctgtcagcccacacaggttgtcgacgc

SEQ ID NO: 606778 - DNA, 131 bp, Homo sapiens
ttagccgacggagtcacagtagcttgtatggtagatactttcttaaacccagatcttatgagctaaatctacagggccatctgaccggcttccttattgggacataagccttataggggagcccactatgg

SEQ ID NO: 606779 - DNA, 250 bp, Homo sapiens
tgtgttatgtaaatttcacatcaacaattacttgtttgaaaaagagaaaacaaggctctgagaaacaactgcaacccatacatttttactatcctcctcctctgtttgataaatatttgtgtgtagcgagcctgccatggcaattcctgcccttcccctggcccagcttagctcttacgtctccccaccgagctgctgtacttcagagatttacacacctgcccccctgcctgcccccatgggtcgacgc

SEQ ID NO: 606780 - DNA, 320 bp, Homo sapiens
accggcacgctatccggttcaatacactgctgttggccaacaagagcaaattttgatctcccccccaaaaaaaaaaaaaggagggaaggttttggaggaaaaaaaaaggacctgggataaagcggccactgggggggtagaaaaaaatttgggatggtggaaaaatatggggcctggggtgggttgggggggcttgagggggtgggggaaatttaaaggcagtggtgggggggaaaagggaggggaggctcagggggcccatggtttgccctaggtttgttttccggggccacattgcctcccaaaggaaaaccaccctc

SEQ ID NO: 606781 - DNA, 803 bp, Homo sapiens
gcgagctcacccggtgaagcgtcagaggatggagtgcgcgctggaccagctcaagacaggttcaccaccgtggtgggcgcgacacggtgcgacttccagcgtccatcgacgagtacaaggcccagtgatgctacctagccaagccccgtccgctgagttccctgggccgcagtgcacacgcatgcccgcttaccaggagcgtgggtggcaggaggcttgatttgccatatggccggaagcgtgggcgggtcacaattgaggaccatgagttacaaatctgcgtatgtgactcaatactttgttgttggttgtctatggagtcagaaagtactgtacatgaagaattccgggccgagtctatccacagtaagttagacagcaagggcgtctcctttgataacagatgcggatggtggctcatgagccagtgcgcgttcatcagagcctctcacgaatgggataccgtctaggtgatcatgaacggatcctgaattcttcatgaagcttgtcattcaacctgggaaggaattcaggctgggataggagctcgaggtgcaggcatgggattcactgcatatgatgatcgttactcttgctccttcggccaggctgtgggctgtgccgaggcgcggtgtgaccctcatctccccatttgttgcggcgcatgcttgattggcatgtggcaaacaccgagaagaaattctatgatggccctggaagaacctggtggtaaagagtgtcggtaaaatctactactactacagaaggtctaggtacgaaaccagtgtcatgggcgctcttcg

SEQ ID NO: 606782 - DNA, 140 bp, Homo sapiens
gagcacatacttagcaatactatggactactatgttggactatgacatggtgcactttctctctaaattgcagcaggagcttttgctagcactgaaattctggatatgtgaatgtcacactctcacatacttcatatact

SEQ ID NO: 606783 - DNA, 763 bp, Homo sapiens
  misc_feature (24)..(24): n is a, c, g, or t
  misc_feature (33)..(34): n is a, c, g, or t
  misc_feature (37)..(37): n is a, c, g, or t
atcgacccccatgtattgatcctnatcgcagcnntcntgcgacattgcgctaattctcctatgggagcacatatggccggcttacccacttttacccgcccttttcaaatcgaaactaatgtgggcaattttgagggcacttttcctaataaccgggacaacgatcaaacaaagaatcccattatcacattaaaagatcattggaacgcaaattttttcgcaataaacttgcccaccacagtatccaacactatcatgaagaaaccccctactacgtctcactgcatcaacgaatttaagaccactctactgcatttaacggactccacacattctaactctgcaatcacgcacccacctcatggtcccaatttttgtctccgtcatttcaaccgttctcaacattacctaaagttcgtcccacctctctccgtctatctacttggatcagacaatctcctagacacgcatccctactcctatcctgacgcggtttactcgtcctattccctatcgagcttatcctttagccctctattagggcagattcttcaattcggatatccctaaactgacacctccgatctgcggttatctcttactaacctccccttcatatccatcattctagcttgataccactcccgtattctcccatttgtcacgccacccaagctattcactctccttacatccaatacctcccggtcaacgcttcgtttatcagctcctagatgcattctaaggcgcctatctctcttct

SEQ ID NO: 606784 - DNA, 170 bp, Homo sapiens
tcgcagcataacattagataaaaatctttggcttttgtttcttgtttttttttttaacaaaaaaaacccggctgggggaaccagcatttaaatgaattaaggggttttatcccccttttaaaccttatcccaaaaaaagttctagctgatttcattgaagggaaaattct

SEQ ID NO: 606785 - DNA, 304 bp, Homo sapiens
ccctgcccttttcaacttcccccctcaagaactgtcaagtaatccccctctgggtaccatccttattcctcctcatggtcggattcaagcaggtgcttcaacccccccaaatgccccagcagggtcagatgctaatactggaggccgtgggcagaccaataatgctgcttttgcatcagcttcccactccccctgaacagtcccgagcagccagctgcccaggaaaaaccccccgtttcttgagtgtccctcagccaccctggtcccgtttggaaaaaatatttaaaaaagaaaaaaatcctta

SEQ ID NO: 606786 - DNA, 101 bp, Homo sapiens
  misc_feature (89)..(89): n is a, c, g, or t
cgagtcctttaaacttagccgggcgtggtggtgggcgctgtagtcccagctactcgggatgctgagtgaatcaggagaatggtgtgacnccgggagtcaga

SEQ ID NO: 606787 - DNA, 279 bp, Homo sapiens
ctaatagtagtgtaaagtggtggactgctctacagagcagcacagtggttcctcaaaaagttgaacatagaattactatatgacccagtaattccactttgaggtatatagccccaataattaaatgcagggacccaaaaagatatttgcatagcaatgtttacagcagcagtactcacagtagccagaaggtggaagcaacatcatgcccactggtggatgaatggataaacaaatgtgatatttgcacgcaatggattattattggaatattattcc

SEQ ID NO: 606788 - DNA, 226 bp, Homo sapiens
cctagtttttgaagtttcaatcagcaaagaaatgaagggctggtaaaatgaatttcgtaatatcctcaggatacttttatcttaaaagtatgttgttaaagatttgggtaaattggtatttcaacatattttaaatggtgttagagcacagtggcacgccgtagttttagacagtttcaagtagcaccgtagtctagaacaccccgcagggcagcgaaggggggta

SEQ ID NO: 606789 - DNA, 81 bp, Homo sapiens
ccccctctgagacctccttgtttaaaagataaacacaaattgtgctctcaaattatggcagataaagcttgatactctgta

SEQ ID NO: 606790 - DNA, 142 bp, Homo sapiens
tacacagagcgcctggaggagccgctgtccctgggggagctggacacctagccgcggtgtccgtgctgcccttctttgaccctgacccccacatcgtctacctctgtagcatgggtgacagctcaatccggtccttagagat

SEQ ID NO: 606791 - DNA, 415 bp, Homo sapiens
  misc_feature (217)..(217): n is a, c, g, or t
  misc_feature (219)..(219): n is a, c, g, or t
  misc_feature (275)..(275): n is a, c, g, or t
  misc_feature (278)..(278): n is a, c, g, or t
  misc_feature (405)..(405): n is a, c, g, or t
tcaagtgcggtatcgacatgtttgactgcgtgtcacccaccagactagccaggcatggagctgctttcactcatgcaggccgtatctccatcaaaaactcgccgcatcaaagggattttagtcctctagatcctctatgtacctgttatgtttgcaagagctataccagagcgtatctgagccatttagtaagacaaagcgaaatggcgggacatcntntgctctcgatacacaatgtgcattttttgatcaatcaagcccaggaatgccgtcangantaccttggcaaggccgaagtttaaaagaagtactttaagtccgttgggtcttcaagttcacgcactttcctgcgcatctatagagacatcctgattgtcggcttcgaagtaggacagggctcttttncggcttgagt

SEQ ID NO: 606792 - DNA, 709 bp, Homo sapiens
gttacgtactacgatttgtgatagtgagcctgtatcctgtgcgatgtgtgtgacaagtgtgcaggacctggtcttgcagagatgtccgacaggggtctcatgcgctaatggcgtgtgagctgtatctgactgaccatgacaaaaaaccagccatgatttctcgtgctgtgcctatgtcaagtgtctggaggtagcgtagtggacgcgtagggaacgcctcggtctgtaccagtagggacatgcagagtctgagtcgtgtctttctggatgcaaggtcgcacacgtcgcgccatgtgagtgggataataagtatgtcgcaggtagtgaatcagtgtgtctgtgggacatctgtgtctcactccggagatcagtgacgcgcgcatgtggctgaggtctcacttctggaggtgtcgcgagtgtttggcgaaatctgcttttagcgctccaaaaagaaccgggccaattaccgttgaagttgttgcaaaccgatattatcatcgtcacttcatgttggaaggataggattaataaccattttaaggttttaggattaatatttcaccaaatcgtttttaagtaaggcaagcattaattattatattgcggagacttaaccggaggccggtttttagggattttgtttggcaggaaccagtatataataaagatcagtggaaagacgtttccaagtggtaaacttcgtaagttt

SEQ ID NO: 606793 - DNA, 202 bp, Homo sapiens
tgccattgtctcctatctagccaaccatcagaggcagggccaccttctctttctgacccacactcctacacttactatttctatgtgaacgcaaccgcaaaaaaacaaaacacaacaaaaaattctatttgccatctatggcccaatactgatgagtatgcacgggctctgacgtgcctacaactcgcctgtgcgtggcacc

SEQ ID NO: 606794 - DNA, 300 bp, Homo sapiens
aacaatgctaaacaaatatcctatagttggcatcaaggcattgatcactattaggaggcttttaagacaattcatttacacgatgcacatgcctctgagtgaacgtgtactatcccatcatctgaagcccacaggaacaagtcctacaataataaaaaggctcgatggaaaaatttctcaatcctgaaatcccctagggcaggcgtcaggagaaagtgccatttttgctatttaagaacaccacagctcttaaaactaagcacttatccctaacatgcaacactgcagatgcaagtaaca

SEQ ID NO: 606795 - DNA, 356 bp, Homo sapiens
ccaaaataatctatcaaaggtgttttacccagggttttaatttttaaaaaattttatcggcaaattggccccaaaaatttatgggtaaaatgtatgttttccccccttaaaaaccctaaaagttagttaaaagttactttggtttaccccaaccccaatgattaagggcctttaattttggtaatttaatgaaacccctcccctgccccagggaggtataaatttttgaaagaataacccgaattatataatatgaaatgctatgtaaagttttttatgtaaaaaaattatgtataaaactattaaaaaatcccccgctttgatcaggggggcccccaataaaattttaaaaagta

SEQ ID NO: 606796 - DNA, 510 bp, Homo sapiens
ttactaggtgaggatgtggagaaactggaaccctcctatactggtaacagaaatggaaaatggtacaaccactttggaaaacagtctgatagttcctcaaaaagttaaagatacaatgactgtatgactcagcaatttcattgctaagtatatatgcaagggaaatgaaaatgtatgtccatgcaaaaacctgtacatggttcacagaggcgttatttgtaatagtcacaaaaagtagaaaggacccaaatgtctacttactgatgaatggaaaaataaaatgtggtatatctatacaatgaaatatcatttggtaataaaaatgaagtactgatacatgttgcaatatgtatgaaccttgacattatgctaagtgacagaagccagtcacaaaagaccacgttatcatttcctttatatgaaatatccaaataggtaaactgtatgaaacagaaagtagattagtagttacttaggactagggtagttggaggggtgctagctaaaagg

SEQ ID NO: 606797 - DNA, 802 bp, Homo sapiens
tgacaaaaactaggccccatctcaatcatataccaaatctctgccctcactaatacgtatagccttctcctgccactctctcgaatcttatccatcatagcaaggcgagttgaggtggattaaacctaaacgcagctacgcaagaatcttagcatactcctcaattacccacagtaggatgaaataatagcacgtatctagcgcggtacaaagcctaacataaccagttcttaattgaactatttatattatcctaactactaccgcatgcctaagctaactcaacttaaactccagcgccacggactcctactactatctcgcacctgaaacaagctaacatgatctaacgacccttaattccatccacccctcctctccctaggaggctcgtgccgcccgttaaccggcttttgcgcaaatgggccagttatcggaagaattcacagaaagacaatagcctcagtcatccccaccatcatagccaccatcaaccctccttaactctacttgtacctacgcctaatctactccagctcaatcacactagctccccatatctgagcaagtgcaatgaagagaaaacaaaacaaataaacaatacggttggggcgtgtggggcccaaaggaagttagcatgactcacggggggggcgggcccacaagccagaagacggggccagatctggtcccgggaaaaccggggcacagggaagggggggttccgcccaaaaaaaaccggggggcccggccgttgagaaacccggggggtcgggtccggctagacaggccagactgtaca

SEQ ID NO: 606798 - DNA, 312 bp, Homo sapiens
tcggcgagcagataccctgtatgtcgactacagacacatgggattttaggaactcttagacgaagagcagtatggcggcagcgaatacttaaagacacccggaggggcctacaacgttgatgcctacgcgtagagcgtatatagtctagaattttccgctcggtaagcattacgattgccattgcgattaaatgtgtacaatgaggagtagcaggttcgccatgtgtatgttgctaagaagaggaattgaacctctgactgtaaagttataagttatatgcgattaccgggctctgccatcttaacaaaccc

SEQ ID NO: 606799 - DNA, 401 bp, Homo sapiens
  misc_feature (328)..(328): n is a, c, g, or t
gagaagacgacagaagggatcccttgaggccaggagttcaagaccagcctgggaaacacagcaaatccctgtctctacaaaacaacaacaaattgtttttttcaaagaatgagtagggatgctgggggcagtggctcatgcctgtaatcccagcactttgggaggccaaggtaggtggatcacctgaggtgaggagttccacaccagcctgactaacatggtgaaaccccgtttctactaaaaatacaaaaaaattagctgggcgtggtagcaggcacctgtaatcccagctacttgagagactgaggcaggagaatcgcttgaatcntggaggtagaggctgcagtgaacccagatcgcaccactgcattccagcctgggcaacagagcaagactgtctc

SEQ ID NO: 606800 - DNA, 596 bp, Homo sapiens
  misc_feature (33)..(33): n is a, c, g, or t
  misc_feature (120)..(120): n is a, c, g, or t
  misc_feature (129)..(132): n is a, c, g, or t
  misc_feature (160)..(161): n is a, c, g, or t
  misc_feature (164)..(164): n is a, c, g, or t
  misc_feature (170)..(170): n is a, c, g, or t
  misc_feature (172)..(172): n is a, c, g, or t
  misc_feature (176)..(176): n is a, c, g, or t
  misc_feature (188)..(188): n is a, c, g, or t
  misc_feature (200)..(200): n is a, c, g, or t
  misc_feature (213)..(213): n is a, c, g, or t
  misc_feature (256)..(256): n is a, c, g, or t
  misc_feature (261)..(261): n is a, c, g, or t
  misc_feature (277)..(277): n is a, c, g, or t
  misc_feature (441)..(441): n is a, c, g, or t
  misc_feature (591)..(591): n is a, c, g, or t
actctgacctggtttgtgctgttaagttttgantttgggtcaaaaggctagggaaagatgtgccaaatctactctctaatccagtaaccatcccgtcaggtgtgagtgtgacagacattnggggggggnnnnggggaggggggggggtgtctgggaatgnngcnacgggngngcgngtggtaaccgantatctgtacctncttgttagagggnaaatgttaaccaccctttcccatgtgcatgatgtgggacgggnctggngcatcctttcactaanatgaatatcaaaatgggattggggcatcttttggttcgagtgttgctttgcaaagaaacattgtcctgctgtctgctttcttccttctgatatgacatttctgcctggcctctacagtaccatgaaacctatattacttacttctctccagcttaatcctaggnggaggaattctagctgtggtttgtgaatgtacacaggtcagagaggtttagcaccttttgggaggaggaggtcagaatgcggtggtgaaacctctcccactgtgaccaacaaaccctcatacttaaaaagaagcatgcacctctggcttnaggtt

SEQ ID NO: 606801 - DNA, 433 bp, Homo sapiens
cagttaactcgcgcactgagaggataccggaggtgggaacatctcagatcatatgggtgccatacaccgggatagagtgccacagtccacgctactttagaaaaacactgggatgggtttggtcctgcacttaatgaatctgagatgcctgaaagacagctatgagctgaggtgtctataaggggactgaatgtaagggtctgagctcatgagagagggctaggaatgggtggagagctaatgataaaatatattacacaccagctccaagagctttggaaagacagaagtggaaccattaactctctggaagcctgggaaggattctcaaagaagatgacatcggattggagtctggcaggagaaaggagggacctccagggaacaggtgagatgggatgaggagggagagaggagcattcctagcacaggt

SEQ ID NO: 606802 - DNA, 767 bp, Homo sapiens
tccagcgggctgcaggaattcggtacgaggctaaaagaagatattctgactgactaattcactattatcatgttacatttctgaaataattgaactttaggggcaagatactacttactgaagcacaggttattactgagaacccacagcccagctaattataagagacaggcatttcctcaggccctcccagaccaaatttatcgacccaaacaatgaaatgaaaactgattgctttgatcctgaccctgttttctagagcacaaacaaatggttacaaacaattgaaagaaagtgcttgatcgtaggacagagattggaattgcttatagcgactgagtgcttaaattgctttaaatttagtattgccactttgatgagagatgggccttttagaaaggaagacatatttaaacgattgatcctttttcccacagtgctttattgtgaaatatgagacaggtctgaatacacttagaggtttattgtgccaaggtatagagcccatgatggtgccttaagagagttttagaacatgtgcacacaagtagaccggttacagctgtatacatttgagggagacagaaggtccaagcatagccgtgagctattacatgtaacgtgtacacctggtatggcctggaacagctggacattcttgaagatgggggtttacaggcccgaggtagaccaaatagtactgaattgcaattgtgtgagagagtaaacctttcctggaaagatgaactcggctaagtcaatatagg

SEQ ID NO: 606803 - DNA, 404 bp, Homo sapiens
  misc_feature (228)..(228): n is a, c, g, or t
  misc_feature (301)..(301): n is a, c, g, or t
  misc_feature (347)..(347): n is a, c, g, or t
caatggtgtgatctcagctcattgcaacctccacctcccgggttcaagcgattctcttgcctcagcttcccgagtagcttggattacaggcgcccgcaccacagccggctaattttttttggtatttttagtagagacgggggtttcaccatgttgcccaggctggtcttgaactcctgactgcaggtgatccaccctcctaaagtactaggattacaggcgtgacanccgcgcttagcctgtttttagttttctaaagcaaggtacctatttgaaaggcaggccattaaacagtgatgantaaggaaaaatcctgggaagagcctgaggaagggaaaaaggtgganttttaattgccaggaggattgaagtttagttcaaagggaacagtgttggaaaacatt

SEQ ID NO: 606804 - DNA, 810 bp, Homo sapiens
  misc_feature (13)..(13): n is a, c, g, or t
  misc_feature (94)..(94): n is a, c, g, or t
  misc_feature (101)..(101): n is a, c, g, or t
  misc_feature (106)..(106): n is a, c, g, or t
  misc_feature (109)..(109): n is a, c, g, or t
  misc_feature (111)..(111): n is a, c, g, or t
  misc_feature (113)..(114): n is a, c, g, or t
  misc_feature (116)..(118): n is a, c, g, or t
  misc_feature (125)..(125): n is a, c, g, or t
  misc_feature (127)..(127): n is a, c, g, or t
  misc_feature (137)..(137): n is a, c, g, or t
  misc_feature (140)..(142): n is a, c, g, or t
  misc_feature (147)..(147): n is a, c, g, or t
  misc_feature (149)..(149): n is a, c, g, or t
  misc_feature (151)..(152): n is a, c, g, or t
  misc_feature (157)..(158): n is a, c, g, or t
  misc_feature (162)..(162): n is a, c, g, or t
  misc_feature (167)..(169): n is a, c, g, or t
  misc_feature (171)..(171): n is a, c, g, or t
  misc_feature (176)..(176): n is a, c, g, or t
  misc_feature (183)..(183): n is a, c, g, or t
  misc_feature (189)..(189): n is a, c, g, or t
  misc_feature (198)..(199): n is a, c, g, or t
  misc_feature (202)..(202): n is a, c, g, or t
  misc_feature (205)..(205): n is a, c, g, or t
  misc_feature (250)..(250): n is a, c, g, or t
  misc_feature (277)..(277): n is a, c, g, or t
  misc_feature (280)..(280): n is a, c, g, or t
  misc_feature (289)..(289): n is a, c, g, or t
  misc_feature (293)..(293): n is a, c, g, or t
  misc_feature (301)..(301): n is a, c, g, or t
  misc_feature (789)..(789): n is a, c, g, or t
ttctaagtgagtncgggtgggggagcttcacgaggggaggctgctctgtgaaggaaccgcctttctctccgcgtgtctcacccttttctccccntaatctntttgnacntnanntnnngggaggntnggggggggtnagnnntgttngnannatacnnggangaggnnngngattnttccttnttgccnctccgcttnnttnccncgtccattccgcgcggtgtcccgattttaggggtagggagaagtntcagcttcaggcatcgcgaggcgtggnggncccatggcnccgntgggaggngccccgcggctggtactgctgttcagcggcaagaggaaatccgggaaggacttcgtgaccgaggcgctgcagagcaggtgtccgtgaggcgggaaaggtggaagggggagctctccgcatcacgtgacacgaggagtgcttttgggtgtcacggagtgagctttggagtacgggtcgtccgtttgcaaggcaggaggagcactgggctggggaaggtggaatgccaccattacataaaacagtagtctacacaggcgagcctcaaagaagcaggtgaccacctctccaaagaccttcagctgcaggtctctctgagaagcattaataatggttcctacgaaggcactttctatataccaggcgttggataccagcctgggcaacatggcgagaccccgcctctacgaaaaatccaaaaagtagctgggcgtggtgacgcgtgcctgtggtcccagctattcaggagcctgagacttggagctgatgtntgttctgtcctccggctctct

SEQ ID NO: 606805 - DNA, 170 bp, Homo sapiens
gaagcgagatgtaccacccctgtcaaactgcaacctctgatcttctgctcttaatgcttgtgcttcttcctttccagcatcccctacccccgacaatgtaattttacatccatgttttatgttttttgcgtttagcagtgttgtacttttatttattgggttttatggtt

SEQ ID NO: 606806 - DNA, 470 bp, Homo sapiens
ctgtagatcgtcgtgtgctacgccatcatcatgattagaagatcacagcagaatacccttggattagagagaagttcgtaccttgcatatctctgaattctagtctctcataagcactgtatgctgggatgattttcactgctttgtgttaatgactttgagcgatctctcacatgatggggttctttagtacatggtcaacagccatgtcatcttaccacacctagccattgtgaatgctgtagtgacatcctttataggcaccttacagctcaaacactttggtttcatttcatgccttacttatcacaaaggcaggaaagtagggatgatctctaaagtcacacaaaaaaacaaaaactttttatcgaaggctcataaataatcatgtcatttggcaatttggttcccacattttcccccaagagttttcaactataagttctgccaggtggctatacaatatgcac

SEQ ID NO: 606807 - DNA, 321 bp, Homo sapiens
agtttttgccagttggttttatttggaggtttgtggggtttttttaaaaaaaaaaagtctttaaattaggaagaaacattaaagattatgtcttagtggagggagtaatcctaacacccagggtggccgccaggtggcacctgcctttatcccagaatgcccttgtcccagctttttgtccaactgttgattatgtgatttttttgaaaggtccattttcaaaagccagggggtttacatttttgttttggccagcccattttgtatttaaaggttttgaggcccaataaaataggacgtggtgtttgcagcccttattga

SEQ ID NO: 606808 - DNA, 1240 bp, Homo sapiens
  misc_feature (967)..(967): n is a, c, g, or t
  misc_feature (975)..(975): n is a, c, g, or t
tgaacatccagtccatgccatggtaactagttgaaaatgttatactggagtggcatttccaagttcagtgcttctataaagacctgctagctcacagaatgcttttttaatgttctgcattgttgtgtgtcccccattgaacaaccttttgagcggacctcgtttttactaatgtaaacattctgactagtatccaaagaaatgacctttgagtgaacctctaaccttccccgtaagtatttgtttgaagacagtgtggagttctcctgctgagaactaagaaccatgatgccttgcagctctgtgagtaagggagtgtttgggggaactggagagaaagacataaataagggaacaacctccagatgtaaagaataaaagagtgaaattaaaaagggaaaaaatagcaattcgttttacctgaagagttagcctataccgaaaaaaaaataaaaataaaaaacgcaaaacacaaaaaccaggattagtagcacataaaagggggtaaaacccctgccgagtgttgtcctctattagaaacttcaaggagaagagccttctctgaccctcctgagcatctctgctggtttcaaggtgagctgataaaaacggttcctggggtggaaatataggtagtcctccttggttgctgtaaaagtggtggggaaagagtagataattaagttctttttctgattggaggagggatgcttctggaagtctttgtgatctagtcagatattcattcctcagcaacatttcaggtgacaggtgggaagaaagatgcagtttcaactctccttttgttttcacctctacatagctgatcactttcttttttgacaactgagctacactttcttaagtaataaagaagtccattgttttgcaaacaaacaccatatgcaaaagactcctttggttttctcccagctattattcctcagcttaattgtattcccaccanagtgctcncaggaggcccgaccgagtggggcctgactgtcctcctccaaagggacttcagcttcctcggaacacagagctgccagcacacactgaatttttctggctaatttcaaagagtgagttttcagttcctgcctgtggccccaggtggactcattaatcatgaagtccccctgtgcttaagatctgaaactggaaatattgacagatgttatcaatgggtatatttttagggagaagctagctggatgctccctgctcctccgaaatg

SEQ ID NO: 606809 - DNA, 632 bp, Homo sapiens
ctaatttttttttttacttttaatagagatagggtttcgccatgggtctctaactcctgagctcaagtaatccacctgcctccacctcccaaagtgctgggattacaagcatgagccactttgcccagcccatatgtatgttcttttggttttaaagacagaatctcgctctgtcatccaggctggagtgcagtggggtgatcttggctcactgcaacctcagcctcccaaattcaagcgatcctcctgggaggcggaggttgctgtgagctgagatcgtgccattgcactccagcctgggcaacaagagtgaaactccatctcaaaaaaaaaaaatggtacagtcggcctaaaggaatggaaaaattatgctatgtagttaaaccaggcctgggacaacggaaaggaagaaaattcaaagcggctaaattggctctgcatgtgcccaaatatttcccagtgctatatcctaaggttccactaagtggtggttacagggtcggagatacgtgaattatcattaagaaacactaaacccggaaggaaattaattaacctgaccctgacaataggacccccgacaacgtggcttctcccagcagacatgaggaagatacctctcccattacctg

SEQ ID NO: 606810 - DNA, 299 bp, Homo sapiens
tgaaaatgaggataagcatggagagccaatgattacatttcacaatgtccttcatgggtatgtgaatatgatagtaggaatcttagctcttcacttaaagaaagaagcattaaaatttggaattttagagagtgagatgataaaaagatacgtggtatggtattaccaccttcttggaatttctgaaaaaccatgttcaggacccagacatagataactgactccttcatttgaattttaggtaggtactacctgtgttattgtgtttagtttctgagataaattgataagcattcaaa

SEQ ID NO: 606811 - DNA, 433 bp, Homo sapiens
  misc_feature (17)..(17): n is a, c, g, or t
atgaacgaacatctcanaaaaaaaaaaaaagaaaacgaaaaactagcaacaaaaaaactctcaggatttggtataataggacccggtgtataaggtagaatattccttccctattgctgtaagcttcaccttcagaacaagacttctctcttttctatctacagtatgaaagtttcattctatttaccagccttaaaagatagaaatttttaagtgtgtagcttcatctgtgttttgacccagttagaaaactgaggagaaattacccctctcattttttctccccctgagttttcaggacagtttgtcgtgctttgccttggggactttctttcttggctcaccttttatttctttccaaattgacgagacgttgtctactagttccagtgttggttccggtcccatttccggggttcccggagcctcgaat

SEQ ID NO: 606812 - DNA, 156 bp, Homo sapiens
cccccagctgggttcgagttcgagaccagcctgatcaacaacatgtttgtaccccatctccactaaaaaacaaaggagccttttatggtggtgcatgcctcccatcccagctactggggaggctgaggtaggagaatcacttgaacccgggaggcg

SEQ ID NO: 606813 - DNA, 170 bp, Homo sapiens
acatgagaacacgtagacatcctcaacctgtcggacaatcaacctatcgagaaataccatgttgtctttttcccagcctgcatcctagctgtatgataggcctggggaatggtctatgaaaatgtgggcgcatatgttacccaaaccatctggcagctgattcctgtgtc

SEQ ID NO: 606814 - DNA, 134 bp, Homo sapiens
cccggagtatgtgatcacccagatcgtctgagagcgggaattttcccggagcggggtggacggagtgtcacgatgactagtagagatgacagacacgtcagggagccccacaagaggaccccccaagacaccct

SEQ ID NO: 606815 - DNA, 964 bp, Homo sapiens
ggagcagctagcgcaggaagcgctcagacacttggttaggaccaaaactcgactcagagccatttgcccccttctcggccaggcgccgaccatggaaaactgactaccatagagtattggtccgggaatgtgctttgaggctccttggtatcccctgtgtcctttcccgtggaacataggcctgattctgtaccggtcctgatgaataggccgagagctgagtccgtcaaggaggaagctcaggtgatattacacccacggaagacccgtatcgcagagtaccgtaccgaacgatgcatgagcatgatccacaatggatgtaatgtgggctgatggacgggttgatgatgaactaggtggacggcgaagagaattaattgggactccgagagagaattctgattgagtcgcacggactgagaactcgtataggttctcattcagaatcttgtgtcgccgttctgaaccattctagaatgacctcttggtgaacttgatcagttgattccccccaacaggaacttgctactttagccgaccctatgtgacagcctcccttgtgtccgcagaagtaagacaatctaatgactcgatcagtaggtggctagtagtggatgcatcgacattgaggatcgagatctaggaagatagcgcagtagcctaaaatcatagttaacctgtatgacctagagatggcatgacatccacttgaacatgttatgcgccgaatagaagagtgcgtgcagggtcagtcccgtggaccagttcccgcacggctcagtctgcgtggattgacgcgggagggagaattaaagcagtattggatacagagtggtgtatcacagcaagaaacagtttgtagggcaaccagaatgaaaagacacgcgggggcacaggactacaaggagggtccaccgtaatacggtatctgtaacccggaacaaaccaatttgcatcgtcggca

SEQ ID NO: 606816 - DNA, 359 bp, Homo sapiens
acaattcagcctcccactgttatgtcttaactaaacagaagagaacagaccgaaaatctatacgtaacacaggagactggaagacaatgtatcaatctgaacatctctgccaattttagctcccacgccatctatagatagacagttaacgtttctatttgacccctggcaatgaggcctagaagaggtcaaggttagaaaggttaagcatttgatcactacaggtacttgtagtacctacagaaggaacccatcctggggttggtggagtctggtattgctactcgttttgatagttctcatttacagagaaagaaacataagccaaagccagacagacatccaagcctcacagttat

SEQ ID NO: 606817 - DNA, 244 bp, Homo sapiens
cctttccactccattccattgcatcccactccattccattccgctccaatccacgccattccactcgactccactagactctattccatgtcattccaccccaccccatttcactccattccattccattccactccactccactccaatccactccacttcattccactccactccactccactccattacattccattctaaatccattccatatccattccattcccttcgtttcttttga

SEQ ID NO: 606818 - DNA, 413 bp, Homo sapiens
gagaactcttgctggacatactagctgacgccactctgtaccagcatacgtgagctatcactgattatcgacttaaggtaactacgcctgcactctcacatgtttctgagttcactaccagggagaccatgggccaatctgcggaccggctgaccggtcacagtgcagcttctctattggaacacgatgaatatgcactgtgcacagacagtgtaaccttgaaggcccaggatgaaggacttcttactgatgtgatacccattactgagcccagactagagacagctactagagctcatgggaatcgaccgtcattactggagctgatgtacttactaatgcctgcattcatgatggcttacagcgcagagacagatgcacagtattcgctctttgactgatgcgcatggcgg

SEQ ID NO: 606819 - DNA, 108 bp, Homo sapiens
ccctagtgacatcttattaaaaatagtcacacaaaaaatacttgtaaattataataccctgtgccggcaaaggtgcaatgaaatgtgcattgttctttttatcttttt

SEQ ID NO: 606820 - DNA, 385 bp, Homo sapiens
  misc_feature (19)..(19): n is a, c, g, or t
tttccataaacacacacanttctaatcacctttagacaagatcgttttggcctttgtttggctttatgcatagtaaagtgcatcagctatttatattcctgccagtaggaaatgatgggccacgtttgtggggctttttatttttaacaaaaatgttaaagtctatttatctcacactgatcctgctgtcaaaaagctataactactggaaagacagagtgtctgaggagacaactgccttagattgtcagtgagccaatgactgtgctgcctaaaaatatttaaaagtattttaattcctttattaaaagcatttataaaaaaacataattttcaaggaagtgtgggtggaataatacagaatataaaatgtgctgactttcca

SEQ ID NO: 606821 - DNA, 294 bp, Homo sapiens
ttttttttttaaggtacccgggccaggcatagtggttcatgcttgtaatcccaacaagacaggcagatcacttgaggccaggagtttaagaccagcctggccaacatggcaaaactccatctctactaaaaatacaaaaagactagccaggtgtggtggcaggcacctgtaatcccagctacttgggaggctgagtcacgagaatcatttgaatccaggaggtggaggttgcagtgagccgagatcaccccactctactccagcctgggtgacaaaggaaaattccatctcaaa

SEQ ID NO: 606822 - DNA, 911 bp, Homo sapiens
  misc_feature (165)..(165): n is a, c, g, or t
  misc_feature (393)..(393): n is a, c, g, or t
  misc_feature (395)..(395): n is a, c, g, or t
  misc_feature (571)..(571): n is a, c, g, or t
  misc_feature (575)..(575): n is a, c, g, or t
gtccgggtcttgtgtgcttcttgtacgttcgaatgtctcacggctgagtacagtttagtggcatccttcctaatgacaggaaggcactgttttcctcaacactgagatctgacctgtgataagtcatgtgactatactcactatgtaatatggctcacaagttcnaattgctccctaaacctgacatggtaccaaagtcctctcagtgcgtgcgtgcgtgaacactcgtcttccagatagttagtacatcatggacttatagaaaacgttctggtcttaagaacatttgccaatcgcgagtccatcgtggtcaagtctatgacatgtgcacacggaatgagaactacatagagtgcaaatgtgttggagagtatctcaaatggcctgtttagngntggtagcgtatgccgttgttgtaggaattgtctcagctcgtatcctggcgttacttatttacccgatatacctcagtgtctcgttgtgtaatactcttgatagtgcagttttgaaagctctgtaccgtaagcaacagactacaccatatccgctatatgcgtggcgaaacttgganacantgaacatgagtgtggcacgctgagtactcacgaaccaagaacaccattctaacaacaacaaaggcaccccgaaatagagaaacaagaggatagcagacaattgccccagaatgaagggatacaaccacatttcctgaagaggaacaaatgatcgtagggtgagcgtgcagagaactacccattgtgcacagcgtggtagttcacgtgaaccagacgacgcaggtggctttcccatggatgtttccatcactgcacgccttgttgcatgagggaaggtaaggaagtgtccaacgtcacaaaggccccgttgggcgctacaaaactatatactccgtg

SEQ ID NO: 606823 - DNA, 304 bp, Homo sapiens
cgttagatcatggacaacacatcactaccagactcacaagctcagtccattctttcgtctattcataaactctaccatgtaagataacaagccaatagcccgactcttagaacctctcatttcctataagacataagccctgcatatcactccatcctatagctacctatcccccctagaaaacttcctatacttgcatatacccagccccatgaatagcagtgaacggttactacgtaagacacttagtacttactacatacaccataaaaatcaaaactccccttctacccagtagctccat

SEQ ID NO: 606824 - DNA, 424 bp, Homo sapiens
  misc_feature (335)..(335): n is a, c, g, or t
  misc_feature (364)..(364): n is a, c, g, or t
gctgtagctcagtggtctgctttccctggacagcgcggcccatgctagcctgtgacctgaggcactttgaccgggattggtggacagtgcttaagcacagtagacactgggactcctggcgcccgctgctggtgttcatctgaggcggctcgcaggcggtctttgcaggctgagtttcctaacggaatccctggaatgcattacccctctgcttttgctcagaaccccacgtgttacccatcccaaagcccaatgaaagaccacaagaagaacttaaggacaggaaaattgttctttcaagtttgacatcaatccatgacaaccaaaggcaaagnaaagcgtccggtgggtggttgtgcaaaanttgccttcccagaacacacaccatattggagaatgccggcttgctttcctgcagattcag

SEQ ID NO: 606825 - DNA, 93 bp, Homo sapiens
ccccccctcccccctgtgggggggggtttccccccccttcctttttaaaggttttttctttggaaaaaaaaaaaaaagggggggggggtttta

SEQ ID NO: 606826 - DNA, 785 bp, Homo sapiens
ggggccgccgccgtgtgcccccgcgcggccatttggccgccggggggtttgtgggcagcgaattcttgtgggtgagcccccttttcgtaggggttcaccccctcccgtgcttggtgggcaatcccccgtgtggggttttttggtccccgcaggccgcactggttggcacccccacgcgtccttggtggccgcgcgctaccgtgtgccctcgagtcctgttggccacacacggttgcacatggtggccgccccgaggttgcactctttggtgtcgccctcggcgagatggctgctccgtccttggggctggagtcccgcagtgcctaatacggtcgtgtgaacccgtctctcatgtctctccctgtgggagagttaggttctcacgccacgcgcacggcacgattctttcgtggtgggtgagcgacctccctcctgtcgagggggaggcccaagaggggttctgttatttcttccggggagggtctcttctgtgggaggggcccccacggtggtctttctctcccatgggcccaccgctctccccgaggacggtttttctctctccggggggacagagtcggccgttcccgcagggaccaacacctgcgggggtgttaccccgcacgggtgatgccggtagtcgtgtggcagtcggattgtagacgcccccgtcgtggtgtgctccacctagcgtaatccccccccgcatgtatctctccgctggtccctgacacccccatgaagcggcgcccccgttgttccgcgcacaacgatgtcgagcacaa

SEQ ID NO: 606827 - DNA, 556 bp, Homo sapiens
tctgcctaaactacactgcccccatctctcccagcccctggctctgcctttgctgcctcaccccagccagtcctggccttggccctgactgcctgatccaccaagatgggcttcatcctacccatgggtctccaagagctcctcactctgaacagcaaaaggtaatgtttctactctaaaatcatgatgtgtgcatggtcacatacagcccaccatgtccgtaggtgcagcccttccaatctagaaaaagctcagggggagccagagtgcaagtacacggaaagaaccagaacccatgcagagatctctctcaaaaataataacgtgtcttcaactagtgttgttagaagctgaaggctgttagtacaaggacagatgtcagtcagaatcctgtttcaggccaggcatggtggctcacacctgtaatcccagaattttggacggccaaggcgggaggattgtttgagtccaagagctcgagaccagcctgtagaacacagtgagacctcatctctataaaaaaaaacaaaaattagctggatgttataatgcacac

SEQ ID NO: 606828 - DNA, 153 bp, Homo sapiens
gtagaatggggttctcatgtcgtgcaggctgtctcaactcctgactcagtgtgatcatctgcctttgctcccaaagtgatgagattacatggcatgagccactgcatccggcctaattcccttttttttttttttttttttttttttggggaa

SEQ ID NO: 606829 - DNA, 178 bp, Homo sapiens
  misc_feature (132)..(132): n is a, c, g, or t
ctgcatcatcttcgtggtgcagcagcagctatcacatggtcatcggacggcacagacaacgctgcaggaggctctgaagctcttcaagagctctgtacaacagatggtgcgcaccatctctgtgatcctgtncctacaccaagcaagatctgctcgctgagaaagtccttgctgggga

SEQ ID NO: 606830 - DNA, 89 bp, Homo sapiens
  misc_feature (27)..(27): n is a, c, g, or t
ccccaacgtgagatgtatgaaggcttntggtctccctggctgcctccacccactcccagggagaccagttgaataaaagtgcacacctt

SEQ ID NO: 606831 - DNA, 117 bp, Homo sapiens
tggagaggtgctggaaccacagtgcagggcaaacattagaccatgagagaaagtagaaagtcctgtcatgtcacaccttccaacactatagtcttttttctcttttgcaaagtttag

SEQ ID NO: 606832 - DNA, 978 bp, Homo sapiens
gtaggtagcataggctcagtggttcaaagttgagcacctgcatcagtgtactactggctcctgagaagcatgcaaatctgaacaccagttgatgagagttacactctttgaaacccgctggccaggacggagttgctaatttggaagaggcagtggtgacatggtagcatgcggggaataggtaggaacgaagttggggtggacgataagccttttttaagaaaggatcctcttattaatcaggccaacgtgtcaattttgtgcgatgatcctgacagactcatctacttaccgcaatgcctctattgttgcatgatccatggataccagttaggttaacgtggtgacttggttggtatccaaatgtggcacttgttggtaagccgtgtaatgtgccttcttgcccacatatgcctgtatccagctcctgtagcctatatctcccgtaggtgggtcgcactcttctgttggtgcattgcatcctgccatctatcttctcggctgatgtgggatgagcgtggcgtatttgtcccatctgtttctggctgtgcataactaacggatctcttggaggtgtggtgccactgactctcttcatctatgttgctggggatcccctttgccatgtcgctgtgtcggccagacggcgtgttggtggtttggcctttatcatacttggctcactgtgtccatcctatcgtctacgtgatgtgcagtctgcctgtgtccagttgctggtggcccttatgggccagggctgtccgggtggctggggggaagggcctagcaactgcgaagaaatgccaccggacgtgctgggggagtcccgggccaccggcaaggcttgggttgtccccacagggggcacgtgtgtcggccaccagggtgtcccgcggggttaccaaggggggggcgcctccacagtgctctccccgtgcaagaccgggcgtctcgccgagcagctctcttgcccgttcc

SEQ ID NO: 606833 - DNA, 233 bp, Homo sapiens
cagccatggctcgtggtcccaagaagcatctgaagcgggtggcagctccaaagcattggatgctggataaattgaccggtgtgtttgctcctcgtccatccaccggtccccacaagttgagagagtgtctccccctcatcattttcctgaggaacagacttaagtatgccctggacaggagatgaagtaaagaagatttgcatgcagcggttcattaaaatcgatggcaaggt

SEQ ID NO: 606834 - DNA, 430 bp, Homo sapiens
attctgattgggattgtgttgaatctattgagcagtctggggagaactgacatcttacaatattaagtcttccaacgcataaacatagcacatttctccattaatttacgcctttttttaagttcttttttttcagacagagtctcgctctagcacccaagctggagtgcagtggcacgatcttggctcactgcaacctctgcctcccatgttcaagtgattctcatgccttagctgggactacaggtgcgcaccaccacgcccaggcaatttttgtatttttagtagagatggagttttgccatgttgggtaggctggtctcaaattcctgaccttgtgatccgcccaccatggcctcccaaaatgttggaattacaagtgtgagccactgtgcccggccagagataaatttattatgctggattcttt

SEQ ID NO: 606835 - DNA, 580 bp, Homo sapiens
tacccattttaaagtcagttgattaacaaactgcatttcgtctgcaaccttaattcccctttgcatgtgaaacatgtctccgcttccattcattaagacttggaccttgttgggagtctatttttctacttagcacactcaccttcaattatttccctgcagtcatctgacttgtactaagtaataaaaattaacatatgctcggcgttgaatatatttttccttatggtcactggtagctttcctttctaacaaagtgcagataaggaagttaaaacaaatgagtgatgggagtggcagaggaaatacgttcacctgtgtagtaaaaggtttgggtgccaaagtcaggtttcagttcagcttaataatttaatgcttaactaacacttcagaaactgactctatttgtctgtcttgattcctgtgagacattttaattcatcttgaccaggaaaaggtatttaaggacacaaaccttcattccacagaatatgaaaacccaaggattttaaatgtatgtagtttcctaaacagatttcaccaggtgcagtttatgtgaaatgtctaagatagaaaaaga

SEQ ID NO: 606836 - DNA, 252 bp, Homo sapiens
cgagtatcttgcatcttgcgtccatcagcttaacatcctttctacaggctgaactcactcaggctgatagaatcaaaattcttacaaccaaatcagacaaattcaaaatcgtaaacccgtaagaaaacacattaaaaacggtgctgatgggagaagatgcgcgcatcttcgtcccatcaggtatttctatacattgacctcgttgttggttatcaaaaaaagcagtcaacgagtctgatgggagcaagatgg

SEQ ID NO: 606837 - DNA, 279 bp, Homo sapiens
cggctggtggcacgattttaccaaccctgcgatagatagcttgagttaataccttcgctatactagcgcgagtgttaactctctgctgtttctccgtgagaggtgtatcttcgctagtcgatctgcgcggctttgttcctgtgctctatgctccgtccctatcaagatcgtcgttactgagaccctgctgtcgctggaacggggatgcttgcatgtgtaatcttactaagagctaatagaaaggctaggaccaaacctatagtagaggaaccggcagta

SEQ ID NO: 606838 - DNA, 189 bp, Homo sapiens
ccgctttggccaggggagaaggagcttccgtgggttttccctgggccccgtttcccgggttgggtctcccctcccttcccgggccgggtgccatggccaggaggtaagggcctttttgggggcccccccttaccctttttttgaaaaacctggtttcgggaagggtttgataaactcatttactctcca

SEQ ID NO: 606839 - DNA, 182 bp, Homo sapiens
cagtgcagcttgaatgcctgttggtctgaattctagagttatccccgggatcgatgagaagggggcttgacacccttagtttactgcctttcaacacaaggacaggagagggaaaaaatatcactagacaccagcagggtgagccattgttggacagtggtgcactcgatggctgcatgtgt

SEQ ID NO: 606840 - DNA, 663 bp, Homo sapiens
  misc_feature (642)..(642): n is a, c, g, or t
ggagacgggggtctcaacagtactactacccattaagtagtggcaacaaatatttatccttattgggcagagggggaaactggggccaagggggtaaggtgactgggccatatcacatatttatcaatagaccatataagaataacgcactggatatcaatttccggaatccaagtgctctttgcagggggcagggggggggatgaggggtacggaatgggagaaaaattatatacataatagagggacaaggaggaaaagcagcaacagagacaggtaaagtcctcaaagggaaaagtaattccatgaagaaacagggtaaatccagccacatgggatggtatcacttttatacatatagaatcatagatgggggccttagatagcataaagtccaaccacatctaatagatgaggggtagctggtaatttgtaagggtctggagcttaaatggcggtctatttaaagatggttccctggaccacattctcaaagggaaatctctggttacaatattcatatacggtgctcagcaaacatattgggaatggttgactgggaagacattaacctggatgacaggaaaaattgaatcttatgcagagaacctaggatttacctaaaatagttttcaggggaanttattcacctaattagatgca

SEQ ID NO: 606841 - DNA, 221 bp, Homo sapiens
cattctgcactaagaacgtttgtatttccttttatttttattttttattttttactgagacagagtcccactctgttgcccaggctggagtgcagtggcacgatctcggctcattgcaacctctaactcctgggttcaaaccattctcccacctcagcctcaagcttaggaaaggaaccagcttcccattacaatcaagattcttattttcactttgggct

SEQ ID NO: 606842 - DNA, 1380 bp, Homo sapiens
gtttcattagtaacgggattcttctgctacttcggccggagatattttatacaggtcttgttgatgaccactgttgcacactaagaacatgtgttagaaaaagcggttgtcccagatatttcccggtcgcgtggaataatataatatgcggtggggggaatcttcttgttgacaatagggatcgtttctccacataggggggttcggcgcgacatttcaagtgaacgccctttcggtgaacaatggtaggcgggggacttcggttgggttccgtgttccccggtctatattggcgcgtttcacgccggcctcctgtttgtaaatgggggtgttggcctgtttcctcttgggctgcgacagggggtgtccctcatggtctcctgtcatacacctccttctccgctggcgacatggttgtttcagaagaagaggaaggcgggtggcttaacattttttctaaagacggggtgttgattcacccacatattgttccgccagaatagcacacaggagaaagagagttttgttgtcgggggttttcttcaccaggacgtttcttggatcacagctctaacgctcccacgctagtgatcaccattataagggagttctgcacaacacacacaacaccatgcgggggggttttttttggaaaacaaaccactaggtttgttttctctcggaggggtagaaaagccccccatcttatactgattaagaggtgggtaaaggaaagagggggtttatgaattgtggcgagaaaatgtattattacccgcccacacacggggggggccccgcgtgaatataaataaggggctcccacacacaaatatatcacggcggggcgtttttttcccaaagagcaagagcatttttctcgccaaaaaatttcgtatgtctcctcacaaactttcatatagaggaggggaggggtttgggggtgtttccaaaaaatgttatatgggagtgttataagttcaccaggggggggtccaccatcacgcggatcacagagccgtgtggataaaacaaaagtggcaagagtgtttactacaatgccatgacgaacatattcctctgggccggtgtttaacatggggcgccgacaatgcttcttgttcaacagagaaaagcgataaaaatggttgtccccacagtggatctttgtacttgttcaaccgtgggacattaggagagtgatggcgtcgtcaaaaaaaaaccaattattgtggccgccggtagtaaccagaagaatgttcgaggaaaataacccctggggaatcaaaaaaaagggaatttttttttgtaaaaaaaaccacccccgcgtgtaggggggtgggaaaaacccccaataaaacccctggtgtgtgtgatata

SEQ ID NO: 606843 - DNA, 1097 bp, Homo sapiens
ctccagcctgggctcaaaaaagaaaaaaaaaaaaaaaaaaaggcccgttcattctcaaattgctttgggcgtctccagggttgcctcaggaaaacttgaagtgtgggcatttgttaaaacttgtggggctacgtggtgttaactttgtggaagaaaaaagtttaagggttactttttaagttggattacgtgtttgtgatgaaatttgccaactttcagggagccccagcttgtggaaaaggagggacgttgagttattctcctttacaagggctctccgaaaacaattctctttctctttcacttatagttttctctttctcttggtgcctcgtgcattcttatattattctccagcaggggtctctttccaatgtgccattgggtttaattaacttaccagaaacctgtggcccaggtgtgcaggtggccttcacgcccgtgttaattcccagaaactttgtgggaaggcttaagaaccaggcagaattcaccttttgagggccagggaggtttcagagagaccaggcctgtggaacaaccattggtgtgattaccccagtttctcttacttaacaaatttcaaaacatttaggctcggggcatgtgggtgatgttgccacctgtgttatctccccagctgtgcctccgggaagcgcttgaggccaggaagaaaatccgcttgtgaaacccccgcggaagacacagagcgtttgccaacggaacgccaagaacttggaagcccacgtgggcctccggcctgtggggtgtgaccggcgaagacctcccatcttcaaaaaaatttaaacttttaccaaaaaaaaacttacttacaactaaacttttatttcacccctttgggaccctgggttttacaacaacacacatattataaaaaaaaaaaaaaaaaaaccaaacacaacaaaacaaaataaaatcatccacaaaaacacaatcaaatacaaaaaccaaaagcaaacagaatacaaactccacaaaacatcactacaatcaatataaatttttccttctaaacaaaaacaaatactcaaacaataacataataaagcacaaacacataatgtaatcatcgcact

SEQ ID NO: 606844 - DNA, 429 bp, Homo sapiens
ggcaaccacgcatggctggcgcagaagaggttgatatagtcctggtttctgttggagtggtccctgtgtgtcatcccctcattctggcccagcaggaagaagagcagttggtgggacaggcagtagcctgaccaggcgggcttggtcatgaggctcctgcagagcgtctgagaggccgcagggctcgctgttgtccgtcccggttcccagtcagctgcaccaggcacacgtcactttctctcctctcacaatgtagtcctggggcccgcaacgtgtgggtacacctatgcgaggcatcagtgtgtgttcccggcatgctcggaacttccggaacccgtgcgtgcattgtcagctggcaatccacgtcatgccactgtcctcctggccttactggtttgcttcctgttttacgaatcattggatcatcca

SEQ ID NO: 606845 - DNA, 303 bp, Homo sapiens
  misc_feature (8)..(8): n is a, c, g, or t
  misc_feature (26)..(26): n is a, c, g, or t
  misc_feature (95)..(95): n is a, c, g, or t
  misc_feature (228)..(228): n is a, c, g, or t
  misc_feature (278)..(278): n is a, c, g, or t
aatgaggngcctgtcccccgggttcnccctgggctccaagcctgctttgccttctgcctccttttgcacacgtgatcacttcagaacccagcagntcttcctttgtcctcttctctgtttctgcttttccatccgtgctgcactcaaccaatttcacatgtgttgtctttgcctgaatcatagcagtagcagtgaaatccctgcttatctttctccccaatcccagtntgtgctgaataccatggccatattcatctcctgaaatattattttcactntgatctcttctcaccctactactat

SEQ ID NO: 606846 - DNA, 1620 bp, Homo sapiens
  misc_feature (82)..(82): n is a, c, g, or t
  misc_feature (162)..(162): n is a, c, g, or t
  misc_feature (239)..(239): n is a, c, g, or t
  misc_feature (276)..(276): n is a, c, g, or t
  misc_feature (325)..(325): n is a, c, g, or t
  misc_feature (559)..(559): n is a, c, g, or t
  misc_feature (617)..(617): n is a, c, g, or t
  misc_feature (658)..(658): n is a, c, g, or t
  misc_feature (899)..(899): n is a, c, g, or t
  misc_feature (1041)..(1041): n is a, c, g, or t
  misc_feature (1066)..(1066): n is a, c, g, or t
  misc_feature (1126)..(1126): n is a, c, g, or t
  misc_feature (1140)..(1140): n is a, c, g, or t
  misc_feature (1166)..(1166): n is a, c, g, or t
  misc_feature (1201)..(1201): n is a, c, g, or t
  misc_feature (1231)..(1231): n is a, c, g, or t
  misc_feature (1257)..(1257): n is a, c, g, or t
  misc_feature (1306)..(1306): n is a, c, g, or t
  misc_feature (1324)..(1324): n is a, c, g, or t
  misc_feature (1333)..(1333): n is a, c, g, or t
  misc_feature (1370)..(1370): n is a, c, g, or t
  misc_feature (1393)..(1393): n is a, c, g, or t
  misc_feature (1401)..(1402): n is a, c, g, or t
  misc_feature (1410)..(1410): n is a, c, g, or t
  misc_feature (1426)..(1426): n is a, c, g, or t
  misc_feature (1428)..(1428): n is a, c, g, or t
  misc_feature (1452)..(1452): n is a, c, g, or t
  misc_feature (1474)..(1474): n is a, c, g, or t
  misc_feature (1508)..(1508): n is a, c, g, or t
  misc_feature (1520)..(1520): n is a, c, g, or t
  misc_feature (1551)..(1551): n is a, c, g, or t
  misc_feature (1553)..(1553): n is a, c, g, or t
  misc_feature (1618)..(1618): n is a, c, g, or t
aaatcaatatatattcacatcactctaattaagacgcaacacacaccctaagatgctctctaccgtaacttcgtaatatacntaccacgtcctctatgtggcgatgcagacagctcatggttataacatctgatgttatccttctacacaatcctccacacngcaatgcagtaacacgacatacacagatgataataacactatactacataatggtacgacatttaccacagtctaanatccctctcaacaagtcatacatcacgaggagtaacntgctcccacgctttatctttatttgtctctgtcacctcacacacacaanccacacatcctattctaatcaatgcgtaaagcaggtattattgattattatttctattgtctctatacatacataaaatatatcggccagccgtatcataattatctttactcgttgaccttcgatctcacccgaccgctccgacaacaccagatgacaatcaatatatacatttataacaattaacaccctatgacacagaatatattttccacaatactctcgactattttnacccacttgattataaccccaatctctacgacacacgtcacgccattctcacctgatntacgccagtagacgctgtatcataccacatatatcaaaccnatatcataatgaggtactatctattattatatctagtattagtctctcgatacggtaatggtacacccgcctctcacctacacaatatacagtatccacatataatcattataatttatactcttactacatatccccaccattatttatatagtcccctcgcccatcctatacattcactggtctgtatctgatagtacttcgcagtactccatcatcacttcataccatgctctcatanattaagcattcgaacatgaaaatatatactaccgccacctcacgctctactagacccaccacgagtctatttattgcttagacacatccagcattatctacatacatattccatctatgattagatacaaacgatacgctantatgtataatgaagatactattcanctttaatctgcatactatcataagttcagttcgatccgaacgcacgcaacttactattancttgtatacactanagcgtctactatagtatgacatacanacactccatctatctacgtgtaccactatagcatntatagatacagatcatagactgacaccttncagtcacatgtaactacgcttcgtgncaccataactattgtataaattactattctaatcgaagagatatctgtnatatataccacatgtgantcacactantgtacataactaaaattaaatatataagacaccacgntctcacgtagacgagatcactcngcagtagnncacacgtnatgtttttaatatatntnaatatctatatatatcattgacanatactcacatattagtccatcnatcaatacccgttgcgaaaatctaagatatattnactcaacatacntacatactctcttctatacagcttaccagtnanatatagatactacaacgacacaactacattacacctaacatcgactatacgatatcgcatagacnag

SEQ ID NO: 606847 - DNA, 256 bp, Homo sapiens
  misc_feature (24)..(24): n is a, c, g, or t
  misc_feature (102)..(102): n is a, c, g, or t
ggggggggccccgggccccccttnggaatgttaaggcaaaaatccaaaataagggggggcccccccctgttcaacaagggttgttttttttggggaaacagngggaaaaggggggcccccggtttgtttccaacatccaaaaaagggcccctttgccttgggtccggggcttaggggggggggtttaagtttccccttttaggggttccacaaattttctgggcctttcctttcaaaaagggggggggtttcccca

SEQ ID NO: 606848 - DNA, 376 bp, Homo sapiens
agattacataaggtgaaccccttagactgaaataggggatcaataaatgcagatttccctcctcaccacccactccaacttaatatgaaattaatgctggccgggcacaatggcttacacctgtaatcccagcactttgggaggccaaggtgggtggatcacttgaggtcaggaatttaagaccagcctggccaacataatgaaaccccatccctactactaaaaatacagaaaattagctgagcatggtggcgcatgcctgtaatcccagctactcaggaggccggggcaggagaattgtttgaacccaggaggcagtggttgcagtgggctgagatcatgccactgtacttcagcctgcaagactccatctcaa

SEQ ID NO: 606849 - DNA, 191 bp, Homo sapiens
gtatttgtctgaagaacagttaaagcttctttgctttggatggtggtagctgactgtttcttaatcttcctactggtgtcattaaaaaaaaaacaacagatgttatactgggttatactgggcagagtgggggatctggatctgggcctcgtgccggatctgggcctcgtgccggatcttggcctcgtgcc

SEQ ID NO: 606850 - DNA, 711 bp, Homo sapiens
  misc_feature (236)..(236): n is a, c, g, or t
gactgaccgaagaatcctttcaagctcttcctgactttcccagtcctttggttggtgggtatctgcccaagtagcgttgggatcagtctcctgtcttatgtgggcagcgttccaaagttgtaaatggagtgtgttttgactctggcgaccaaaatttaggaagatagcatgtgaaatatcatgttcgtaacttgtggtcacaactacatgcaacagaggagaacaagaccttttgntccttggaactctcgttgcgcttcggtgcagagcctgtgtccgaaggcgaacacgtacatcagaacgtggttacctgtgttaactgacgaggtcagcttcgagtggccagtgtcgaagctggttctcgacgggcatacgctccagtgtccttcctagacattgcctaggtgtcccagaaggaatagcagacaaagccagtttcgaactattcatggtaagcttgatctcttgttctaaattgtcggaccaagggggaccttgaagaatcactaagttgattcaaaaattgtggatgttgcgtacgaacttggggtagtcgtgccaaggaacgattggcgagggagagctcacgtaatatggaatccgcattggaggtcttcgcaatgtgttggtgcttctaaccgaaacggtaattgccaagaaagcttgacatgaaatttttgtgaaccatcgttaattttgcttatcgagggg

SEQ ID NO: 606851 - DNA, 214 bp, Homo sapiens
ctgaaatcgcatcactgcactccaggctgggtgacagagtgagagtctgtctcaaaaaacaaacaaacaaaaaaaaagtgtcagtttcccttgtggtccctctctcctggcatcttgtgaagaaagggtgcttgctttccctttgccatccaccatgactgtaagtatcctgagggctcccaggcattggactccggagacattgcactccggg

SEQ ID NO: 606852 - DNA, 421 bp, Homo sapiens
  misc_feature (13)..(13): n is a, c, g, or t
  misc_feature (387)..(387): n is a, c, g, or t
  misc_feature (397)..(397): n is a, c, g, or t
  misc_feature (419)..(419): n is a, c, g, or t
ataaatgtctganaaatggtaaactcgctatgaatcaaatattattaatcaaacatttccagtacagtaatggtatagaaagtgcattccaggaacaaagtgaaggttctcttaatctctcacccagaaacagtgaactaaactcttgatcagcatggttttaaatgtgggaaggaaattaaacacatgtcccaatgtgtgtatcttgtgattctgcctccagccaaataatgcaaaaatgtggcacctgtttttattgtgttactttctttgttgacagtttttattttctaaaaattaccaatatttggagaaagaaagtgaacacaaaaaaaaaagcaaatcagtattctgaatgtagcacagttaccaacagcagcattttantctctgaaanacgttgtgccccatgctgctgnga

SEQ ID NO: 606853 - DNA, 117 bp, Homo sapiens
accctggggtggggcggggggggcaacattataaaaaaaactggaagggaaaaaaaagggaggggggggggggtcttttctttctgttgctgtaaaaaaagttttttgtccctctca

SEQ ID NO: 606854 - DNA, 713 bp, Homo sapiens
  misc_feature (17)..(17): n is a, c, g, or t
  misc_feature (188)..(188): n is a, c, g, or t
  misc_feature (225)..(225): n is a, c, g, or t
  misc_feature (235)..(235): n is a, c, g, or t
  misc_feature (249)..(249): n is a, c, g, or t
  misc_feature (254)..(254): n is a, c, g, or t
  misc_feature (320)..(320): n is a, c, g, or t
  misc_feature (367)..(367): n is a, c, g, or t
  misc_feature (414)..(414): n is a, c, g, or t
  misc_feature (431)..(431): n is a, c, g, or t
  misc_feature (435)..(435): n is a, c, g, or t
  misc_feature (567)..(567): n is a, c, g, or t
  misc_feature (605)..(605): n is a, c, g, or t
  misc_feature (630)..(630): n is a, c, g, or t
  misc_feature (660)..(660): n is a, c, g, or t
  misc_feature (684)..(684): n is a, c, g, or t
ggaaggggaagcatganagggaggtccacttttgtggactcaaaccttgatggggatgttgagcagtgacaacgcttctgagagaaggcacaagcgccccagagattcaggcccggagaacaggctggctcagcaggtcttcacgatcgggtgtttcgagcccttcttcgggaacgagggccacagcnggagcggggcatgggacccaggccagggggtgctccngggggtgggnaaccacactcgatnggggnccagggggtcccggctgagcggcacccacactgcagggacgatggcggcgcactgtgagggggtgnagccgctgtgtcaggggaggctgggacccagcggtgctcagtgtgangggaacgtagctgggtgagcgggtgcgggcctgggacccgcgcgctngagaatgtgagcgcgangagnagcctttgctgcggcgctgccagagcctgagagcactacatgccgagcactgccgcgctccaaccgacccagagccaacgccagcgggtggcgaatgtggctgcgatctcggacccgcatcttaagggtatnaggaggtagctggggcattggggaaggcgctgggagcnctacagaaccagctttccggtagtnctccatcctgcttgctgttttgtttgttanttttgctgcccacgaagccgcctnaagcacgaaccggagccaagagggcgcgc

SEQ ID NO: 606855 - DNA, 132 bp, Homo sapiens
tacaggactggtggtgtaaaccggactgtagtgtgttaatggatttaatgggcctgagatgggggtgaaagaaacatagcagtgattagtagagctgccaaggagaccaggtatatcatcaactagccgtgt

SEQ ID NO: 606856 - DNA, 106 bp, Homo sapiens
actctagaggaccccgtcaatttctacacttaaatataaaaattaaaagttaaactctagcccttcagtgaaggagacgtaaaatggcgtgggtacaacaactacc

SEQ ID NO: 606857 - DNA, 881 bp, Homo sapiens
aatactacttggaggaattcttctactaattgtatttaatgtggaaatgtatagtttcattgatttaatcataaataatggaaatggtctccaagaagttttatttttcattttttgcttatacactctgattcctataatacagtgctataagctatgcacagaaaataaaatgtttgaaatccaagaataatggttcttactgctaagagggagtaatagttattactaatgattttgatgggttgcattttgttgcaatgtttattccacttgcagttagaatatgaatatgttttatcactagtgtggctaaataaccaaacattgtgtaaaaaaaaaaaaaagccaagatttcatggttggtggaatatttcttaagcatcgggcccctaaagagaccgtttcttaccaagccggtaaactatggctggagggaaatcctggtatttaattaggaatggtgttggtttactcaccacatctgtggaatcatggtataaatgtgtggttacaaactctggtgacttgtaatttaacttaatctcatctaatgtaaatatcagattctgatgtcagtaacatcttccataggtataactggtgtcattatagtttcagagtactctgagtaatcaaatgggtaaagcggttgagtacatagtagattatacttatggatacgaattacacacggttgcgggtggggtcaggttcgagaagcagcttcggatgcgggttagataaagttgttgggggaaggatcaccagcgaggggttatacctggccagattgcgtgtttggtccaaccctttttgttttccaaatagtaatgtatcagcgggtagtaccccgaggggatggccgcttttatatcttt

SEQ ID NO: 606858 - DNA, 818 bp, Homo sapiens
  misc_feature (45)..(45): n is a, c, g, or t
  misc_feature (47)..(49): n is a, c, g, or t
  misc_feature (51)..(52): n is a, c, g, or t
  misc_feature (67)..(67): n is a, c, g, or t
  misc_feature (71)..(71): n is a, c, g, or t
  misc_feature (73)..(73): n is a, c, g, or t
  misc_feature (81)..(81): n is a, c, g, or t
  misc_feature (115)..(115): n is a, c, g, or t
  misc_feature (128)..(128): n is a, c, g, or t
  misc_feature (131)..(131): n is a, c, g, or t
  misc_feature (140)..(140): n is a, c, g, or t
  misc_feature (149)..(149): n is a, c, g, or t
  misc_feature (155)..(156): n is a, c, g, or t
  misc_feature (161)..(162): n is a, c, g, or t
  misc_feature (172)..(173): n is a, c, g, or t
  misc_feature (196)..(196): n is a, c, g, or t
  misc_feature (198)..(198): n is a, c, g, or t
  misc_feature (240)..(240): n is a, c, g, or t
  misc_feature (249)..(249): n is a, c, g, or t
  misc_feature (326)..(326): n is a, c, g, or t
  misc_feature (342)..(342): n is a, c, g, or t
  misc_feature (350)..(350): n is a, c, g, or t
  misc_feature (356)..(356): n is a, c, g, or t
  misc_feature (618)..(618): n is a, c, g, or t
  misc_feature (639)..(639): n is a, c, g, or t
cgtttgggccagagaagtggatcgccgcttgcgccgcatggagtncnnntnngaaagcggggtgtgntgananccccccantggagaccctaagcttcctggtgatgaagagatnatcgaggtggtanaanttgatcccnggtcctgcnggaccnngatgnnctggcccagnnagatggaagatgtggactttgangnaagaagaggaggaagagggcaacgaagagggctgggttctangaacccagngaaggggtggtcggcagcatggatgggccccgacgatagctgaggtcacctttgcattgcactcagcatctgtgttnttgtgtgagcctggancccaagancaatancttgtgcatgttgaccgggggtgaagatgacaaagccttcgtatggcggctcagcgatggggagctgctctttgagtgtgcaggccataaagactctgtgacttgtgctggtttcagccatgactccactctagtggccacaggggacatgagtggcctcttgaaagtgtggcaggtggacactaaggaggaggtctggtcctttgaagcgggagacctggagtggatggagtggcatcctcgggcacctgtcctgttggcngggcacagctgacggcaacanctggatgtggaaagtcccgaatggtgactgcaagaacttacagggtcccaactgcccagacacttgtggccgagtcctccctgatgggaaagagagctgtggtaggctatgacagatgggaccatcaggatttgggaacctgtatgcagggaaggcctagtcagtgtactgacacggga

SEQ ID NO: 606859 - DNA, 466 bp, Homo sapiens
  misc_feature (4)..(4): n is a, c, g, or t
ttanaattacggttccagctaagccacagtaaaataagacaaacgggagattcctaaagtccctgatgccaggcctttgctactggaaggactttctagacctgccggaagccataagggaacacgctgccgcaggccttgggtgaaacacaatattgtgctggcttcaggtgtgacccagcacagtcccagaggtggtggccataggagagcttgtgtcacccctaccccaactccaggcatcacagcacagagggagagactccatttgttgagggcgggaggttggggggataagggaagaaaacaagagattcttcctggtaatctggggtgttcacctgtatcttaaccaaaaataccaaagaagtacttctagaactccaaaaaagttacagcattactgggcttgggatgccctctaatgcatatgccccttaatgctgcagtgaccaaagacttagat

SEQ ID NO: 606860 - DNA, 1035 bp, Homo sapiens
ggtgctatgggggcttctagactcccctgtgcgctcttctggtatcgctcgggctgaggtcgagtgaagaaggccctgctgagaagctcgagaactacctgcattctgagacgctgcaggtgcgcgaggacgctactcagtgctcagcagagcctggggttccaccattgacatagaggtctaccgggatccgtgtatatggcttggcgtcccgactcaaggatgcccggggttgtctccttccttgtgagctacatagaccaggaagaagatccacaatgagtttgccagataaaccgctgaccttgagtatgtgcggagtgaccccttggacaccatcgagcactgatggagtatcgacgcgggaagtgtggtggccgtgagtgtgtcattgtgaccccgaaataggctggattgacgggaggctgtggaaggcgtgctattaagcagggcaccggggaccaggtcctggcggaggcgtatgagtgtccatgcattgggggttgctgactagggatggaggcgtctgagcatgctgcctagacatatgcggccaggacttggctggaaatgaatccgcgaggtagattttggggtccttggctgagtgccctctggacctaagctagggacacctccacagttggaagggatgcactcgtggaacaacaagctcgaacgggtgtgcatggatgtgccggcttgagtgatctcagaccggatggacggcggacaggtgatgtagggtcgatagaagtcggggagactcgctggtcacgatctctggtgacgcagataggggcagtatcagaggtgggagaggctctataaaggtaccacaccgccttggtgagaactacaaagaaaccccagggtatgttgtcagtgcgacacccatgaatttcataaaggtgactggcacttcttggtgggaacgcacgatcccggtaccggcggaatccccgggatctccttttgagttgccagctcaacaacttgggttacaggcacagggcctgcacggtcggtcacatg

SEQ ID NO: 606861 - DNA, 1395 bp, Homo sapiens
cttctaaaacaccgcagagatgctcccctagcaagctcaccgatgcacttgactttccctgaaaatgagtggaagggtcttggtgacagagatgacacctaacatacgcgtgcggttacatgtcgccgctgaatgctaggtcgacgtagtaggccgaaaatgactcgtgtgaggtagactgaccacgcgtcatgaccaaagcatagttccaaaagagcttgagtgtcatacttatcgaactcgggagtcgtcccccaaactagacatcttgcacgaacacattcagtcgtcccgttcagtcgaaaagctctagctcaccgtcgccacgacaaagtcatccctggacaacaacaacccaattattgaggaccgcggtaaatcggtgagatcgcaccacgcgagagagactcgaggcaagacattaacgcattaatgtacatctatgccaggcatttcaccattagtctactaagacagccctgagtacgctatgggaaccacacgcgatctccgtgctaggtcgacaccctaacacagcggcacattaccaaacagaagccgcggaaaggtttgacagaggttaccacagcgcaacgcccgttgaacagaattgcccaaggagcgaaatgaggtattaccttagtcgcccaagagggctctatcgaccacgagttcgcgccacctcgggcaccgttcgcacacaccatcttcaaattcaatccatagacactttgggccacgtgacccttgaataatacagtttgggtaccgaccgttgacgcgacaagtgatgttcttgtacgccaacaaacgcgcccgcgtttgtcgcgcccaggttacatttgggccacgcgccaaagaaagtttttctatgggactgccaaattggcaaccattgcagagagaacgcagggaacaagctgcgtttatgtatcaccagagagagattcccaactttaggccgagtgacactgattgcataggagcattggcgttacggcacaaaggcgtgtgtacatttgtcgcacacacaaagcgggaaaaaaccaggaggcaaccgccggaacaactggacgatcacagcattgaacgagaccaattgatccctctgaaagcagatgccgataatttagcacggccgcttcatcaggaccacaccctcaaggccacgagataagaacataccaaaaggaacacatcacaccagcgtggacaaggagtcaaggatttcacgccgtttgggaaaatattcaaccgaagacaacgtaccagattcatttagtcacagccgaggtagaaaaaaccaccattggataagagaaaccagattttacgcgatctgtaaaccaacaaacaaggaagccgaacatcagctaagggaacaagagaaccacg

SEQ ID NO: 606862 - DNA, 505 bp, Homo sapiens
  misc_feature (237)..(238): n is a, c, g, or t
  misc_feature (241)..(241): n is a, c, g, or t
tttgttgttgtttttgctttgtttccttttttagaaagttctagaaaataggaaaatgaaaaatttcattgagatgagtagtgcatttaattattttttaaacacttctttaagtacttgaattttatatcaggaaaacaaagttgttgagccttgcttcttccgttttgccctttgtctcgctccttatctttttttggggggagggtaaaatttttttttttttggggccttttnnttntattcttcctggcataatttccattttattcttctgagtgtctatgttaacttccctctatcccgccttataaaaaaattctccaacaaaaatacttgttgacttgatgttttatcacttctctaagtaaggttgaaatatccttattgtagctactgtttttaatgtaaaggttaaacttgaaaagaaattcttaatcacggtgccaaaattcattttctaacaccatgtgttagaaaattataaaaaataaaataattttag

SEQ ID NO: 606863 - DNA, 471 bp, Homo sapiens
gcatgacctttgctgagctgctcgccctgcgttctgtcgtttgttcatcattcattcatccgaaatgctcgggactggaagcacagtggaaacactgccccaggttctgtgctcggcattgagggtagaaagacttttcgaaggtggcagggtgtttcttaagatcattgacccttaaaatgaaagtgtaggccgggcgcggtggctcacgtctgtaatcctagcactttgggaggccgaggcgggcggatcacgaggtcaggagatcgagaccatcctggctaacacggtgaaaccccgtctctcctaaaaaatacaaaaaattagccgggtgtggtggcgggcgcctgtagtcccagctactcgggaggctgaggcgggagaatggcgtgaacccaggaggcagagcttgcagtgagccgagatcgcgccactgcacttcagcctgggtgacagcgagaatccgtctca

SEQ ID NO: 606864 - DNA, 219 bp, Homo sapiens
aataccttttcctcacaggtttctactccagagatcatatcatcgaccccgcgtacatatcatacacaaacgcctgatccctatctattactctcatcgctaccaccctaacaagcgcctattacactcgaggaattctactcaccctaacaggtcaggctcgcttccctagccttagtaacattaacgatcatacccccaccttataaaccccattaa

SEQ ID NO: 606865 - DNA, 152 bp, Homo sapiens
gcaatgtcatgacttacttagagcagcttcatctgaggacagaaaagtgtgttccttagatagatctagacgcccaatccttagatgtggttagctcaggtagctgtctgaggtaaaggtccatgaaccatgccctattgttggtatcagcg

SEQ ID NO: 606866 - DNA, 307 bp, Homo sapiens
cccccccccctttccaccaaagggggggtgggggtttttggggggggtttttttaaagggcttttttttttcacccccccatcccccggggggccccctccccttttttttttcccttttttaggaccccggggccccttcccctcccgttttttttcttggggggggggggggtttatattttccccgggggaccggttttgccttttggctttttcaaaaagtttttttgggggcccttttgggggtgccccttggggttccggtctgggttttccgggtgggccccccggttcggaaattaata

SEQ ID NO: 606867 - DNA, 124 bp, Homo sapiens
gacccctcaaggatgttagcgacactacgctccttatgaccgtccactgtgcttcgggcgtccttataactatgctacctcagggttgaaataaaatgagctatcgagagcctagattatctcc

SEQ ID NO: 606868 - DNA, 341 bp, Homo sapiens
  misc_feature (143)..(143): n is a, c, g, or t
ggcgactttcaaagggtattttgcccttgggggcactccaccatttttgggtggaaaaaatttagcccttttccctttggaaaaaaaaaaaaaaaaaaaaaaaaaaaaaaaaaaaaaaaaaaaaaaaaaaaaaaaaaaattgngcggcgtggatacttgggttactttcaccattggctgctgtgaataatgctgctacgaacatgtgtgtgcaaatatctccttgaaatcctgattttcaactgttttgaatatgtacccagaaatgagattcctggaccatatggtgattctatttttaattttctgaggaaccaccatactgttttccatagcggccg

SEQ ID NO: 606869 - DNA, 113 bp, Homo sapiens
caccaaggtcacagagacagtacctggcactgatttcttcaacccaatctcacaccccatgggaacgaggtcatcaatgcaggaagaaggatggatatggtactccagatcat

SEQ ID NO: 606870 - DNA, 144 bp, Homo sapiens
ggttgttggtcgcagcatcagtgtggttggtgctgtggtcggcactgccaggttgaagggcatctctggggctttggggaatttcagtgcgtgggtgagccaagcaacaatcactcaattaatcaatcagtcaagttgttcagt

SEQ ID NO: 606871 - DNA, 614 bp, Homo sapiens
gctataagacaaccaggactgaaccagggagccaatctgttgtctttgaacagtaaatcaggaataccaatggaccagaatgaacacagtcactggggaccacggatgctagagggccaatgtgcctagtcagatctgagctgagaatcatcctggtgggcgaaacaggaactggcaaaagtgctgcatgggaacagcatcctcaaggaagcaagcatctgaatcgatgctgggttcccagatcttgactaagacttgcagcaaaagtcagggaagctggggaaatagagagattgtccattatatgagcacaccagagtatgtgtctactgtgtgaaggagccactgtgaagctctgtccaaagaggtgcagaggtgctcacttgcatgtctgcaccaggaacccatgtgctgttcctggtgagtcaagctggggcgatatacctcagaggaacagtaaggctgtcagagggtgaaaggcgatcttgggagaggatgccgtgtggactcgtaagggtcctctttaaccacaaggaagacctcaatggtggtccctgatgggagtacatgctcgatcagataacaaagcctaagcaagctgtgcagcatgtgtg

SEQ ID NO: 606872 - DNA, 115 bp, Homo sapiens
  misc_feature (4)..(4): n is a, c, g, or t
gtanagagctcatcccatactagtctgtgattccagttaccctttgagaccctaggcaactctccttatctttcaggcagaatagtcactgcagctgggctcctataactcagtc

SEQ ID NO: 606873 - DNA, 140 bp, Homo sapiens
gcgtgactgctacactgtggtgggaagatgctgataaatttgatggttctacacagttaaatataattgtgattttaattaaggtgcacaatattataagaacttcaaatggagacctgatctggtgcttgtggtggtgg

SEQ ID NO: 606874 - DNA, 582 bp, Homo sapiens
acctgctagccattggctacgaggaggaagcgtgcagtcccatgtggaaactgaaaggccttgtttccagcgacttaattcaagataagttgaagcagtcaatgcctttgtgggggatcggtgtgaatcatctaacgggtacctgcctcgcacagaatggggaacgaattcgcgtactcttgggccgatcacactgtcgcgcagttcttaaggccatcgctgtccatcggtatcattatggagtcctttccgcaaccctagcgcagttcgatcctgttaccaagtcaggccactcctctcagtccagatgttcctctgcgctgggatagcttaatgtccttgtgtgacgcgtacaggggccgcccagcccgtctgaggaagcggccctcccgactgtgtcagaggagcctgggtcccgaggggacaaggaagcgtgggttgcgccccaccccgttgagggagttcctcttgcctcccgtacccccggggattgtatatagattataaatatataaggggaaaggggtgagcggggaggggttctggggctggggcctcactttcccctcctcccccttcccc

SEQ ID NO: 606875 - DNA, 354 bp, Homo sapiens
atactgaaagacccagatcatcataccagggccagatactaccttctcagacattgacagatccagatccttctatttgtgccagatcccacctcctcagacatggacagacccagatcctaatacctgcatcaaatcctacctcctcagacatgatcctacatgaacagacccagatccttgtatctgtaccagatttctaccttctcacacatggagagacccagatcctcatacctgtaccagatcctacctcctcagagatggacagacccagatcctcacatcggtatcagatcctacctccagacatggagagacccaaatcctaacacctgtaccacatcctacctc

SEQ ID NO: 606876 - DNA, 157 bp, Homo sapiens
gatatcgcgtgcatgtgcaatgaagggcgtgttggtagacattgtgaatgcagcacagatgaagttaacagtgaagacatggcacgcctgatagctttaaaattaggcctctgggctttacggaggaagtagaggttattcttcagtacatctgtga

SEQ ID NO: 606877 - DNA, 165 bp, Homo sapiens
acttcagggtttggtgtgtcatgcactacggggatttgagtcagctcccccaagatgagctgcagcccccagagagagctctgcacgtaccaagtaaccaggccccagcctccaggcccccaactccgcccagcctctccccgctctggcatcctgcacctctaa

SEQ ID NO: 606878 - DNA, 323 bp, Homo sapiens
tgaacactagtctgtgtcactgtaaacatctagcagtaaatacttgcagttgtgatataaaggaccctgtatgtgtacaaaagaaaacatgtaacataatggttgtgaaatgtaacatgaagcaaactaactgacatattcttaacatatacgatggtaaaatacaatgatagaactttgccagtctttaagatcttggataaattcaatgtatcaatctgttagcgcacacataataccaccattcaaaaatgttaagaagatgagttgcagatcttataatagattgtttgttagccattgtcattcacacctctgtactc

SEQ ID NO: 606879 - DNA, 988 bp, Homo sapiens
tggctatgccaggaagccactccaccacatgaatgctaatatgccagtggtacccagtacctcttgtatataggttattgcacctattgttctgaaatgcttaacttcagaattacatgtgttaagagtatttaattgttttcaatctatttggtatggatatagaagtacaactagaattctctggagatacagattgatatctatttgcactaacacacgtgacgtgcatgatttaattccatataagctttagcgtctcccctaataagaaagacctcgccattgtagtaactaaacaacgaggaacaatgatggaagcaccggtcatgaacatccctctacacatcctcgcgtggcccgcatggctcatgactcgcggcattgaagctacacgcggcatcgctgaccctcttcaagaggtataccttccatgcacatcgtgcgacactgcttcacgggcccggacagatgcagcatcgctcttctcacgccagcggaccaacgaatcccactgctacgttcatctcatcgaacatactccccctgcaacacgccctccaacaaccagatgatgaaccagaaactgaatacacagcagaggtgaagaaggccaaccacacgccctcacagtctgccttccctccacaagaatccctgaatagtcgaacccgcatggcctcaaccggatacgcatcatgcttacacagccattacccacggcatccagcactcaactagaactgacaagcacacatgcgctacccgcaccctctgcaacaaccccttcgaatagcacagaagcaccagcagaactgaaaagacacgacgactcaacacctccaacagcagaccaactcgcagacaccaccaccaacccaacacccccaacaccaagacacccacacctgacgctcagacatcctcacccacagccacccaggtccaccacacacaaaaacggaaccctacgctacctccactcatc

SEQ ID NO: 606880 - DNA, 772 bp, Homo sapiens
  misc_feature (252)..(252): n is a, c, g, or t
tgagtccgagcctggggacccccttccggcgtcccagttagcagcagccatcctgggtggtgtggacccgagacccacaacaaacccgggggctaaagttttcttacctcggggcttcctcgggcaccccggtgttccccaagtctctgacaatcgttggtcccggagtggtctagatctaacgccgctcgaggctctcccacccgccttctggccggctgaggcctcacttataacttggtccccaagaangagggggcccagcactcaacattcccggtgaatcgaggatgtctcgacaccccaccacccaatatccgcacatgcttactctgcccaatggctggaatgtgaatctttgctcgaatgtggggcccacgcccacgagccacgaacccgcgagattgttggcccccgaagatgcccaccacccctcctggcgtatatggaaggacaactttgtgagtttctccattataggcccaactgcacttgagactccacacagcctcacagccgagggccgctgtttgcctccgagagtgtgaaaagagtgccaccacaggaggaacactgtagcccgccacggagacacagttgagcccctgaggccacatattgaaaaaagacccatgccgctggttcgtgggaagtgtaacaaggccccccccccaggtgaagaaactgaaattcagcgctgtcaggattgcgagagatttgtgttgatactgttgcacgtgtgtttttttatttaaagactcatccctttcca

SEQ ID NO: 606881 - DNA, 552 bp, Homo sapiens
  misc_feature (70)..(70): n is a, c, g, or t
ggttcgagaagatgcttggccgtgaggttgaacgccaggtgaggtatcaggtcgcccgcaagacgctcgntcagttgctggacgaagccgagggcgtagcgcagcgcgtgcgggacacgttgcgcgccttggatgacatgctcaatacgcatgaggccgaggtagaccggctcagagcctacattcaagccgggcgcgagttcctggacgagaaccccgaggccggcgcggccaaggccggcgtgatcgagttcgacaagccgcgcgaacgcttcgcgcgcaagctcgccaacctggcaaccctcatggcgtcccatgaaatgagcgtcactcagatgaagctcacgcgggcgcaggccgtggacatgctggaccgcttctctgaaacggcatccgtcctggtgcccgtctggcgtcagcacaccctcgcgctcatcaccaccaagaacatgaatccggcaatggtcgccgaggcggccaaagctcaccaggcgctcatgcggagcctttcgcagagcctggaaggcatcaaccaataacacggcgggagaa

SEQ ID NO: 606882 - DNA, 152 bp, Homo sapiens
tatcacagcctcgcgtaaactattcctaggacttctaacagccctagacgtcaactacctaaaccaacaaaacttaaaataaaatccccactatagcacataattatatactccacacatcctcggatatctaccactagacatcacagcac

SEQ ID NO: 606883 - DNA, 311 bp, Homo sapiens
gagaggtagctctagagatcccactaacctaatcgctactctccaaagagtagaagcacagttctcagataggtctggctgcctccaagcactggaggcagctgctgtctatcatcctatgaaagcctaaaactatctactccatgccaacctaacagtttattcaacccataatatcaaagacatagctagctcaccacagagtaactaagtctacatactctgccccgaggactcctccaactgtatgctacggtcatagagaaaccccccaagagtcacgcgattagggttagcgggtaccggagctc

SEQ ID NO: 606884 - DNA, 330 bp, Homo sapiens
gggcccattggggttccgggtttttaaaaatccctcctggtttcccaatggaaggtttagggattttggctccttaaggggccctaaggggggttattatggggggtttggttttggccccccccattggggtttttttgaatccagggtttttcccctttgggtccctatttttttggtgggccggggttccgggttttttttttttccccctggttggtttttttgggaggccctttttgtggtgcccttttttttggggtttttttttttgccaaaattggccaatttaaaaaggttttttttttttccccccctttttttaagggg

SEQ ID NO: 606885 - DNA, 260 bp, Homo sapiens
gatcgagctcggtaccaggctatacaccctataccactactaacccctagcacaccattctactttctgtctctaggaatttgactattttaggtagctcatgtcggtggtatcagccagtgtttgtctttttgagtctggctgatgtcatttagcatgctcatccattcaaggttcatgcttgcagcaggcgtaaacacttccttccttttaaaggctgagtaatattccattgtctggatacaccgcggtggtatagt

SEQ ID NO: 606886 - DNA, 749 bp, Homo sapiens
  misc_feature (296)..(296): n is a, c, g, or t
  misc_feature (320)..(320): n is a, c, g, or t
tatctgtagccatgtcccctaatggctattagtgttcatggttagtgtgttgaagatgagccaggtacataacgcggcacattttctgcaggtcagcagtaaggtttcaaggtacagttatggaggaaagaagaaaatgacacattgataacacaggtctttatttcctaagggtacatatgaattattcccttttgaatgagacagtttttaaaagttgatttataaatacaaaaatacattctccaaagatagtatttccaaactgttatatacccatctactcccaacatggntataagttttttaaaaaaatagtngtatataacatacatatctgccccagtgttacttcacaggcctatgccctacgggaactccactctcccagccccactttttctcttggttctcccacattcttattctcccacatccctacccacgtttgagctggaaaggatgtccctaccctaggcatgaggtatattttattctgggcaccacacatttgccccatagataacaatacacgtgatgatgtcactagtcctacctttctaggttttacatacttaaaagtagtaactagaacagttattactggaactaagaattttccccacagaggtgaacagaccaagaactaaaattttaggaaacctgtttaatttcttttgtattttgaaaagttagtttatttctaaaattctttccattgcttataatcaactgtatgttaagctttt

SEQ ID NO: 606887 - DNA, 270 bp, Homo sapiens
taacgagtcccagcacagcatcccctcagcgtaatgtgtcgtctagacgccagatttccctattcacactgtgtatccatgttgtatagcaattggctgtgtcctgcttgtggttcccttattttatcacatgtattattaggctcgtctctcccactggatgtcagtcagcatatggaatgtcatgatattaccaggttatggagattaattgtgcacgtggaatttggtacacatccctatttcaccctcttcaggctttgtgttaat

SEQ ID NO: 606888 - DNA, 432 bp, Homo sapiens
aggctcggtaccgaaaatgacatagaggcaggcagatcacctgacggttaggagttcaagaccagctgcccaacatggtgaaaccttgtctctactaaaaatacaaaaattagctgggcatagtggctggcgcctgtaatcccagctactcgggaggctgaggcaggagaatcgcttgaacctgggaggcagaggttgcagtgagctgggattgtgcccctgcactccagactgggcgacagactaagactccatttccaaaaaaaaaaaaaattaaggaggtaccgtgtgcagctttggtacatgggttgtatggtataatcgggggttggggctcccagtgaactcttcacccaaaatagcgaacattagtacccaataggttagtttttcccaccattttctcccctgggggggattcctctagagttc

SEQ ID NO: 606889 - DNA, 738 bp, Homo sapiens
gcatagtcacaaggcttccttgcggacagggaatcgaggtctatcttaggcagaaatgatacaccatggattggcttagcaggggcgacagattcctagagtaccgaacagaatgttccacgctatggtcgcgcgagaggtaggaacatacagtgtggcaagttgacaaacgttttcttggaactagagcacagagatctgccaaaagtaccgtaggattgtcacagaatgtctattgtgtgccaggcacaatgctaagcttggcgaacacagtggtgaacaagaaccacatgtatcaatggctcagcagaaagcgtagcaatcctaggtgaccgaaaagagcatagtcacacatacctgaccgtaattacggaattatgatgttactaggacaataagtacgtggtaacgtcctgagaagattcccccgtgaatgagcgctagacattcctgagatttcgcgtcacgggcacacggtcactgaagccggtcgccaccatatgatcctatctcatcgatcatactgcacagacccgtctggactcccatggcacccctgagacttggcaatagttgccccttacggaaacctagaacgacgaatgcgaatgcgctggtgctggacatgagagactacacggactaggcgatccaaccaacgtgccttaggcatgtccggcaaggacctgaatagaaaagacgatccctagacaccaacagactaccctcctacccaca

SEQ ID NO: 606890 - DNA, 149 bp, Homo sapiens
atcttatcaggagagagactgcaacagactgtaggcaggaaacagcaggctggagggacagcgcggacaggacacagcctggcggaaggagggggccgggggtggaagcagataaggcaggagaggggcagggcagttacaatagcctc

SEQ ID NO: 606891 - DNA, 100 bp, Homo sapiens
tggcgatctcttgagatccccagctcaggatcttagctccagcgtctcgagctcgaatctgtatctgtcatgcttttcctgtgtaaaaccctggcgaccc

SEQ ID NO: 606892 - DNA, 241 bp, Homo sapiens
taggatccctcagggttgacttcggggtggcggggcgtacgggagggtgctgcctgaccaggctgtgctgagcgggtcagtgagggcgagcagggcgtcactgctctgtgcctgcagcccctgtgggccagtgggtgagctggctggagcagttcatgtggggccttgtggggacaacaccagtgcatggagcccttggactcatgggcatgctcgccatgtccctgatcctgtcttgcag

SEQ ID NO: 606893 - DNA, 369 bp, Homo sapiens
  misc_feature (75)..(75): n is a, c, g, or t
tctgaggatcccgacactgttccccaccccgacgccgacggcgttgagtgaggcggaggctatgccgcggcggangcgacgtatcgggcgtatgtcgacgcgttgaaccgtgtggactctccgatcccacgacattcgagcccgtgttcgcgttgacgaccggtgaagcgcttgccgcggaccgaaagaccttttccgacatgcacgccgcgctactcggtatccggtaacactcgcgttcagtcgatagtcgaccgtcggtttgatagttcgaccggagttgtcgagcttgccgtgtgtcaggacgtctcacaagtgcacgtcgtggacgagtcggggaacagtgtcgtcactcaccaaccaaggatg

SEQ ID NO: 606894 - DNA, 999 bp, Homo sapiens
tttctagagcagaacacgatcagactatagcaggtgcagcacttcacttattaacgtagactggagacaggtagtatcacgttatattaacttggctctcgctctgaactgaacgtactattccacggactttcacgaaagctgcagctttcacgcttgcttggctaccagagcaacttgacaactttgcacttgcactgctggcccgcgctaacgacaaacttcattcctgagcacacggtacgctggctacactaccctaacttagcactacccagctgcaacactacctacacggtgcaacccagattctgcaacgctacactagcttcgtgacacacagctactgcccacacacttttgacgaccaatgttaataaccactttagtcctcacgcccggcaccacaaaccgactaacacacaagctgcgcgctaaactaagtgattgaaaagtggggaccttggacgactgctcaccactggggctagagctttaccatcctattcccctaatccctgcctctagcaaaaccctaaacaaccgcttgggcaccttgaaacttcaaacgtgacactcctgggacttctccctgaaactagccacccgctgcccttgaagctgttgctgcttccccctacttgttcggccccagctcccacccaaccctttacgaaccgcaacgctggttggcgaatatccagtaacagtacccggtcacatcatccgacattggctgaagcatctctcagccttcctcatcctggcacgccaccgctccgcgcacactcaacaggacagaacttcgcaacgctccttccggactaattcctaaccccaagaaccgttcttcctaacaacaagcccggcaggccgcacttgttcagaccataccaatgggcctaccagggccccgcctgcgcggtgccttccatctttccgtgattcaacacgccataccgggtatctactctctattctacacacggtcattgtgcg

SEQ ID NO: 606895 - DNA, 843 bp, Homo sapiens
gctctcggacaagtcaactgagatccagagaatcctggatgtgaatgctaaacactgggacccttaactcacattcaatgtaattccacttcccaattaaccatcaagttcatacgctcaatacatcaacataacgaattccgacgcccagtacaaagatggaactaacactcatttccttaccactgcttcgcgaccccacttacaacgaaccaccaactcccaacttccaaaccaactaagcaccaccacacgtacacatcacactgcacaactcccacaacgaacacccctcgcgcccccaaagggacacaaccaccgaacaaaaagaatacacgacacactacaacgaacgacgttggcccacaagagaacaaatatgcaactaccagacgacaatcatccactgacagtacgacacaaacgaacagcaacacagaaggacaacaaacacacactatatacgaaccattctatcacacaaccacacctcagataaacacaaccaccatccttcccttaaacaccaatataccaccaacaacataacccccacaacacaaccacaccacacacaaaaaccatacactacccacgccaaaaccacccatagaaaacacattatcccccaacaaacacacaaaagatgcaacaaaaaagccatacaggaacacaagtgagacacgaaacaacacaacaacgacaacaccacatcacaccacgcggccaaaacaccaaacatatcgggaccaaaacccaattcaaccacacaacagaagcccacgacatacaatcaaagcaacaagcacgaaaaaaccccgcataaaacaacagacacacaac

SEQ ID NO: 606896 - DNA, 135 bp, Homo sapiens
caattgccccgattagctttcgtgtcgatccattttgaaacaagaggccacttttaaagaaccgtgcctcaaatgttaaaggactgctctttgactccacgttccctaaagccccttaattgaacccccacggat

SEQ ID NO: 606897 - DNA, 144 bp, Homo sapiens
aaaatgtgaccttctatatctactccaggtcacggagacctcattgaaaaggtaatgtgagcaaagactcgaaggagagtaaggggattaccatgtggatatctgtaagaagattgttactaggcagataaaacggtgcaaagc

SEQ ID NO: 606898 - DNA, 273 bp, Homo sapiens
ccctgccggagctttataagtcgctaccagcgcgtgtacggcaccactttcgcccgcagggcacgtgctcggagacacggacggtattggaaggtggaccacttgtatacccgtcgtccggtccgccttcagggggctgtccctcagatcgggacccgtctctaggcgcggggtgccttcggggtcaatagaggcaggccttggtggtgcctgtgcgataagcaccttgcgcctgtctatctacggcgtgttattaagattgccggggcgaag

SEQ ID NO: 606899 - DNA, 822 bp, Homo sapiens
agcgggtcttactgctaacctgtgtggatgtttctggtactcagaaagaatcaggaacatcattttgcaatgctgaagaattaagataatgaaattcaataaagcaggataagaaaatggctggcatgtttccccattacctagaatagctctgtggagaccaatccattccatgaaaacaactgcgaaacaggataattccatgtaataaacatctgctgaatagggcatcatgacaaactagcaaggcagctagactgagaagccaagatagcagaaagaagggtgtgctagagatggtccgctcacgtagttcggtgccacttgttccttgaggcattatgtcgaactcctaaacagcagcctatagatgaaggagctgagcagatattcgtaagagtttcacgggggatacaggaataacatggcaagcttaagagccaataagaagcagacaaaatatccctagcatttcaggttggaaccctggatgggattcatgtcaggagtaatagggaaccagaaacagacaggacggtcgatgaagattccagcccactgagattagactagctgatctgctctaccctaactttgcaaccagaaagaagaataaacccgctagcagtaacaccatctagagtctggaattatctctgaaaattttgcacattaccatatcctgatttcgatgaaaaattatcagtcatattaagaagcacaataagtgatcacaagccaagaggaacaacaactcaggttaaagaaacgagccaacaggagaccggacaccggtggctcacggcctgtaatcccagacaa

SEQ ID NO: 606900 - DNA, 688 bp, Homo sapiens
gctgtctgggcttctttctgtctctttctgtctttctgtctctctccctacccccgctccctctttccagtgctctggctggctgtctctccctttctccccctctctctctgccttaggctctgtctccaccgcagggcccaaggtgaaagtcctccccttgccggaggccagctggcagggcctttcgtggctggaagtggccagtttggttccggtgctgacccctaggccccagcgcagctgctcccgtgctgtcttgtctccccctctctgttaatgtctggcgcggaagtattaaaattcaaagcctcctgagcattctgtagaggtaccacatctactccttcgtgactacactctgggccatcttctatactacttgaacatataccaccatctataggacctctgcatcatcactgaacccatctctgtcagtctcatcagcctttatctcatgggttaagatcccccactccaaggctctgagccccttcttcccccttacctcaaaactggctgctataggcagcagaaccctgaacactgagataataccagacccagggagggaggagaccccaggcagcgaggacagaggacagcatcatcaaatgtccccaggaacaaggatgtggatcacgagagactgccagaaggagtagaaaaagaaagcagaacactg

SEQ ID NO: 606901 - DNA, 558 bp, Homo sapiens
tattccacaggggcagcatcagccactgtcagctgctcattttcccaaagcccacaagcctcagccacgctttgcttctgcaagacgcttcttcaccttttcaataaacctgcctgaatttaaactgacgggggtttaattctccttcatcataaatgaaattcttcaccgcaataatctccaatgaattttgggcacagcaggcaggcccatttctgcttctgttccactatctcccctgtaggttgaaaaggaggaggtactgaattacctccaaatgttcctctggctctgatattctgttattctggttccttttcagctactttgtttttggtagcatgtatcctaaggcatccagttgaacaacctttgtctactgtgtccaggcattcctcgtggtatttcagataagacactcttgggttgctgaactcacaaccactgaaccaattctatgaccatctgtttcatggccacatgtttgctcattttatatgtatataaagggaggggacagacagcaaacttgcgtgttataaattgtatcctcttaaa

SEQ ID NO: 606902 - DNA, 355 bp, Homo sapiens
tgactgcgagcaggttgagtggagtgcagtgcgacggtcgactcactgcggcctctgcctcccgggttcaggagattctcctggctcaacgtcctgagtagctgggattacaggtgcctgcactatgcctagctaatttttgtgtttttcgtggagacggggttttgccgtgttagccaggatggtctcgatctcctgacctcgtgatccgcctgcctcggcctcccaaagtgctgggattacaggcgtgagccactatgcccggcccaatttgtgtatacccgtgtgacgcaccgggagatgtagccatgctcgtccgtgcgctcctcgtgcttgctgattatctccacgaggc

SEQ ID NO: 606903 - DNA, 109 bp, Homo sapiens
agggctctgctaccgacgctcatgaacaggctatcttgcggttgcacgtcaacaatgttctgtctcagcctcatgactcaggccactgttaaactagaacatgctaaat

SEQ ID NO: 606904 - DNA, 281 bp, Homo sapiens
  misc_feature (18)..(18): n is a, c, g, or t
tctagaggatcccatggnagaccaggtctgaggagggaggatggcttgagcccaggctgagcaacatggcaaaaccttgtctctattaaaaacacaaaaaaattagctaggtgtggtggcaaacgttggtaatcccagctactcatggggctgaggcccgagaattgtttaaacccaggaggcagagactgcagtgaattgagattgtgccactgcactccagcctgggcaacagatcgagactctgtctcaaagatacagagactcgctctgttgcccag

SEQ ID NO: 606905 - DNA, 208 bp, Homo sapiens
  misc_feature (97)..(97): n is a, c, g, or t
aaaggggtattaatttaaaactcccttattaggattaccttttaaaggtttatttatgaattccccttaaaaatgatatttccaaggttaacccatnccatataaagaaaaaaataaatatattaataccggcttcctgtccccatttttaacctcagccttccctactgtcccccacaacccaggtaaataaagtcccccgccttga

SEQ ID NO: 606906 - DNA, 814 bp, Homo sapiens
  misc_feature (6)..(6): n is a, c, g, or t
  misc_feature (63)..(63): n is a, c, g, or t
  misc_feature (75)..(75): n is a, c, g, or t
  misc_feature (81)..(81): n is a, c, g, or t
  misc_feature (128)..(129): n is a, c, g, or t
  misc_feature (153)..(153): n is a, c, g, or t
  misc_feature (177)..(177): n is a, c, g, or t
  misc_feature (180)..(180): n is a, c, g, or t
  misc_feature (204)..(204): n is a, c, g, or t
  misc_feature (256)..(256): n is a, c, g, or t
  misc_feature (306)..(306): n is a, c, g, or t
  misc_feature (311)..(311): n is a, c, g, or t
  misc_feature (313)..(313): n is a, c, g, or t
  misc_feature (337)..(337): n is a, c, g, or t
  misc_feature (341)..(341): n is a, c, g, or t
  misc_feature (364)..(364): n is a, c, g, or t
  misc_feature (367)..(367): n is a, c, g, or t
  misc_feature (397)..(397): n is a, c, g, or t
  misc_feature (661)..(661): n is a, c, g, or t
  misc_feature (667)..(667): n is a, c, g, or t
  misc_feature (679)..(679): n is a, c, g, or t
  misc_feature (682)..(683): n is a, c, g, or t
  misc_feature (691)..(691): n is a, c, g, or t
  misc_feature (699)..(699): n is a, c, g, or t
  misc_feature (713)..(713): n is a, c, g, or t
  misc_feature (715)..(715): n is a, c, g, or t
  misc_feature (725)..(726): n is a, c, g, or t
  misc_feature (732)..(732): n is a, c, g, or t
  misc_feature (776)..(776): n is a, c, g, or t
aaaacnaaataggcgatagaatattaatctctgtgaaacaatatagacaagagtatgaaaatnattttacagccncttttncatggctgttgacctactggaacaagagcaaaacccgcattagatgnntggtcataagactctccataagtngatgtccaatatataatgcttttnaangccattgtgagacttctgcaaganatacacgtccatctaccacaaatggctccacatctgtattgtctggctttanacaacccatttgaattaagtctgaatatgctatacacgtagcctcatcanatttntntccccaaatgtagatatgagaganagtnagacttgccttccccgattgggnaantgcaacaagtccttctccctctatgttgtngctgactactgacaacgctttaagactcctgttgtgtgaagtaagagtttcactgagatagtttgcgcctgcattttctattctgttaaaggaaagatctattacttccagggtagtgttgcttttcagtacatcagccaaatacaccattccatcatgagttattttgttgcagctgacatcaaggtagcgcaggctactgttcagatacagtgcatcacatatctgttgtataccactgttttttatatcatgcttacacangtgtanagcaacaagacngtnnttttcttncaacatgnggcctacatggacngnagactcttcnngaacancgtacagtataggtcggattaagtttattgacttaaatagcttnattttgaattaatactgtagctaaaaaaataacacttt

SEQ ID NO: 606907 - DNA, 200 bp, Homo sapiens
cccccccccccccccccctttttgggggtaagggggaaaaaagttttttgtgggggggggttttttttccccccccccccggtttttttggggggggaaaattttttttttcccttttttggggggggggggtttttttttttggggggggtttttttttccccccccgttttttttggggggtcccccctttgggggga

SEQ ID NO: 606908 - DNA, 217 bp, Homo sapiens
agaccgcagtgtatagggagcagggataaaatattttcttgataaagtacgtgaagtgttaactttttatcgatctggtagtaaaaaatatatgtgcaaaagtgtgtttctattttattccattaaatagctgagtatagctactacttcagaagtcttcgttaaacatagatttgcgggtgtctattaaatagtgtcttcgtgtagcagaaatagg

SEQ ID NO: 606909 - DNA, 594 bp, Homo sapiens
tcggctcggacccggtccagtgcacagttgtaaaagagactttaagatcggcaggcacggtggctcatgctgtaatcccagcactttgggaggcagaggtgggaggatcacaaggtcaagaggttgagatcatcctggccaatatggtaaaaccctgtctctactgaaaatacaaaaaaaattagctgggtgtggtggtgttccccttatagtcccagctactcgggaggctgaggcaggagaatggcatgaacccgggaggcagagcttgcagtgagccgagatcacgccactgcactccagcctgggcgacacagcgagactccgtcttaaaaaaacaaaaaaaccccacaaattttagatgtgcgacatgctgcccaccctggggggatactgctcattgtctcactggtagccaccctctaagcttcctggaatccatattgtgtcgtacactaagttgaattttattctctcataaccatgaccatattaactatttaaacaaatgaatacccagagagtaaaaacgaaaagcaaaacgaaaaaaccctaaaagtattacattagaagtcaaagcacctcagacaattt

SEQ ID NO: 606910 - DNA, 95 bp, Homo sapiens
aacttaaccttcatttcttgtagttaagaaaccatttcttcaggatcatgactgaagttttgccatgttccatcattaatgttccaacatcacca

SEQ ID NO: 606911 - DNA, 463 bp, Homo sapiens
  misc_feature (93)..(93): n is a, c, g, or t
gtcaggatagcaggaatccggggtcaaggttgccttaaccattctggtcacacccctgtgagtaattgggaccaaagttgtgtagcacttgtntctgtcgtaagtgtaacaggtctcagaataatcgtcatcaggacagatgttgctttggctagcagtaaacacctgattgtccagctctatttccgtaggatcacattttttacagaggttagccaaattatacttgaattcggttctcagtggtgaggtgggatcagagatattctccctggtgttcagaggaacgataattctgatgtttctctccacaatgtcctcactggggttgtcgggatcacggatgatcctggaagtgatgcggacacactggcatttgttgtcaacaagaacagtgctttcgtcttcacctgtgacaagaacagcctgaacaaaaatggccaggatgccccagagaagcaaa

SEQ ID NO: 606912 - DNA, 1397 bp, Homo sapiens
  misc_feature (394)..(394): n is a, c, g, or t
tgggagaagcttagaggatactatctaacaactgaaattagtgatttggcaagtttcatgcaatcagttgttgtgtaaaaagttacgcttataaactgtaatgacagtgtcgtattattgactgtgtagtactccgaaggtgagaatcgagtgtacgactccttcaaggttatatagcgagaccgtagtatgtacttgtgtagagttgtgcagcttgttgagatctgaacaagatacatggttgcccactgtagaagtgagcgaagatgccttgagcccaaatggactacgtatctgtcgtgtctagcatgtagttcatcgttctatgtcacgcgttttagagtatcctatggagtcggaaggtttcctgtaacggaatttgcataagatctcntgttactaaggagaatacgggtcgaaggagctcgctgattggtgtagtggaagcgtcttgcatttgagtccctaggattattacgcgaggtgaacaattgattaatactcaaagtcctttccactagatatcttctggggtgacgacagagaaattcttgagaggctccaagttagtctgataccgactggatcacacgttaccattatgcccaagatgatctatttctaatcgaggattattcgtttctgggactcgtttactagtttcgccactttgtaaaaaggccgcggctttcctgcgcacaaacgcagggcggctgtatccaaaattctgaagggtatcccgatatatgtcccatccgcaattgtgacggaactcagccgagcctttgacttttctactggcccaatgtgcccttgccttccaagggggaaggaaggaggtccgcagattattattgcttccttccactatgtagggggacaaggtccattaaccccgaggacaacaacaagttggaagattttgcgggaaccgattcatatgggcctggatttaatcgtttgtgcccaaggggtaaccacacacggcttggggggcacacactacgaacaccttggggggggactcgggtggaggaaacttcgccaacagggaagtgcttaacacatggttgggcgggccaaaaaataaattatcgcaccaaaacagcgagccaactacattctcttacgctgacccagccgagcgcaggcttactaaacagccgatcttcctaagaaatgggacacgcgagaacggcgacgaaagtcgatgatgaccaccacacccgcagaatctatatttttgcagcgattattatgaagacaccacagcctactattataaaatgaaacacatgtccccccaaccaaccctagaagggaggccatactaaacaccagacgagaacgacaactctacttattgaatgcgaccacgcgcgagcgacacctcaaaa

SEQ ID NO: 606913 - DNA, 966 bp, Homo sapiens
ctggctggggggcggaaagggcagactgcaaactggggggctgcgttacgttgcaggaggcgcggttggggctgcgttggaggagggggccacgttgttagaaaagaaagaaaatgtggttggccggagattggagaggcgcccaaggaacctctcctgtgggaggggcgccttgcatttcatattgtttggtggagctgtggagacttgggcttgaccgccctgtgcatttcagcctgtgttgcctttctcctgtaggggttttcttttctctgttctctttctcggaggaaaagggcccgagaaaggggccattaccagggccgcggcgcttgggtttgccacactttggaaaagcagcccggaagcctgggttgctggggaaggcggggcgcgttagccttcccgccgcccttgcggtttggcccggttggaggcccaggcgtttgctaggatttgcttcagtttccctgtttgtgccctatttctcttttggttaacatttggcccttgtgtttgaagttattttcgaattttccttcctttgcctcttgaaactttcagcgattctccattgggtgattaggcgcacaaacagcacgtgtcttgtcggtaactcggatactacctttatttacagtgattttccctgtttacccgtgttttgttagtccttttgggcacccccaagaaaaaacaaaagagcaaaagaacaaaaacacaacgacggcaaagaaggaccgtacaagcgaataccccgcacagatatgacaggcaaaacaagagcgtacaaaatcaataatgcaactgtatttgaaaaacaataccacatatcaaaaaaaaagaaaaacaaaaaactcaacaaaaaaaggacgtaaaaaataaaatagaggaagttcccaagaccaacacccaacttaccttaactagtcacaaccactcttaagaaataaatagacacacata

SEQ ID NO: 606914 - DNA, 139 bp, Homo sapiens
atcaatgaggagacgcttccgtataattcgtcgtcagtcacggctcccatggcgtgccggcggcggcggcggcggcggcggcgcaagctgaggcggcggttggcggcggcggaggtcaaactcccacaatgcagccggg

SEQ ID NO: 606915 - DNA, 106 bp, Homo sapiens
ttatgactggcctgtgcgtcgcagatacgcgacactttttgtgcggacagctgcttctgagcccccattgtggtcttcctgggctttcagcgatggcttgtgcggt

SEQ ID NO: 606916 - DNA, 359 bp, Homo sapiens
  misc_feature (2)..(2): n is a, c, g, or t
  misc_feature (66)..(67): n is a, c, g, or t
  misc_feature (75)..(75): n is a, c, g, or t
  misc_feature (97)..(98): n is a, c, g, or t
  misc_feature (102)..(102): n is a, c, g, or t
  misc_feature (107)..(107): n is a, c, g, or t
  misc_feature (109)..(109): n is a, c, g, or t
  misc_feature (112)..(112): n is a, c, g, or t
  misc_feature (123)..(123): n is a, c, g, or t
  misc_feature (125)..(125): n is a, c, g, or t
  misc_feature (184)..(184): n is a, c, g, or t
  misc_feature (188)..(189): n is a, c, g, or t
  misc_feature (195)..(195): n is a, c, g, or t
  misc_feature (199)..(201): n is a, c, g, or t
  misc_feature (203)..(203): n is a, c, g, or t
  misc_feature (209)..(210): n is a, c, g, or t
  misc_feature (213)..(213): n is a, c, g, or t
  misc_feature (221)..(221): n is a, c, g, or t
  misc_feature (225)..(225): n is a, c, g, or t
  misc_feature (231)..(232): n is a, c, g, or t
  misc_feature (236)..(237): n is a, c, g, or t
  misc_feature (240)..(240): n is a, c, g, or t
  misc_feature (248)..(248): n is a, c, g, or t
  misc_feature (251)..(251): n is a, c, g, or t
  misc_feature (255)..(255): n is a, c, g, or t
  misc_feature (270)..(271): n is a, c, g, or t
  misc_feature (281)..(281): n is a, c, g, or t
  misc_feature (284)..(284): n is a, c, g, or t
  misc_feature (286)..(286): n is a, c, g, or t
  misc_feature (293)..(293): n is a, c, g, or t
  misc_feature (296)..(296): n is a, c, g, or t
  misc_feature (300)..(300): n is a, c, g, or t
  misc_feature (302)..(302): n is a, c, g, or t
  misc_feature (305)..(305): n is a, c, g, or t
  misc_feature (309)..(309): n is a, c, g, or t
  misc_feature (317)..(317): n is a, c, g, or t
  misc_feature (323)..(323): n is a, c, g, or t
  misc_feature (341)..(342): n is a, c, g, or t
  misc_feature (358)..(358): n is a, c, g, or t
antgaatgatatatggaatgaggaggatgatgagagaaagaaaaaaagatgagagaaaatgaaagnntaggtgtnatggggaggtatagatgggagnnaaanaggtnanagnatttggaagtnantgggtcagagcctgtatcacatcctttaccagcatggtgccaatcaccattttctcgcngttnncagtcngctnnncngctccnnctngccgggcntccngggtcnncagnncgnggcttccnccngtcngtttcctccctgccnncctgtcctcntcncncgtcccnccnggcncncgncccntgtttgcngttgcngtcactttctgcaccacnntgtggtcactccgacnc

SEQ ID NO: 606917 - DNA, 106 bp, Homo sapiens
cttcggctacaccgctgcaacatccccctttgtccatgcaaccaagcaatttcacggactcagtttacagggtctgtctcagctagggggtgccgggtcgcggggt

SEQ ID NO: 606918 - DNA, 1086 bp, Homo sapiens
ggctgattttcatgagtcgccttcaagactctcgtgtagggttgacaatgtgggggggtggtgggatccagcttatctctttgtattgttcaagtccattcttggggctggctgcgaggaggcagggacggaataccgcctcccataagacccttaggtgtgtgccgagtcttgctttgtgatgttggcatggggaggggagaccttggtgtggtgactgagttcccttaatcagacccttcaatgggcacaaacattgagtgcttgattttaggttataattcttgttctatgaatgtccaagatctgtgtttcccccttgtgcctcccagactgtgtggccagttgaaagtgtctgggtcagtgttcatctcatccctcatttctggagcagggcctgagaccctgccacatctcctatgctctgcatccacgacctcttttggaccattaaaggttcgattgatgcaaaccagagagggacaacaagaagggagacacaaagaatcacacctgggagcggacatttcagggccgtgggaggagtgagaataacacagcggttagaccatagggagagccgtctaggaagcggtgacacgcaaatattccccactggcagcactgacgagagacttggccatccaaagaggcgggtaccatgcgtcaggcgcgtgcacctcgagaagggggaatgaggacaaaaaaaccggtacaaagacatcggaggaagacacagaaaggcctgatgaggtgaaggggacagaaaaatcccatgggagacagttgaaagaacgacgacccagggaaggggcagaggacaagaacgcaaaccaccgataggaagaaagaatatgagcaggagccaaccgaggaaaacataaccgcaagagaaagaaacgatcataacaagtgggatacaaatcgacgcccactggtaacacaactgaacgaaagaaaaggagacaccaacgattgggacacaaaaaacaacgcacaatatgaacacgaggaaacaccatccaatgacccaagcaaacgagagcgagggcaagaaccaaaattgagagtggaagaacccacgac

SEQ ID NO: 606919 - DNA, 142 bp, Homo sapiens
  misc_feature (93)..(93): n is a, c, g, or t
accgagattagaaaccttaaccttaactactagttgttccaaaacatccacttaagtactttgatttgtaccattccttcaaataaagaaatntggtacccaggtgttgtctttgaggtcttgggatgaatcagaaatctat

SEQ ID NO: 606920 - DNA, 207 bp, Homo sapiens
acggatccaagttaatgaacgggaagaatgggtggcaatggtgtgctcctggaagagctcagccagcagaggtgccctgagctcggggccttgcgtctctgtcacctggggatatctatactttagataaagtttttactataaagtacgacagagacaatagaacaatatacaaatcttgagtgggtcaggggaacgaaactgtga

SEQ ID NO: 606921 - DNA, 450 bp, Homo sapiens
tgggcgcacatttacacaaaaaatactgcaggacactgctaattactgcctgtccagtctcacactgaagtcacccatgttattgatcttgtagcccaaaataattatttcaggacaagtatgtaatcctcttcacttttcctttaaaaacccttgtcttcctcagtgtggcgattcctcaaggatctagaactagaaataccatttgacccagccatcccattactgggtatatacccaaaggtgtatatgtggcacatatacaccatggaatactatgcagccataaaaaaggatgcgttcatgtcctttgtagggacatggatgaagctggaaaccatcattctcagtaaactatcacaaggacaaaaaaccaaacaccgcgtgtactcactcacaggtgggaattgaacaatgagaacacttggaacacaggaagggggtgttata

SEQ ID NO: 606922 - DNA, 128 bp, Homo sapiens
cacgagggccaccacggctatgggaattcaccgctatgtcttctatttatactgtcccatcagtatgattgcaaccacacgctgtagaaccgtatgctgtcctttgctaaagacactactctccggca

SEQ ID NO: 606923 - DNA, 106 bp, Homo sapiens
ttggaaggatgtccttggttgatcagcacgttcttgcccttgtagttaagattacatgaaccttcttggtgccagggccacagatatcgggactgtgaaagtccag

SEQ ID NO: 606924 - DNA, 312 bp, Homo sapiens
  misc_feature (42)..(42): n is a, c, g, or t
  misc_feature (47)..(47): n is a, c, g, or t
  misc_feature (146)..(146): n is a, c, g, or t
  misc_feature (151)..(151): n is a, c, g, or t
gcggccgggggggaggggcgagggagataggagagaaaaaantttangttgtacctagccttctgcttgcccatgccacacatatcctgtggcccccagagcgctggcagaaattggaatctgggggtctggggagcgcttaccantacanagagaagaggaatgactgcatgaatctacctgagttgctggcattgggaggccagttactggaaaggaatggaaaaaagaagcctccgaaagggaaaaacttctgacaatatgatgctgtgcgagaaatggggcggggcattaaaacgatctgtattatta

SEQ ID NO: 606925 - DNA, 353 bp, Homo sapiens
accgtcgacgccacctgactaagcttgtacctaacatgaaccaatcactggctatcgtcacacgagttgtatatatacatactctccccgacacatcccgtaagctgcttatgatcattggccaattaaatagatagggaaacctaattattggaaattaccttgagcttgactaatatgatgacaagcttttagatcggctagtgaagcccaggcccacctatcagagtccaagctctcagacactatgcttcgttgtctgtctcatagtatttcatgctaaacagcacagactcacataaatcaacttccacaatatagtatagatacgtggaggctctggccatgaactg

SEQ ID NO: 606926 - DNA, 432 bp, Homo sapiens
  misc_feature (43)..(44): n is a, c, g, or t
gaaattcgccggcccctggtttcccccccagggggccggggcnncccccccctggggtttttttccccccccaccaaggggtttttcccgggggggtcgggggggagggggtttcccccccccccgggggccccggtttgggtttaaaaaaccccccaaaaggggcccttttccccggggtttggggcccccggggtttttacgggtttcccttttttccctttgggttggggggggggggggcccccccccccccccccccctttgggttcccatgcccccccggtaaaaaggggggggtttttttccccctctttaagggggggggggggcttttaagccccccgggcgggggccccccggccccccctttttaaaggccggtttttttgccccctccctgggataacccccgggggtggggttttttga

SEQ ID NO: 606927 - DNA, 111 bp, Homo sapiens
ccaaatgtttttttttttggcccctcccccccttttttattgtggaagatttgtcccccatcctccctgggtccccctttaaaatttaaaaggaacttttggggtccccca

SEQ ID NO: 606928 - DNA, 230 bp, Homo sapiens
  misc_feature (113)..(113): n is a, c, g, or t
  misc_feature (201)..(201): n is a, c, g, or t
aaggatctgtgggcttgtgataagagagcatacatatctgcatttgtgacaaccctggaaggtgcatttgctcttcagaaggtgcagatctgggaaaactgcaacaaggaggntagaaaaaaagaaaacatcaagaaaagcccatagcttatagaaccatgccttttaaatgtggctcagaaatagcttacaatattcatnataatgactgtctttgccccagaatcctt

SEQ ID NO: 606929 - DNA, 275 bp, Homo sapiens
  misc_feature (236)..(236): n is a, c, g, or t
  misc_feature (271)..(271): n is a, c, g, or t
cacaagatagagaaaaagggaaccctcgctaaatcatcctatgacaccagtatcaccctaataccaaaaccaggaaaagacataaccaaaaaagaaaactacagaccaatatccctgatgaacatagatgctataatcctcaacaaaacactagctaactgattccaacaacatatcaaaaagataatccaccatgatcaagtgggtttcataccagggatgcagggatgattaanatacacaagtcaataaatgcgatacaccacataancggg

SEQ ID NO: 606930 - DNA, 387 bp, Homo sapiens
ggtacgacgccgtggctcgtgcctgtaatcccagtgctttgggaggctgaggtgggaggatcacttgagaccaggagtttgagaccaatttgggcaacacagtgagaccccatctctaaaaaaattttaaaaattaggcaggcatggtggtgcatacctgtaatctcagatacttgggaggttgaggtggtaggattgcttgagctcaggagtttgaggctgcagtaagctatgatcacggccactgcacaccagcctggtagcctgggtgaaagggggagacctgtctcttaaaaaaaagggctggcctgtaatcccagcacctttgaaggccaaagcgggcggatcatttgagcccaggagttcaggacgagcctgggcaacatg

SEQ ID NO: 606931 - DNA, 623 bp, Homo sapiens
cccctcccctgaccaagcgccacagtcccaggtggatctcagattgctgcgtgtgctggaagcgagaatttcaaaccagtggatcttactttcctgggctccatgggggtgggaaccgccgagccagaccacttggctcctggcttcaggccccctttccaggggagtgaacagttctgtctcgctggcgttccaggtgccactgggatatggaaaaataaaataaaataaaagctcctgcagctagttcagtgtctgcccagttggccgcccagttttgtgcttgaaacccagggcctggtggggtagtcaccagagggaatctcctggtttgcaggttgtgaagaccatggaacaagtgcagtatatgtgcccaagttcctcaggctgagaccctcacagcttcccttgggtacagggggaaaatttcccgattccttgcgcttcccaggtgaggtgacaccccaccctgcttccgctcagcctctgtgggctgcacccactgtccaacctgccccggtgagatgaaccaggtacctcagttggaaatgcagaaatcacccaccgtctgcatcgatctcgctgggacctgcagactggtgctgttcctattcggccatctg

SEQ ID NO: 606932 - DNA, 378 bp, Homo sapiens
cgctttcctcaagatcaagtctccaaccttcctgttctctcaaaaggattgttccacagagacacctgagtgttcatgaaaatgccaagccttggcccggcgcggtggctcacgcctgtaatcctagcactttgggaggcttaggccggcggaattgcttgaggtcaggagttcgagactagcctgggcagcatggcgaagctccgtctctactgagagtacaaaggattggccgggcgtagtggtacgcgcctgtaatcccggctaaactggaggctgaggcgcaagaattacttgaacccggaaggtggaggttgtagtgagcccagatcgtgcacctggactctttggactgtgtctcaaaaaaaaaaacaaaac

SEQ ID NO: 606933 - DNA, 137 bp, Homo sapiens
ctcctgacacagcagaccaggtcggatgggaggaggcggaggaggaggaagaaaccaaccttagatgagcccgttttgttttgttttgttttgttttgttttgtttttttcaggcagagtctctgttgccccaggca

SEQ ID NO: 606934 - DNA, 1437 bp, Homo sapiens
  misc_feature (996)..(996): n is a, c, g, or t
  misc_feature (1167)..(1167): n is a, c, g, or t
ttgattctgtgctgattgcatgtcccttcactttttttgttgtgatagcgcaccgccgtcctttgtgcgttgttagcagcttgagcggttctctcccctgtgagtagctcggtttcaagtctaatggcgcgtgatgctcattgtgtctgacacttcggcgggggttgtcctcccttctggcctcccgggcgtgtcccactttggctgtgcgccctcgccacatggtggacggttgtggttccgacccccttcgatggttgtggaccatagatcttttggggggacacaagcactttatggtgttttttgtggcaccacgttgttgttgcagcctgccataaagttggtttggaccacctgggggaaagataccatgtttcgacgccttgtcgggggccccccccaggttttcccgtcaattctgtgtgtaaaatgggggcgtgaacccagaggtgattgccccgtcctctcttattaggatttaaaatgggatgttccaagcgtcccttcaacttgagaggcccccttcatgccccttccggtggagcccccacatttgggtgccggacgcccccctcccgggtattatttaccccctctatagcgcctgggagccgcccctgtaggagcgtttcttggagtccccccgccttaatttagggggaccacgatagaaagccctctccaaatcttgtgaaagggtgccctgaaatgcgccctggcctgaacctggggaaaaacttttcaagggcaacttgatatggggttctttaccctgggtaaaccgggaagggccctgagaggaaacaccctgtaagcgcttccaaaatctaaatgtcttctgggtaaacccccggggtggccccttgagagcgcccacaagatctttggggtctttttgagaaggagaatatataggggaagagaaggtatatcctcgggcgcacacacatccacacgcgctataacaccctcgctgaggggttacacattttnatagggagaactatacccgctcacatctatagctattataagggagtcacatgccacgaaggtcacgccaataagcccgcggtggcgagatagaggctcacgccccttaactcacttcaccactacacccactcaccacactttaaatttccacaattctcgtaataattngctcttttataaaagttaaagtgccactttctatattatacccacacaataatgcactgaaattcactttctccctctttgagagagagttagagttgttaaagatagtcctcacttcacgctatccacaccacctccttgagtccttccctttttagtggctgttgtttgttgtaacttccctttagagctttgttttaaatgcttgtaacggaacaataatgtggactcattgggaatattgtgtgtttaatgccaatgatatattga

SEQ ID NO: 606935 - DNA, 578 bp, Homo sapiens
cttcacgatataaaataatataagaacttctggtttacaaaatgtaaaatcttaagcctatggaacccttgatttcctacctcagtgtacactcaactatgggtggtatcagttggtgtatgtcgcaattgtcaacataatctttggcttaatggctactgtacttgctttgaaagattacctactattttatgatacactgtagttgtctccagagcttaaatatacttggtaaacgcacttggttaaaatttctctctacctataaacagtttagcatcaagggttcctattaatgacacagaattattggcgcacagtgtacatttcttaaaaatttagcatactttaaatagccagcatgtaatacaagtaactacactacctcatatctacatgatttccaagttgtaatgcacgatggccagataacacaagatttcacgttcgtctttgtgccataagtgggaaagtctcctgtatatggcatagcttacacatttatgcctattttaacattaacttctaaagaagttttcctaagacacatgttcaaggcaatattcttagaggctgcc

SEQ ID NO: 606936 - DNA, 417 bp, Homo sapiens
  misc_feature (5)..(5): n is a, c, g, or t
  misc_feature (7)..(7): n is a, c, g, or t
  misc_feature (62)..(62): n is a, c, g, or t
  misc_feature (67)..(67): n is a, c, g, or t
  misc_feature (73)..(74): n is a, c, g, or t
  misc_feature (81)..(81): n is a, c, g, or t
  misc_feature (120)..(120): n is a, c, g, or t
  misc_feature (137)..(137): n is a, c, g, or t
  misc_feature (154)..(154): n is a, c, g, or t
  misc_feature (162)..(163): n is a, c, g, or t
  misc_feature (168)..(168): n is a, c, g, or t
  misc_feature (179)..(179): n is a, c, g, or t
  misc_feature (213)..(213): n is a, c, g, or t
  misc_feature (237)..(237): n is a, c, g, or t
  misc_feature (270)..(271): n is a, c, g, or t
  misc_feature (275)..(276): n is a, c, g, or t
  misc_feature (278)..(278): n is a, c, g, or t
  misc_feature (315)..(315): n is a, c, g, or t
  misc_feature (339)..(339): n is a, c, g, or t
  misc_feature (376)..(376): n is a, c, g, or t
  misc_feature (399)..(400): n is a, c, g, or t
  misc_feature (402)..(403): n is a, c, g, or t
gcagnanagtgtattgctatatgggtgccaagattgaatatgaagaagccccagtgtttgtnagtantatagnncttaagncaaatgctgtgtggtgatagcagccataagaatggggcntatataaagccctgtancatgtaagattttgtancagagaanntttangctttataaantgtatatgaagcatgtaaatgctttaaaatgtancataaaatagctgtatttttttancttgtgtgtgatagtctagtgcattgcatgtanntatnntntattatgtattctgtagtataaagcatacattgatgncttacatttttactggtaagtcancatccgttggatgttttctgaagtggctctttttgangtgataatagattgtaattcaanntnnaattattaatgaat

SEQ ID NO: 606937 - DNA, 227 bp, Homo sapiens
tagcctcccaccttagcctcccaagtagctgggacacaggcacatgcaccacgccagctaattttgtattttttagtagagatgaggtctatgtgcccaggctggtcttgaactcctgagctcaagagatcctcctgccttggcctcccgaagtgctgggcttacaggggtgatccactgtggctggccacaacaatccatcttgggaccgcttgcttgttccgctg

SEQ ID NO: 606938 - DNA, 210 bp, Homo sapiens
gagtattgtcttggaagtaaggcttgacaaaagagggaagggaaagactaattaacaaatgtgaaaaattaaggccctttgtccaagatgattcccttgtttaagtcagctgtttttgttgctggccctcttgcaccttagctttactactgtgggtggctgttagcagggtgctttgggaaggactgtccccaattcagacaagatggg

SEQ ID NO: 606939 - DNA, 455 bp, Homo sapiens
  misc_feature (191)..(191): n is a, c, g, or t
cacgattgcaaatcactgatctaagcacatcccaccttattctatacactctccttttcacctccaatattacacttctatttttatatatgtttcccaatctatttcttttggtaacatttggccctcaggaaaatagagaatcccaatgttggtttgctacaaagaagcctggagcaggctgggcacanatcgtcacgcctataatcccagcactttgggaggccgaggcaggaggatcacttgagagccctggagttcgagaccagcctgggcaacatggtgaaacccagtctctacaaaaattagctagatgtggtggcatgtgcctatagtcctagctactcaggaggctgaagtggaaggattccttgagcccaggaggtcaaggctcctgtgagctgtgatcacaccactgcactccagcctgggcagcacagagagatcctgtctca

SEQ ID NO: 606940 - DNA, 121 bp, Homo sapiens
gtttatagaggatcccagtctgtgagcctccgttgtagacaagttcttgggacacacttcatttggtaagtttgtttctcccctacctgtcacccccggcccccatccaatactctactct

SEQ ID NO: 606941 - DNA, 527 bp, Homo sapiens
gcatttggatgcggtatccgcaggcggcgtcacaccacgttgtcgagctcgcaatgcgcttccagccgatacccgtcgggatcgacgacgaacgccgcgtaatagccggggccgtagtgctcgcgcttgccgggcccgccgttgtcctggccgccgtgctcgagtgcggcgcggtagaacgcgtcgacctcgaccggcgaagcggccttgaacgacaggtgcaaccccgagtcgggatcggcagcgacggggcgcggcgcatgctgcaaccacagctcgggttcggtcgtaccgtacccgatcgagccgtcgtcgctatacagccgcgtgtagccgagtgcgccgagcgcgtggtcgtagaaggtgcggctgcggccgatgtgggcaacgccgaacgaaaggtgatcgatcatgtgaggctccttggactgaagagggacgtcagtgcggcaaacctgcttataaccaccacgccagccgcttgtagcggagtgcgccgagtgtgctgtcgtagtacgcgcggccgc

SEQ ID NO: 606942 - DNA, 270 bp, Homo sapiens
gtcccccgtaaaaacccctgggatgggggggggttggggttgtttaaggaaaaacaacccaacctgctttgtgaactgaaaggatttttatgcaattttgaggggcccttccaccctaaaaagaaagggtttgttttaccgggtggtgttaaaaagttttgaggattctgggtttgaaaggttgggaaaaaaaaaattcccttttatatgatgcccgtaaacccccccggatttataaatgaggaaaaaaaactgggtttttccttttga

SEQ ID NO: 606943 - DNA, 166 bp, Homo sapiens
atagttcttgtggtactggaaaattaacattacatatgtgacttgaggccttgctcagtggctcgtgcctgtaatcccagcattttgggaggctgaggtgggagaatcccttgagcccgggaggcagaggttgcagtgagtcgagatcacaccactgcactccagc

SEQ ID NO: 606944 - DNA, 248 bp, Homo sapiens
gagaagaagaaggaggttcctgctgtgccagaaacccttaagaaaagcgagggaatttcgcagaggctgaaggatcaagcgcctcagaaaggaagttttgcccaaaagatgcttcgaaaggcaaggaggagcttatctataaaagcaaagcactatcacaggaatatggcagatgtacagacctcaaatcgatgcaggatggccagaaaagctggccactctatgctgcctccgcacccaaattggcg

SEQ ID NO: 606945 - DNA, 221 bp, Homo sapiens
tatctctatcggcagtatgtagctctggggggtgcacaccgactcctgcaggactacaaatccctccaggtatatcattgccatcctggagatatgagatgcactttgctgagtgaagacaagttgaccgtgtcccgtgcacggcacaacatacagcgtttctgtgtctccagcccattcccagggttgctagcaggatcttccacagcatccaaccatca

SEQ ID NO: 606946 - DNA, 593 bp, Homo sapiens
cgcggtggctcatgcctgtaatcccagcactttgggaggccgaggtgggcggatcatctgaggtcaggagttcgagacctgcccgaccaacatggagaaaccccatctctactaaaaatacaaaatcagctggacacagaggcgcatgcctgtaatctcagctactcgggaggctgaggcaggagaatcacttgaacccgggaggtagaggttgcggtgagctgagatcgcaccattgcactccagcctgggcgatagagcgagactcagtctcaaaatctttgtatttcctttttctcccttttggaaggagaatatctattctctgcctttctcaccattgtgttttggaagtaaataactggttttgatttcacaggctcacagcaggaagggaatttgcctcaggatgtatcatgccttgactctcgcttatatatgatttagatagactctggaatttgacttttgagttgatgctggaatgagttaagactttggggctattgggatggaataatatatttggatgtgagaagacacgaatttgagggcagggctctatggttgaaagtgtccccgttattgtggtt

SEQ ID NO: 606947 - DNA, 346 bp, Homo sapiens
gtaccacgttgtagtgtgctgcttgtgtcacattgatgcttatacaagatagtccatctgttatcaggcataccaaacacacacgacggttcacacagcatatccaccgagggaaaataacagaactgacacactgcgataggaaaagctttggagctaacaaaatctcttcagaagaggcacatttcataatattcgtcatcacagcccacatcagatctggaggagaccttttttagaacagtcgtccgatacctaacgaaaactcctgcctccgtctataggcggaactctgacgctcgtctcagacgatagcaccacggttggaaggtagtagaaattgcaa

SEQ ID NO: 606948 - DNA, 322 bp, Homo sapiens
  misc_feature (247)..(248): n is a, c, g, or t
aaggggatattaatcatcttctctctggtcaggagtagctgataggaggccgggcgtcggtgtcacgcctgtaatcccaacactttgggaggccgaagcaagcagatcatgaggtcaagagataccatcctagctaacatggtgaaaccccgtctctactaaaaatacaaaaattagttgggagtggtgcaggcgcctgtaatcccagctacttgggaggctgaggtgggagaatcgcttgaacccnnaaggcagaggttgcagtgagccgagatcgcaccactgcactccgagcctggcgacagagcaagacttcatctca

SEQ ID NO: 606949 - DNA, 112 bp, Homo sapiens
aaatggatcatcgattttttttttaatcaacgtgcaatgaagaatgttggtttatatatcactataaaatccagttgacctggacagctattatagtgtacatagtctagtt

SEQ ID NO: 606950 - DNA, 749 bp, Homo sapiens
ccagctcctgaccgcgagtgatccgccagcctcggcctccggaggtgccgggattgcagacggagtctcgttcactcggtgctcaagtgttgcccaggctggagtgcagtgtcgtgatctcggctagctacaacctccacctcccagccgcccgccttggcctcccaaagtgccgagattacagcctctgcccggccgccaccccctctgggaagtgcggagcgtctctgcctggccgcccattgtctgggatgtgaggagcccctctgcccgagtgccagtctggggaggtgaggagcgcctcttcctggtgcgcgatgccatctgggaagtgaggcgtgtctctggccgactgcccgtcatctgaggctgtggaggagcaccttcaggccaccgtccgatcgccggtctggtgcgatgtgaggagacgcctctgctccggagcagccggctcccagtcttggtgcaggtgttggcacctgtcgcttgggccgtgcactgcacggtctgtgcacgaatggcacctaccgtgcagaacagtacgtgctatgagcggaaattgatgcagcatttacgaacagctctcatgaggccacaatcctattaattcaacgcggcttggtcgcaaggggaagacgattacagctgacgacaaagcgtgcgtagagaagtaataaagccacagaaaaaaagataagagaaaattgtctcatacgtatcaagcctgctgagcgattacataaaaattc

SEQ ID NO: 606951 - DNA, 1043 bp, Homo sapiens
  misc_feature (1043)..(1043): n is a, c, g, or t
ggttgcgctgggcttggttgctgctccatgagccctgggagttgcgatccgttactcgcggtgggctccctgtcagtaatactacaccagctgctgctgtccaaggcagagccttgcctacgatgtcgttgtggctctgggctgcaccagtgcctgggtagagccattcacgcgccattgtaaggtgcggagttgcagccccgcggcctataagtccctgggtggggtctgtctctcgacctcaggtcggatggcttctagcagtgcgtggcgcctgggggaccgggtgactctggcgggctcgtggccttcgtgtcgcggtagaagcctgagtttcctccgtcaccgtgcggcctgcgctgttacacatggtccgggcgggcccggacctgtgtgttgtttgcgccccggtcgaggcctgagcgggagggcgctacggattgaggcggtccgcgcgtaagaagaagttgattctgcttgacagccgccttgccatctattgcctgagaagtaaaatgacctcacgaataatcacagcctggattagcaattttgcgggtacctagtggaggcccgtacaacttcctggcaagcaggagttgagcctcccaggggagggaggggtgacttgtgactagagccaatgtagccgtggtgctctgagcagcggctggtattggtagcagcccctaggttgttgattctgctctaattgcacaagctggcgtcgctgggagcatggcctttcgttggctggagacccggccattacgagcagtgatgcccggttccttgtcctttgatcttgtttatgatgcggatccgcgcgccgttgtcatcggaccgtgtggtggtgctgcatggcccataggggcgtgttcggtgtggcggggagtggcccgtggttcacccgggcacacgcaacaggtggcggcttcggttgcctggtgcggccgggtcctttgtgttgcccctctttgtgcccggtgggccgcggagctttgggggccggcggctccttggcgcgggcgggagggcgcgcn

SEQ ID NO: 606952 - DNA, 988 bp, Homo sapiens
agcgggtcgtccaacggcaggcctcaggagtgatcgggcagcagtcggccggccagctggacggcagagcgggcggacgggtaggcccggccaggctctagcgcgaggaggaatgaaggtggccactctcgcacggtcccctagtaacctccccagcacgcacagacgaagaccagacacagaagcggtcaaggggagacagctgcagagagaccagaggagcaggcacttaccacgcagtgtagacacggccgatcagaacagcacagacacaactgagaggagcctatgaccgatagacgtagagaagtctgagaccaggtaggcagtacatcgagcgtggcgatgaaactgtggcttgacagcggcgcactggggaggaccgagcagaagtgcccgaccaggaaaccgaacgaagtccaggagtgtctcgaaacacttgggggggagaacctactaggatcacgacgacgcgcggcactcgcgcctcgcaacacgcggcgtcatgccacacagcaactcaacccaggtaactcgacgagcgaatcctaaagcaaaggggcaagcccgggggcgggcaaagggaaacaacccccgggaacgtcgcgaagacgtaccacaccaacagacggccccaaaaacaagccatgtggatccacacctaggactaggagcagaccagagacggcagggtcgccgcagaccgtgcacatcgccacaacgggggtcccaacacgggcatggtgcaaccaaaggaagcgtgcggccgtgaaaggcacaaccagagcagcagacgccaacagacacacacggcccgcactcccaccacgaggaccgaccgccacaggcacaaatccaccgcgcgtgccgacacagacagacacgccggcggcggctgaaaccaccccccgtgtcacgaagggcagacgggcagcgcacgcggcacaaggagcacaacaacagaccgacgaggcgcgagcaacaccac

SEQ ID NO: 606953 - DNA, 1235 bp, Homo sapiens
gctgactacgagtccaagggcatcaaggctcacttcaacctggatgagcagtggcgtgctcagctctagcacaggggctgccgctctgtacttctgcgacacctggtagacggacagcgcagaacgaggaactcgtactctcacgcaaaccttggcaacaccactttccagcctgctccgcgcacggcggctaccaccaccagcaatgccaaggcagaactggatgcctgactacatgtccaaggcaggcaacacggcaggagccactgccacgcagggcgacgcgacgcgaccgacgccatggcgcgagcaccggctgcgcacgcctccccggcacggacacggcccagcgcgggcccccagcctgcgaccgagcactgcgcgtatctcaaggccccacccagcagcccccttgcacaccatatacaacggggactcacatcgctagacaccgcctgcacggcgagaccaacagcggccaaccacgaaccccaacgaaccaactgggccgaacacacgcccgtggcaggccacccccgtaacacacacccagcacgattcgagcacaatcggccacgaaagggcgccccgagcccccttgcccgcgacagactagccgacccaaagctccccaaggaagcgcactaacggaaaagaacagtccaagccaagccccccgacccaggggacacggcagaggccgaagacttggcctccacatgcgcccaaccgccccagccggcccccccgccccgcagcctcgacaccctgcccaccgcacccaagccccagacgcgcacccccccaccgcgccccaaccagtgcccgcccaccaacagactccacgcaccccgccagccaccaccaccacccagcgcccaacgcacgcgacccgccccaccacccaccgagccatcagccctctccagagaccccacaccacaccgaacaccccccggcccccaccggccacccccacacgcaactacccgcaacccgaccaccagccggagcaccagagccacgaaacccctgcggcagggccaacgcacccatccacaaggagagaacgaaacacaggacgagccacccccccccgcgacaagcgccacaacacacgaccgcacacgaacacacaaccaaccgcgaagcacagcccacagccccccgccccccgacacacacccctcgcacaaacccacaagcaccaaaacacccaccccggacacccacac

SEQ ID NO: 606954 - DNA, 641 bp, Homo sapiens
tgaaaagaaaccagaatctgctagaaccccggtcagaagcgagcttatttgctgctgctcagtctacgcttaaattatcttcagatccttggggaactcaagacgtatggtgggaaagtcttcaatgccactttgatgttacaggatagagaatcttacattgccctcctggttggggccaagtacgggattagccagatcatcaacagcaagctcaacatcatatccacgctggcagagttcgccaacatcagccgcgtggagctgacagaagagtctgagaaagtgagcatggtcaaggtctaccttcaggacgttaacggttctgacttgtgttgctggaatccagcagtgcaaaagacctggcctgcttgatcgctgggtactacaggctgtttgtggacccggccaactccgtcttccactggtctggaaacagacggccgacgcaccgggtatccgctgaagaaggctacgagtccagggcctgcagtgactcggaggagtcctctgaagtggactgtgtactggagcccctttctgaccgatgcctggtgaagctgagcctctgcagaccatttgctagagaggagctgccccctggcgacagcccacacctgaggcaagcagaagaggtccaa

SEQ ID NO: 606955 - DNA, 331 bp, Homo sapiens
tgcaatcgtcctccttctcgaatgtgctatttctctgccctaagaaatgaggcaaccctccgggccaaggggcaataagtgtccctcctgtcctgtgttccagccatcacccggaccatcaaatgtgcccacgagcggtcagtgcacctgttcatcgactccgtgctgcaccccggcatgcagagcacggcctacctgtgcaaggacatggacagcttcagccagggcctgtgcccgagctgcaagaagggccgctgcaccacgctgggttactacacccaccaggagcagcagagcaagaagagcaagagcctcttcctgatgactcgag

SEQ ID NO: 606956 - DNA, 417 bp, Homo sapiens
tcgcatttggggttgcggttcccccccttaccccttccccggggtctgggtggtagacattgtcaccgcgcccctacgtggggtcgcgttgccaccccatgcggactccccagctgtcgcgccctcgccattgcctgacctggcaggcaccaccactactcacctacccatctgaccaaacaataggctggctgcggtgtactctcgagctgcacatgacgtcgcgtccagacctggccttcgctctttactctttgcatccacagatggctaggtggaccccagcatcaacgatacatcactccttggttcgcagaggcgcatatccccgtactcgctccatccctgtcatgaacataagtggtcagaacacaactcagctcccacgtagaccccacccgccaaatagcccgacca

SEQ ID NO: 606957 - DNA, 1288 bp, Homo sapiens
tgcagaagtaccgcctgcggagtaactgcaaagatgctgtccagtgcgcgttgctgcggacgtggtccgcgcccttcctcggcgggccggactggtctccagaaatgctttggagttcatctttcattgctgccacaggcaacttccatgcctctcaaccactccatcttcacaacagcactgggactgctgcagatgtcctctcatccttgacagcagcgtcattcttgtgagctgcatcacctctgttgcatctctgcacagcaacacttgggacgtgtcattcaagtcattcggtgcatggtcattgccctgcgtcacatggagctgcaggcacatgttccaagccagcacagcacacatggtcacagttccactatccaggctttcacacagggtccatgtcccattgtcaactttgcgaacaccttgccaccacattgtcacgcgtcgtctcgtcaggtgtaaagggcaacattgcatcaacactccaattccacggcaaggcaccatccatccagtcgcacagcaaggcaccagtgcagcaccatctcgttggagcacgtttcaccaagatatgagatggccatagcaaccatgcaagcagggtacgatggtccaggttcgcattgccccctctgggttccacataggcctccattcgcattgggacacaagggtgtcccccgattcagggtctccccaacaagcacacgccagcacagcgccgacagcttctgggaccatctggccaccagacccccccggtagcacattcacatattccctccggcaacaataccccgaggctagcccgggagcaaacccaaaataggcaaagcacctagcggcactacttcacaacgggcttggttcgcacaattaagacccttgaggattgaccccacattctagggctaccacaatgggaatcacagtcatgattgcaacaccctcgtcgcatctacctctcgcagttcgaacccagaagcaacgcaacgcgggggtcgacaagcaaaccccctatccacaactgggccacactccaggccacacccccacaagccccatccacaaccagccggaacaacacacgggatccccagccgcctggcaactgacgaacaccccatcgacacggcaccaacacacaacggcaagaccagcagcaccacaagacacaaatcgaaccacggtcggcccaacaactgtgcgacacacaccaaccaaccgaataccccaccaatgggcatcgccccacagaagaggcagacacaacgaccgaagc

SEQ ID NO: 606958 - DNA, 642 bp, Homo sapiens
  misc_feature (155)..(155): n is a, c, g, or t
  misc_feature (216)..(216): n is a, c, g, or t
  misc_feature (318)..(318): n is a, c, g, or t
  misc_feature (334)..(334): n is a, c, g, or t
  misc_feature (424)..(424): n is a, c, g, or t
  misc_feature (590)..(590): n is a, c, g, or t
  misc_feature (596)..(596): n is a, c, g, or t
  misc_feature (604)..(604): n is a, c, g, or t
  misc_feature (611)..(611): n is a, c, g, or t
  misc_feature (619)..(619): n is a, c, g, or t
agatcgacaaagctaacaaatgtctcaaatggttaactttccgggacagagatgaacactctaggaatcagcggactaagtaccttactgaatattcctcgggcgtggaaacgtccgggactgaaccttagccgaccagaaagaaacaagtagcnaatataatcagcttcgaaggaacctaactaacctcaaaatccaattacctcatagatcatngaccttataatcatctcactttactttcaagaacctcaagctatcatctagataatacgtctaaagatacaaatgtagacaaacgacaacaccgtacaagcnaagaaacaaagagcanaaaaataagacgatagacgaaactaaacgaggaactcgaacaacccggaaaaactctgaaccataggccgtagaagtaaaagtggtgtantagagcaaaatagaaaacaaaatcgaagtaaaaatctaacgctgatcagacgctctaggatagaatttcaagatactcacccacataaaatgaaacaaaacgacagcagatgggttaacaattcaactgtttggtttacagaacgacaacgggttaagacgggtcntgcganttgacggnagcttangttgtccntaaatatccgctcctcttctccc

SEQ ID NO: 606959 - DNA, 1084 bp, Homo sapiens
  misc_feature (963)..(963): n is a, c, g, or t
  misc_feature (1084)..(1084): n is a, c, g, or t
cgtaggtctatccatccttcccgttcgacatgccgtgacagcctgactgcacaactctcggtatctctgccagtggcggcgaacgagagaaagcccgtggaaggagtcaccattgctaacaacgatcatattcactatgcaggtaggccgggcgctaggaatgtgattcttagttcgtgtggccgtttatcaacccatagacaggaggtgctcttccatcctaatcttatgatgagggctcaatcgaatatgccattactagtagcaactgaattcgaggtattgtcaactcgcacgtgccacgatcacgcactatccagcactatatagagcgcgcggctacttccagattctagtttgcacagaccacgtaagactccctgccacacgcttcgcgtaacatcgcgtaagtgcatcgacacgcataaccacttagatgttgtggccaatccactcatgatgagtagagtagtactcagcctaggacacatacggggaacccatgctttttccttttctgacctcccccaggcacagcgtacgtggatgtggatgtatcacacacgaatctcatataatcccaaaactttccctcaatattctagaataaatatcttcggcgaactatctcgcgtgtaccacgtcaactaattctccttgtaacttactaaaccaggtgactatatctgtgaatcctcattatttcctcattcatttgtcacctcctatctcacctatctgcctttaatagtaaacactatataaggtgaatctcggttaattgatagttgcgtctagaaggccataatgagtattctctatttgggcttcccaaaggggatataacaatccgctagatgggtcaatcgtcccaggattatgccccacctcgcataagtggagcataacccagcggtatggacggcgcacagaagccacttagttttttcacccgtgccgaanatttacccctcacattttttccgccttatacgctgggccagggcggcctcatacagagtcatcttaagcttgtacacctgggcaaataaattcccagagtgaaagccccatgtttggcacn

SEQ ID NO: 606960 - DNA, 141 bp, Homo sapiens
tacatgatacgaaccgaggtgtaccgccctcggatcatcatcttaggagcaagacagagacgcaggaatggaaagcggagttcctaacaggatgaaagttcccccaggcagcaatgtgctattgaaacttctaaaactagg

SEQ ID NO: 606961 - DNA, 190 bp, Homo sapiens
tttaaaattctacttgtatccatttcaaaacctacctgaatttcactcagtcccacaatattaccataatctttgagctgttggcaaaatggatccattttataagtcatgccttttgcattgagcttttgcctgtctcatatttagataaatttgaaagcaaaaggaatatcactgtgttgaatatctt

SEQ ID NO: 606962 - DNA, 214 bp, Homo sapiens
ccttttgttttttgttgtaaaattttttttttcatgcctatgctcatagtaaatagtttgcaaatgaaagttgatttgccatacttttaaataaaattgttttagcttgaatattctataatacccttttatagagtataacatgctaaatccctgttttgttgtaaaaagggtgtaaacattttgttaataaaatgctatgtttccaaatata

SEQ ID NO: 606963 - DNA, 180 bp, Homo sapiens
cagacggtgcctggaagtaacgtagcgtagcctttggattcttaatcgccatgcttgctgcactgtctccaaagaatctttcattttctttcagggtcgcgatcaccggtgttttcctccgagattccttattcaagacaatctacaacttccacaggagctcgcccctgagctgcaggg

SEQ ID NO: 606964 - DNA, 420 bp, Homo sapiens
gtgttgggctacagaaacaagaccatttttaaaaggtcttgccataggtacatacgacagttgtgcatcaaacatttgcccagaagctttaaaaacctaataaagctaatatcgtttataaaccgaaaagcacaaacagagaggtataaattctcagggaagaaatggcagtcagcagactactaaagtataggacatcagtagaggacaagacatagtacaacaaaaataatagttcaatataggacaccaatagccttcataaaccaaatcaacagccactttggatatgtggtggatgaatagtctacagtaccagtggtggcactgtgtatgaaataggacagattgtctcaagaaatattcatgatattctgtagaaattgctaaatatgaatcaaagggaaacactatgtagga

SEQ ID NO: 606965 - DNA, 138 bp, Homo sapiens
tgggaatacgggtggactacctgaactgcaggagctgtccccacctcccctgctatctgaacagctcgctcatacagcagggttgggacttctgttaaactagaatttaaacaaaaggccaagtcgtattaagcactc

SEQ ID NO: 606966 - DNA, 316 bp, Homo sapiens
atgttcacggctgttgttcaagacgtgactgcgtgcctgctggacgctcattgccccccattgagaagattcgtcgtcctgagaagtcgcgtgctggaggtggagtgtgtctagaagcatttgcggtggacgatggaagggccggcctcgtcgtactcctgcttggtgatccacatctgctggaaggtggacagcgaggccaggatggagccgccgatccacaccgagtatttgcgctccggcggggcgatgatcttgatcttcatggtgctgggtgccagcgcggtgatctctttctgccattgggccaagcggg

SEQ ID NO: 606967 - DNA, 354 bp, Homo sapiens
  misc_feature (16)..(16): n is a, c, g, or t
tcggtaccatcgctcnaaaacctcaaaggcagctgtgcgcggtggcaaacgcctgtaatctcagcacttgggaggccgaagtaggcagatcgcttgagctcaggagtggagaccagcctgggcaatacggcaaaaccccgtctctacaaagaatacaaaaattggggtgtggtggcacacatctgtagttccagctactcaggaggctgaggcgggaggattgcttgagcccaggaggtggaggttgcagttagccaggatcacgccactgcacaccagtctgggcaacacagtgagaccctgtctcaaaacaaaagaattttttttctttgctgtgccaggtgatggaggaac

SEQ ID NO: 606968 - DNA, 493 bp, Homo sapiens
  misc_feature (38)..(38): n is a, c, g, or t
  misc_feature (59)..(60): n is a, c, g, or t
  misc_feature (89)..(89): n is a, c, g, or t
  misc_feature (106)..(106): n is a, c, g, or t
  misc_feature (113)..(113): n is a, c, g, or t
  misc_feature (145)..(146): n is a, c, g, or t
  misc_feature (178)..(178): n is a, c, g, or t
  misc_feature (183)..(183): n is a, c, g, or t
  misc_feature (256)..(256): n is a, c, g, or t
  misc_feature (279)..(279): n is a, c, g, or t
  misc_feature (337)..(337): n is a, c, g, or t
  misc_feature (351)..(351): n is a, c, g, or t
  misc_feature (375)..(375): n is a, c, g, or t
  misc_feature (412)..(412): n is a, c, g, or t
aggacacccttcaccttagaagttgtggctcagtgcanataaagttgagacagagtttnnacatccagccccacctctctggaacgggnagatgactggggagganacacagnccagcatgggaacaggggtcacagtggacacnngggtgggctgtctctccacctcctcacattangctancagggacgcagacacattcaggtgcctttgcagaaagagatgccagaggctcttgaagtcacaaaggggaggngtgaagaaatcctgcatctcagnccctcacaagacagctgtctcaggcttttcaagctgtgagagacacatcagagccctnggcactgtcgctgnacgcagcctgagagtagctccctncttttccacctgagctcttcctcctacacatcacagnagcgaccacagctccgatgaccacaacttctaaggttaagcttaaccttagaagttgtggacagcctggtaggcaaacaag

SEQ ID NO: 606969 - DNA, 115 bp, Homo sapiens
tctgtagtccaggtactcatagaagctgaactgagcccagaaatcaaggctgcagtgggccgagattgagccactgcacttcagcctgggcacaacagaagtgagaacttgtctc

SEQ ID NO: 606970 - DNA, 138 bp, Homo sapiens
tacgtctgtcagcatgtatcaaacacaatcacagcagtctaatctacgcgaaccatcttgcttatcagaggtgcatatctaaattcaatagcttaccaatatcttcttgggacgtaggcaaaaggaaacagaaaaccc

SEQ ID NO: 606971 - DNA, 175 bp, Homo sapiens
gttcggtcacctcacgacgcggacgtcgcctctagttcccgggtcaggcgctcgctttcctgcttgagccgttcattctcttcagctagcggtgccactttcctttcattctccgtgtctttctccttctggcgtggctttgcagggtcgggctggcggcacatgaccactctgt

SEQ ID NO: 606972 - DNA, 846 bp, Homo sapiens
atggagaaatcacttgaaagtctctttaggaaatggaaatttggttctaatatttctctacctggaagacatttcctatttctggcatgctgcattttaagaatatgcataatgaaaattacagccataggacttgctgaatacaattttatcttacacagagcccttacactcttttacagtctacagtttggtatcgttttcttctacttacacttttctttccaaatatttctcttttaatgcccttacgttcataaaatacaacaaataaaaatcgttccagaataaaaacaacctaaacttctttatttttccaaaatttccacctaaaggcagtgcctactccaggattacaaaagaaagtatgagttcttccgaagaaagtgaagaagcaggttagtcatgttataataaatacttaagagtccatcaatatatagatggaaagtactgggcaatgttttttacagtaataattgtctatattgtaaaatttgagtgaacagtttttcctagagaaaggatgctcatttttgagtagctgtgatatatcactacagaccataattagtttatgtcttcatctcacagatatttataatattcaacaatgccttcaagtgtgcttccagagtctaactggtgtatcccggtgggttatggggtgacttggcaattggcagagtgggcccggaatttctttggctagtttgatggtatagagcagccggactcacggcctgggtcaggagcatcatctacgccaagagcggtataaacacacagcagggctggagtgcctgataagatccactcagcaaactggaacacgcggccggacag

SEQ ID NO: 606973 - DNA, 914 bp, Homo sapiens
  misc_feature (1)..(1): n is a, c, g, or t
  misc_feature (10)..(10): n is a, c, g, or t
  misc_feature (599)..(599): n is a, c, g, or t
  misc_feature (736)..(736): n is a, c, g, or t
  misc_feature (741)..(743): n is a, c, g, or t
  misc_feature (749)..(749): n is a, c, g, or t
  misc_feature (752)..(753): n is a, c, g, or t
  misc_feature (755)..(755): n is a, c, g, or t
  misc_feature (764)..(764): n is a, c, g, or t
  misc_feature (774)..(774): n is a, c, g, or t
  misc_feature (777)..(779): n is a, c, g, or t
  misc_feature (790)..(791): n is a, c, g, or t
  misc_feature (799)..(799): n is a, c, g, or t
  misc_feature (805)..(805): n is a, c, g, or t
nctggccgancaggctttattcattattgaaccattggtaagcatttaaaaatatttgtacacacacacacacacacacacacacaaacaggacttgacaatatcactgcccctgctcagtagtagctttgtcaacaaacaagtagagtcactgaagtgaaatattcactgtcaattagcagctgggtcaatgttactaattgtcaaactattttttttgctataaaacacatttacacacaatcttgtgtagaaacccactatataaaacagacaagggccaggtgcagtgtctcttgcccataatcccagcactttgggaggctgaggcaggaggattgcttgaaactagatgtttgagactagcctgggcaacatagggagaccccacgtctaaaatcatacaaaaattagctgagtgtggtggcacatgcctgtagtcccagctactcaggaggctgaggcaggacgattacttgatcccaggaggtcgaggctgcagtgagctgtgatggagccattgcactccagtctagatgacagagtgagaccgtagcttaaattcactttgcttgtttttcaattggtgtatttataangcacttgtcttccaaagtagatttgtatttcagatgataatggcaatagtgctttctttgaaaacctatctgggtgatcttggcgaaatcaactgggtgaaacatagaacacacatttgttctttgaatggggcttnatctnnnggctanccnngnggtggcatnaaaaataacngtnnngctcccacagnngggacccntcccantgtttaaagctgaattgtctggttttgccgaatccttgcacaacctggccatcaaatttttgcaaaggaatgtgtcctttttgtcagacctattctaccgggcctggag

SEQ ID NO: 606974 - DNA, 184 bp, Homo sapiens
aagagaaagtcagaaaatgttcttagattgtactctaatttcactaactgacaaggggtagaacagaataatctcagattgcttcattcctattaaagatgaagcccaaagaacgcatggcgactaactttagcaggaacaatatagcagacagaggcagggactgtgcatgatccccatctgg

SEQ ID NO: 606975 - DNA, 148 bp, Homo sapiens
  misc_feature (12)..(12): n is a, c, g, or t
  misc_feature (29)..(29): n is a, c, g, or t
  misc_feature (105)..(105): n is a, c, g, or t
  misc_feature (116)..(116): n is a, c, g, or t
ccgtgagggggnaaccatgcggttgatgntgggggcttcaagaacgcgcaggccaggacgtcaagcccggacaaggccgggtcggccgggttcaagtcaagggtntttccaggggnagggaacgggatcaacaaaagggccacttgaa

SEQ ID NO: 606976 - DNA, 173 bp, Homo sapiens
cgaagtcacttggccaccatctcctcaagtggatcatcaactccacctatccaaggcctccccagtccgtagtgtgcacgcagtcatccattgccaaccacggctctcctgcacacacgtgtagccactggttgtcgacaccatgccgcttcctcaggccttaaccccagctc

SEQ ID NO: 606977 - DNA, 198 bp, Homo sapiens
gagtactctccaggttgtgggcttgtcgtgtgtgtacgacatccgggggatatccttcatagattagatgctgtcatacgttgaggacatttgacaatgtacgattttttgctaaggtctctgtgctctggaacactctctcgcgcatggattttggttttcatgctctgtcctcccctcctttggtcctcacaagac

SEQ ID NO: 606978 - DNA, 937 bp, Homo sapiens
gcagagtgccaggagccggagcagccgaagcctgctgccctctggcgcgcatgcggagagtggcgtcatgaaacccgtgtgaatccagatcaagaccgactccagcgctccgtcaactcgagagattctgcattcatccatcaaggattcccgtttgagagtgaggacagacagggacatcgtgtatgaccatgggatggagaccgggcactcagacccatgaacgaagccaagttggagagaagaacatcctgtaacaccatgtttgaaaactcctacagcaaagcaggttatcaaccgacaggtgaggagacctgaagaaacttcttactgggatgggacacttggagagcaacaagaagcccataatgatgacgactgccgacgtacatgaaacacaacacagtcatcttaccaggatgcatcacaaagatagaagaggatacttatgcagatgacatgaagaaatgcatccgaaatttaagagcaaagatgacacatgaaagaatgactgacactcaatggttgcatagacaaatgggacaagaaggataataaaatgatagaggatgggaggaaccccaagcacacatagagacctaaggtagagacgactcaaaacgacatagaagacacttgaaaagagcacattgccaacgggtattcataatccaaagacaaccatgccaggatccaaaggaaacacaaatagacacagccggggccagaagacccaggacatcgacgcccaatgagataacaggaaacaggggccaacattgaaaagcaacaacaacgagaccctagataaacccccagcattggcgttacacaaacggacacattgagaacaccagcacaataacctggggaaaacgaggaccacatggagccctaaaagcaccaagaggcattagagcaacaacgacaacacaag

SEQ ID NO: 606979 - DNA, 380 bp, Homo sapiens
  misc_feature (337)..(337): n is a, c, g, or t
  misc_feature (355)..(355): n is a, c, g, or t
  misc_feature (379)..(379): n is a, c, g, or t
taatccacacattcaatgagttaggctttgcacttgtaaggaaggagaagcgttcacaacctcaaatagctaataaaccggtcttgaatatttgaagatttaaaatctgactctaggacgggcacggtggctcacgactataatcccaacactttgggaggccgaggcgggcgggtcacaaggtcagggagttcaaggaccagcctgaccaatatgggtgaaaccccatctctactaaaaatacaaaaattagccaggggtggttggcagggtgcctgtaggtcccagctacctgtgagggtggagattgcatttgaggccaagatcttcaacactngcactccagcctgggggnaacagcgtgaggacttccaccttna

SEQ ID NO: 606980 - DNA, 472 bp, Homo sapiens
ctatctagaggatcccagtgctacctccacaaacagcatgatactggtaccaaaacagagatatagaccaatggaacagaacacaggcctcagaaataacactacacatctccaaccattgatcttgacaaacctgacaaaaacaagaaatggcgaaaggattccctatttaatacatggcgctgggaaaactggctagccatatgcagaaaactgaaactggactccttccttacaccttatacaaaaattaattcaagatggattgaagacttaaatgttagacataaaaccataaaaaccctagaagaaaacctaggcaataacctttaggtcaggcatgggatataattaaactaaagagcttctgcacagcaaaagaaactaccatcagagtgaaaaggcaacctacagaatgggagaggatgtggagaaataagaacgcttttacactgtttgtggaggtagcact

SEQ ID NO: 606981 - DNA, 455 bp, Homo sapiens
atttatgaggtggacaagcaagattgtcgccaattttgccctactggcatcgatggagccatgacaatttgggatttcaaaacccccgagttttccatccagggcctccggataatgtgaaactgagtgagcctcccccatccagcatgacaaactgtggccgaccccaactgttccgtggcacgatggcgaggaagccagccccaaggaaaccctgaaaacccatatcccgccaatgccgtgtggttttgtttgaatataaaattggtgaaagggttggtttttttaaggcaggaaattttttgtttgtttttttgcgatttcattccatttttggcccaagcttctctttaagtagtttattatggaaaattgtccccctaacttaaaagacagggtgagggagatatgtaaattgtcccctagaaaattaaataaaaaaactgaatgtggga

SEQ ID NO: 606982 - DNA, 109 bp, Homo sapiens
acctacaaaatcccaacacatataactgaactcctcacacccaagaggacccatctatcaccctcatagaagaactcatgttcgctatacgtaacatagaacaccttct

SEQ ID NO: 606983 - DNA, 992 bp, Homo sapiens
gagcaggtccaggaccttttcaataagaaatacggggaagccttgggcatcaagtagcccggtccaggtcccctacatagcggatcaagagtaaccccggtctccggtgtatcatcgaggggctgctcccgcaggaatcccgttccgaaatgccctgtaccttgcggctcccagaacctggaggaggattcttgctgtggctgacaagatctaagttccacagtcgaccaggcctttcctaaggactcatcccaaagcctgatgaacgatgacgccaacagactcggcggagaaggtagatcctgctggggagcgaggtgaagtgaactcttccaacgagaaatacggtgaggccctgtggccatgaaccggccggtgctggtcccttataaactaaatccgggacagcccagacgccgtggaaggtcacgggatctgcctgatgaacatccctcgttcctggaaatgcctcaacactgtacgatcactcccaccgtggtggtacgaagaatccctgaaaggccctgagagtccgtgtccgcatggtcaatcacttaagcgcagtctccaaacaccctttggcctgaacatctgcaatgagtggcaaatgggtggcctagccaaaagacgggagctgattcccaaagcgcagagaaagcgggtctcggaaggaaattccgtctgctcttccctccttagttggtcctcttcctcgttcctctcagcccggcttcatgtggatctggccaacccagagtctcactccgtggttgacgttgccccgattgggattcccggcgctcatctctgtgggacgtcaaccctttgtttggaaggccgttctctggatttgggcccggggacggggagggctgggttggggggaccaccggcccggggtaaaggaccccgtgcccgaggtgccaccctcggggggccccggccgggataaccaccgggggcagggaggcagtccctcgccgcgggtgaag

SEQ ID NO: 606984 - DNA, 432 bp, Homo sapiens
ggtcctcttcccaaagggaaagccccaatcccccaattagtgtaaaaaaatgcttcgggatgctgacccaaagggctattcagaatctttggccggggaggaagtctccttaaaaaaatagtttaaaccatttgttaaaaaatttcccgtcttatttcatttctggaccagttgatatctggctgccccttttataaagcaaagtgagacctttccccaccgtgtttgataaatgttgtcccggttctattcccaaaaatgtgttgtcccaaaagcctgtttagtttttaaaaatggaacccccccccttgcttggttttaagtaggtatggaatgttattataggccatagtagtaccggtggtcccacatggaaatggtggggagccaaaaaaaaacatgtgaaataaaacccagtttttttttaaagta

SEQ ID NO: 606985 - DNA, 242 bp, Homo sapiens
aagctgctgcacatggctgcggcatcatggcaaagtgtcggatggtgctctcctccaggtactatctgctcccacttatgtcatagtaaggcctccagggccaggatcagctcactccttctcccgacacaagttccaggacgggctgggcgcattgtattccgcgcatgtagcgctggccctggccactttccactgtttctcgctggcgttctcagatgcatccacgctctactctccag

SEQ ID NO: 606986 - DNA, 113 bp, Homo sapiens
gcaatgtagcgatgtggtccaaagtcatccagcatctgcttcaccaactgcccgatctcctcctacagatgcatacaaggcacacggggtccatggttgccctgaaattgtca

SEQ ID NO: 606987 - DNA, 194 bp, Homo sapiens
tgctagtcccaatccatctcggttgcttccagaactaagacgtaatgaccatagtcacaaccgcctcctaagtcctatctgtgtgagggtatctcttattgctgccattccacctgagatgcagtcttgcttctgatttactgtttttgttggaaaggcagcaggatatttcaagggcttccatgcagtctttc

SEQ ID NO: 606988 - DNA, 504 bp, Homo sapiens
  misc_feature (381)..(381): n is a, c, g, or t
atagctgactctagaggataaaacgacgcctggcaattcctgaggcgactcctgggggcctctgggttcctaaagcgggggcgaaggactgggtgcagtgtcgctgccctgttagctggctgaagcgcactgggtgcagaagtagtggtggtggccggcagagggtttccggagagctccaggtgactcctgtactgcagccagttgcggccgaaccgttcccggaagctgctcatgagctccagctccgggtgctgctgcacgaaccatccagccggagaggggttcagagttcggggctccgggtccgtatcactgggttcagagatgcttgcccgcctcacacggactcggctcttaaccttatgaagcaggggctgngtcacaacaccccctgaggagaggctgtcactcaggtcagggccacctgaggtttcaggagtactccccactggccagtgcaaaggtgggcccatggggctgagccccaaggatgtgtgagtt

SEQ ID NO: 606989 - DNA, 214 bp, Homo sapiens
ccggggtgttcacgggacggtactggtttatgacttagatgtgccaaaattccccactctccagaaggaaagcaggtgttgagtgtaatcccacattgcttattatatagaaatggcaacgaaccctctcttccggtcgggtgtggaaaactgggcaggagctgtttaccggcaagttcccagattcccgcctgggcacggcaagactcaccta

SEQ ID NO: 606990 - DNA, 195 bp, Homo sapiens
gccacggaagattagcgtggtggcataggctctcttgatacaggaaaaagatatgcatgtgcgtaagtccctaggtgcaagcttgtgcagttatgtttaaagcacccttataaactatgtgcatagaagatattatgtacatttatttcagataaaggacaataagtttacttggtatctgaactcaaaacaaag

SEQ ID NO: 606991 - DNA, 382 bp, Homo sapiens
gcacagggacatgagggaccggcccctcagttgccatcagcagcctcggtggcacctgtgtcatcggggacccgtgcatgagcagggcacggtcactgccctctgggatgggaagcgttgagggataccacagagagtctgcgtggtgtcaccctacaagctctccacgccgcgtgtcccttgtccctggtgagggggcactggagccagggtctctgccaccggcacagcgcttgcagatctgctgtaggttccggtgtagctcttcctgctgtgggctgatgacaacagttgtgggacttgcttcacatggcactggtctgagacacttggtggctgactgggtgttgaggagtgaggggcagggaggggccgaggatga

SEQ ID NO: 606992 - DNA, 399 bp, Homo sapiens
cgttctacacggatccccctggcttgctcaggtctgaatgcaatggaactatctcggtcactgcaacctccgcctcccggtttcatgccattcttctatctcagcctcccgtttagcttgtattacaggtcgcgcaccaacacatctggctaatttttgtatttttagtagagatggggtttcgccactcctgccctcaggtgatccacctgcctcggactcccaaagtgctaggattacaggcatgagccactatgcctgacccaatttttttttattttttatttttttttttttttttgttggttttttttccctttttttttttggggttttagcgggggggtttttttccccccttatagggctctcttaaaaaaaggggcgggatttttggcc

SEQ ID NO: 606993 - DNA, 433 bp, Homo sapiens
atgccccaaatgggcttcattgccagggccacccaccctaattatagagtttgagtttccctttggacatatttgacatataaagcccgccctggttattcgggaagcccgtttttattcatttggcttaaaaaattcgttttggctgggggttaagacaaggccaaccggtaatcctgttggtattctcccggttcctggaatggcatggtgcatgtgatcaaaggcatccagtcgggatcccaaaattaaatattcttgtactaaaggataccgactcattggttcctcgtcgccacatgcatcatctcaggtgatactgtcatttgggataatgaaacacctatttgtgacagtgagttgaaatatcccttcctatttcttttaccgacacattctaatttttctctggaataataaaaataaataactg

SEQ ID NO: 606994 - DNA, 348 bp, Homo sapiens
  misc_feature (200)..(200): n is a, c, g, or t
  misc_feature (204)..(204): n is a, c, g, or t
  misc_feature (208)..(208): n is a, c, g, or t
  misc_feature (213)..(213): n is a, c, g, or t
  misc_feature (216)..(216): n is a, c, g, or t
  misc_feature (219)..(219): n is a, c, g, or t
  misc_feature (254)..(254): n is a, c, g, or t
  misc_feature (286)..(286): n is a, c, g, or t
  misc_feature (298)..(298): n is a, c, g, or t
ggcacgtggtgaaattccgtctctgctaaaatacaaaaaatagccggggggtagtgggtgcatgcctgtaatcccagctactcaagaggctgaggcagagaatggcttgaacccgggaaagtggaggtggcagtgagccgagatcgtgctactgcactccagccggggcaacagagcgagattccatcttcaaaaaaaangaangaangaaantancanggttaccatggagatcctgcagtcacggggacatnctcaaacatcacaaggatgggggtcaaaaatngaaaccgggaanaagaaaactggactatgatggtggaataacgcaaccaagtgggagtccgg

SEQ ID NO: 606995 - DNA, 122 bp, Homo sapiens
ctagtttagaagtttcaatagcatctgaaagaaaagctgggcatttcacatccatgaagtaggaattagggctctgcaccaggcgtttcttcttgtgtttcctcttctcctcttctggagag

SEQ ID NO: 606996 - DNA, 299 bp, Homo sapiens
tcagtccatggtatagctggacactgcagcccctcgtaccctgtaacacgagaccacgttggttccagcaaaggccaaggcaggggccgagctcacatccttctcccaaattcaccaggcacacaagtctgtcctcacccctgtgtcgcagatagggaacacctccagcagtcactccatgtggatacctaaatgcgaaatacctacttcccccaacaagagttatcacttttacattaccgacccccacaacaaccctgggaggcaaaaaaacaggtctcacaaaaacaaaaaaaaaa

SEQ ID NO: 606997 - DNA, 132 bp, Homo sapiens
tctcatataagagcgcaggccacagaagaactcatattcagggggattgcatattggggactctggcatagtccagtgtacttctgcttcacaaactcatcagtgatgagcttcttcacgtcccccaagagt

SEQ ID NO: 606998 - DNA, 798 bp, Homo sapiens
gagcgggctgcggttggcagcggcgcgatggagaagctgggggtggatgccggaggacggaagtgcggcggcgacggacgatggacgactgcctgaggcctgggccatgtgaagctggactggacagtgtgcgggcaggacagccacgcgtcgcatgggtagttcatgagtcaaggtgttgcccagaccaaaatgcttcatccagagtcatagtacatgtggactctggattgctttgctgcacaagtagaaactgactctcaatatccaagaggctacaaagactaacctttaggggttcaatcagaactattgggtggtaacctgcaactatgaaggctcgggacacttggatgttagcgaagcttactgaatgtcagagatgctagcgatgaacacgtgtccacaggttggtattaggttaactggagaagacctgacgccgctacatgaggaatactgtcttactagagggttccacgaacttgactggagagacattgtagtccagtctgttgacgaagcactttgcgcacttccgcttcgcacacaatcctttgttgggatcttacacacgcagacctgtgcttgcagcaaggcagaactacatgcccagtctagcatatacgctgcattgcagacttatgctagtccgagtcggaacttgtggttctgcggtacaatgttattagcaagtaaatgcaacgtactattgaacccttgccttggactgtgcgttgccaccactcatggacttaccttgttgtgggatcttccagccattgcgcccagacgaag

SEQ ID NO: 606999 - DNA, 296 bp, Homo sapiens
  misc_feature (41)..(41): n is a, c, g, or t
  misc_feature (89)..(89): n is a, c, g, or t
  misc_feature (190)..(190): n is a, c, g, or t
  misc_feature (217)..(217): n is a, c, g, or t
  misc_feature (220)..(220): n is a, c, g, or t
  misc_feature (236)..(236): n is a, c, g, or t
  misc_feature (289)..(289): n is a, c, g, or t
cagccctgagcaaaggggttctgaggtccataccaagaagncggtgatgatcaagaccatcgagacacgggatggggaggtcgtcagtnaggccacacagcagcagcatgaagtgctctaaagacagagaccctctgccaccagagaccgtcctcacccctgtcctcactgcttcctgaagccagccttntttccattccagggcaacacaaccagnctnagttcttccccttaanaggcttttgaccccttcttaattggccattccttggtgggtcccaaaaagggncattggg

SEQ ID NO: 607000 - DNA, 115 bp, Homo sapiens
tgatccaccgccttggcctctcaaagtgctgggattacaggtgtgagccactgtgcccggtctcggcatgctctttgattcctggaagcaaacgtgggactgctggtggaaggga

SEQ ID NO: 607001 - DNA, 112 bp, Homo sapiens
atcatcagatcgtgggactatctcctatggctacatggaaaagaaagctgtcctgaatccccacgagggcctggtcagcctcttcccaccacaggcacaccagggtcagaag

SEQ ID NO: 607002 - DNA, 564 bp, Homo sapiens
gtgtaaagagcatccacactgtttattttccttcacaatgttcttctatcagaaaacatttaaaagttagcgaatataacctgagctactatagcttcataaataacacagatgtgtgctaccaatggagtaaaaaaggtatatgaagatacataataaaaaacccagataaactaacttaccactactatgtctacaaaagtactcacattcatccaaaagacggcagcaaaagggaactagattaaggaaaatatcataaggcataaacaaaaacgaaataaacatgataaaactaaatctcgcacacatatattaccttatatataaatggtctaaacactccacttatacagatagtgccccaatagatttttaaaaaatatccacaatagaagtatatgctctctattatgctatatcagaaactcactttaaatatgattagattagaagcatgataaatgatatgctaccctcaaaataaccaaaagaaaactggaataacctatcagtattaaataagtacaatagaacgcagggaggggtcactctaaaagagcc

SEQ ID NO: 607003 - DNA, 303 bp, Homo sapiens
  misc_feature (294)..(294): n is a, c, g, or t
cataatcccagcactttggaacgctgggtggattgcttgaacccaggagttcgagaccatcctgggcaatatggcaaaaccccatctttaccaaaaataagctgggtgtggtggaacatgcctgtggtcccagcttcttgggaggctgaggtgggaggattgcttgaacccgggagtagaggctgcaatgggccatgatcacgatcctgcactccagcctggggcaacagagagagacagtccctgggcccactgcccccttccctgggcccagtctcaaaaaaaatgaggctngggcgtggg

SEQ ID NO: 607004 - DNA, 229 bp, Homo sapiens
agctgactctagaggattcacgttttattgaattagctgcatgcaggagcaattctgttcttcccatgagcagcagagtcgagtgttagagtgcagtatccagagcggggagaggctgtacgaagttggtgtcctgccgcctgttccctgtctacttggtgacgtgcagagctctctctggggggctgcagctcatcttgtggggagctggactcagatgcccccgtag

SEQ ID NO: 607005 - DNA, 327 bp, Homo sapiens
ccgaggcccgagtcggtgaggattgggcagcagcagaaatttattggtctaggtctttgcgcaactgagtgcggcgtggtcggctttagtataaacaggtgctgaaatatggcgaatcaaatctgctttttctgactggggagtcaccgtgatcgcaacagctctggtactggtagcggcgttgttgcacgcgacgtggaacaccttgatcaaattcagcggcgagcgcctgttggtcatcgcgtgcatggacacggtggcgttgttgtttgtggtgctggcggtggggtttgtatcgtttccaccgctggaaatctgggtcgacgc

SEQ ID NO: 607006 - DNA, 382 bp, Homo sapiens
gtgatttggggccttttaatgtctttaacagcaatcttttatttatttatttatttatttttgagacggagtcttgctgtgtcaccaggctggagcagtggcacgatctcgcctcactgcaacctccgcctcccaggttcaagctattctcctgcctcagcctcccaagtaactgggactgcaggcacatgccaccacatccagctaatttttgtatttttagtagagacggggtttcaccttgttggccaggatgatctcgatctcttgatctcgtgatctgcccgcattggcctcctgaagtgctggggattacaggcatgagccactgcggcccggcccaaatcttttatttttttaacagccttagttatttataatt

SEQ ID NO: 607007 - DNA, 324 bp, Homo sapiens
caggcatactacgtaaatcgaatgtaatgtgaatggaatatcaaaacaggatctaagatggtatagtagtagaatacaaagtaatatcatataaaagttaaatgagtatggaaaaggtctgtactctagttttgtccagtacagtttactgaaggcctatcattaacattcatattcatatcattaaacaaataaaaatcatgtagaattatcgtattttattgccactagagggttcagcatgatagacctcaaaaaatcgacaatactaggttgaaatattgtagcatccatttagttattctttttaatactaataactag

SEQ ID NO: 607008 - DNA, 359 bp, Homo sapiens
gactaggtgcaacgaacatctaatttgactactctgtctccaggtcaccgggaaagatcatacaccgcatgcattccataagggggcaataatgtataggaaggacatgaaggcatgacacagcattccttcaggttatctgttgcatgtatactctatgcattgtattgttccagttgctgtgtatggagggataaaggaaacaaacacctctgctctcatggaccttttacagaaatatgccatatatggcaaagtcccctaatggacatataacaggccattgcaagagagaacatgggggcctctgaagagcataacatttaagctgacatcttaagaatgggcatcccatttgg

SEQ ID NO: 607009 - DNA, 196 bp, Homo sapiens
cgggcttttttggaaaacccaaaggggctagccccctgattcaaagaaatatttctcagggtgggtccttctgggttatattttcctttaaaaccccttggggtaaggttaagccttttaaaagttagttttggagaatgagacccaatactaatccggggggaatggggggggccctgccttaaacctttctttg

SEQ ID NO: 607010 - DNA, 125 bp, Homo sapiens
acaatactggacttcggggcattctggacttcggggcagttctggactatcggggcaattctggactatcggggcaattctggactctagaataggattgccccgatagtccagaattgccccga

SEQ ID NO: 607011 - DNA, 148 bp, Homo sapiens
gtcttggtgccgcggtcggtctggccgacgcgggtgtgcttggtgacgtagttcacgccttcgacgatgacgcggttctgctcgacgaggacctcgaggaccttgccctgcttgccgcggtctccgccgcgctcgggcttggcgcccg

SEQ ID NO: 607012 - DNA, 286 bp, Homo sapiens
tcagccgttacctgtgagacgggtctcatggcgggacacaggaaagacgccacggcgacgggacacgtgacgaaggtgagatggcggtggccaggcgggtcttgggagtccagtggctgcaaagggcatcccggaacgtgatgccgctggtgcacggccagcctcccacatgagcaaggacatgttcccggtgccctatcctaggagcccagaagaacgggccgccggcgcaaagaaggtataatatgccgtgtggaaagactacgaacaccttacccgggatgac

SEQ ID NO: 607013 - DNA, 129 bp, Homo sapiens
tcactggggcggtcccaatgccaagtggaactgttgactgggaccctgtccacgcctgcttttaagtcctgctcgcggtgtaaattgtttcaccctgtcccttaataaagctctctgctcccttgaacc

SEQ ID NO: 607014 - DNA, 144 bp, Homo sapiens
acctgagctgatcatggtcggataccctcctgttgacattggcttgacatgctcaatggtgtcactgggctcgaactcaagggtgctggtttgccagtgcgggtcttcacaaagatctgcatgttgcgtgcgcacgaccgccgc

SEQ ID NO: 607015 - DNA, 1501 bp, Homo sapiens
ggcgtagctctgacctataggcttgatacctgtatcatcagcgccagttcttaacttccgtgtggacagctggatgtcgtcactgcaaggcttctcgaggagcagcttgctggagctggctcgcaggctgctgtgcgaagggcggctcgacccttaggagtctgggctcacgggacgctggagtgcatgcgccgccatagttggacactctactgaagttggactctaagatgcgcttgtgtggaggccccctgtttgagtgcggcgctctgtgacgagcatactcgcagaccttcatatcttggctgccttgaggagtccagtgctatgcttgtccaggtcgtagcaacgcggtgtatactcgcgtcgtcgcgcttggggagttgttccccaaggtcgtcgtagtggcctctttgtcatgcctcagtaggaactggggattcacccttgtgtgcttggtccttggttgagcccccgactggaagcggcgcatgctttgcacggcgttgtagatttgcccttcccgcctggcgagggtgacgagcgactagtgataagcgagcgggccctgtttggccattgagaccgttatgcctcagcgtcgtttcttgttgcctgcgtagggcccgcgagtgtgggcatcgacgttgttgacgccgccctttgggatggttcccgtcacataccacgtttttggtccgcctctggagggcgtggtatcccaattccctgccatagccccacgtttgccgcaaagggagagacccgtgtccgcttccatttttagccccccgttttacccaatgagttaaacgtcataacacgattcaatacttcgagaattagggccgtaagcaaccacaagagcctcacggcactcgcccatagggttatacaagcaaaaacacaaacatgagcacgagggatacatttaggcagtggaatcaagaagtggccttcacacagcagagtaggctatgagcccaaccagttttaccataaaattttgggaaagaatatcggacgttgttgtgccccggtcaccccccgatggatactatatagtgtgacacccacaaattattgacgtgaacatgacccatgtggccggtcctctgggggccttgcacatcttatacattaagcgtcgcggcgcacgcggcattgcataagagctttgccagaggatcacccattggacagtatagattacaaataccaccccgagtataaagcttaaaccaacacgaagttaatcttaatacacgaacctatgagaattagaaaacaggcactagtaggtggctatataccaccaacaataggagacattagtattagtaaccagaaaaaccaaggagacacccatatagagcatagcatatgaacagaccccctaggggcccaagttgaggtaactaggcgcgaacaagaaacagaacagggacacacccattacattggtcccaaggagagcctatgggtatggggccacaccact

SEQ ID NO: 607016 - DNA, 843 bp, Homo sapiens
  misc_feature (26)..(26): n is a, c, g, or t
  misc_feature (109)..(109): n is a, c, g, or t
  misc_feature (147)..(147): n is a, c, g, or t
  misc_feature (159)..(159): n is a, c, g, or t
  misc_feature (334)..(334): n is a, c, g, or t
  misc_feature (369)..(369): n is a, c, g, or t
  misc_feature (377)..(377): n is a, c, g, or t
  misc_feature (387)..(387): n is a, c, g, or t
  misc_feature (406)..(406): n is a, c, g, or t
  misc_feature (416)..(416): n is a, c, g, or t
  misc_feature (423)..(423): n is a, c, g, or t
  misc_feature (435)..(435): n is a, c, g, or t
  misc_feature (439)..(439): n is a, c, g, or t
  misc_feature (447)..(447): n is a, c, g, or t
  misc_feature (449)..(449): n is a, c, g, or t
  misc_feature (452)..(452): n is a, c, g, or t
  misc_feature (475)..(475): n is a, c, g, or t
  misc_feature (479)..(479): n is a, c, g, or t
  misc_feature (481)..(481): n is a, c, g, or t
  misc_feature (499)..(499): n is a, c, g, or t
  misc_feature (508)..(508): n is a, c, g, or t
  misc_feature (533)..(533): n is a, c, g, or t
  misc_feature (535)..(535): n is a, c, g, or t
  misc_feature (548)..(548): n is a, c, g, or t
  misc_feature (556)..(556): n is a, c, g, or t
  misc_feature (573)..(573): n is a, c, g, or t
  misc_feature (629)..(629): n is a, c, g, or t
  misc_feature (642)..(642): n is a, c, g, or t
  misc_feature (722)..(723): n is a, c, g, or t
  misc_feature (735)..(735): n is a, c, g, or t
  misc_feature (745)..(745): n is a, c, g, or t
  misc_feature (813)..(813): n is a, c, g, or t
cctggctatcggggtgaacgcatcantcagctcatccgtcagctgaactagacccaggtgccaaactgcggtaaattttttatcagtgaagtggaagcatgtgtttttnttttggaaatttttatcaagtatcttcagagaagattntttcctgctttntcttcagaaactggaaagggtcaaagaaaagacagtagctggccggtcgtggtggctcatgcctgtaatcccaacacttagggaggctgaggtgggcagatcacctgaggttgggagttcgagaccagcctgaccaacagggagaaattctgccccgactgaaaacacaaaattngccggatgggggggggcatgccggtaatcccagcnacttgggnggctgaggcnagagaatggcccgaacccngggaggcagnggtggcngggagccgagancacnccattgcncnccnccttgggcaacaaaagcaaaacnctgncncaaaaaaaaaaaaaaaanaagtgccancgtatgaggtaattagattggttcncnccagaggtaaccngccaagangagatgctatagatgtnactcctatactgtaaaacattgtgaaatcagattactttaaaatgatgtattacanagttatgcaaaanagcagttgtgactatggaagcccaaggcttatatcccagctctgtctacactaaatatgggtacagtgtttccactctgnncataaaatgggngctaatatcncaacctgtgtgccacatgatggttaagggattaacaaacaatagttgtaattatctgcagacaactgntggtaataaagggctagtgcgaaattattt

SEQ ID NO: 607017 - DNA, 666 bp, Homo sapiens
  misc_feature (151)..(151): n is a, c, g, or t
  misc_feature (177)..(177): n is a, c, g, or t
  misc_feature (229)..(229): n is a, c, g, or t
  misc_feature (242)..(242): n is a, c, g, or t
  misc_feature (252)..(252): n is a, c, g, or t
  misc_feature (266)..(266): n is a, c, g, or t
  misc_feature (324)..(324): n is a, c, g, or t
  misc_feature (363)..(363): n is a, c, g, or t
  misc_feature (365)..(366): n is a, c, g, or t
cagttccgcctggtgacaagattgtgaatgaggcagtcatgtgcctgcaagaggggatcttggccacacctgcagagggagacatcggagccgtcttggggctaggcttcccgccttgatctgggaaggcctttcctgctttgatggatcntgtatggcgcccagaagatagtggancggctcaagaaatatgaagctgcctatggaaaacagttcaccccatgccagnctgctagctgacncatgcgtaancagccctaacaagnaagttctaccagatgagcaggcctcatgcctcgctcagtcagtgcactaaccccagcngccggcagtgctggttctccaacagagtggtgtctagantnntcagagtaacgagaagacaaactgtccggcacatgggctgttgctcgccatgattaagagtgcacttcagaccaagtaccattctctctcctcctggtgaagtgtgacttcgaattagtttgcacttcctattggaaggtagagcccactgctcattgtataagccccgaggcctagagtgggagccaagagccatctgaagccacctctctgcctgttcctcccaagaggccaggtgggcaggggtggtgagggcagttctgctacgccagcaaacacataacaataaaaacaaactct

SEQ ID NO: 607018 - DNA, 817 bp, Homo sapiens
  misc_feature (81)..(81): n is a, c, g, or t
  misc_feature (817)..(817): n is a, c, g, or t
ggcccggaccccgccttcggcgctcggtcgcaggatggatcccgtacccgggacagactcgggccgtggtgcctggccctnggtccgtcggcctcgtgcacccccgccggcgggggggtccacgcgcgatctccgtgcaccgtgtccgagggggggcaccccggccaggttttgtgggcaaaagaaggtttccgcggcaagaaaattcgtgggcttatttcccgtggtggcctttaggttcttcgtggggccacgctttaaagaaggaaccccgggaaggagaaaaaccggtggtgtggccccggaattaatcccaagggattccggttgggtggaacaaatggaagccccctcgtttggccctggggtgggggcttttcttcccccacgcggtttgttggtgggacacccaagtggtaatttcccaaaaggggcccttcttgggtgtggttcccaaagggaaacgaaaacacagggaccattggttggttgcttagacacggctttggttgtggccccccgttgggtgaagggcccacaagtggtgacccaccggggcgttggttgtgctaaaggcatttgtccgggggctttagataggttggtgcaagagggacccaagagaacccagggtggcccgtttgggagttaccccctttcccgacaccttacaggcgcgcgaccaatgtggggcaccgggcattttgttcggccaaattcgttgggtggtgcaaaagagaagggggccaaagtgggccccccggaaggccaataggtgggcccaaaaagggccccccggaggggtacatcaaaggcn

SEQ ID NO: 607019 - DNA, 134 bp, Homo sapiens
gtgaggagcacagagacactgtgctgggccagctggacacagtgagctgcaggacctcgtctcctctatcgtctcttgtacaggatggtggtagggatgatcttgctgctggaactgccagagacactgccacc

SEQ ID NO: 607020 - DNA, 394 bp, Homo sapiens
cccaaataaagtataggcgataaaattgaaacctggcgctataatatatgtaccgcaaggggaaagatgaaaaattattaccaagcataatatagcaaggactaacccctataccttctgcataatgaatttactagaaataactttgccaggagagcccaagcttagacccccgaaaccagaacgagctacctaagaaacagctttggggaacacacccggcctatgttttcataattgtgggaagatttattgggtagagggcgacaaacctaccgagccctgggtgaatatctgggttggtcccagaattgaatccttagttcccacctttaaattttgcccaccagaaaaccctcctaaaaatcccccttggtttaattttaaccggttt

SEQ ID NO: 607021 - DNA, 132 bp, Homo sapiens
tagagaccctgcggtctctacctgatgacgacgaagctcctcagcttttgacggcttccacctgggggcgcctcagcctccttggtgtcacgctggcctccctccaagagcgcatgaagggtcaggaagaga

SEQ ID NO: 607022 - DNA, 403 bp, Homo sapiens
  misc_feature (92)..(92): n is a, c, g, or t
gatccgatttcccaagacaactaggaatggaaaaggaacccttcaatgaagttccataataaacgtgtctgggggggagaccaccgcttcanaaaaacctgatgaagggattgtgccaacagtctcctgccactgcgaccacctaaactaagaactccatctaaatgatccacagctggaccaacacagtgaggagacctccaccttcttcaatgtctccctgaggggccagtaatttcagggcaagctgagaggtctccacaggtctaaccccatataaatagccaacagtgtctagagtacattttatacccaacagggtataccccatggtgatcaaaataaaataaacctgttgtacaatgaaaaataactcaaaggcgtggcctcggtggcctcaaca

SEQ ID NO: 607023 - DNA, 123 bp, Homo sapiens
ttcggtccctcagtagcggagcggtcagtaagctcagtaagcggagcatagtaagcggagctcacgcctgctgggggtatgttgtgttgtgagctgtgttcatgtatgtgctccgcttactga

SEQ ID NO: 607024 - DNA, 411 bp, Homo sapiens
aaaaaagggggggggccccccccaaaagccccccccgggttaacaaaaaaaaccccgggccaaaaatgggggggaaaaggaaagaaaaaaaaattttccacaaaaaaaacactttgcccccttttttcccccaaggttaaaaaaccccccaaaaaaaaaaaaagggggcccccccgaaggccgggcggaaaaaaccgggggaaaaaaaaaaaaaaaaagggggaaaaaaaaaaaaaaattttttttttttttttttttttttttaaaaattttttttttttttttttttttttttttttattttttttttttttttttttttttttttttttttttttttttttttttttttttttttttttttttttttttttttttttttttttttttttttcctcccttctgtcgtct

SEQ ID NO: 607025 - DNA, 229 bp, Homo sapiens
cctgggttatgcattcattttttttgttcttgatcaccacataaatgaaccatatcataggcactattttgtgataagcttccatttcttttagagtaagtcctggcattcgtccatatagatgcaagagtcagtagttcattctttatagttcattgtgtaaaacacattttatttttccattctcctgttgatagacatttggtttcttttgatgattgactattat

SEQ ID NO: 607026 - DNA, 137 bp, Homo sapiens
  misc_feature (86)..(86): n is a, c, g, or t
tgtctagccaagatgaagcaggagctggtgaaactgaagaaggagagatatgggggaggattgcgcttttgtgtacatggagtgtncagcaaatgaccaaatgatggagtgagagaggtttctgaatggtacgagag

SEQ ID NO: 607027 - DNA, 531 bp, Homo sapiens
gctgatatcagtaatttggggagagtagggtgggtgccccagatccgatgaagccttcatacagactcctcttccaggagatatcttttcaaagcacatgtggtttcccactccccctttcaagcccatgaggaaaattaaagcatctaattgtagtgatgaattttactgatacagacaactgcttttccagattttctccaaatgtaagcacaattgctacatcaaccaaaatacctcctactgaacacaaactggcgttgtgtggcgcttgctgattcctggtaatatattaccgaatcataagctctgtgttggacagcactctctatctttcaatattgaaccaagccaggggagcaaattaaataggagaactgaaagttagctaatatctgcaaacttacttcctcttaaatgaacttgtccatcaaaccttcagatttcccctactttctcccttaaagaaacagatccaaaatatttcgtgattgcacaagctagctaatgtcacacagctgaagcactgga

SEQ ID NO: 607028 - DNA, 1049 bp, Homo sapiens
  misc_feature (282)..(282): n is a, c, g, or t
  misc_feature (642)..(642): n is a, c, g, or t
ttttgtccgtgagatgcggtagtataaaatagttcagaagcaagcaagcgggagagagagaaaaacagaaaaacagacagcaacgacactgaccgtgtgggcaccgatcatttggcgggcgcccctatctaagagtgtgattcgaaaggcaaccggattcgaggtatcctcgtttggttggttcgcctccgactgtgttggattggagccgcccggctctctgtggtagcgccgcccttgtcgctggtgctggagtgctcataccgccgcccgtggcccttnatacgacagattttatgggtgctcacccgctggatactagactgtcccatcgggtcgggctctactctcttctaagtttggtgccccgagtggttttcaatcacgggttgccgccgattatcaattattgtagcgctgaaatgatttcccccgtggcctgttgtgcggcaggccacaaagagaaagacgagttgtttctggcgcagctggtagcacacccactacattgggggggcccgtgctccctcttattctcggccaccatgagcgcaccggtgcgtggcttacactacacggtaaacagccccggcgtaccagcgagtccctcatctggtgaatggatggtcgtaccctacactntgtcgatatcttcttgttacccacactgcccgctcgttgtgtggtacccatcctcacaagaaatgcaccgccacagagtgagtggagctatgttcttatgcaccacgccgggacaccttcttttaggcgggccgcaatagcttgataatgttgacgctctcgccccgcggctcctcttttcaagtggcgtctcctaacccacgggaccttgatagggagtcccgccgccagtcatctttgccaccgggtgattgccactcttgcgtgcttacaggggggggggcgagctatgcaaacaccatccgcctcagaacacagtaataagaagagatttgttagaataaacaagcgcccttcaattcctctagtacaagtctcagagacgtactgattaaccgccttgcgca

SEQ ID NO: 607029 - DNA, 278 bp, Homo sapiens
  misc_feature (72)..(72): n is a, c, g, or t
  misc_feature (108)..(110): n is a, c, g, or t
  misc_feature (142)..(142): n is a, c, g, or t
  misc_feature (271)..(271): n is a, c, g, or t
caaggctttttccaaaaaacattcaaattacacatgcagtctcagagactatttagacaaagttcaagttanggagcttttacggatgtgggagaaaagctttaaaannncggggagggctggctgctggaagaaggaagangccagactggttagacagtactcttcactcctagcccagcctagcgtgccctgcccctctggccactgctgcagacacctgccttaacacacacatctggcttctcccttaagaagagagagatacttntagaatt

SEQ ID NO: 607030 - DNA, 267 bp, Homo sapiens
taatagacataccaagagaggaagatccatctactgtatactcactgttcgctgaacaggtcccgttgcagatacaaacttggattttttccagtctgatccttttgtcggccgtgatcctttcacggtactgatccttttggaagaatcgatccatttggtggtgatcctttcgaaggttcggatccatttgcatcagactgtttcttcaggcaatctactgatccttttgccacttcaagcactgaccctttcagtgcagccaga

SEQ ID NO: 607031 - DNA, 816 bp, Homo sapiens
  misc_feature (70)..(70): n is a, c, g, or t
  misc_feature (333)..(333): n is a, c, g, or t
gagccgtccaggtctcagtgctgtcccccccccagagcctagaggatgtttcatgggatcccagccacgncgggcataggagcccctgggaacaagccggagctgtatgaggaagtgaagttgtacaagaacgcccgggagagggagaagtaagtgcaggcgcccaggctgtcccatcacacctcatgcgcatctggctgccctggggcagcccctccagacccaccccaaactgaggggtgggaggacgcagggtcagtctggggaactgttcctgaggcactccaggatggacgcgagaggtacgacaacatggcagagctgtttgcggtngtgaagacaatgcaagccctggagaaggcctacactcaaggactgtgtctccccctagcgagtactagcatgcagcactgctcccggcgtcctggttccaatacaaagctgccttcaggcaggtccaggtctcagaaatcagctctattgactgaattctgccgtaagttccgcctggactgcccgctggccatggagcggatcaatggaggaccggcccatcacgcatcaaggacgacaagggcatatcctcaacctgctgcatcgctagacgtggtctcgctcttgatcacggtcatggacatagctgcgcctggatgatccgcggccatggatgagatccagcccgatctgcgagagctgatggagatcatgcacctgcatgagccacctcgcaccgactttgagggccgcaggacggtcagacagtggctgcagaccctgagcggcatgtcggcgtgagatgagctgggagcgatcaga

SEQ ID NO: 607032 - DNA, 125 bp, Homo sapiens
tgtcgaccaggttggagtggctgaggagcgagcttgggttaatgcaatctcctcctcccttgtcacaatgatactcctgcctctggactcccgagtagctgggactacagcgcgcctgctaccac

SEQ ID NO: 607033 - DNA, 663 bp, Homo sapiens
  misc_feature (70)..(70): n is a, c, g, or t
  misc_feature (180)..(180): n is a, c, g, or t
gagccgtccaggtctcagtgctgtcccccccccagagcctagaggatgtttcatgggatcccagccacgncgggcataggagcccctgggaacaagccggagctgtatgaggaagtgaagttgtacaagaacgcccgggagagggagaagtacgacaacatggcagagctgtttgcggtngtgaagacaatgcaagccctggagaaggcctacactcaaggactgtgtctccccctagcgagtactagcatgcagcactgctcccggcgtcctggttccaatacaaagctgccttcaggcaggtccaggtctcagaaatcagctctattgactgaattctgccgtaagttccgcctggactgcccgctggccatggagcggatcaatggaggaccggcccatcacgcatcaaggacgacaagggcatatcctcaacctgctgcatcgctagacgtggtctcgctcttgatcacggtcatggacatagctgcgcctggatgatccgcggccatggatgagatccagcccgatctgcgagagctgatggagatcatgcacctgcatgagccacctcgcaccgactttgagggccgcaggacggtcagacagtggctgcagaccctgagcggcatgtcggcgtgagatgagctgggagcgatcaga

SEQ ID NO: 607034 - DNA, 559 bp, Homo sapiens
  misc_feature (103)..(103): n is a, c, g, or t
  misc_feature (265)..(265): n is a, c, g, or t
  misc_feature (269)..(269): n is a, c, g, or t
  misc_feature (304)..(304): n is a, c, g, or t
  misc_feature (437)..(437): n is a, c, g, or t
  misc_feature (450)..(450): n is a, c, g, or t
  misc_feature (462)..(462): n is a, c, g, or t
  misc_feature (484)..(484): n is a, c, g, or t
  misc_feature (507)..(507): n is a, c, g, or t
gggctgcaggttttttttctgtttgaaaaaaggggtcagggggctccttgatattagggaacagggacctgagcttttacagcccttcatatttattaggtanagtgaatagggaggaagggataactgtcggtcagctatttgatttaacacaggcccacatgattcctttctttgttcaacaggttctggatgttcctgtggataacctcaaggagcacgggacctgggacatgactgcccccagcattccttctggcggcanacanagtttgtcagttcgccaacatcctgctttcatganaacagtttgctgtttgctcacagagcctccagtggtatactgagttggtcacgaacctcattccttcggcctccaacatctcccccttttgttttttgcattaattgaataaaggtaatttcaggctgtgcanctttcaattgccngttggtggtccnccgatcctataaaccccaggancctacagctagcatggccaaaantgattcggggtttttgcctaaccctggcccccatattccccaccccgttttc

SEQ ID NO: 607035 - DNA, 1333 bp, Homo sapiens
gcgtctaatggggctactctcgtgaaccttgccggattgttgcttatgcgaggttatggacagtagaaggcatacgctccctggtagagcgtatcttatgcgtagtctcggtgaacgttggctgatacgggaacagtggagggaagcgatggagtggtctgcgatatcatcagcggaggatcgtccgagagacggcacggagatccgagagatcgttgtgatatcgaaggtagagggaccgaaggaagagcctcctccgtgacttttacagaagagtgcggagcagaagccctgcgtttgccacatagctcgggaccgactagctgcaggtagacaacccatggccaccgctgtctgtcaaccggactagctcgcgcgcgtactgataggggacatggcccattgagtagctctacttaattagtggcaagacatgattcgaaaagcctagacctagtagtcggaggaagacgcgatcagtcgttgcacgcaatagtcgatcataggggcgacgcacttagccctagttccctcttgatagaaaatcaaaagctgattgttgagtccctagtatcccagacgtgactgcgccactaaagaagatacgtacgctagaacaatccgcagtctgaggcatagagaattcgccactgcggagaggtcgcatacggacgagcatgggtttcgcagggaggtttgctacaacacttcggttgaaacgaaacaggttccgcgttggggccctagtcgcgtgactcttggcttgccactggcagagacgaaatcgcccgaaaagccccttcatttctttccccactagttggtacgaattgccttgatagggttgggaccgaaagccccctgttgcacctgtaacgccagggctatgggaaagcgcatttggcgcccattggacactagacagaaacgaaggaaaggggcgcgataggggcgggtaggtcccccctttaatccaagcgcaaggggagagggggcaaccctctgggatttggttaaaccctgcggacagggggggcatattcaccaaaggagcggcgttgggtggcccaaaaggtaacttaacggatttgccccatttgctcttggaccttctaaaggaaacccttgtccgaattgaacagtgggaacctaggcctttgtctgtcgcctctcgcaacttggttcctctggctgggacgaacggcagaatttcaccgccccggtttgcttggcttccaaatttaacttggccaagtcgccaaaactttggttggtgcgcaagggaagtaacccacgaaaggtgctctgggaacaccttgctccttccaatcct

SEQ ID NO: 607036 - DNA, 992 bp, Homo sapiens
ggagagagaactagtctcgagtttttgtttatttaattaaaattatggtaagggggtccgcccaaaaggaaggggtggagggtggggtccctgcaggggacacgggaccacgatgacttggccagggccacaatttcttctgcgtggggacaaagggcttgcaaaaagacacgacgcagggctggagctgggggtggacacggagaggggcgaccagggatagattcccccgcccccagagaagacaaattaggcccgtggaccacaaagacacaccatggaccaccgaagacaacaaatcctaccacatatagccatatgacccaccatgacctaacactaccagcacacaatagaactaataccccccatgaacagaatactcacacatacgagacggaaatgtacaagggaccagtgaaaaacacaacacagccaaaataacaacatacagagcgggatacacaccaatcgtgccggagcccatgctacaaaggcaaaatgcctaaaaaacaaaaggcatgaaaaacgcatagatgagggaaaaagtaagtagaaacccgaagatacataagacagcagaagcaggccagcaacagagaagaaaaaaaagcagacaagcgaagcagaaacagtcaacacaccaaccagagaagaggagaagaccaacaaagacggagaagacagaaaaaagagaaaagaaacaaaacaaacacgaagagagcagagggacagagcgaagcaacgcagacgaacatacagcacgatgagaaggccaagcatagacaaagcatcagccacaaaaaggcacagaagaaaagacataaacagacagacgagaccacagacacgacccgaaaacgcgaaccacaaggacaagagacacacaacagtgaatagagcagatcaaacagagctaacaataaaagaagaaacacaaaacagcacacacgaagaaaaaacaacacaccaacagcgaaaagcactgaaac

SEQ ID NO: 607037 - DNA, 635 bp, Homo sapiens
ccctcctcccagggagccttgtttggggttttttgggtttttttccccccggggggtttcccggccccccccgggtccctttgcaatgagaaaggttatccccggggggtgtttcccccttccctcccccccaggaggtggtttttcccccccccccccccttttaagggggagagtgggttcccccccggtttgtttcccccctccaaagggccggggtttgaacctcccaaaccccccccaagaacccgcccaaatttttgctcccctccaaaggaattttggcgggttcccttttccggttaaggaaccgcgggttcttaaggggttccccctttgccccaattgaagccttaggggattttaattccccgggagggtttttgggaaaaaaaaaggttttaaaatggatctttagggggaaattttccccttttttttttggcgggggaaccttttccctttggtttacccccccttttataaccccaaggggggggtttttttttggtatcttcccggggggggggcctttaatttttaaggttggggttttttcccccaacccggtttttccgggggggggggccaatgtggaaggacccttttgccttaaaaaattttaggttttttta

SEQ ID NO: 607038 - DNA, 251 bp, Homo sapiens
agtgatacgataaagaactggccgacgagcgtccccctgaaagtctgatgacactatggatgatatgctgttgctcgatgagtatcctggttctatggctagctgtcatagagtggtctacacacatatagcaatagccactgcgacgagaatttcgcaagatacagcattattcccaatggcagttcctagatgtggttagttgcatcattctcaatccaaggatgatccttatcgaatgctcctggtat

SEQ ID NO: 607039 - DNA, 360 bp, Homo sapiens
  misc_feature (282)..(282): n is a, c, g, or t
tcttaccggttcgccatgattcccaggctgttcattgaactctggctcaagcgatccgcctgcttggccctccaaagtgctgggattacaggtgtgagctactgcacctggcagaatttgtttcttaaggactgagttctggtatcttcttttattttttttgagacagggtctcactctgtcacccaggctggagtgcagtggcacgatcatggcttgctgcagcctcaacctccccaggctcaggtgatcctcctacctcaacttcctacatagctgagnacacaggtgtgcaccacctatgcccgggctacatttttgtatctggtgtacgagacttgggtcttcactgttgttgcc

SEQ ID NO: 607040 - DNA, 648 bp, Homo sapiens
atcagctccgctaagatgctagcttggccaggtctgtgatgtccactgaaaaagtcttagcagagaattattgcatacccacccaaaagccctctcagccactcaaatggctatcttctccagtctacaaatttcatgttcccccccatcattacagttcttgatcatgttatttctccacttactggtctacgttggttaaactcactggataagtattataatagagctacttatctgtggttttaatacccttctgttaacaatttgcaggcaaattaatgtccttttgtaacataattcaacccaccaatgacctcgacaccatcgttaccttgaaaccgattattgatcatgcccacaaggatccaagctactggctgcctcgatataaggggtgcagggtctgtgctagatcaaaagggccggggtggcgatgtggcagagaagttacttgtagggagaacttgcttttaacaagcttctggaaaagcaagggaaaagtggtggccgctttccccctttccctccccttcaagcacccttgaatttgggcttatattaagagctgtttaaaacagttcttaattgtagagagccagggtttccactccttcgatgtcctccaaagaggataagcagctatac

SEQ ID NO: 607041 - DNA, 513 bp, Homo sapiens
tcctcatggtaacactcgtttttatataaatatccgcaagtcttgtacaaaaaaagccccaccgggaaaaaaagtcaacgtaagggtttggtaaaatggaccccgtgcctttctaggttggggccccagccctgttggaggccgcctgtgcgtgcttgggaaaggcggggggttgctgccgtgaggctgccgaaaaagctgcctgtgttcgcccacccctgtgggccgaccccccttcttgggtgtgtggtcacatggtgaccttctcgtggccaaccctttacccttggggcagaggttttgggagaaacgagggtttcgagggaaagccgagggccccccaggagagtcccgatgggggaccatctgtggaaaatgcgaggcggtcgaagaaggggacacggaaaccacaataaaaagagaggcgggaggagaatacgcgagaaaacaattaaaaaagagccctaaacacctattggaggcgcgtggggggagcagaagaggaaacgggaa

SEQ ID NO: 607042 - DNA, 372 bp, Homo sapiens
tgcgtatcatggggcgttgaaatgtaaaatatgggatgtcttccaagtgacacattttagtctttgctaacagataaatatgactattaagttatacagcttcatgttcaaatacggctggttctaatacgacactactcctgtacatcctacccctctcccattcccagagctacctactagaagttgaaaactattgcgatgtcttcactgggaagatccctgctgagtcaaacaacaaaacagaaacatgttggagaactgatgtctttggtgcaaagaaagaaatcacagaggaggtgaggcccatgctgttgccgttggccccagggatccatggtcagctttgactctcaccatacgcccaggtaa

SEQ ID NO: 607043 - DNA, 243 bp, Homo sapiens
  misc_feature (76)..(76): n is a, c, g, or t
  misc_feature (170)..(170): n is a, c, g, or t
  misc_feature (226)..(226): n is a, c, g, or t
attctataccctttggtgaacaattcatactcataactcagttcctacagaaactgatatattcacaatgccagangttcccatttacattgcaaaggcagacaagctgacctattattttaaggtttgagggttgttgcagaaggactctattttcttaaaagtatttnccttttatattgaaatcattcagttatttcttggattagttatcctttttctaagnacgtctataaatttaag

SEQ ID NO: 607044 - DNA, 405 bp, Homo sapiens
gtcatcttacgagtatcccctccgcacccttgcagcacctggtagctagcgcgatgtcgtaatcttgatcttaagtcttgcctggtgttcaaacgctggtcacactgcgagggttcatgactgggaacaccttttgggagcgggcgtggtgatgggaaggtcctctgtcccttgctcatcctgtgtactggctcttcctccttgtgttttctctctgggccaggaggaagtagagaggtgggatcagggccgatgtccccagcctggataggcagagtactgaaccatgggttccacaaccagaactcttcatggcagagacctatggcctagcctgtcctcatctgaagataactaggccgaacagattactcttaccacaaaaggccatggaggctgcctctg

SEQ ID NO: 607045 - DNA, 446 bp, Homo sapiens
cttagatgatcccggcctcctctggttgctggtgatcgattggtgcgtgtttatggtgttcctgagcggggagcttgagcctagagctggtatcccgaaatctgcgggctcgagcttgagtgcgcgctggggaagacgcacaagggcggtgattgctccagtggtccccaacgcttggtttctttccgtctcatccgggatctgcaccagcatctgagagaaagggattccgaagactatatctccatgagctcctagaaggcagtgaaatctatctcccagaggttgtgaagcctccacggaacccagaactagttgcccggctggagaagattaagatacagctggccaatgaggaatataaacggatcacccgcaacgtcacttgtcaggatacaagacatggtgggactctcagcaaccaagtgggcggccgggtaccgagc

SEQ ID NO: 607046 - DNA, 141 bp, Homo sapiens
gatggtgtcattgagtgtggtgagctcagaggtcagagaggccacctgtgcagtcaaccgggccccatgagcctgagaggcctgctccagctcttccttggcctggctgagggtggagatggagctctgcaggtcagtgat

SEQ ID NO: 607047 - DNA, 168 bp, Homo sapiens
cggctatctagagtacccagtaaactggaaatcgcgagtcaacatgttagctcggcgtagcccggccttttccagactgaaccaactgacatcttacatgtgttgatatgaggtctcatgtctccctaaaacgtatgaccaccttggccacatgtacgtcagagacat

SEQ ID NO: 607048 - DNA, 895 bp, Homo sapiens
  misc_feature (35)..(35): n is a, c, g, or t
  misc_feature (79)..(79): n is a, c, g, or t
  misc_feature (127)..(127): n is a, c, g, or t
  misc_feature (129)..(129): n is a, c, g, or t
  misc_feature (135)..(135): n is a, c, g, or t
  misc_feature (139)..(140): n is a, c, g, or t
  misc_feature (147)..(151): n is a, c, g, or t
  misc_feature (160)..(160): n is a, c, g, or t
  misc_feature (208)..(208): n is a, c, g, or t
  misc_feature (255)..(255): n is a, c, g, or t
  misc_feature (258)..(259): n is a, c, g, or t
  misc_feature (269)..(269): n is a, c, g, or t
  misc_feature (273)..(273): n is a, c, g, or t
  misc_feature (304)..(305): n is a, c, g, or t
  misc_feature (354)..(356): n is a, c, g, or t
  misc_feature (372)..(373): n is a, c, g, or t
  misc_feature (387)..(387): n is a, c, g, or t
  misc_feature (389)..(389): n is a, c, g, or t
  misc_feature (470)..(470): n is a, c, g, or t
  misc_feature (550)..(550): n is a, c, g, or t
  misc_feature (669)..(669): n is a, c, g, or t
  misc_feature (676)..(676): n is a, c, g, or t
  misc_feature (745)..(745): n is a, c, g, or t
  misc_feature (864)..(864): n is a, c, g, or t
gagtatggataaatgaaatgtaggtagaaccaganaataaaattttattctacattaaaaaaaaaatgagctagatatntatgacaagatagagagaaaattaaatggatattaataaatgaaagangnaatttnaaanngtatatnnnnnatgaaaagntatatactgtatgatttcaactaaattaaattctggtaaaagcaaaantatgtaaaaagtgaaaagatcagttgctaagggttaaaggagagggnggnntgaataagtnaaanatagaggattttttaagggagtgaaattatnntgtataataatataaaggttgaaaaatgtaattaaaaatttgtaaaaannnatattatgtaaaaaannaagagtgaaccctnangtaaactatggactttgggtgataataatgtgtcaatgtaggttcatcagttgtaacaaatgtaccactctattataaganattgacggtaggggagggtgtgaatgtgtggaggtagagggtatatgggaaatctctgcattttctgctccatttttgcngtgaacctaaaactgttctaaaacataaagtctattttttgtaaaagttttctaaggtcaacatagttaatactgaaaaacagcattttaaaaatcagttataaaataacttgtaaganttaaggncattcttcctaattgtccaataacgttgaaacacttcaaccatgaatatatttaaaataaaaatgatanatcgctttggcgacacccagtagaataagcttgactggctaaataaagtgaccatcttttcatcttcattttcaaatgcctctgcatcatgacattattggtagggattggagcaaganagagagaaggaggaaaagaaactattttttt

SEQ ID NO: 607049 - DNA, 329 bp, Homo sapiens
tgaaaatccccgctatagaaaatcaccgagacaatacacatggatactaggaacatcactagaagctcagcatatggtaagaccaacaattgtggcagaaaccctatgtcctactattctgggcaatgtttacatgttagcccactttgtgctcatcaaccttccctagtacaaatttattgagcatcatcttactgaccagctactgactttactgaatctattccttgatttgatgttacctttcatacaaatcacagtagaaaaacgtatgaagttttttcaatacagcctagatgctggcttctcacctgtgaatatagttttca

SEQ ID NO: 607050 - DNA, 398 bp, Homo sapiens
cgaacaattgtctctcctttttctcttcaacttttctttacccccttttaagtattttaatgctatggtgtgactgctatctattcgtcacgagtcaaattactttttttttaccagcgctttctttaatggctttttttgagaaatcagatgccagattcctctctttgcaccagttaggatacctttttgttggcaatttgtgattttcctttgcaaatgctaaaaattaaatatgatgtataaaagcaaaagcttgtcttcttgcctctacctcgcctcacttccagagttttgcatacccatcaccaggctaatactgtgaaaacatcattttcaaaacactaccccctacccaaagtccttcttcacccctagtcatttagactatcccaacc

SEQ ID NO: 607051 - DNA, 227 bp, Homo sapiens
ggcctttggccccccccaaaacaaggaaggtggttggggccaaaccccaagggcccctccaagcactttacttcttgttcctccccagccttaaccccaaagccctcctgccccccaaaaaaacccctaagggtggccaaaccacactttttccccaagggggttgacctggcccaattgggtccccagggccagcacatggaataaaaaaaccagggcccccctca

SEQ ID NO: 607052 - DNA, 126 bp, Homo sapiens
tcagtaagcggagcagtcacgcctgcttggggtatgttgtgttgtaggaatgcggtagtagttaggataatataaatagttaaattaagaatggtatgttgtgttgcatggttgctccgcttactg

SEQ ID NO: 607053 - DNA, 248 bp, Homo sapiens
  misc_feature (38)..(38): n is a, c, g, or t
  misc_feature (40)..(40): n is a, c, g, or t
  misc_feature (42)..(42): n is a, c, g, or t
tttttttttcattagtttttcaacgttgtggttggggngngngtgtgtgtgtgtgtgtgtgtgtgtgtgtgtgtgttggtgttttatgaaaacgtgatttttttattctattatttgaaccaggtattttttttctagctatatgtgagtgtgttttatgtgtgaagtttaaatttctatctgtgtatatgtgtgtctagaaaacactatggggtctactttttttttgtgcttttttttagcagaca

SEQ ID NO: 607054 - DNA, 138 bp, Homo sapiens
attctcttctgaatccttgcaatgttggatattacgatgttgctaagatacatattgcacctgtagcagattttacacacaagattatatattacactccactccatgattctgctagtaatgtgcacagagatataa

SEQ ID NO: 607055 - DNA, 684 bp, Homo sapiens
gaggaggcacaggtataagagggaagagcatgagctgagtgtacctgaccacggtggtccatgttcatgtgcctatttgctgctatgaggatcaagacttaggggagaagtttgccagttactaggaatctccagacattgtaccgcagaaccaagccttaacatttggtggcatcttcttgtgagatgtggagaccagaatcctagcagcattaaatgttagacactagagatgatgcccagctttgtgccacatgatggtggctacgtgcctgtaggcattttccagtgagctgaaagaggctgctagtggtcgaggatgagatatcatgcaattttcctaacaagagattgaaacccttcatattccccagaatgaataactgctgttccccatgtcttcagacatctgcatcaagctgaagttctgtgtcctcgtgagctgatttcagcttggcacagatcttgggggaggtgatcgacaattagaccctggaccttcaactttctcttgtctgaagcttgcatggggggccctgaagggtcagggcagatcggtaggccacacaggatcaattgtggatcaatgctcttgctctcttctccagggttcttgctgtgactctgagactggtgtaaactaaagactggttatcactcttctgtggtgcctgttggtcctgg

SEQ ID NO: 607056 - DNA, 263 bp, Homo sapiens
  misc_feature (52)..(52): n is a, c, g, or t
  misc_feature (84)..(84): n is a, c, g, or t
  misc_feature (107)..(108): n is a, c, g, or t
  misc_feature (115)..(116): n is a, c, g, or t
  misc_feature (121)..(121): n is a, c, g, or t
  misc_feature (173)..(173): n is a, c, g, or t
  misc_feature (191)..(191): n is a, c, g, or t
  misc_feature (198)..(198): n is a, c, g, or t
caacaccaactatctataacctagccatggccatccccttatgagcgggcgnagtgattataggctttcgctctaagattaaanatgccctagcccacttcttaccnnaaggcanncctanaccccttatccccatactagttattatcgaacccatcagcctactcattcanccaatagccctggccgtncgcctanccgataacattactgaggccacctactcatgcactaattggagcgaccctagaatatcaccatta

SEQ ID NO: 607057 - DNA, 186 bp, Homo sapiens
aggactggtcatgtcggcacgcccagcggcggctcgatcatggcgccggccttgacggcgtcgggaacggcaggtcctcggcctcgacgcggtcgatgacggccgggtcgacctgcttgaggtgcaggtagccgatgcgctcggggtacttgcggatgatcgcgacgttgtcgccgcggtagtagg

SEQ ID NO: 607058 - DNA, 740 bp, Homo sapiens
cgcggaggaggaggaaggggagtgagggcgaggcgtggagtgtgctatgagtggaccctcgccatggtgtcacgggcctagagtggcgtgaagatacctggcctgtgtgccaaactggctactgctgcttcctgtgtgcctccatgtgctgagtgactggctggactgccctgggccctgtgtgccctgtggctggaatgctgcctgctgaatgtctttcgcaagtcagggtgccacctgtggcactgctcagacgaccgtattaccagatgccccacatgtgagacagtgatccgaagcaaatgtttgagcttgactcgataccttgggaccctgcgtgttgatctcacccctctttctgaactttcaatacgaaggggcatctatgttgctaatcgcagacgcccacaagtgggccaatcacctgttggcaagtatgcgcagcgaacggaatgccgaagacgacagccctttcaatgtgccaagggcgaatgacatcggaaaagcgtccagtgttatgggcaacaccaaagaaaggtcgcgctagaggtggtccatgaggaaaagcgcttgtggccaccaggagtgcgactcgcatcagccacaaggtgcttgacagcctggaaccaacagtgcgccgcaaagcctatccattcccacttgcgctaccgtggcgatgacagattcgagaaaccttggtcaggcgaatacaagacttaattccagaggggattgtgcac

SEQ ID NO: 607059 - DNA, 782 bp, Homo sapiens
gttcttgcagattttatgtgctccccaccaccccctgttgtgcttgtgtagtagagttacaacaaggcatggaggctaacaggtgtgttcattttagctaatccagtttggctctgttatatagaggttaccctttcttataccgacagacccaattgaagactcctgtcttgatcctgtgtgaaagcaggaaagctacagattgacttggaaaccgagagtttggcttctattaacccatgcctgtcaaccgagaggagaactcatcatgagagtgtcttagcagccacgatgtgaatatggagcacttgaaatgggcttgtttcaattggagaaatgtgtttacaaagtgttaaaaactagcataagctattttaaaagcatgcattagttaggtgtatacataggactaggatacgtttgtagaaggtactgaaaagatgggtgctaacacatatgtttgaatttaatatacttgctttaaagtatagggctgtggtggttgaaagtaattaatttatgacatagtatctgagacttaaatttgctgtgtccttttggcttttcagccatttggttagtagaaattcagatgcatatatatagcatgcattaattctttaggataacattgctgtcggaggtcacgcaagctaacggcaagtgtgtctatcagtagtggtcctggatcctagaatcccattaaaagtatcctaagatcagctgggcatggtggcttacaactgtaatcccagcacttgggagactgaagcaggagactc

SEQ ID NO: 607060 - DNA, 436 bp, Homo sapiens
aatggtccatagcgtgcaacctggaatctaccaaactgcccatcccacccagaaaggacacattctacagaaccatatctatccaaagtaaaaatggggaagtgaggttcccatataaggaaaaatgccccataccaaaatacgacctataggagcagggtgacgtcatatggaaatccgaaataaactgaggggtgggggccagtggggggacgctctgtcactatctggttaccactgtattgaagcttcattgtggctaatccccctgcagaacctcaaaccacttagagatcaactccatagatctataggttaacatacatctagtatcacatggaacacagattacacctagtactgtgctttgaaagctcacgtgtaataaacttcctcttgtgataaacaatcagtggacaatccattccgaccctat

SEQ ID NO: 607061 - DNA, 206 bp, Homo sapiens
agcaccgcgtctagagtctaaaattgactggcgctggtggcgtgttgcctgtggtcccgctactcgggaagctgagacaggataatcgcttgaaccaggagttggaggttgcagagagccgagatcacaccactgcactccagcctgatgatagagcgagactccatctcaaaataaataaataaataaatcaataaattagctag

SEQ ID NO: 607062 - DNA, 530 bp, Homo sapiens
tacgccgacaccgtcattgacgcggcccgagccgggatcgttaccgaggcgctaaggggcacgttctggaaaagcgtctggacgaacatcttctccggggcgctctacacggtcatcctaatcgtcttcgctctcattctttcgaagtccggcatcgatctcctcggaatatttgagcacatgacgaagacagcaccggctacaggcggctaagtccgctcccaacagcagccgtcatccgtaagcctcagaagcgaggcccatagcgatatagagcggtcgtcgtttccgtgaaacgatgaagcggtctaagtggcgggctctaccctcggccttccgatgccgcgcagcctggccgccaaggcgggacttaccttgttgatctcatgcaggatgcggcggcggctgaaatggacctgtcggcgcgcgcgccactgcaggtcggtgtcgatggtcaggctgcgccggaaacgcgccagttggagcgcatgctgatccatcgcctgcttgaccgtatcgtcatagaattg

SEQ ID NO: 607063 - DNA, 203 bp, Homo sapiens
aaatcttgctatatgatagggcaaatctctcctccttgtgcttcagtttcctcatctgtaaaacggagataacagtacttacctcatagagctgttgtgaaaagtgatgactgaatatgtaaaagcacctagaacagtgcctggcacatgctaagggctttgttcattattgttgttattatgtaattttctctcaaactgag

SEQ ID NO: 607064 - DNA, 694 bp, Homo sapiens
ctagagtaagagtatatagacccaaggattcttatgcaggtcaagttcagatattgatatgaatatgagaataccaaggtcccatagtagttcagtagtaacgtggtcatgtctgaacagagaatgacactaaactaatgctagcaggtaaaaatcaatcataatgttgaaaaatggatgctgtcctcagcatgttatatcctcaggtctgataatttgactggtcgtggttatacagagaatttgatgttgaacgttataaagtcaaagaactgcttgtttagatgaggtttatttttatttttgatattattcactcttgtcacacatcaagaagaaaacactagagtgctgctggaattccaaatctgaagaattctaacggctgcattctttgttattaaaaagggcacaatccttcctttttatttggcagtttaatttcagtaggaagcatgtcacatgtgcactgttggttagaattatgcatctgtcatgcctgactgctgaaccctacctaagccttttggcgcagtttaaaacttatactggtggactgtgaacctcaaaacaaatgggtatttcagggctttgaggatagatgttactccttaaagtttgtatttggggcatgacaaacttactgaagaagaacagtgtacagatactacatttcaagacgtggcatttcccc

SEQ ID NO: 607065 - DNA, 271 bp, Homo sapiens
ctcccacgttcaagtgattctcctgactcagcctccagtgtagctgggattacaggcatgtaccaccacgcccagctaatttttgtcttttaatagatacaggctttcaccatgttggccaggctggtcttgaactcctgacctcgggtgatcaacccgccttggcctcccaaagtgctgggattacatgcgtgacccaccacgcccggctcaccaactgatatatttcacagtaagcacagtattttaaaaggagaatttaaaatattga

SEQ ID NO: 607066 - DNA, 548 bp, Homo sapiens
cgcacggaccctctacttcagtgtttaatgagccaaggagactcaaacccagcagctattccgcatgcagcagaagatattcaaggagatgaccgatggatgtctcagttgccaggtattaactccgaattgttaagccaccaaaattacccctagagaataaacccaaccctgataaggatggtccagattatgagcccaacctctggactgtgggtaaatccctttcgatagtgtatccccctggaaagctggcaggtctcaggacgtaggaacgagggaggacctgacaagcacactccccgtcctctcagtgcaccccagaaggatggcatgatgccagctgctcagaggccgcaggggtggaatcactgtcccagtcctccatcaacgcggtctccccctcggaagcggtttgcctttacccccagcacctgggagacaagcacttccccttataccggacggcccggaaggctgcgaagaatactgtccgtcacaaatctctgttaacgagacagctcagagaaagtgcctgtcagcatgca

SEQ ID NO: 607067 - DNA, 143 bp, Homo sapiens
tcaccactcgtacaaaacccggagggcatagaaatctggtaaatgcatcgccaagcacgggggctgattgcagtaattctctaagcaaggcaaacatgatctagcttggaaggcagcatgaaggcagccggtgggcttcatgt

SEQ ID NO: 607068 - DNA, 767 bp, Homo sapiens
  misc_feature (461)..(461): n is a, c, g, or t
agcggcttggcggagccggtgcgcccggggtgccgctccctgcctggcgcgctccggacctggaggtgccttgcccctctcctgcccactcgtcggaatttccctgtggctccttggatcctttccgagtctcctaggctccttctccgcttcctagccttgtgtccgcccagagaaaggctcaggatccttggtcccctgctacggtttcttggggcctatggctggtctgggcccctggcggtacgcgcgcattcagagcgggggagccccgagccccatgttgattgcgacgtagaaggggagctcgtagagtgcaggaaaggtggtcgctacgaaagtcaagagccaacaatgttcaacctgtctctgctttccttcaaatgcgaggacctctaactctttccttgccaaggtcgcgacctgctacactgcactaacaatcatcggggggtatttcnggagagaagtcgagggtgccacttgccatagtgatcccaaggttcttcgctatgccttgtatagatcgggtatccaatccagtagttgattgctcgaaaggaaacttgtgggttgaacacctttgccgattggtagtccaaagggggtcgattcgccattaacggttgaaacgccccaggaacgattttcgggttgcagagcgcccctgagaagtagaccgcggcaagctccctccacggatagccccctagaagttgcccggtgtagccccctggtcaagtttgtaaagttccttcgagtcccag

SEQ ID NO: 607069 - DNA, 310 bp, Homo sapiens
ccccctcctccccggcctttttttcaccaaacggtttttgccttttccgggagattccagcggggatagagggtgagaccctttgcaaacaacatttaagggaatgtgggcccaaggcaaaaggtctttaaaaatcatgttgtgaaaaaaaaaaacataatcatttttgaaagaggccttggtcacatccaaaaatcggctcacatcattttttttgggacaagaatattttccagttatttaccggttgcccccagaattggttagattttttaaaaaccaatttttaaaaagttttggtttgaaacta

SEQ ID NO: 607070 - DNA, 340 bp, Homo sapiens
agcgatgttgcgagacttcgacccaatgacccacacagagggaaccaggtgtgtgcaccaatctccgttccctgaggctcttagacaacattgagttgatgatttgcgaccatatactcaactgtattggaaatgtgacatctgtcacatcaagaaaccgcgtactgctcaatagtgaatgcccatactgtgcatcgtggactagatcaaacaagatgcttgccctgagaatttcagagcgtattgagcactttaagcaccattagagcctattagctacctggctctggtgcagggacatgatcagattacggaatccatgtagaagggctcatggtac

SEQ ID NO: 607071 - DNA, 264 bp, Homo sapiens
ctctagatgatcccggctatcacattatctcacgggataggggtagatggctgagatcttgtggattcagtaacatggatcatgtcctgtacctagtacgtactgtttgtgtagtagaatgattaggagattcccaaatgcctttttccccctcatcttgaaatgagatgagttttaatgtgtaagcaatatttatttaacgtatgctataaaattattgagtgcctactgaggcctttaagcaccgctaacattcctttccat

SEQ ID NO: 607072 - DNA, 149 bp, Homo sapiens
gaaagataggaaccaagcggagcaaaataggaaataagctagaagtagatgttcccatggactgactttcttaaatagtgattcagttgctgtgggtaacacatgactctgatctaacttacaatccaatgagctcttcacatcaaatt

SEQ ID NO: 607073 - DNA, 153 bp, Homo sapiens
caggctgcccccaggattatcatgcatggcaggtggcagcatttgctgctgttgaaattgttttaggtaatagcttttctaatcaggttaggtctaggaggagtaggtggcaggttttatgctcgataagcacaggccatacactcagtggca

SEQ ID NO: 607074 - DNA, 557 bp, Homo sapiens
ttgaaggccacaatgtaccacaagtactatgccaaagcactctataacgttgtataaagaattccacatccccgatattggccacctcgaagatgaaaacagataactccctaaatgttaactatctttacagcacatgcatgtaaggcaagtgatcaaaaaaaaaaaatcacaaaagcaaaaatcctaaaaaaaaggttacaatacatgggtttctggtagtactgctgtgctcgatatacatgaggtatggaataccaggcaattcatcttgcctgcatccttacttttacattggtccttaggtggcctaaaacatttaaatacaaataaaatgagtgtagcaaaaataatgaaagctaacagcaggtaactttacaaataagggaatgtgaaccgtttctgcccttatccagagtaaaaggggtcacaactttgtctaagggaacacttctgcagctgtagtccagggtgtacactttgagtattccacagatatacatggttaaatatgtggtatccatggggtatgattctaccaaagccttgtaagtgct

SEQ ID NO: 607075 - DNA, 147 bp, Homo sapiens
gccacacctgctcctttttgctttccccggggaaaaaaaggggttttggtcgggaaactggggtaaaggtttggggagggggaaaaaaaatttttttttttgaacccctgggtcccttttgcataagtttaaaggaaggaaaagtta

SEQ ID NO: 607076 - DNA, 423 bp, Homo sapiens
cttatcgtgtgcactgcaacgattacttatgagaagactggtgggtgcacgaagcttatcaaaaatattgaatatcctgtggacttgtgaacttagtaaagaacttgctttctcccagcgggttacaataagaattttaatgccaccgaacctatcggctctttgcagtgggtctaccatcacggggacagtgcgacgggcgggccttacactacagacgtcttccagatcggtctgaatggctggctgcgcatcgatgaacagacaggtcaaggtgatcaacccggtaccagggtgggttgaaaccacctgctgaacgcacagactaactcctgtattaaccgccgagtggacctgctgtaaacccctgtgtagcgctgtgttgttgcggcccccatgccccgctttcgtaggagaccacct

SEQ ID NO: 607077 - DNA, 108 bp, Homo sapiens
aattcccttgcgggttttcttgtttttggagtttttggttttatccaccaaaccttgccctttttttcttccagttttttcttgactttttgattcccattttttgga

SEQ ID NO: 607078 - DNA, 342 bp, Homo sapiens
acctagaggatctcccgctctcacccacccctatgcagtttgagtgagtttttaaatcctgagtcctagtttgattgcactgtggtctgagagacagttgttgtgatttctgttcttttacatttgctgaggagtgctttacttccaattatgtggtcaattttggaataagtgcgatgtgatgctgagaagaatgtatattctgttgactttgggtggagagttctttagatgtctattaggtctccttgatgcggagctgagttcaattcctggatatccttgttaaccttctgtctcgttgatctgtctaatgttgacagtggggtgggtggagagcgg

SEQ ID NO: 607079 - DNA, 322 bp, Homo sapiens
gtctcactcaccgaggatgcctagtgcccccttcagtgtgagcagattggagaactgaaggcagagttcaccaaattatgataaaaaatgtgtttgaacaagaaacgaagttgcaaaactccatgaagcttttgcacctgcgcaagcggctggtaaaagtcatctttcatgaactagttctatcccacaaaatccttcggaaggccagcggaaacctggagctttggcttgggggggcctatacaggaatgtacctttccgacagagcagggtcgtgagaggaagaatcatccaataaagtctgtacttcccccaccggata

SEQ ID NO: 607080 - DNA, 217 bp, Homo sapiens
cacgaggtgactccagttcggttgcatctaaagtgtttaggagttcatatcaatacaaaaatttgttgaagaaaaataaggatgagtcggcagtttccatttctcacacaaaatgttccttgttatgagacatcagttatgggaaaaacttaatacctaagaaatgttttacttcttttaagaagaatagtaaagaaaagtgttctttgaaacatca

SEQ ID NO: 607081 - DNA, 740 bp, Homo sapiens
aggcatcggcctgttacccgcgcggcagcatggtgcatccaccggcacctacggggctcacgcgcacgacacagccacaagatgtccgctctgacggaactactgccagctgccacgctccgaccctcccccatcctcctgaccatcttcaccgaccgcggatcagatccgccaacgaccgccgtcccgagcacaagaccgatgtgaggccgaagccagacggcttgcattcccacgatacggggccgagtgaatacagtgtcaagcccttttccttcttctcggaacagcaaccttcttactaaacagatcggcagattggaccaggcaggagcgaggcggcagggcaggcacggatcaatgcagctgcggcgcggcacggtagcaacgcacctgggccggcaacacccattagcgcctcagcagaacagccatcgcagaaccgcgaacggagaacacaatgaggcacgagacaagccgtaccaggcacagccaggaccaggcctgacggcagcacctcccacaggggcacgccacgaaaggcaacacaccatcaccaccgacccagacggactacccacccccaaacggaccacccacacacaaccgacacgcgaacataccaccagcgaacgaccaggacgcctccatcccgcgcgacacacaacccaatcccactcggcacgcacggcgccataaaacccgaacacagccgcagcacggcctacgacgacccacac

SEQ ID NO: 607082 - DNA, 439 bp, Homo sapiens
tttcccgcgcccgcgcttctggtgccacacttggggagcccggaaggagacccgcgccacggtgtttctacccctggacgccctggccctgcctggagccactgccattctcccccactctgtcggccgacgtgctggtggccacgggtaccactgtcccgggccgcccgggtccccttctcccacttgccacgcccctgagaccctgcaccctatagttctgagccacgctgctgaggaagggggcgcctggtcccccctgaggcccactcccacgggacggcccacgcccgctgaagacggagcctgggcaaaggtgccccagtggctgaagctgccggccagccacgaggtgagactgccagcctgaggtgccccctccgccagccccaggaccacctccttctgcccgccaggaataaagacttgtgcatcccta

SEQ ID NO: 607083 - DNA, 339 bp, Homo sapiens
  misc_feature (84)..(84): n is a, c, g, or t
  misc_feature (311)..(311): n is a, c, g, or t
ctggaacccagataagcaaacataaccccgagacacttcccccaacctgtcctaaagcctagtggttatctggcccaaatctgnccccaatagggttagtttttgggtctctctggtgttttttaaatttttgatctcttgaggtcaggaattcaagaccagcctgagcaagatagcaagacccccatctctaaaatcttttaaaattagctaggtgtggtggcatgcacctgtagtcccccaggtgcttgggaggctgaggtgggaggatcacttgagtccaggaattcaaggctgcagtgaaatatganttggccactgcactacagcttggatgac

SEQ ID NO: 607084 - DNA, 849 bp, Homo sapiens
gggtggctataggaatggtgagttttgctggcccggtggtccattcctgtgcgcttaatccgcagccaagatgtcgcgtgtcaaaaggaggtggtgcaggtccgaaagcgaataaacgaggaagaaaaacaggaagaacttgactccatgtgcagtagttgcctatgtgcggcgcgacatacactgacctattttgacgaagagctcagatctttttatatttctccctagttgggcgcttgtgacaggttcaggctgtccagaagtaaaaggcatgaaatagcaaaggctatgcttttgtggagttggagtctgaggatgttgccaaaatagtggcttgaaacaatgaacaaatacctgttgtggtgaaagactctgtggagtgtcattttatgccacctgaaaaagtacataaagaactctttaaagactgaatattccatttaagcagccatcatatccatcagtgaaacggttataatccggaatcggacactaacacaaaagctaggatggaggagcgatttaaaaagaacgaaagattactcaggaacgaaattagctaaaacaggaaatggacgtatgatttccttcttggattttacagaaaaggaaagtatttcaaaaactaatcgtcagaagtctacaaaaggcaggtttacgtaagaagaacaaacaagttcaggtatctgggaactcctagaagctggggtagccagggccaacaagttgtaacaacatttgggggggaaatcagtggtgcatgattgtgttaaggtggaatttaaggcttcggttgagagataagaatcacctacattgagaaaagaagaaggtaggtattgaaaa

SEQ ID NO: 607085 - DNA, 136 bp, Homo sapiens
  misc_feature (40)..(41): n is a, c, g, or t
  misc_feature (66)..(66): n is a, c, g, or t
cccccccccccccccccccgcgaaaagggggggggggggnnaaacccgttgggggggggggggggnagcatagcctgaaatcaactaacccaagggtgaaattgttcgaagtctcatgttttattgtttacaaaca

SEQ ID NO: 607086 - DNA, 1633 bp, Homo sapiens
gaacccccggttggatcaccaaagccatgtccacttagcacaggtagatgcgtgggctgacatctggcgggatcgaaagagtcgtggatctatggtaacggtgatcacgaagtttccacgcactatctgatatgtgtctggttctcgtccggtcggctatggatgaaagggcgctaataattactaccaagactaccatcgcgtttactcgctaagatctacagtacagtatggcgcacactgcattgcgtctaattcaagatcaacttgtacggacacgtcactgtctagctgtacacgcgtgttcatttgtacttgttaaagactacgtcttgcaggatgtctcttgacaggcctcgtcagcagttcagggacgaggttaaccgtgcaagtacgtgttagagcgaccaaatataggttggaaggggtctccttggtgtgctaactaagatgaaactattaaggtctaagcgtgaatcgtaaataaagggagttggtatcgtacagtgtgttaaaaagataactggtgtcggaaataccacggttcaatacactttttttcactaggacggggacctggaaaattaggcccgtgtaagcatattgtccgtggatagctcttcttgattgaaaagtcgtggcagcaaaatatccggaagtggcttcggcacaacgcgacttgctgcgtttacatatcacagagggctcggtacaaaaagcatagggcgaggtgtcacgtttcaccggtaggggttaacaaaacttgcgtttggcgagagaacactggttagtcccacaggacattctaattccactaaacgtggatccccgggtgcaggccctgccatgacaccgggagcgacggctaacacaagggtgtgcagcgagcgcacaaactctgcgagatacacggcttgcgcggtcgagcaaccacttggtggtctaccctattcgttcgtctcttatcaagatcctcatacctcttccttgtgccccacaccacgcacacacgacacacccaagtcaaccgcaacacacgaccacacacaaccaacacaacccgatacaaaccacagagcagacccactccaggcgcgcgacgccggcggccggcgacgagcgcggacacagcgcaaccacgcaaccgacgcaccgacaacgaaggagaacagcagagacaagacaccggccacagccgtcaaaggcggacagacaacgaaggagatcagacacgaagcatgtggaggacaacgctggaggcggggcaacgaacagcggacgcaaggaggcgacacagaggagagagacaagaggagaccgggcgaacggacgtcgagagcgcgacgatcaagcaggcgccggacgagacgaacatacgagacggtctgcgagcggcagcaggaacagaaacggagacgcaagcacaacgagagcgcccgcaacgacacgactaccgagtcggctaggagcgcgagcacaccgcccagcacgccacaccgcagcggatcgaagaaacaaggaacacatagcacagcacggcgcgagtacacagcacacgcgatcagcggcaggactgcagaccagcagcactgacatcagggacagcgaagtacgactgccgcacgcacacacc

SEQ ID NO: 607087 - DNA, 167 bp, Homo sapiens
aaacccccttgttttttaaaaaaaaaaaccccccccccccccttgggggggggaaaaaattggtggtttttgggaactttcccccccccccttttgtggggggggggggactttccccctttttggggttttttttttggttcccccccaggggctttgttacccca

SEQ ID NO: 607088 - DNA, 194 bp, Homo sapiens
ggacccaattccccctttttcccccccgggggggggaaagggggcttttttggccaggggccccctttttttcccccccccctttggccccggggggggggttttttttttttttggcccccccccccctttttccccccccctttttttcccttttttttcccgtttttccccccttcccaaaaaaaccccca

SEQ ID NO: 607089 - DNA, 242 bp, Homo sapiens
tgcaatcctgcagggcgaattttagaggatcccctccactagtgtaggtggcctgctgtaatgttagcggttaggcgtacggccagggctattggttgaactagctgtctgatgcccgccataatagctacagttcaattacactgtgtaaaagtgccttgcggtaagaagtgggctaagccattcataaaggtacatagttagcgaacaagctatgatcctacctttacacgggttgccaa

SEQ ID NO: 607090 - DNA, 783 bp, Homo sapiens
  misc_feature (52)..(52): n is a, c, g, or t
  misc_feature (62)..(62): n is a, c, g, or t
  misc_feature (69)..(69): n is a, c, g, or t
  misc_feature (91)..(91): n is a, c, g, or t
  misc_feature (93)..(93): n is a, c, g, or t
  misc_feature (97)..(98): n is a, c, g, or t
  misc_feature (250)..(250): n is a, c, g, or t
  misc_feature (444)..(444): n is a, c, g, or t
  misc_feature (477)..(477): n is a, c, g, or t
  misc_feature (632)..(632): n is a, c, g, or t
acagagaaagcacggaggaaacaggaatagaacgcatgaagccccatgaaanccggaagagnaggaganagaccgaacacccatgaccccntngagnnacgagagaagaacgaatagacacgaacaggaggaaaaggaaacgacaggggaggagagagtgcggcaggagcgccccacagaggagacggcaggacaggaagggcaccgaaaaacagagaagagaagaagaaaagaagacgaaaagaggacngggaaggacgaggacagaagagagaagagaagcagagcagagaaacagaggagagaagagggagagagagggagacacgagaggggagagaggagggaaagaagaacggagagaagcaacggaagagcgagagggacgaggaaagaggaaaaggaagagaaggacagacgagaagaacaagacagaggagaaanaggaggcgcgagacaaagagaagagagagaaanaacgagagaaagggaaggcggaaggaaacaaagaagacacggcaaagagaggagaagaggacggacggagggacaagaagggaaagacaagacgaagacgaagaggagaagacaaaagaaggagagacaaaagaggaagaaagcaaggagcaggngaagacaggagagacgacggcgagagaagaagaggaagcaagacagagggagggagaagggaagagagcagacacgagaggaagaaagaaggacgagcgagacggaagaacaagagagagacaggagaggagcgaggcgagcagagagcgc

SEQ ID NO: 607091 - DNA, 163 bp, Homo sapiens
caatcgtggcgaagttgctcgtgatgattacgatgaaccaattatttcaaattatcagttcaactttatccaacaaagcaaatcaggcgatgttggcaatgatgataacattgtccgtattttggttgacccagcagaaagtgaacgcttgcaagctggtttg

SEQ ID NO: 607092 - DNA, 192 bp, Homo sapiens
ccgactagcccgacatggacagggccggcactggtccccatatggcagcgtgggtccccgtggaaaccagcaatgcacctttcacagtgctcaccccctgtgtgaccacggtgcaggacagctcctcgtcccggaagtaaggtatagtcaggtgatgcaaactcatcatgggcactgtcgggctagtcgggg

SEQ ID NO: 607093 - DNA, 869 bp, Homo sapiens
gggggcccccattttgtggccaccaaatgttgtgaagaaatatgggcgtaagatatccgccttgttctcgtgttgggagattcgtgtgtaaggggaactctgccgcgttttcgctcacggattaggttgttttttctccccccgggtgcccccctcgtgggggacttcttctgccgccctgtctggccgcccacctttcgtgggtggaaaacaatgggggttgggtccccccccggggtgtttccccccgttccgggggtgttcgcccgcttttgtccgccccctctgtgggcgccccctctatttctctgtgcggcccctcttcctctgcggttaaggggggtttttatattgtctgttcccctgcgtattaagggggcgccccttctccacccgtttttaacaatggtccacttgatgcgccccgcacattccaggcgttgagctcccctcttttctaatattttttttcaattatgttttttcccccgcgccaaattttttcctccccattatgcgcccctgtaactcgctttttattgaaatggtacgccaatacctctggctttcgatagtgctgtcatttgtggaaataaacatgtcacacacgccgcgcccccccccaagggcggcttatatagaaaggaaaatggtgtctccacataatataggcgtattctttgcgcgtccactccggcaccagtttatggttgcacaccacgccccgagtcttttatattgcgggatcctctatcaacagtataagcgattcctgtatggtgcccaccgcgtgcagttcccgcgcgttcacgctcgcggggcctcttcgaaaaaatctgcccacaacaatagatacacagcaaactaca

SEQ ID NO: 607094 - DNA, 434 bp, Homo sapiens
tgatggtggtggcgcgtgaagttactcgagtcagagccgtcaggatcctgacttgcggagtggctaaagggcttcggatgcatggatcccagcatggcaaacagactttgtagtacctgcgctatgaagacacgctcattctggaagaccagtcaacaggtgagaatgatatggtgatcatgagacctgtaaacagatatgagtacaagttcggctttgagctgcctcaagggcctctgtgaacatccttcaaaggaaaatatggttgtgtagactactgggtgaaggcttttcttgaccgtccgagccagtcaactcaagagacaaagaaaaactttgaagtaatggatctggtggatgtcaatacccatgagttaatggcacctgtgactgctaatggcgtgtcctgcatgttcattcctgatggccgggag

SEQ ID NO: 607095 - DNA, 514 bp, Homo sapiens
gacgcgtcttgctattgagatgtcctgtatcagcagaggcataccaatgactcttctagcggtgtacgagctctatgattagtctgtgtacccggtgtgcatatttgctcaccgaaacacgatccagaatggctctttaaaacgttatcatgcttacaggtgattcgcgattagacaatttgacaccatctggaccgtgtatatgatcacacgggcttgttatgtttattgtcgtgaagggccatgatctgcttgcgcctcctcctttgcgcctgaggacctgtagacataaccagtgacatgcataaaatgcccactgcctgtaacagccacctggagaacttcataaagatgtctcacagccctggggacacctgcccagtgggccccagccctacagggactgggcaaagatgatgtttccagattacactccagcctgagtcagcacccctcctagcaacctgccttgggacttagaacaccgtcgccccctgccccacagagagagcgt

SEQ ID NO: 607096 - DNA, 556 bp, Homo sapiens
ttatccttgtgtccaaaacaactaactgaatactccaatgcccaactcattttgaatgaatgaagctgccttcattgcagggtcgggtggaggattttgaactcggaactttggccttcagtctttgttattacagtttaaagattcattctcgggcatggaggaacaatttaggtcaaaatcacaaaaatctgaaataatttaggacgaggcgtaaatttatctgcaaagatcaacacgctcaaacgaatcactaatgctcatcagtcttttacttaaagcaaacaaggtggagggtagctccttgcgaaacctaccacctgcctaaaagcgcagtggctcgggtggtccagtcccggagactttcttggcacttaaggctctgcccacgggccgccaagtggcggaagagcctcacgcacgacgtgccgcctcacactcccgcggaggcatcgcgacgcagcgacggcgtgggcggagaggccggcccttcctctggcgccttcggctcctccccctgcgcctcacacgctcattgtgaagcgacagcggccgc

SEQ ID NO: 607097 - DNA, 176 bp, Homo sapiens
taagctgtggaagacgggggggttggtactttgtttttttttgagacggaggcttgctccgtcgcccaggctgcagtgcagcgtcgcgatcttggctcactgcaaactccgcctgctgggtacacaccattctgatgcctcagcctccggagtggatgcgactgcattttcacgcc

SEQ ID NO: 607098 - DNA, 315 bp, Homo sapiens
gacagagggcatggagaccctgcccggccagaccacagagctgacagagggcgtggagacgctgcccagcctctgcagcacagcccaagtgtggtggggcacactgccctccccagtttcagtcctccctgcggcacattctgttcccagcagctgcctctgacctgaggcaggagggcagggggcttcggtcctgccctgggagctggggagtgatttctccttggggtgggagggtcgcaagtgacccaccttcctctcggccctgcttatgcccagaattaagaacagcagatcccagcactgtgcgctcgg

SEQ ID NO: 607099 - DNA, 263 bp, Homo sapiens
cctccctggttgctgtcgatggtaggccggccactctctctttgcgtatcgtagcttgaccatacctcatttattctcaggtccttggtctacttttgtgcattttactcccagctggctagtctcgcttactcagtttgttgtgatctttgggattgtttaatcttcctttcatgtttcatctttggtttaagagaatgctacttattctttttggttgatgcacagcaacctaagtggaggccatgctaactagtgggagg

SEQ ID NO: 607100 - DNA, 1683 bp, Homo sapiens
  misc_feature (1132)..(1132): n is a, c, g, or t
ggtgatgtgttgcgtcgtcttcgtttgttttgttgtcgtgattgtctgggatggatcgctggggtggtggaggggcgttactgcaggatggtgggcgcggtgtgcgagcagcgtgttttgattatggggaacccctgggggggtggatgatctgctgtagacgcgcggaccaagggtgacacgtggatgtggcatgttttgtggtctcggtggagatggcgagggcgtcccgaaccggtgggggacgcctggttgtcaggaacttggttgaaagagtggggcttgttttagtatccgctcgagctctcatgtccctcgggtgcgttgcgtagagtctcctttgtgggggggggttaactatctctaagtagtttttctgttgttagtactcttttttcggataggccttgtgcgggcggttgagtgtttgaaaagagggtggtggtcttgctcgcgtgtttgtccctctcggggacccattgttgttgtgagtggggggcgaggccgtgtattactctcgggtgtagtcatgcctctgttgcgtggtggaagcgcccgcgcgtggtgtttgtgtgtcgccgtgtttgagcgagtttgtcccgggctgtgtgtttgggtaaagaagggtgggaggtgcacacttgtgtgcccacgggcgatggtccagccccccggtggtgggggggccttgtgtttggttccctcggtggaggcccctgggaaaggtgagcctcttgtgttgcacagaaccaactggatggtgtctgtgttcccacgaagagtggtggcttttgggctgataccgcggctggttgtagtggcgagagtgtcgtacagctggtgccgctgaccgcgttgctcgcgccggcgtgagaggtgtgtatgtgcccgtcctggtgtttgagagaaaatttgcgcgcgttcttgttaggggaattttgtgtatagacacacctggtgtggttctgagaacaacatcgcacagcgggtatatatgtgggtgtgccacacgctttggggcccacagagcactctcactcgtcgcgagagagaagccgctgtgtgttccccccgcgtgtttgtggagaagggggatacgcgagacccggcgaaacttgtgacacacatgtgngtcacacgtgcacaggtagaccgcgccctggccacacgtgtgtctctctcacatggagacgtggagatctacatgggcggttattgtgacacatgtttgttgtggggaataatgggtgagagagacgtgtctctgggagatctctctggtcacagaggggtgtgtctcccacacatgtctcctgtgagacagagaggagagcttgtgttgtgcttgctcacagcccacctgtgggcgcccgcgcacacacaggcctctgtgcgccactgtctccaccttctccctctagaacccagggcgtctcatctcatctcactgtctgtgtggcgtctcaattgtgacacccatggccctcttcttaccacgcccacggccctgtggccctgttcaaaggccagaacccaccgacacccttgaatctcccgggtggggaagtggccaagagatagctggaactgaatcagaccctgaccagttgtttcaggcaattttagtttctaccatctgtattgaacacctgtggcccaaataaagttgaaattttacccacc

SEQ ID NO: 607101 - DNA, 391 bp, Homo sapiens
  misc_feature (370)..(370): n is a, c, g, or t
catggctccacagagcaaattttacttcttaggctgtgtaaatccatagtctagtttttgtctaaaatcatttcttgttcttctattgctcactactttacaaatgttcatttggtggaaattcttatcactatatacaaggggggaatatctctcagaattatttttttaaggggaaaaaataacctaagaaatgtattttaaaagtcatccagtgaacagcgaggaatgcatgctttttaagttgttatttaggaatgcttttattcatcgagtgttttttgtttttttacaaaggtaagagcagtcctgacaccagagggttggttttgttacctaaccgatttttttttctgttatgttttactcnttaatgttactacttacattt

SEQ ID NO: 607102 - DNA, 157 bp, Homo sapiens
tctcacgtcgcctgccgtcgtgcgcgtttggccgtggccgtcgtatacaaccgtcgtgcgggggcttacggacgctcccccgtcttcgcctggggggctcctctcacgtcgccctgcgggcctgcccgcttgggcctgggcgtcgtttacacccgtc

SEQ ID NO: 607103 - DNA, 540 bp, Homo sapiens
  misc_feature (62)..(62): n is a, c, g, or t
cgggttttcctcggtgttttgatctataaatacgaaaaataagaacagcaccggtgctgaanctatgtcatcccatgaatggatgaactggttgaaaaaaaaatagcctgatactgggagccaaaaaggccgaagggatcgtgaccaactcagcattccactggaggctatatgatcaatcagcaaactgtttatcctgaatgtaggatgtgagtaaaactcacagctgcgcctgctgccagaaggtttgctgagggcggtcactccctggcactggggtccttgaagttatctactgggaaatctagcgcctgttgttcgaaggatgcagtctcgcaagcctgctgtgaaccaaacggcggactgccgattacccgacaatcactgcactttgtcgcgatctcttttaccaataaatacggagggctgtgtaaagctctatctcttttaccaataaatatggagggctgtgtaaagctcagggcccttgtccactagaggcaaggtgccccctgaccccttctttcaaatataaaaaaa

SEQ ID NO: 607104 - DNA, 429 bp, Homo sapiens
  misc_feature (51)..(51): n is a, c, g, or t
  misc_feature (53)..(53): n is a, c, g, or t
  misc_feature (57)..(57): n is a, c, g, or t
  misc_feature (60)..(60): n is a, c, g, or t
  misc_feature (66)..(66): n is a, c, g, or t
  misc_feature (76)..(76): n is a, c, g, or t
  misc_feature (84)..(84): n is a, c, g, or t
  misc_feature (86)..(86): n is a, c, g, or t
  misc_feature (88)..(89): n is a, c, g, or t
  misc_feature (109)..(109): n is a, c, g, or t
  misc_feature (115)..(115): n is a, c, g, or t
  misc_feature (123)..(123): n is a, c, g, or t
  misc_feature (145)..(145): n is a, c, g, or t
  misc_feature (189)..(189): n is a, c, g, or t
  misc_feature (222)..(222): n is a, c, g, or t
  misc_feature (239)..(239): n is a, c, g, or t
  misc_feature (277)..(277): n is a, c, g, or t
  misc_feature (300)..(300): n is a, c, g, or t
atctagagcatccccccgtgagacaactttacagagcatttaataaaattngnttgntanccttangtgtggattngagaatancncnnagtaggacactgacagtaantccaangtttatgntatctttccaaagtcaggagtngacatacccctttgaaaaattattctgtgcttaagaaaataatntgtatttaaaacttaaggggtgtatgacatagnacagaatacaggttgtncctagagaagttttaaaagggagggccaggattaaaanctaacccagggagagggttgggncataagacattgttttttttagagatggacctctgagctctgatgcaactgcctgcatttatgaatgcctttgcacagctaagtctgagtgcagatttatattcctactacttagcacgcagaaaataa

SEQ ID NO: 607105 - DNA, 498 bp, Homo sapiens
cctttcctttttggggagttgttatgccatgatctttggtatttatgtaaaaggattatcactaattctatttctgtatgtttattctagataaggacatgttgagggcaagccgccaaattacacaggttaaggttagagagattggccagcaaagaactgtgggaaccatgaacttcgtcattatgatttcattatcacaggacaataggagggtgtcttagtgcccacaacagattcacatgtcagccacatccagaggggataccagcatttggtaaagaagttgaattagggccggagtgaaccaagtcttcccttatggttttacttttgttccgaacatcttacgtatcatgtgatccgcagtattccggtggatggttcatgtaccgattgggcttcttcgttaatagatctatttcatataatataatcgtggatcttttgatacaaaggcctccccctgtagggatatacctcccgattccgattccc

SEQ ID NO: 607106 - DNA, 114 bp, Homo sapiens
accccctccacttgcaaatcttacatctcaattcccatcctaaaaagcactcatacttaatgcatccccgcagctacacacacacaacacacatgcacactgcataacacatgc

SEQ ID NO: 607107 - DNA, 167 bp, Homo sapiens
atagacatgtaataagattcattcagatatggtaagagctataagaaaaggaagaagaggctgatctcaaagggtcttccctggaggccggagaaaatggaatttctatgcactggctatgtgttggagttggggctgggtgggcattgtggagaagtgtaggggaa

SEQ ID NO: 607108 - DNA, 2011 bp, Homo sapiens
ggcgacagcaccgctgccgccgtctctaaggtcgcccgggtcccacctgccgccaccattgcctcgtgggaagcctgcagcgctggcctccctggccatgccatgcctgccccagaactgcgcccatcatgccacatacacagaccacagcctcacaatcctcacgcgaacatcatgcccacgacaccaccactccacaaatactaacgttaactcccccataacatacatcatcaattattttctcacataacacctaacatacatgaacctaccacaatcttaataccccacccaacatcccccacacaccccaaccacttaaacaagaaacctaactacaataccactctctgcaaactcagagcgggcggtagccgtctcggccgccaggccgggacgagcaacgggaacgccgcacagcggaaaggggaggcggcacacaggagacgcggaaaggcgacgggccgcgtcacccaacgcttttcatcataacacccacctctacctcctctctcccactccaccccgacctcccttctcaccacaaccagaaccaagcaaacgcagcccaccctacactaaatcaccttgccctccctcctctctaattattaagtacatccagttcaactacatacccagcgtgtcagtctatcacttcatagctataacaattctcaattccataccctataagcctgtctaacattacaaaacacgagacaaaaagacacgaatgcctcttatatattgcatcttcccccaccaccactccaacccacacatcccaaacccacaaccccctcacgccacacacccaccttccaccatccgattcacgaccgccccagcaactcacaaccactcatcgaaacccacacatagccgaccacacaacaaccaatacacacactaacaacacaatacaatccactacaccccacatccacataaaccaccatcctacaatccaacaccaacacacgaaccacacaaaacttcacgccacgacacgctaaccgcaccacgcacacgcacaacactccatacacacacctaacgcacacaccccacacatcatagaacaaccagatcacacccacccatcaacgacccgcaactacaccccaccccgccagaacgacggagaggcgaggagggagacggaggagacgggtgacgaggccgtgatgagggaaaagacgagccgaagagggcggaccggggggcagacgcgtgaggcccggcggcgggacggggcggcggggggatggacgagcagggcgtagggcgcgatgcgagcgcagcgaggacgagagcgggccagatggggggagagggaagggggacagggcgaggagggagtgaggagagacgaccagtcaccacttcacgcagcataagctgaacgctaatgccacatagctgtctaactcatctgtcgtctagtctagcacgacgaactaaaatgttagttcggacgctggcttacctaactgaatagactcacaggactaatagacactatcacatatcgatgagatatctacactaacgatagcaatactaaatacacacctgagtacgacatacacaccctgaccactccttacgactgtgtctctccacctggacatcttctccagacacagtactacatcatgtacccgatacgtcccactggcttacgctaatatagaacgacacatcatatacatatgaactcagctcatactactaatgagcacgacatatgatccgtatgcgtaactcttaattacttcgcctacaccacctccacacatacacctctcacgattaacagcacaaccatctacaccacgtatagtacgcaccgctcgctctaccacacacaacttacaacacagaacaagcacgacctccctgctactccccgcgagcgtacgttatatacccgctaaagaaacatagctcaaactatcacgtgtgtcgatgagagtgctccttacgaccatcacgcgctact

SEQ ID NO: 607109 - DNA, 539 bp, Homo sapiens
gaggcaggaggacatcagaggaagacacaccaaagaaaaagaagcacaaaggagggtaagaggctttcccctctttttcccaaaagaacgaatacccatagcctgtatcccggatgtaggaacactgatggaagctgacccgagtgaagtgcaccccgtgtgccgggtggtattctgattcttacgctgcgcgcctgtcgtcagcctgtcctcaccgcagcctttgagggggtgccgttgtcaggggcattttcagtgtcgcagggacctgcccaggctttagggctgctgtggtgcggctgggctgcacctggagtctgactccagtgcctgtcctcttagccacagtgtgtgctgccccactagggacaggaggatggtgagcaacgtgttgttgacagaggccaatgtagaccactctttaagtagctagatttctgtatatctgtcagttattttatgtgtcaacatatagtgtgcatatattcattgttaattatgtggccacatttattaaatagacatgtcatttaacttga

SEQ ID NO: 607110 - DNA, 413 bp, Homo sapiens
ctcaacacgccaaggcaaagcaccagtagtcacacaagagaaaagcaagagcagcaagcagcacagagctagagaaaagaggagcgtctcatcgggaggaggtggccgagagcaagcccttcgtgttcgccgcttcgcccaagaagcagcagcaggaggaggaggaggcggcgcccgtccgccgcaggaagccggcgcagtaccggggcgtgcggcgccggccgtggggcaagtgggccgccgagatccgcgaccccgtcaagggcgtccgcgtctggctcggcaccttcccctccgccgaggccgccgcgctcgcctacgacgaagccgcgcgcgccatccgcgggcccaggccaagctcaacttctcctcctcctctgccgtcgccgccgcggccccgggagcgcgcaagc

SEQ ID NO: 607111 - DNA, 887 bp, Homo sapiens
taatggaacgatatatggatacagatatatatatatatacatatgtccttaatagaggaatgcttcatatatcaaaaattatatcctgatcaccttttggttaatggtaaagtatctctgcttatccattgctgaattcgataggatgtcgaaatgctggtcaccaaaacaaccggaaactgagcaaattcatttcaaccaacatcaaaacttcagcttctcatagtaaaaagctgaatgtcactaaatattcccatatctacaaaaaaccaaattcttagcaatgaaatgtgctgtgtaaacaccacaaacttcacatcaaatacttctgtgtataggacacatatgtatagtaggtagatagaaaagtatacaaaatgttggtggaagtatcttatttcagaatgaatggggaattgccaaagatgatccttcagggcattatgaaattattcacatgttctctgtggtttatataaattccttgtaatagattcagaattgaaaaattcttggtgaaggtcttcttaaaagtgtcccaatttatctcaaaaatctcaatatataggatcagtttaaaccataaagaaaaccgtgaattcctcaaatgttggacatgttccagaccagctcttaaaccggtatgcttgggcaccacgggcatatagggaggagcccatctcatgctctgagttggattcaatactcctattgcataaatgcagcgtggcattggaccacacttgcgctttcctagtattagcacgtaaaaaagagcgtcacaattgcggcttacagtcaaacatgatattaacaagccgggcttgcaccgcttcaaaaaaatttccccctcgtcaaaacgcacaccacaacgccacaagataaac

SEQ ID NO: 607112 - DNA, 434 bp, Homo sapiens
  misc_feature (166)..(166): n is a, c, g, or t
  misc_feature (433)..(433): n is a, c, g, or t
gacggggtttcatcatgttgctcaggttggtctcgacctcctgacctcgggtgatccaccagtctcagcctcccaaagtactgggattataggcgtgagccactgtgcacggctgctgacccacatttaatagtataatgacattccctctaacagtgtcattttngttttctttgtaccaataggtaatttgtcgtccagatgctctgctatatgtcaagtatcatttttctattgaacacaggtcatccttcagtttcatttttctcttcaccaattggatgctgcatacctggttttcagctcattcatgtgttaaaatcccctgtgtcctagatcgtatacctttctctttcttgatttactttctcattttatagagcacatcattgagtagaaagatggaaaataattttcgggatttatacaattna

SEQ ID NO: 607113 - DNA, 127 bp, Homo sapiens
caaaggaacatttccagaaatattaattaattatgactcttcaaagttcaaaatttggaccaagaaattggcatagtttatgaagctaatcctggcgttccaccagcaaccataagtggttccttgt

SEQ ID NO: 607114 - DNA, 205 bp, Homo sapiens
aatcgagctcggaccgctctcgtgaactgtcatgttcaggcaggactcaacaggaaaagagaaccactctaagtacttaaaggagagggaatgcaatgcagagaactggttacacaagtgacagaagagcccataagccaaacagaggatggtgaagaacaggaatccactaccactcctaggctgaagggacaaaagaaagagg

SEQ ID NO: 607115 - DNA, 669 bp, Homo sapiens
ttttgtaaattcccatattgcattcagaacaacttcacaacattatcagtgggagtaaatgcttcaacaaatctgctcctccctttttgctggacagattgacgtctattttgctaaaacgggtgttctattatcaattgctaaaaagtggatctgttaagcctgtaatcaaatgtctcacgtaggcaaactgtctttgcccattcataaattcgattttgcactcagacagccttgttctgacaatcttgatggcacgtctcctatatattctgatggacggctgagaggaaccttattcctcatatgtggagttcccacccatctagtgacaagtgcttatcgactgtgctgtgttttttgctggcattaacacacgatcctgtggtgtgtctagggtccttgattctttgccagtcatcccctcacttggcagacatagcgcgctcactcccgatttcaagtcttagactcacattgtgtctcagacagtaaaatttcttctcatctatattatacaattaaccagccgggattggtggtgcccttctgttctcctattcacttggcagactaaggaaattcacttgcatctaaacggcagccgtagctgtcagtgagttttgctccatctcttccccccagtctgggtctcaaaaagctacatcg

SEQ ID NO: 607116 - DNA, 861 bp, Homo sapiens
  misc_feature (76)..(76): n is a, c, g, or t
  misc_feature (80)..(80): n is a, c, g, or t
  misc_feature (123)..(123): n is a, c, g, or t
  misc_feature (130)..(130): n is a, c, g, or t
  misc_feature (158)..(158): n is a, c, g, or t
  misc_feature (861)..(861): n is a, c, g, or t
taatgaccctcaccgcatggacaggcgcttgcaggccctcatgatagctgggtcatgcctcggtgtgtcctggagnatgntttgtcctcttctggacgagcagtatgattggctaccaagagngtgcggngcttctcgacttagaccctgaagtggantgtctgaaggccaacaccaatgaggttctgtgggcggtggtggcggcgttcaccaagtaactcgtgctcggggtgaaccattctcctttctctcaagtaaaccagtagtttttcttctgtggacttctggtatactgtaattgtactttcccacactataatcggcttctgtttacaaaatggtgggtggcgtttttctttttgtacgtgtacaggattccgctggtacgagaggcttcctctttctgtttggaaaaaagagtttcactgcatatggattccattccctgttgccattcctcacctgtacctgttgggttgcggtctacttgacttgcaaagttacctcaggctcctcatacgcacaggtttggatgaactcagttgagttctcatatgtgcatgtacatctagagtgcgctaaggttgagagcggagtcacaaaaggcttcagttcgccaggtacaatctgatctcataggaatttacatgaatagtgaaaggaaactaggacggttgtgtctgaaggcagtagagtaaaaagggcggagtggccgtaactttgtttgaacgggtgagtaaaaaagggatgtgaagggtggggaggggatactgagaatggagaagtgacagtgagcacaagtagaaagtgggcgtgtagtgaaactatgcgaaagagggaagacaaagagggaagataatn

SEQ ID NO: 607117 - DNA, 238 bp, Homo sapiens
caaactacaaggatatcatcccacatatatactctaacccattacacactcaacccatataacttcttgaaaacagtcatactattaacttttgtaaaacatgtaactttcccaggtcacaaagtacagatccctatactgtatgtaccctgaacatattatcccttcttatcattattctgagacagagtcttattctgacacccaggctggagtacaatgacataatcttggctca

SEQ ID NO: 607118 - DNA, 977 bp, Homo sapiens
ccacgcggtcggcggggccgtgcgcgcacgggacccggagccgagggccattgagtggcgatggcggcgacggcgatgtgccgggggccgtgcgggatagacgggaaggccccgtacctccccgtaagtccgtcgaagttcctgttgtgggggcctggtcgggcatgggacgctagcagttttatgtccgagccgcctggtacctggttgaagaagcggagtggcaggttgaagcggggagaggggccaagtactcggagaggtacaaacaccagtcttccactgcgcctcaccaggtgatcctggaagggccgagaggtcctgagggggcatttagctctggtgctgtcggactgggcctgactgcgtacaggccatgctagcaaccattaacccgtccttggacatctataaccggtgtctgttgtgagcgacctggactggggcgtgatggtactccccactggctttctgctgaaggctgtgattgggatgaccgcaggtgccactgggtgccattagtgggaacagcagacgaagtggctcttatccgcatgactgccgatggccggcttccagctgaccagcgccgtgggtacaaaacatgtgtgaacgccctgattcgaatcagccgggaagagggtgtcctcacactgtggcgaggggtgaatccctacgcatggctcgggccgcagtcggcaatgctgcccagttcgccttcctagtcccatcccaagcaggctaacgtggactcaggctacttctcttggagaaatcttgtgccaattctgtggcaagatgaatcaagagggactggccccacggctgacgcagtgcagggtgacactggcaagacccgaagtgccagaacaggggcagactgcgggaaaccagaacaaagaacaggctgcaaacaggcacagggcagaacaaggaactaacacgggaaagacaacagaaaagacccaaggacaaga

SEQ ID NO: 607119 - DNA, 816 bp, Homo sapiens
  misc_feature (290)..(290): n is a, c, g, or t
gcgaaagagaagacagcacgtgccaagtcctggaagggggactttaggcccgcatatcctggtgactgaagacgaccgtgactctgaatctgtttcacgcccaggcaagagatgacagtggtgcggggctaggctaaaaactctggaaatggccgataaataaaggaattcaacagtactatatacttagtgcagctaaatccactaggatctggggagagtgagatgtaggaatacaatgtatctcccatggtcttgggtatccttggcgtggcgtttcatcaggaggnagaagcatgatccgtgggaggagcaatgataagcaacacttgctactcgcgttggctctgtcatggacgcactcagcagagaacaaaaaattgcgtactagttcatagctcttcgagaaggtgtatgcgtgatcggccagcctacactgtggggaagctctacttgctacggattagaacacgcagcgtagagggatgctggcatcgggcacggacggatggaccgagggaccctggctgaaggagacgtatttgctagaagagaacctcatgcatggagcccagattacctcggaaggtgcgtcgaggctaattgcccgcctagtttcgaaacggctcgtgtaccgctcgtcaacgtaggattcccccccaaggttgtcacccttggcatggggaaggccaatggcgctgactggcttggctggcacggagttggcaatcgtgtaccaacatcgctgtgcctttacgtggggaagtggcttggatctaggactcgaaggacatcgggcttggccctttcccctgg

SEQ ID NO: 607120 - DNA, 135 bp, Homo sapiens
ttcctacactttgagaggcaaggcaagaggatcgcttgtgaccaagagttcaagaccagtctgggcaacagagcaagatgctatatctactacaggcatgatctgtagtctcagctacctgggaggctgagagaa

SEQ ID NO: 607121 - DNA, 979 bp, Homo sapiens
caccaccagacagcgtgaatacatctgcctacactatatagatgggaaaaaatagagaatcctacccaggagtggtggtgcatgccggtatggtcaggcactttgcggagcgctggaggcaggatgaacacctgcagcctaggcagaccagaggttgcagggagtgatagagctacacccatgtgcactccagccaaggtgcgaacggggaacaagatgtgcctcaacatacataagtgatgaatactaggcgctaaacatgtactacggaaaatagaagaatccctgtagtcggaatgtaatagagtctattttagtggtgtgtcaacactacgagatgtacatagatgcatttcttcatgtctagaagacacggcaaaggttcagacacaggagaatgcaatattctagcaacatttaccctagagctgcaaaggtcagaacaggaaaactgtgggagggtatactcgatatggtcgtacgaatgggaatttgctagtgcatggtttgtcctcctatcaggttcttactatcaatcacttaagcaaccaagtggaaattgattcgtgtcataataatgttataccgctggaaatagcgattgcttgacccaaccatctttggcaggtctaagagcaatcagggccatgagaaagcagatcatacggcatccgaggttgggcaaaagaacaagtgagattgctttctgtcaccgtgatctgctgtgtacctggaaaagcgaaaggttctcggagagttctaaacgctggtaaattaacttccgtatgttcggttacgaatcaagatatgtaagtgcgcttttattttcctatatccgtggacaaccaaacgcagcgcgagaacccaccgtagcgaaagtaaatagtacatccacggggaaagtaggaccagcactggtacagaaagaacagaccagagtggaaaataagagcgacagagactcaactacagaaccgaa

SEQ ID NO: 607122 - DNA, 136 bp, Homo sapiens
attgagggacatgagcattttagagcttttgctgcatagttagaggcttttcctgaaacacagaaccagttgacaatatattgagcaagctctgtacctgtatttccacagctccatcaacgtggtcactttaatt

SEQ ID NO: 607123 - DNA, 107 bp, Homo sapiens
aaaaagcccggaaaaacccccttttgggttaaataaagaaaaaggtttttgaaaaaaaagatggggtccccaacccaaaaaattttttttttgaaggggggccttta

SEQ ID NO: 607124 - DNA, 150 bp, Homo sapiens
tgtggactctataataggattgcgcgtatccctagtggtcatatcaacaatagggtatacgacctcgatgtgggatcaggacatcccgagtggtgcagccgctattaaaggttcgtgtgttcaacgcattaagagtcctacgtgatcgtg

SEQ ID NO: 607125 - DNA, 302 bp, Homo sapiens
gaggcgatcagaggatcgccgatatgctggctcatatgataatgaagacagatctgtcatctaccagtagttttaatgaaattctcaatttatatcagtgtctggtagaaataacttatcttagaggcaaggaaaaggacaaagttcattaagaatatgaaattttttcggtgtcattgtcccatttaggtttacttttcatatcatttaaagaaataatctttttaacagaagccatctatctacatattggcacatggatttactagctgatatagcagtaagtacgtaacttgtcttga

SEQ ID NO: 607126 - DNA, 237 bp, Homo sapiens
gggcctggccccagggggggggtgggggctccccaccccccatggttgcctgaagttttggccgggccccccggggaagggtcctctttttttggcagatgttggggggggggccccaccccccccccagccggggtttgcccccccaacgggttggggggggttttaaaataaattttgggggtccaaaccaaatgaacccaaaaaaaaatgattaaaactttccggaaacgggga

SEQ ID NO: 607127 - DNA, 357 bp, Homo sapiens
ctgacccattctcattgtcctgacctacactcatatccaagtttggatcccctcagcggatccaaaggacaggagaactcttcactggataaagtaaacagcatcaggtgaaagaattctgtcatttggagaatacccaacaaaaagctagttgtctgatcattataatctgaagctcatccatgcaaaacgagcttccatgcagcttgtttttgtttttgttcatcactgtctgcttttgtaaccatgcagcttttaaggaccataaatgtgaactaaaagccaaggatctcaatgtaattaaggaaagcccttacacaaagactttaatacacaattcaaataacacaattcagg

SEQ ID NO: 607128 - DNA, 328 bp, Homo sapiens
cccggggggggggccgggttttccccttttaaaattttttttggggggggcccccccccccccttaaaacgggtttaaaaaatttttttttttcccccccccccaggggggggaagggggggggcccccccaagttttttttttggttttcccttaaaaaaaatgggcctccctgtttttttttttttttggggggggcccgaaaccaatttggtttttgcccccccccccccccgttggggggggggtttttttttttaaccccccggggcccgggttctttggggggggggttttttggggtttttttttacccccttttttttta

SEQ ID NO: 607129 - DNA, 198 bp, Homo sapiens
aaaaaaacacttatacaagagtcaataatatatttaaatgactactaatacattctcattaaagcacaaatatattacattagtatcttaagtataacagtagtaggtaaagaaaaaaacaaaaatggtacaaaacaatcattgtgaacatttagcaagtagtaacactagactatagtataactatcacggtcctgt

SEQ ID NO: 607130 - DNA, 467 bp, Homo sapiens
tatccctaagcctgttcttcaacctgttgaatgtttcccctaaattgttatatggagatcctggacccggaagttggctgacatgaaacaggcctagcagtgcagctgaggaaatgctccaacctcaggatccaggaagattgcacatggcaccaaaacaatcatttaaaagctaatcctggccaggcaacagtagtcacgcctgtaatcccagcactttgggaggccgaggtgggctgatcacaaggtcaagagatcgagaccatcctgaccaacatggtgaaaccccatctctaccaaaagtacaaatattagctgggcatggtgcgcgcgcctgtagtcccagctacccgggaggctgaggcaggagaatcacttgaacccgggaggaggaggttgcagtgagccaagatcatgccactgcactccagcctggtgacagagcaagactccatctcaaaaaaaaa

SEQ ID NO: 607131 - DNA, 183 bp, Homo sapiens
cctttttttaaaacccccttttttttcctttggggccccggaactttttttcaaagggttgcccttgaattggggacttttgggaaaggtttttgggggggttggcccttaacttaacccggggaaattttttggttgggttttcaaggttttttgaaaaataacctttttgttcccccggga

SEQ ID NO: 607132 - DNA, 671 bp, Homo sapiens
ggcgagaccggtccgcccggagcacagagcctcgcctttgccgatccgccgcccgtccacacccgccgcagctcaccagtggatgatgatatcgccgcgctcgtcgtcgacaagggctccggcatgtgcaaggccggccttcgcgggcgacgatgccccccgggccgtctttccccttccatcgttggggcgccccaggcaccaggcgtgatggtgggcatgggtcagcagggcatcctatgtgggcagacgaggcccagagcacgagaggcatccttcaccctgaagtacccccaatcgagacacgagatcgtccaccaaacgtgagacgacatttggagaaacatctgggcaccaaacaccgtcctacaaacggacgcttgcgtgtggctcccgaggcagcaacccccggtcgcttcgccatgaaaccggagggcccccccttggaaaaccccccacagggcccacacccggcggaacgcacggaatggacacccagcgactccactgctgcggacaaacccattcaaacgccccccccacagcgccacgtggactaaccggctaccgcctactcacaagcgcctgggtcgcctctaccacccagcgtgcataacgcgccacttcatggcgcaccgagaacccactgggacactcgacgactgggcacc

SEQ ID NO: 607133 - DNA, 628 bp, Homo sapiens
  misc_feature (247)..(247): n is a, c, g, or t
ccggcacatcagcatttatttaaactctgcactgtgtcagcactgtcctatgcactgaagatacaaggggacaaggaaggggcctgctctcatggagcttccattctgatgagacaggtggtaactgactggaaaacataccaccgctggggcaggtgctatgaaaaaaaaggcagcttgctgaggggacacagtggcatcatggatggtcaccgatgcctgggggccaagaagcttgtgcacaaanccctgctctccagagctcagtcaggctgcggagctccttcttaataactccggatgaggcaagagtaaggcactttattctatttcatttttagtaacattcgggtcaaattaatttggggttttgagaacagttaattcactaataaaactggcttaacaccaaacatggggcttgcaagataggaaaactctccctacgaattctgccagctttcattccaatgggtcaccccttatggcttcaactctggggatacctcttttttgctgcgcccatgaacaagtgtggggggagaacccagggaatgcaagtcaggggattaaagggagggggcccccttttttaaaagaaatcccaggggcgggggggttatgattt

SEQ ID NO: 607134 - DNA, 703 bp, Homo sapiens
tggggcttaagcacttgttgataatcagcagacgtgtagggtagggctcaagcctactcccccaaacccgtcttaactccctaacatctgtctcttcctctacagattgacctaactgctttctttcagcctccgtggctggcccctctcttttgaaactccctggttcccgcagctcggagttagaagtcgacctcccctcagagacagaggtggatgggctgattatgatacgtgggtggatacgctggtcaaaggacccacgggtgggggcgtgcactttgacagccgccgagggaaacacgtgatgtgggtgactggtggtaggcagtctcgggttttctcctttgaagctcttactatgcttgcactttgaacctccagcaccattccgtgggtgttacgttgtttgacaggtggttgacatgccgacgccatgtgcagcaggtgaaggagagccaggccatgtagaaggcccagccatattcccaaactgtggtggtctccagtcttcgggacccatgttgacagctcgcttgggaagacttggtgaatacttctgtggtgggccaacatccccagtgagacctgacgggacgaggacaacagccgaaagggcgctccagttgagcccccgggccggttccccggtgttaaccgtctgttttaccgaggactggtaatgagccatatggaatgcgtc

SEQ ID NO: 607135 - DNA, 238 bp, Homo sapiens
attagtaccatcatcatccgtcattgatgatgatgatagatgatccttccctcatctatccatttacctggttcatccttccttccatcgatgcatccttccatcatctacccatacacccatgggtccttccatccatccatcatccatccatccactccttccacttatccactccattcaccatgttcatctatagatatcttcatgggtgctgaagggattctccaagaagttc

SEQ ID NO: 607136 - DNA, 518 bp, Homo sapiens
ctctttcttttcctcatgtttgacttcacatgcagcctttgattgtttgtcagggtaatctgctgttttaactcgcactgaaattgcttgtaattgtcagatctgtatatttttaggactactttgcaaatgttttgggtatatatatttttattattaataaaatgttgataaaataatgatatacttatgtttataaacttagccagaatttcttaagcaatggcttgacaatcaactggaagtaaacccccagtttcagttcctctcaacagttaatattaaaattatcaaacccattacagttaattaatttacacaatgtttttacataacattgtttgaacaaatctttattaaacttcatattatttgtattttaaagaatatttggttaagcattttcagtttgatttattgaactccgctgtcttggtgaaccagcacaagtgcacagatttgtggatattgaaatatattactaaataccaaaaatatgcaaatacaaattattaata

SEQ ID NO: 607137 - DNA, 291 bp, Homo sapiens
actgtcgtctctggagcagatgacttagataggttgatacaagctcgggctgctttcacatgcttggcacttagattatattcgcaccacgttttttcactcatgaattatcctgtgattctagcagtgcctcccgatgatcaagaccatccgagttgtggaattggcaatcttaagaacctgtgtttgtgtgttaacagggcacaaccattattgtgatggtgtgctcaggttccaaccccaacagaaagacttgggtaagtattcagccagccctgggaacagactggt

SEQ ID NO: 607138 - DNA, 280 bp, Homo sapiens
cgttgagaacatattatgaacaacttattgtactgaaccacttagttcgatgactcgctgatcatgaacaacctgtgtgtaatattattccctacaaacgtagcacccttcagcaggaccctataaaactttcctccagcccttgcctctttgcaggtagccccttctctgctgagctgcccactgcaacatattttcacaatttctctaataaatctgcccttctttacctacaactatcttggtaaatggctttaccacctgcaaaactgaccctagg

SEQ ID NO: 607139 - DNA, 181 bp, Homo sapiens
tggcggtcgctggggctgaaagcagctcctcctccacgtgcatgggctgtttatacctcccaaactcctctgcaccgccatgccctgcttatggtcccttctgtgtgctatgtccccagccagaggccgagggcaaacactcggtcccggcccaacactctggtgctgccagggaagaact

SEQ ID NO: 607140 - DNA, 262 bp, Homo sapiens
ctaagaaagcatattaaattaatctagcttgttgtgagggagttaaatctgtttagatgtgcaccagtgtgactataatagtttggtctcaacccatttctggcctgcggctgcagaaggttgactcccagcttgctttcatttgaaagatcccagcaacaaacacatttggcatttccagccaaacccactttgtgcagcgaaggaaaagttgaggcgtgcctctgttgttttcccccaaatcattaggcagaaatgtggc

SEQ ID NO: 607141 - DNA, 305 bp, Homo sapiens
ctgcacgataacagctctcagcctctgtggtcacgatgcccttctctgcatgaaactatccctgtctctctcttagaatggacacttgagcgatgtaatttcagggccctatctggttaatctactcaggatctattcacttaatctgtatcttacaaagtctccttttataggccatatgagctgacagtcacaggtattaggggattaagtagtagatgtcttcggggtctgttttatacctctgtggcccagacttcctcagctgacctcaccccctcagactcatgctgcctgaagaactc

SEQ ID NO: 607142 - DNA, 230 bp, Homo sapiens
cctacctgcgaagctcggagctgcacccggtgccaggagctgatcttcgaggagtttgccaggttcatcctggtggaaaacacgtgcgaggcaggtggtgctgcagaccgtcatgataggacatccgtgcaggactgtagaaggcgaggccgcggatgcagagcgaagcacataccatctaccggtgacagcattgggtcactgccctgatatagcgtaacccgaacctt

SEQ ID NO: 607143 - DNA, 229 bp, Homo sapiens
ttttaaaaaaaaaaagggttttggaattaaaaaaaaaaaggggttcccctttttaaaggggtttcccaaaaaaaattttttttccctgggggttttaaaaaccttttaaaaaagggttggggaaaccgggggggtttttcccaataaaggcccttttggggaaaggggaaacttttttttttaatttgggatttgggccttttccccccaaaaaaaaattttttttcca

SEQ ID NO: 607144 - DNA, 237 bp, Homo sapiens
ctctagtatgagcaggacccaaattaatttgcatgactatgaagaacagtgtcactgtttgactggttgagtcagttatgtcattgggcatgaagatgtagccacaaactaaattatgactggctttagtcatgaacggactgacggaaagtgggcagacaaagaacagcctttctttatacttatttttatatattattattattactttttctctggagccggagtctcgcttcg

SEQ ID NO: 607145 - DNA, 381 bp, Homo sapiens
gactgagctctaagagggtcaggaaactgggcagccgctagtacagtgtagtacacccctggacaggcaggtgagccacaggcttgtcacagaccacatagagacacacgcacacacacgcgcacacagacacacacacacacaaagagtgccattgagagcctatggaccaggacgctataagatagggatgtcgttctcgatattggcgcgatggcgctgggagaatacattcagcgatccacacgatgttgcgacactcctgctccttgagctacacgaaggcatagaagacaccaaagtgagagtggtccaggaaggccaacttgtcccgctttacctacgttgctcagtcgaacggactgaccaatcctctagagt

SEQ ID NO: 607146 - DNA, 422 bp, Homo sapiens
  misc_feature (311)..(311): n is a, c, g, or t
  misc_feature (393)..(393): n is a, c, g, or t
  misc_feature (396)..(396): n is a, c, g, or t
tgtaggaaccaggtcttgctttgttgcccagctggtctcaaacttctggtctcgagcaatcctcccaccacagtctccccaagtgtaactccccaagtgtaactcccaacacttgggattacaggcatgagccactgtgctctaccagagttgatgttcaaatttttatagagaacgaaagaatttcactggtaactgtcagagcagtccttaaggatatgtcagaaagaaaaaaaattatgatttgagatagaaaaaacgccaaatgtatataacagaagtgcacagtaacagggaagcgacgggaaggnacagcagacccaagacactccatttctggatggcgtggatggcaccatatcgtttaggatgaagaaagggcaacataaaacnttnaccttcatttttttttttttaaaggg

SEQ ID NO: 607147 - DNA, 468 bp, Homo sapiens
gacctccacacagcactaggatataagaaatatttaaggtatttttttctcttaggactttctcactgtttttgtgtttggttgttttgttttgtttttaagtggcaatgccacattaaagtcaaaaatgacttgttgagagctgtaagtgtgacactgtgtgcttggccgggcacagacaccaagcagtatccccagcgttgagcacaggcaaaccaaaggcatggcttatcctgcctgctgaggtcaggatagggaaggacacacccagacaggcagagacagtgggaaataaatacaaagcagtcttcccagcaaagcactcgcgtaacttgaaaatgagacggaaatgccagggcaaacttgtaagtttgtgccttactgaagaaagctgttaaaattgggcaaagggtctggaaggctcccgcagacccttctgtgaggcaggtggcacaggcgtccaggcat

SEQ ID NO: 607148 - DNA, 1133 bp, Homo sapiens
ctgttgaccccctgcagctgttggaatctctgcaagaacctctgtattcttctaataaattccctcttttatttaaaaaaaaaaaaaaaaaaaaaaaaaaaaaaaaaaaaaaaaaaaaaaaaaaaaaaaaaaaaaaaaaaaaaaaaaaaaaaaaaaaaaaaaaaaaaaaaaaaaaaagaaaaaaaaaaaagaaaaaaaaaaaaaaaaaaaaaaaaaaaaaaaaaaaaagcagaaaaagaaagagagaggcgggcgcgcgcgacgcacacatacacgtcaacgacggggcgcggccacacccaatcacgcaccacgacctaaaagtttagaacgaaaagagagagcggccgcacgcaaaggaggatggtttcatttagacgtacgcgcgcgcgcggcggagcaaaacagacgcgacggacgaggaagagaagcacgcccgggagcaacctcggcgggcgaaaccacaaccacaccagtggcgtggaggagtagaaaacagaagaagacacaccacaccccaccggagaagatccacgacgccacgagtggggagaaaataaacaaacaagcagcctgtagcagatggtcaagcgtcgacaaacacaacacacacgagcatccgccgggggcaagcagacaagagacgggcacggcagctcaaggagttagccagaagaaacaatacaccaccgccgagcgcggacgaagaacaacgcgcggcaccagacagcaacgaccgcggccgaccaccaggagggatgagtcatgatggtgagcgaaggagtacggagggaggaggtgaaggacggagcgaggcgcagtggaacgatgggggagagaacgagagacgaacagaagaagacgcagagaaaaagaaagcagactgagacaggagagcagcgaggctggcgtcgtgcggacggagagcgaggacgagagagaagtagaggtcagacggggtgcggcaggatcgctgcaggaaagagaagcgaggatgagatcggagtagcaggaccgagaacacagggggctgcagcagcagcgtgagactgcgtgtggagcatgagagcgaaaggacagacgaacagaagagaacgacgggcggaaggagagtaagagcgagtacaagaacg

SEQ ID NO: 607149 - DNA, 388 bp, Homo sapiens
gatgccgaaaggaaagaaggccaagggaaagaaggtggctccgcccccagctgttcgtgaagaagcaggagggtaagaaagtagtgaatcccctgtttgagaaaagccctaagaattttggcattgggacagggagcatcccaccccaaaagagcccctccccccgttttgtgaaatggcccccctatatcaggttgtagccggcagagagccatgcttttatatgcggttgaaagccgcctcctgcggattcaaccagttcacagaggcgttcgaccgccaaacagttactcagctgcttaaggtgcgcccacacgtacagaccagagacagagcaggagaggaggcagagtctttccgcccgcccgagaagaagtttgcttgcaaa

SEQ ID NO: 607150 - DNA, 484 bp, Homo sapiens
cacaggaaagggaaaacaggactttaaaaatggaacaggaataaatagcagagaggaacatccttttttttttttgttaaacagaatctaaccaggtacccattatacgatcggcattggtctgggacggtcactggagcggttctctgagcggtcttcatgtaactattaactccccgatctttctgaggctgccggtgtgagggggcagcctggtttagtcggcaaacaagcggtggctgaggactctggacaacatgagcaggcatttcccagttggaggaagtcccgggggccggtgtcagattcggccaccagcatgcacagagctgaagcgtgggcgcaggcatgggctagatggggtccagcccctttcccagaactgaaacgggtcccaatccatctctgggctcagcactccaggagggctattggaggaagcaaacctatagggaactaagaacagtcatgtgtccatgatgga

SEQ ID NO: 607151 - DNA, 289 bp, Homo sapiens
cctgggggagactgaaatgctcccaagcagggctgtcagcagctgctggatacgaactcggcaggtcagggctcaggccttgagtcagcggtggaggccaacccgagattcctgctagctagctacgttccgcacctcgtttcctctgagaaatggggcggggtgcctcagggtccgggcctgcctcgccgtgtggctgagggtctgggccttacagggcgactctgagggtctgggcctgccttgcagggtgactgagggtctaggcctgccttgtgctagttctaga

SEQ ID NO: 607152 - DNA, 413 bp, Homo sapiens
tataacaaaaggcccatgtctgtatatagaaggaataatagagtcaaaaaagcggaaaattggctatttggaacccccataataataggggatccgcgtaccaaccatagtggggtgtaaagcccatgggtaacgggtggtgggaaaacaggatatccagggggtctaaaatatacactaatttccactaatttcaatattatccaaggagacaggtgtgtatctcccggatggggagatcgggtaaatcccatctacccaattacccaattttagcatcaccaatcatggagacagccggactatgaggtggctcctggatgtgatgcaacgggaattatgcaccctcacccaggcggtagtgtccgcaaattggtctaatctggagtcaaataggggaaccaatcagacaa

SEQ ID NO: 607153 - DNA, 145 bp, Homo sapiens
atatgtgcgagagcagtcacgctgcttcgctcagcactccactgtttacacttgcgcagttctgctcgcccaccgacaccaacgacccgcgcacgcggcagccacttcctcctcactattcctcaagttctaggatggcagtgaa

SEQ ID NO: 607154 - DNA, 360 bp, Homo sapiens
gcgcgcacaggacacgcaggcacctaatcttatgcctcccccttttttggatgatgctgatgggaaccctcatccatcaagatatcaaagattaggttctgcccgtgaaaattgcatgcaggagcatcttatgccttataagggagcaacttccccaggactgaatcaagttttaagtcaagcacgcgaaccacgagatcagcccactggacagcatgattcaaagactacaacaggagcaagacctgagacgttctggtgaagcagttatcagtaataccagccgcttaagtagaggctccataagttctacctcagaggttcattcaccaccaaacgtatgactaagacgttgtggac

SEQ ID NO: 607155 - DNA, 286 bp, Homo sapiens
  misc_feature (117)..(117): n is a, c, g, or t
tgctagatgcttgatgaatggatacgggggcctggcaaatggattcagaggaggatatgatggttaactggcccttctatatctctaatcactccaacacaggtgtgtgtatatcancaaggtctcacggttcaagtgtcgtccccccggtggatataactactgtggcgtatacaaacggcgaatgtgagtattactacgcacgtttcaaaggcgaagggctcctgtgtggcacggtgtgaacccacggtgggaagcccccaccggaagggtatacttattttgg

SEQ ID NO: 607156 - DNA, 354 bp, Homo sapiens
ataagagtattcatgtatatcgtgggcaaacctccagggggggagtcatgtagtaaccataaagtcgcctataattaaacaagtcacttaaaaattatatattacaatatcatttatccccacattcatgcaaataaagtattttcatgcacgcatatagtaacatgcaacacgtgaactataagtaaagctcttctcattaaaagtatatgatcaaactagctttaatatcagaactgaaacaaaagaccgtaaaatattacgccttacctttaaaatatccaacataaatagattctccagcttttccattacctgcaaataatcacctactttaagccataatgaacatta

SEQ ID NO: 607157 - DNA, 337 bp, Homo sapiens
  misc_feature (284)..(284): n is a, c, g, or t
  misc_feature (316)..(317): n is a, c, g, or t
ctctcttgcccaggctggagtgcaatggcacgttctcagctcactgcaacctccgcctcttgggttcaagcaattctgctgcatcagcctcccgagtacctgggattacaggcatgtgccaccacgcccggctaattttgtatttttagtagagacggggttttgccatgttggccaggctggtctcgaactcttgacttcagatgatccatctgccttggactcccacagtgctgggattacaggcgtgagccacccatgcccgggctctttctcaactttanaactgtctttcttaatcctcacatctggtttnnacaccttcatccctggtctt

SEQ ID NO: 607158 - DNA, 174 bp, Homo sapiens
tgatagcatttagacaatagtaagtagcctttaatacattacatgtgctcatagtataatatataccacaacgcaacataattacattcgtacacaaactaagtaccggattaggcaacctgcttatagctgtacacatgtattccaatgaaatataagcccagtacatcaaaa

SEQ ID NO: 607159 - DNA, 182 bp, Homo sapiens
ggtgaggcgctgagacggtatggcggtgagttctgggcaggcgcagctgaaaggcccgcaaccgggaaacgtcaaaacaagcggaaggacttggtgattcctggagcagtcgcccctatctgctggtcctgcagttgctcgaccgccaccgaccccgcgcgtaggactgggcactgaatggc

SEQ ID NO: 607160 - DNA, 147 bp, Homo sapiens
aggctcggtacctgttttcgcctgctgaggttgctgaggctgagtgctgatgcgagggggcaatggaggatgcaacggcccctgcagtgttgggctgtgtgtgtgtgggcagaaactggctgtcctgggcactggcgaggaacggct

SEQ ID NO: 607161 - DNA, 109 bp, Homo sapiens
ttccctgtcaaccgtatctggatgcgcctgaaatccgaaatgactattacctgaaccttgtggattggagttctgggaatgtactggcgctgtggtactggacaacggt

SEQ ID NO: 607162 - DNA, 111 bp, Homo sapiens
cgtgttcgttctcgagggcctgttcttgagggtgggggtacttcgtctttggcgggtcgaaggtagactgcagtacccaatggaaaaggggccccgcatagcagccggggg

SEQ ID NO: 607163 - DNA, 585 bp, Homo sapiens
cccattcgacatttttaaagaccggcccggtaatttagttttgggccgctataaaagagcttatacgttgcaaggcagggttattaagcttgaatccttgagacgggcgactttttattattatcgggttcgaagaggcgcacaaaaggaccgattggcccggggaatttttggcggtttaagccagttgtttatgccagttgaaacttggcccttccctaaagttccccttttcaggaaagcattagttaagccattcccattattaacccccttcaagccattgaggttccaatttgagattgttgaccaccatggaaagttcccagcgtattaattaaaaatctcagaggccaaaggattttttctttttaggagttttccatttggggtaattcccatgggaaggaccagcttgccagaaagccccccggggttaccactggttggcttaaataggattattcgatttttaaaaatccttttccatgttttttaagtgctttatgttaattcagtggcttttgtgataatccattccttatgtggccttaaccagggttcaattaaagggggtattgttcc

SEQ ID NO: 607164 - DNA, 185 bp, Homo sapiens
aaaccaaccctttttgggggggttcaaaagggttttgggccccccaggcagtctcctgggtttttagtcccaaagcccaccccaaggattggttttgggggggtttattccccaccccataaacatcaggccccccccgggcgggttcaaaaaaagggttttaaataaaaatttttgctgggcca

SEQ ID NO: 607165 - DNA, 280 bp, Homo sapiens
gtacttttaatgatcacacgacatctctgttcgagtgctcggccatatagtctgcactagctccagttcgcgtgtatcaaaacaacatgatatatgatacaaaaaagtcgtactacctttagacacgtagcttggtacgtattgtatagagtacagatctcgagcatataagaggaattacgtatgtgaaaacctgttaatgccatggaaggactgcaattttaccagccaccctatcctaaccgacctgcatctaagttcctgctgtagttctcactgc

SEQ ID NO: 607166 - DNA, 304 bp, Homo sapiens
  misc_feature (54)..(54): n is a, c, g, or t
tggggtcccccggcccccccctttgccccaaaccgattatttttccaaaattcnccccccataggttcccgattccctggggcctggtccttttaaaaaaaaaaaaaagggggtgttcccccccttttttttttccccccgggccctttgggacggggtgtttttttttaaccctagggggccgggggggggttttgtttttttttttaaaaaagttgggttttttgggggggtgcccgttgttaaaagtttccttttggggggtcccccttgtttcccccccgggatttttttttttccccca

SEQ ID NO: 607167 - DNA, 486 bp, Homo sapiens
agcatttttactacttgtttatccaatgagtgaatacgaaggtgctttagattcagcatactatcacgctgagtcttccatacaactcactaacggaaatgaagttaaaagtttactacaaatgttattgcttcacgcaattccagagcctgtcatttctgataagaaagcatttgatgtagctaaacgtattcttaaacttgatcctaataataatgtagcacgtaatgtgcttaaagacactgcaaaacgtatggacaacattgttgtcgatattaatgaattaaacaagcatagagatgcacgatagttaaacgtatttatctctttataatgccattagagttaccatactttaatggctatttttatacagttttctctagttttatgcattaatgtataagtctaagaggtggggttgaaaataaaaaacagtacgttataattctcactgtgaaaatctgtcgacgcggccgcgaattt

SEQ ID NO: 607168 - DNA, 452 bp, Homo sapiens
gaattgtgtggtgttgtgttcgcacaagccaaatatatgcaataaagcaaaaaagcccctaaaaatagggacttcttcagtacacttatggaaaaactttgaatgtcacttgaatagcaattaccgtcacaagtttaagcaacatcatgcccagcactaatgcctttgaaggttacatgaggagaaagcacccttcagataaaataaattcatcgcaccactgaacatattcccatttgggtgaacagatatgcatcgactcggctacaaacttggaaactgacaaatgaccagcgttaaatcagctcgttgaatgattcccatcaattaatcgagttataaaaactgggtttaagccaataagcatatttacatatacttttgggcgaatgtctaaactggatttaaatttcaaagactgtaacaagccatcgtcataacaccacacaatt

SEQ ID NO: 607169 - DNA, 1053 bp, Homo sapiens
gagtggctaacttttttcattatttacgtgtatatttttccagatgaagttggtgtaattttatcatgttaagagattatatcgtgtatagacattgaattaatagatttagggacatctgtacagttctgcacttctgaggcttgtttttgtttttgtttctttttatccaaaaaaaaaccatatgcttgtagggttggaggttaaagtccatacaaccgtgttttcccgaagataggggtgcgattaatataactaggttagttgctgtgttgacattgagaggctttcaaggactatttgctccttgtttatacgcacatcgtttccatgctaaaatatgagtgggttttaatcaaaaccgcgtgatggaagtggttttccgtttggtaatgaaaactagatctcttgaagtgagtgtcttatgggtatagtccccataaaagacctatgagtcgtcggcaagtgtacaagtattcctggggcatcccacgatttgcccaggctcgttgccagaattcttcgagggaggagtcattcacaggggtggtgtctagtggggggacccaccccttcatggtaccttgtgtggtcttccgacaactatggagatatcctcatggggcggcatccaaccaaggcctcaaatttgaggagagatctgggacacagacctgttggagggccagcctgctgcaatattaattagtctccaggcataagagccccagaaagggcaccaccaaggactcttggtgtcgtcgaacacgggcaataacaacggcccaggggtcttttagaccacgagggacaaacggtggtcggtcaacgtggaaatcgccagtagcacggaggacccgactgaaatcctaggagagggcaccccggggtggacaacacttaggaacggcggagacccccacggggtttcaacacttttgtcgctggtacccggcagctggggtgtagcagactccacaaaacggcggggggttcccaaaactggacaaaattggaggcagagcatggtgtgcaccctcctgtggtatacaa

SEQ ID NO: 607170 - DNA, 1115 bp, Homo sapiens
ggacgcgtgggttctctgatcacgcatttgagaatccttcacttttcagcaaaggtgaaggattctctgatcacgcatttgagaccgtccccgcatgtgctgaaaagtgagctcagatccagcaccatgttcctcctgacccatcctgtctatcttctcagttgagtttttaatctcacattgggtttccttgtgaagttggagggaagtttactaatagcctaacactaccccaccccaactaggaggaacctctgttttcaagagagatgcctgtcctgtgcttggatacgtcagctcaattattatgtgtactgaacacaacctgtaccaaactcaatgttatctgaaaaataactgatctcagcactttctaacgttaacatctgttaaaacacttctggactcgttctgccatatcggagtgggtttacatcttagaatcgcatgctgtagaaatgctcaaaagtgcatatgggactcagctccttaggtgtaacttactactttatacagaaactaacctcttacagtatgtaaccatatgccggctctgtaccaacttctcgtgagctgcctctgacgagccacactatcgcgaacgccggtaccagcagccgccggatcataccccggctcgaggcagacgagcgataaagccaaccaggaagacctcagacacacgacaaacaaaaagcaaacacaacaacacggccacgaccccgccactacaaaccaaaccctcagacaaaggagtacccaaacaccataaaacccgacagaccacagagctctaaccagcagacaccaccacagtggcacccaccaattacgagaggacggtccacagcaatcataccccgcacagaccgacgcacaggagaacacaaacgtgcaaacccaaccaacagacgcatccacacgcaccgacgcaacacaaatgtgcaacccaaagtgagcacaatcaccgcgtagcaagaaagtcacccatcaccatcccagcaggcaacgtcacgacagaaaaagataggacacagagacagccccacacagagagagcaaaaaacagccaccaagcggtaacacgaccacacaccaccacacacaagcacgca

SEQ ID NO: 607171 - DNA, 168 bp, Homo sapiens
gactgcccaggtgtggtcacatgattctctccgcggtcttctttgccaagagcaagtcaaaaaacattctggtgagaatggtgagcgacatgggacatggtttctgcttcaacaccaagagaaaccgactgcggaaaaactgactcttttgcattatgatcagttgtg

SEQ ID NO: 607172 - DNA, 478 bp, Homo sapiens
atcatacattttgataataggttattagatttcttgcctttatgccatcaactgaggagtaggggcaatgatcccattaatacaatccttctctttctttagtaataaggcatggctagacgcactccttcagataaggcaagtagcaccaacccgtggcccagctgggccccatgtgtagcccctcttggtggagttccgagctgacccttgctggttcttttctcatgtttccagtttctgcttcttcctaccctagacccaggtacgaaaatggagatgggtgacctacatagggaagtacattcttttcatgcattaacatttttaaaaaagtaatatgtgtatatggtaaaaagccaaatgaaacagaaagataagatgaaaagtaaacatctccctcaacacatccctcacctgacccaagtttctctctctaaagcctgtcattgttgatagtttcttacatctttttcta

SEQ ID NO: 607173 - DNA, 771 bp, Homo sapiens
tgaagttgaccacccggatccgatggaagccttctaaggtgatagcagggtctctcccataggtgacgaacaagtgagtcctgctagtccgaccccctggcgaagccacgaccaagtaatccacgccctagtacttcgtttgccccaacactatgccgctttccgatacagggcgcgttcctctcgcaaggtgccctaaggcgatgcgcatgtctacgtcaaagcgattcgacaagcaaggtccttaccactgcgcgacagatacgtggcaactcgtttggtctctactcgatggacgtgtacttaggcattctatggcatcatgccgtagcatccaggcatggatcgccttgaactccaggtagctatgcctcgcaagcctagtcttcagccatgtcggccttcaagtgcgtcctgaacgcatctcccatgtttcccacatggcttgttctcaccgtttcgtacgcacgtcatgctccctcgtaggctggccagcatccgtgccacacgactggcacaacgctgcactctgcgagcgcaggcacacgctcaggtacgaaaacgtgaggttaagctcttacgctgcccccgttcagcgttcactcaccacccttgtcagcgtcgtgcccacttcatccttgaccacgtggttcccccactcccatttctctggcactctgccataatttgttgttcaaatgctccctcgaattcctgaggggcctcagggcttgtggggggtaggctgagaccaatacccccaaggtaaga

SEQ ID NO: 607174 - DNA, 155 bp, Homo sapiens
tttttttactgacatcagcggtaccctaagggtttggcctgggataggaaatggtagggtttcattgattctaagacatacatttcctttccacattctaacatctctgaaattgatgtgcatcttaaaattgatggcatcttgcaattataggg

SEQ ID NO: 607175 - DNA, 724 bp, Homo sapiens
gaagggcaactagagagagaggatggaggggtgtctgcatttagtccagacactgcttggctcgctccccgagctcctcctgtttctgagcttcctgcataactgttgagctgagagggtttcctcattctcccctatctttaccccatcatatctgatttctttcttgggcagctggtgctacttggtgccaagaatcatgttgtttgggatggaagatgcctgctcttgtctgtgtgtgttgtacttatatgtctatatggatgatgcctgtgaatgaacagcagtgtgccgtgggtcatttggacaaatctcctcccaccccccaatccactgcaactctgctgttcacacattacccttgtgcagggaggtggtgggggggcagaggactacactgacggcatagtgacaagacctgtagatactcataagatgacgtccagccctccttactgggtagtttggtgggctccgaatcggtctgtgtaccgatgcttgtaggagtcgacagttaaatcgttttgcacccaggctgtcctggtatggggatgatccctccccaggaagcatgctggtgccaaggccttggggggccaatcctactgagctgggttcctgctccttgcttggggcctccatgaaagggagtaaagaggctagtttggagagcctcccttggccctttccggtgcctccccgctggctcaaattattgagcatg

SEQ ID NO: 607176 - DNA, 280 bp, Homo sapiens
aggctgaggcaggagaatcgcttgaacccatgaggcggaggttgcggcgagccgagaacacgccactgctctctagcctgggcgacagagtaagaccctgtctcaaaaaaaaacaaaaaaaaaaagaaagtcaccttaatactccgagcagagctgagctgagatcttcacttactcccttctcacacgaatagagctctttttgaggagagccccatactttatcctgaagtattctctggtagctggaaagcccatgtgtctgcagtcttttctgctg

SEQ ID NO: 607177 - DNA, 362 bp, Homo sapiens
  misc_feature (203)..(203): n is a, c, g, or t
  misc_feature (303)..(303): n is a, c, g, or t
  misc_feature (324)..(324): n is a, c, g, or t
  misc_feature (342)..(342): n is a, c, g, or t
tcctccccccggccatgcctttggttttgggggcccatcatggaggagcacctgaactttttggacaagacctttggccgacctggggatggcctttgatccctggagcagtggcccccttgcccggtgctttcaaaaacctcaaagctggtgggggtccagatcaggccttggccttttagccctgcctgctttgggccatncaaaggaaggacaaagggtgggggcagggccccaactcagggacatccccttttctgggggacgtcagtgggccttcctgcccccccagcctggaatgtnaatcaactgtgtggggcccgngtgggtggaaggaaatanacccttttgtagctccctta

SEQ ID NO: 607178 - DNA, 150 bp, Homo sapiens
cagcatggaaaggaaaacgaaaacggcctttttaccctctaacaacccagtagcatgttaaatttaggatgggggcatgaccctccagtgtcaaaataagttttagtagatttccctgttttataaaaaaaactccctttttccctggga

SEQ ID NO: 607179 - DNA, 274 bp, Homo sapiens
acgatgattacgccatgctacgtaatacgactcactaatggggcccctggaatttaaaccgggtgggggcaaacttttcttgaaggtaactgggttcaacaaattccttactttcggcgggaagggtctcccggtgttcaaggaagggtccgaacccgggttcgggcggtcggcgttgttcaagggggtaaccgggtcgaagaaacgggggaacaagagatttacttttaaaaaaggttttaaaaacaagtggggaagctttgggggccccaag

SEQ ID NO: 607180 - DNA, 1972 bp, Homo sapiens
tatccccatgttacaaatgaagaaactgaggctcagagggagaaaggggcttgccaaggtcatagagtgagtgcctgagtcatccaaggccagtattgtcctcaccaaccccagctgtggccatgtggagcagctggggtggggggcaccggcccagaggagtcagaggcgtgccccgcaaggtggtggaactgggagtgctgccagggttacttcctccctgggtccggatgcccgagaagcagtgggtatcaccatggccgccagcattcttgatacttaccaggcaccaggcacaattctggaaccttcccccagcccccagctctcgggtgctgctcagagaggggccgtggcttaccagggatgcagggttccacaaggcagaggggcccagcgttcaggaaaggacgtggctgggggacagggctgtgcatgcagaaaaaccccgctgaccacaggtgcagcattcacggcgactttcaggcaagcaggcaccaacagccagcgagccatcattcccagggctgcgagctggcacccacgtggtcacatgcctagagctgaggagtgaggggtcagggctcaggtgtcctgcccagcccaagccatgagcttcttccaggctcatgtggcccagcagtccctgaatggccttgcttacctgggacccctccacccacgctcacaagtcatccagggccagggactctggactccattcctccaggagctgtggatcctcttgctccatcttagggggcgccccaagccccagagactacctgccggctcccactcccgcccctcaagcaagctctgcacgtggcctagagtatgacacccctctgcccttggtcccgcactgtactgtgaagacctctccagcccagggctgcaaggaggcaggggccagcgggaaggagtgctaagatgagggggaatggcctgggcaaaggtaaggccaagcgcccgcctcgctggggccagtgaagggccttccatgcagcttcccagcccctcccctcccctaccagtcttcccggccccttccccagccagtcttccctgcccctcctccaccggtgttacagtgcccctcgggcctttggcctccccatcaatgacccccagcctggctccattcctggttgtcactctaattcacgctgaagagtgaatggctgacacttgaggattgctgtgcttgaagaggcagggcttgcaatttttctggaacaatccctttcttcaggaggaggggtctctaaggcaggtgagccaggtcccctccttgtccccacatctgaaatccaatcattcaacttgggttcctcgggcctcagaggcttctcagactgtaagaggccgggaggggaaggacatcctgtccgaagcggcaagtgcgtccactaccactcatgctggagaggacaggccgcctgtcttctgtggccagggacacaggcttggggcccaccctcagacctctgagaactgcctgccagcccccgatgcagaacccttgataggcaagcctcagtttctccacaccccactcctctttctcctctcctcagccttacagctggagggcagggggctggggaagggggtcaccccaatgccctggactgggccccacagctcccccggctgcttgcttccttctcctgacggccggctccttcccacttcagcctcctctgtgggcaccgaggcccaggagcttcaaaagtcagaccaagactgtccttggtcccacaggggcagaggtgagatctgtgcgtgccccctctccacactcacggggacagggcgtgagatctttgcgccccctccccatgatctccctttccagattttcaaaacgcccaagtgacgtgaaatggtgtgtgtatttatatccgacgtaaacaatctccttcacgagatgtcctcgtctggaattaaagctgtttattctattctt

SEQ ID NO: 607181 - DNA, 1609 bp, Homo sapiens
  misc_feature (8)..(8): n is a, c, g, or t
  misc_feature (1369)..(1369): n is a, c, g, or t
  misc_feature (1374)..(1375): n is a, c, g, or t
  misc_feature (1381)..(1381): n is a, c, g, or t
  misc_feature (1387)..(1387): n is a, c, g, or t
  misc_feature (1394)..(1395): n is a, c, g, or t
  misc_feature (1399)..(1399): n is a, c, g, or t
  misc_feature (1402)..(1402): n is a, c, g, or t
  misc_feature (1408)..(1408): n is a, c, g, or t
  misc_feature (1421)..(1421): n is a, c, g, or t
  misc_feature (1435)..(1438): n is a, c, g, or t
  misc_feature (1443)..(1443): n is a, c, g, or t
gaacaatnagctaggtacgaggctgggtgttgaatcggccgaggcttctccgctccttctaggatctccgcctggttcggcccgcctgcctccactcctgcctctaccatgtccatcagggtgacccagaagtcctacaaggtgtccacctctggcccccgggccttcagcagccgctcctacacgagtgggcccggttcccgcatcagctcctcgagcttctcccgagtgggcagcagcaactttcgcggtggcctgggcggcggctatggtggggccagcggcatgggaggcatcaccgcagttacggtcaaccagagcctgctgagcccccttgtcctggaggtggaccccaacatccaggccgtgcgcacccaggagaaggagcagatcaagaccctcaacaacaagtttgcctccttcatagacaaggtacggttcctggagcagcagaacaagatgctggagaccaagtggagcctcctgcagcagcagaagacggctcgaagcaacatggacaacatgttcgagagctacatcaacaaccttaggcggcagctggagactctgggccaggagaagctgaagctggaggcggagcttggcaacatgcaggggctggtggaggacttcaagaacaagtatgaggatgagatcaataagcgtacagagatggagaacgaatttgtcctcatcaagaaggatgtggatgaagcttacatgaacaaggtagagctggagtctcgcctggaagggctgaccgacgagatcaacttcctcaggcagctatatgaagaggagatccgggagctgcagtcccagatctcggacacatctgtggtgctgtccatggacaacagccgctccctggacatggacagcatcattgctgaggtcaaggcacagtacgaggatattgccaaccgcagccgggctgaggctgagagcatgtaccagatcaagtatgaggagctgcagagcctggctgggaagcacggggatgacctgcggcgcacaaagactgagatctctgagatgaaccggaacatcagccggctccaggctgagattgagggcctcaaaggccagagggcttccctggaggccgccattgcagatgccgagcagcgtggagagctggccattaaggatgccaacgccaagttgtccgagctggaggccgccctgcagcgggccaagcaggacatggcgcggcagctgcgtgagtaccaggagctgatgaacgtcaagctggccctggacatcgagatcgccacctacaggaagctgctggagggcgaggagagccggctggagtctgggatgcagaacatgagtattcatacgaagaccaccaggggtaagcagngggcnnagctcnggctangggggcnnaaanccnggccanataaggcgggccnagtggcggggggcnnnncctancggacaatctcaggcgggggggaaaactaacaccgtggggacggggtggacccgagccgccaaagaaagggggggcccagacacccccgggccacggaggggcgccggcggcgagagaccggaccccccggagagaagaaccgcccacaaagtctcacgcccaaaa

SEQ ID NO: 607182 - DNA, 164 bp, Homo sapiens
  misc_feature (152)..(153): n is a, c, g, or t
agctgcttgaggatccagttctggtcccccactaataatacaacaaacagcggtgtggtggtgcatgctgaaatcccagctactcaggaggctgaggcaggagaattgcttgactctgggaggtggaggttgctgtgagcaatgatcgcacnncattacactct

SEQ ID NO: 607183 - DNA, 1235 bp, Homo sapiens
  misc_feature (8)..(8): n is a, c, g, or t
gaacaatnagctaggtacgaggctgggtgttgaatcggccgaggcttctccgctccttctaggatctccgcctggttcggcccgcctgcctccactcctgcctctaccatgtccatcagggtgacccagaagtcctacaaggtgtccacctctggcccccgggccttcagcagccgctcctacacgagtgggcccggttcccgcatcagctcctcgagcttctcccgagtgggcagcagcaactttcgcggtggcctgggcggcggctatggtggggccagcggcatgggaggcatcaccgcagttacggtcaaccagagcctgctgagcccccttgtcctggaggtggaccccaacatccaggccgtgcgcacccaggagaaggagcagatcaagaccctcaacaacaagtttgcctccttcatagacaaggtacggttcctggagcagcagaacaagatgctggagaccaagtggagcctcctgcagcagcagaagacggctcgaagcaacatggacaacatgttcgagagctacatcaacaaccttaggcggcagctggagactctgggccaggagaagctgaagctggaggcggagcttggcaacatgcaggggctggtggaggacttcaagaacaagtatgaggatgagatcaataagcgtacagagatggagaacgaatttgtcctcatcaagaaggatgtggatgaagcttacatgaacaaggtagagctggagtctcgcctggaagggctgaccgacgagatcaacttcctcaggcagctatatgaagaggagatccgggagctgcagtcccagatctcggacacatctgtggtgctgtccatggacaacagccgctccctggacatggacagcatcattgctgaggtcaaggcacagtacgaggatattgccaaccgcagccgggctgaggctgagagcatgtaccagatcaagtatgaggagctgcagagcctggctgggaagcacggggatgacctgcggcgcacaaagactgagatctctgagatgaaccggaacatcagccggctccaggctgagattgagggcctcaaaggccagagggcttccctggaggccgccattgcagatgccgagcagcgacacacacgcgaacacagcacacacgaacacagcacacacagcacacacacaaacacagcacacacatgcacacagcacacgcacacacagcacacagatgagca

SEQ ID NO: 607184 - DNA, 248 bp, Homo sapiens
  misc_feature (52)..(53): n is a, c, g, or t
cttacagaccttccgtacgccaatgatgtgcttctccatataagtcataggnnttctacatatacttctctccagccacgagagctaatcccaagaatatgaggtggcgtgaattaagtgatttattagctatctacaagagaagctacgaacccccctgtaattcaagaagaaaaacccaagaagaagaagaaggcacaggaggatctctaaagccgtaggccaacaccactttggtaaaaggactc

SEQ ID NO: 607185 - DNA, 2491 bp, Homo sapiens
  misc_feature (8)..(8): n is a, c, g, or t
  misc_feature (2491)..(2491): n is a, c, g, or t
gaacaatnagctaggtacgaggctgggtgttgaatcggccgaggcttctccgctccttctaggatctccgcctggttcggcccgcctgcctccactcctgcctctaccatgtccatcagggtgacccagaagtcctacaaggtgtccacctctggcccccgggccttcagcagccgctcctacacgagtgggcccggttcccgcatcagctcctcgagcttctcccgagtgggcagcagcaactttcgcggtggcctgggcggcggctatggtggggccagcggcatgggaggcatcaccgcagttacggtcaaccagagcctgctgagcccccttgtcctggaggtggaccccaacatccaggccgtgcgcacccaggagaaggagcagatcaagaccctcaacaacaagtttgcctccttcatagacaaggtacggttcctggagcagcagaacaagatgctggagaccaagtggagcctcctgcagcagcagaagacggctcgaagcaacatggacaacatgttcgagagctacatcaacaaccttaggcggcagctggagactctgggccaggagaagctgaagctggaggcggagcttggcaacatgcaggggctggtggaggacttcaagaacaagtatgaggatgagatcaataagcgtacagagatggagaacgaatttgtcctcatcaagaaggatgtggatgaagcttacatgaacaaggtagagctggagtctcgcctggaagggctgaccgacgagatcaacttcctcaggcagctatatgaagaggagatccgggagctgcagtcccagatctcggacacatctgtggtgctgtccatggacaacagccgctccctggacatggacagcatcattgctgaggtcaaggcacagtacgaggatattgccaaccgcagccgggctgaggctgagagcatgtaccagatcaagtatgaggagctgcagagcctggctgggaagcacggggatgacctgcggcgcacaaagactgagatctctgagatgaaccggaacatcagccggctcctagtgctgacattgagtggtctcaaaggccaaagggcttcccatggaaggccgccaattgcaagtagtgtccgagacctaggactgatcgtatgagcatgtgccagttgaagggagttgccttagacgccgataggttggtccttgacgtcttggtacggtgccaggcccatgtcagtcggggctcatagcaaggcatatggactgacggtcagacttgtctgatgacgtacgctaggcgaggcttgattgaaactggtcataggacttcggccgctgtgacactcggcaagcattctgcacgaccctacacgtgagagctcgcttggaggcgcgccggtagagctcggcgtggtaggtctgggagatgacagaagctagtgatgtattcataccgtatagaactcatctcatgcgggtcggctatgcaggtggtctgagctcggcctatgggggcctcacaagccccggcctcagctacagcctgggctccagctttggctctggcgcgggctccagctccttcagccgcaccagctcctccagggccgtggttgtgaagaagatcgagacacgtgatgggaagctggtgtctgagtcctctgacgtcctgcccaagtgaacagctgcggcagcccctcccagcctacccctcctgcgctgccccagagcctgggaaggaggccgctatgcagggtagcactgggaacaggagacccacctgaggctcagccctagccctcagcccacctggggagtttactacctggggaccccccttgcccatgcctccagctacaaaacaattcaattgctttttttttttggtccaaaataaaacctcagctagctctgccaaaaaaaaaaaacaaaaaaaaaaaaaaaaaaaaaaaagaggggggcgcgcgcgcgcccaagaaggttccccccgagggggcgcccagatacccgcgcggcccccgggttttggggaacaagggggggccccccaataggaggaggagccgcgccaattataatagcgacagcgggccggtgggcgccggcggcttatcacacaacggcgcaggcgaccgggggggaaaacagcgcggccaccgccgcggcgaaacccctcggggagagagggacaccctataaacccgcgaggcgggagggaacaaatatggtgggagaccaaaacattgcgctctccagaggggaatttataaacgcctctctatcgaggggagagacacattgtatcgcagtttgtttaaacgcgtctgtgtaaattacgggtgggggtcaaaacataagctgtgagagatatgttagctgagtgaggtgcgaaggaaaaaactgttgagaggtatacaataggggatatattagattatgtaagaaaaaaattattttatcaccccaggggacccgctttggaggagtaagn

SEQ ID NO: 607186 - DNA, 1149 bp, Homo sapiens
atgcagagagcaagcaatgtcacctaccaagcccatcatgtcagcaggaacaagagaggtcaggtggtggggaccagaggtggctttcgtggttgcacagtttagggcaacaggcttgtctggagcgggaaagactactgtgagcatggccttggcggcagtacctggttagtcatggtcattcccatgctcaccactctaggcatggtgaccacatcattcgtccaagggtctccaatcacacacatcttggctttagtcctgcaagaccagcagcacagcagcaatgttcgcacgcgatcgcagcacagtctagctaacacactgttctgcaaagcatagctcggcttcagttgtgccatccaccacagtttccatcatccacctttcacacttccaggcatcgccacacacatgcgacaggcccaaattccatagcacaggtgcaaagattaaccctgtcgattataggccaggtcatttggttggatggcttcctcatgacaagtgctagaggtgcaccaacgcaggggcattgtcaaacagcggacatcgtacgaacacaacaagcccccggtgccaggggaggacacattttcacaacggggttctagaacttgggcgaacttcgactctccttggaacttcattgaaacaagggcccaagaaggaggccgccttgccagccttgggctgcttggaaaaaacctggacctccactggctcgcgtggtcccatggacctggtgtaccgagcaacagttcggaggacacccttcctaatccacggcaaccgggggactccacggagaaccctagggaggcctaggaccatcttcacatgacagcgacaacaggacaactactactaggcgccacaacaacaagtacacagccttccaccaggggcacaacaccagacatgggggacaccactgcaacaaccaccggcaaaagtacaccaagcgggcgaaagcacagaggaagtcaacgaagggcaccaaccggacgggcaacacacagcagcccggggagacagcacacgaacacgcgcacacgagcaccagacccaaaaaagcaaggcacaaaggaaaacggcggcaaaaccgacccgagccaccaaacaccacagagcacacaccaagcacaa

SEQ ID NO: 607187 - DNA, 714 bp, Homo sapiens
gacacatcactcatgtacactcctcggttggtttcggccagctcactgtcacgcgctgttcctagtgtgttttgtcttggtcgtctcgctgtgatagatagtatgaggtgatgagtgatctcgccccggactattggggggcaggtaaacgcacacaccccaggctgtggcgcatacacacgtttttgttcacacaccactgagcggtcgccgtgctcacgtactgtggcgctcctctctgttagctactactgttgcggcttattgtgggctttgttatattagtggggtgtctataacaactgtctcgttgaatggtttctgtaaagatactcgaggtgagtaaaaaacaaaggggagtgagatagatgagtgtttttatgcatttgttcaccacaccatgctctatatatacgctaagtataaacgccagacacctctgtctcagagaggagtggacgccctcgcctcctttgaggagacgcatggtatatcttggctgcatgttgtgatcatgagtatttatcgttggcgtcaccgcgctaacctcttcgttgccacacccgctcccatatattttcttgttgcaggagccacatcatctgggcgcatgcaagacagaaggggagggggggggaaagaggggggggtttttttaattttaaattttttgtgttttgtgaaaaaaaaaatttattttgggtggtttttaca

SEQ ID NO: 607188 - DNA, 158 bp, Homo sapiens
agctttgtgtttgaccaccagcctagtgtgacatctttggctgtgtgtgcccacatcggttggattacaggacacatgctacagctttgtatgggcgctctctgcaatggtgccaccagcgtcctttttgagagcaccccgagtttatcccaatgctg

SEQ ID NO: 607189 - DNA, 1433 bp, Homo sapiens
  misc_feature (8)..(8): n is a, c, g, or t
gaacaatnagctaggtacgaggctgggtgttgaatcggccgaggcttctccgctccttctaggatctccgcctggttcggcccgcctgcctccactcctgcctctaccatgtccatcagggtgacccagaagtcctacaaggtgtccacctctggcccccgggccttcagcagccgctcctacacgagtgggcccggttcccgcatcagctcctcgagcttctcccgagtgggcagcagcaactttcgcggtggcctgggcggcggctatggtggggccagcggcatgggaggcatcaccgcagttacggtcaaccagagcctgctgagcccccttgtcctggaggtggaccccaacatccaggccgtgcgcacccaggagaaggagcagatcaagaccctcaacaacaagtttgcctccttcatagacaaggtacggttcctggagcagcagaacaagatgctggagaccaagtggagcctcctgcagcagcagaagacggctcgaagcaacatggacaacatgttcgagagctacatcaacaaccttaggcggcagctggagactctgggccaggagaagctgaagctggaggcggagcttggcaacatgcaggggctggtggaggacttcaagaacaagtatgaggatgagatcaataagcgtacagagatggagaacgaatttgtcctcatcaagaaggatgtggatgaagcttacatgaacaaggtagagctggagtctcgcctggaagggctgaccgacgagatcaacttcctcaggcagctatatgaagaggagatccgggagctgcagtcccagatctcggacacatctgtggtgctgtccatggacaacagccgctccctggacatggacagcatcattgctgaggtcaaggcacagtacgaggatattgccaaccgcagccgggctgaggctgagagcatgtaccagatcaagtatgaggagctgcagagcctggctgggaagcacggggatgacctgcggcgcacaaagactgagatctctgagatgaaccggaacatcagccggctccgaaccagccctcgccggcctcggattccggctctggctacgtaccgggctcggactctgcagcctacagtaacttgccccaacgagaaggtcgccaagggagatcgccagggccgaggtggagaagcgcctagcagcctgcagtcaacctcatccctcagatgacatccatctatgcagtggacaagggaaagatcgacggagagaacagcgcaaggtgcctggcacgacgcactcacacacccacaagctccctgggacgcaagcatcgaacaagcatccacggaacgaacatgaagacaccattaccgaaagtgggccagagaaaatcgcatcgcccgcggaacaaggggaactacgaacctgaaaaggaa

SEQ ID NO: 607190 - DNA, 149 bp, Homo sapiens
aactcagtggggaaaatacgattccaagaccattccgcatctgtgatatcatggatcttttatttccttggggggctgaattgagctaaaaaaaaaggctctttgaaatagttttatttctctccacagttttttttgtttggtttgtg

SEQ ID NO: 607191 - DNA, 647 bp, Homo sapiens
gacccagaggatccctcgaatcgacggttctctgtatataattatttctagtatattccattgtagtctgaaaaggtacttgatataatcttaaattttaaaatttgttgagatttattttgtgggcaacatatgggctatcctggagaatggttccttgtgttgacaagaaaatgtattctgcagtttttgttctatgttctcttgtatagcactgaacttgttaataacattatttaaaattcttttttgggcatttcattgtattgctttttcattcaaacctgttcctagagaattactgtgttccttcagaggcattctgtttccttgctttttcatgtttcttatatccttacactcatatttgtgcatctggtgtaactgtctcttctttcaattttatggattggctttcataggaaaagacttttcctgatagatgtatctattgtatcggttgggtaggatgctttggcttttattttgggtgggggcagtagtttagtttccatatttcttcagctataatcagtgtcagtggtatctgtgagttcctcagtggattggctgtggttgtatggggaaagaggtggtctaatccagatgttcataggatctatctggttgcacgctggaggagaaca

SEQ ID NO: 607192 - DNA, 2134 bp, Homo sapiens
  misc_feature (8)..(8): n is a, c, g, or t
  misc_feature (2134)..(2134): n is a, c, g, or t
gaacaatnagctaggtacgaggctgggtgttgaatcggccgagggcggcatgggaggcatcaccgcagttacggtcaaccagagcctgctgagcccccttgtcctggaggtggaccccaacatccaggccgtgcgcacccaggagaaggagcagatcaagaccctcaacaacaagtttgcctccttcatagacaaggtacggttcctggagcagcagaacaagatgctggagaccaagtggagcctcctgcagcagcagaagacggctcgaagcaacatggacaacatgttcgagagctacatcaacaaccttaggcggcagctggagactctgggccaggagaagctgaagctggaggcggagcttggcaacatgcaggggctggtggaggacttcaagaacaagtatgaggatgagatcaataagcgtacagagatggagaacgaatttgtcctcatcaagaaggatgtggatgaagcttacatgaacaaggtagagctggagtctcgcctggaagggctgaccgacgagatcaacttcctcaggcagctatatgaagaggagatccgggagctgcagtcccagatctcggacacatctgtggtgctgtccatggacaacagccgctccctggacatggacagcatcattgctgaggtcaaggcacagtacgaggatattgccaaccgcagccgggctgaggctgagagcatgtaccagatcaagtatgaggagctgcagagcctggctgggaagcacggggatgacctgcggcgcacaaagactgagatctctgagatgaaccggaacatcagccggctccaggctgagattgagggcctcaaaggccagagggcttccctggaggccgccattgcagatgccgagcagcgtggagagctggccattaaggatgccaacgccaagttgtccgagctggaggccgccctgcagcgggccaagcaggacatggcgcggcagctgcgtgagtaccaggagctgatgaacgtcaagctggccctggacatcgagatcgccacctacaggaagctgctggagggcgaggagagccggctggagtctgggatgcagaacatgagtattcatacgaagaccaccagcggctatgcaggtggtctgagctcggcctatgggggcctcacaagccccggcctcagctacagcctgggctccagctttggctctggcgcgggctccagctccttcagccgcaccagctcctccagggccgtggttgtgaagaagatcgagacacgtgatgggaagctggtgtctgagtcctctgacgtcctgcccaagtgaacagctgcggcagcccctcccagcctacccctcctgcgctgccccagagcctgggaaggaggccgctatgcagggtagcactgggaacaggagacccacctgaggctcagccctagccctcagcccacctggggagtttactacctggggaccccccttgcccatgcctccagctacaaaacaattcaattgctttttttttttggtccaaaataaaacctcagctagctctgccaaaaaaaaaaaacaaaaaaaaaaaaaaaaaaaaaaaagaggggggcgcgcgcgcgcccaagaaggttccccccgagggggcgcccagatacccgcgcggcccccgggttttggggaacaagggggggccccccaataggaggaggagccgcgccaattataatagcgacagcgggccggtgggcgccggcggcttatcacacaacggcgcaggcgaccgggggggaaaacagcgcggccaccgccgcggcgaaacccctcggggagagagggacaccctataaacccgcgaggcgggagggaacaaatatggtgggagaccaaaacattgcgctctccagaggggaatttataaacgcctctctatcgaggggagagacacattgtatcgcagtttgtttaaacgcgtctgtgtaaattacgggtgggggtcaaaacataagctgtgagagatatgttagctgagtgaggtgcgaaggaaaaaactgttgagaggtatacaataggggatatattagattatgtaagaaaaaaattattttatcaccccaggggacccgctttggaggagtaagn

SEQ ID NO: 607193 - DNA, 324 bp, Homo sapiens
atgaaccacagcttctaacacagctgagtagcactgcattatgccacatctacaacactcttcactaactgcccatactgagcacaattacattgtctaagtcatagctctttcctgtataaaagctgtcgaactcttgcccaccccggtgaagccagcttctggacttgtggggataccgacagcacgaagcggctacactgccgcagagccaccctgtgccacctcgtcccccctcctctgcagcccagcggagctgacgggggcgggggcgtgcgcggtgggggctgacatcttataatacggatatacatattgtcacgc

SEQ ID NO: 607194 - DNA, 437 bp, Homo sapiens
tgttgactctatcaggatccccgagtctgatctctcgcgggtcatgggaattccgccggccgtccctcgccggttcggcatcgcctttctggtcatacctaggacgtgttttctgatcatctgcgaacctccgattggcgttcttctttagtgaacccattctcgtccaagtgctttcgctgctgcgtccgtcttgcgccgtctctgacatttacaacccttgcggcgcaatacgaatgcctcccggcccgtccctcttaatcatggcctcagttccgaaaaccaacaaaatagaaccgaggtcctattccattattcctagctgcggtatccaggcggctcgggcctgctttgaacactctaattttttcaaagtaaacgcttcgggccccgcgggacactcagctaagagcatcgagggggcgccgagatcagat

SEQ ID NO: 607195 - DNA, 2322 bp, Homo sapiens
  misc_feature (8)..(8): n is a, c, g, or t
  misc_feature (2322)..(2322): n is a, c, g, or t
gaacaatnagctaggtacgaggctgggtgttgaatcggccgaggcttctccgctccttctaggatctccgcctggttcggcccgcctgcctccactcctgcctctaccatgtccatcagggtgacccagaagtcctacaaggtgtccacctctggcccccgggccttcagcagccgctcctacacgagtgggcccggttcccgcatcagctcctcgagcttctcccgagtgggcagcagcaactttcgcggtggcctgggcggcggctatggtggggccagcggcatgggaggcatcaccgcagttacggtcaaccagagcctgctgagcccccttgtcctggaggtggaccccaacatccaggccgtgcgcacccaggagaaggagcagatcaagaccctcaacaacaagtttgcctccttcatagacaaggtacggttcctggagcagcagaacaagatgctggagaccaagtggagcctcctgcagcagcagaagacggctcgaagcaacatggacaacatgttcgagagctacatcaacaaccttaggcggcagctggagactctgggccaggagaagctgaagctggaggcggagcttggcaacatgcaggggctggtggaggacttcaagaacaagtatgaggatgagatcaataagcgtacagagatggagaacgaatttgtcctcatcaagaaggatgtggatgaagcttacatgaacaaggtagagctggagtctcgcctggaagggctgaccgacgagatcaacttcctcaggcagctatatgaagaggagatccgggagctgcagtcccagatctcggacagcatcattgctgaggtcaaggcacagtacgaggatattgccaaccgcagccgggctgaggctgagagcatgtaccagatcaagtatgaggagctgcagagcctggctgggaagcacggggatgacctgcggcgcacaaagactgagatctctgagatgaaccggaacatcagccggctccaggctgagattgagggcctcaaaggccagagggcttccctggaggccgccattgcagatgccgagcagcgtggagagctggccattaaggatgccaacgccaagttgtccgagctggaggccgccctgcagcgggccaagcaggacatggcgcggcagctgcgtgagtaccaggagctgatgaacgtcaagctggccctggacatcgagatcgccacctacaggaagctgctggagggcgaggagagccggctggagtctgggatgcagaacatgagtattcatacgaagaccaccagcggctatgcaggtggtctgagctcggcctatgggggcctcacaagccccggcctcagctacagcctgggctccagctttggctctggcgcgggctccagctccttcagccgcaccagctcctccagggccgtggttgtgaagaagatcgagacacgtgatgggaagctggtgtctgagtcctctgacgtcctgcccaagtgaacagctgcggcagcccctcccagcctacccctcctgcgctgccccagagcctgggaaggaggccgctatgcagggtagcactgggaacaggagacccacctgaggctcagccctagccctcagcccacctggggagtttactacctggggaccccccttgcccatgcctccagctacaaaacaattcaattgctttttttttttggtccaaaataaaacctcagctagctctgccaaaaaaaaaaaacaaaaaaaaaaaaaaaaaaaaaaaagaggggggcgcgcgcgcgcccaagaaggttccccccgagggggcgcccagatacccgcgcggcccccgggttttggggaacaagggggggccccccaataggaggaggagccgcgccaattataatagcgacagcgggccggtgggcgccggcggcttatcacacaacggcgcaggcgaccgggggggaaaacagcgcggccaccgccgcggcgaaacccctcggggagagagggacaccctataaacccgcgaggcgggagggaacaaatatggtgggagaccaaaacattgcgctctccagaggggaatttataaacgcctctctatcgaggggagagacacattgtatcgcagtttgtttaaacgcgtctgtgtaaattacgggtgggggtcaaaacataagctgtgagagatatgttagctgagtgaggtgcgaaggaaaaaactgttgagaggtatacaataggggatatattagattatgtaagaaaaaaattattttatcaccccaggggacccgctttggaggagtaagn

SEQ ID NO: 607196 - DNA, 2371 bp, Homo sapiens
  misc_feature (2371)..(2371): n is a, c, g, or t
ggaccgctccttctagggtgtcgatctggtactacccgactatctccactcctaatgtctagcatgtgcatcaaggtgatgcatgaggttcgtagaggctgtgcatcgtcgggccccatgatctaggacagtgcgctacgtgacacgaggtgggtgcgcggtattcccagtatcctactctgtcgagcttttctggtattggtgcgattatcctcttttgcggtggtgtgggacagagggaactaggtgggagtcgagacggtgctaatgaggaggctagttagccgcatcattacggatctgatgcagagaccgatggatgaacccacgcatgtccgatggaggtggaccccgagcaatccaggccgtgcgcacccaggagaaggagcagatcaagaccctcaacaacaagtttgcctccttcatagacaaggtacggttcctggagcagcagaacaagatgctggagaccaagtggagcctcctgcagcagcagaagacggctcgaagcaacatggacaacatgttcgagagctacatcaacaaccttaggcggcagctggagactctgggccaggagaagctgaagctggaggcggagcttggcaacatgcaggggctggtggaggacttcaagaacaagtatgaggatgagatcaataagcgtacagagatggagaacgaatttgtcctcatcaagaaggatgtggatgaagcttacatgaacaaggtagagctggagtctcgcctggaagggctgaccgacgagatcaacttcctcaggcagctatatgaagaggagatccgggagctgcagtcccagatctcggacacatctgtggtgctgtccatggacaacagccgctccctggacatggacagcatcattgctgaggtcaaggcacagtacgaggatattgccaaccgcagccgggctgaggctgagagcatgtaccagatcaagtatgaggagctgcagagcctggctgggaagcacggggatgacctgcggcgcacaaagactgagatctctgagatgaaccggaacatcagccggctccaggctgagattgagggcctcaaaggccagagggcttccctggaggccgccattgcagatgccgagcagcgtggagagctggccattaaggatgccaacgccaagttgtccgagctggaggccgccctgcagcgggccaagcaggacatggcgcggcagctgcgtgagtaccaggagctgatgaacgtcaagctggccctggacatcgagatcgccacctacaggaagctgctggagggcgaggagagccggctggagtctgggatgcagaacatgagtattcatacgaagaccaccagcggctatgcaggtggtctgagctcggcctatgggggcctcacaagccccggcctcagctacagcctgggctccagctttggctctggcgcgggctccagctccttcagccgcaccagctcctccagggccgtggttgtgaagaagatcgagacacgtgatgggaagctggtgtctgagtcctctgacgtcctgcccaagtgaacagctgcggcagcccctcccagcctacccctcctgcgctgccccagagcctgggaaggaggccgctatgcagggtagcactgggaacaggagacccacctgaggctcagccctagccctcagcccacctggggagtttactacctggggaccccccttgcccatgcctccagctacaaaacaattcaattgctttttttttttggtccaaaataaaacctcagctagctctgccaaaaaaaaaaaacaaaaaaaaaaaaaaaaaaaaaaaagaggggggcgcgcgcgcgcccaagaaggttccccccgagggggcgcccagatacccgcgcggcccccgggttttggggaacaagggggggccccccaataggaggaggagccgcgccaattataatagcgacagcgggccggtgggcgccggcggcttatcacacaacggcgcaggcgaccgggggggaaaacagcgcggccaccgccgcggcgaaacccctcggggagagagggacaccctataaacccgcgaggcgggagggaacaaatatggtgggagaccaaaacattgcgctctccagaggggaatttataaacgcctctctatcgaggggagagacacattgtatcgcagtttgtttaaacgcgtctgtgtaaattacgggtgggggtcaaaacataagctgtgagagatatgttagctgagtgaggtgcgaaggaaaaaactgttgagaggtatacaataggggatatattagattatgtaagaaaaaaattattttatcaccccaggggacccgctttggaggagtaagn

SEQ ID NO: 607197 - DNA, 466 bp, Homo sapiens
tctgggtttcatcccaggatgtgtgtgtgtgagtgagtgagagagagagagaggtgtgtgtgtgtgacaggatggagagggtgggaagggtcttacaggccagagagtggccggagtaacatatccaaccttaatttcttggtgggactcagctcatgtcagacctgaaggtacccttaagaaacaagtatggcgtaggtatgtaagagacagagagagtaatgagcaagcaattgagcgcataagctgtctaacgttttatatcttgtatggccatttgacaccctttaagcagtgttttgtaagcattaaatcttctagctttccagctgcatgtttatactggctaaccctgctttcctttgtttgtaaatcacactcattgtgggtgacggggaatcagggttcgattccggagagggagcctgagaaacggctaccacatccaaggaaggcagcacacgcg

SEQ ID NO: 607198 - DNA, 333 bp, Homo sapiens
cagggggagggtaaaattttttacctaagtaatacatggttcattctgttttacaaaaggaaaccattacaaaaagggttaggcccttttgtcactcccaacccataagatcactgtaaaagtttcaggtgcatttttccaggctttttctatacatggatacatttacgtgcatatttatatacccataaaaatatataataattttttttttgagacggagtctggctctgtcgcccaagctggaatgcaatgtgccaaattttggtttattgaaccctatgccttcctggctcaaggtatttttctgccttaatcttccgagttgctggg

SEQ ID NO: 607199 - DNA, 2496 bp, Homo sapiens
  misc_feature (8)..(8): n is a, c, g, or t
  misc_feature (445)..(445): n is a, c, g, or t
  misc_feature (2496)..(2496): n is a, c, g, or t
gaacaatnagctaggtacgaggctgggtgttgaatcggccgaggcttctccgctccttctaggatctccgcctggttcggcccgcctgcctccactcctgcctctaccatgtccatcagggtgacccagaagtcctacaaggtgtccacctctggcccccgggccttcagcagccgctcctacacgagtgggcccggttcccgcatcagctcctcgagcttctcccgagtgggcagcagcaactttcgcggtggcctgggcggcggctatggtggggccacgtgcggagcctagacgtgacattggggacgtgtcatcatcgcgcgaagtattcaggtccatgcgaagatgactctagcatgacgtcccccgcttgctaccttggatgtgttgtgcgcacctcgcagagcactccagagcctgattagcggcatcgctatgtgangagagagagtcaaagactcgaagcgatcgcacttcgaagcaagcaaaagttgttgccctctcgttcattaggacgaagggtactggttcctaggtacggcacgtcggacgatacgaaggatgcttggtagactcaaagtggaagccttcctgctacgcattctcctgcagcagcagaagacggctcgaagcaacatggacaacatgttcgagagctacatcaacaaccttaggcggcagctggagactctgggccaggagaagctgaagctggaggcggagcttggcaacatgcaggggctggtggaggacttcaagaacaagtatgaggatgagatcaataagcgtacagagatggagaacgaatttgtcctcatcaagaaggatgtggatgaagcttacatgaacaaggtagagctggagtctcgcctggaagggctgaccgacgagatcaacttcctcaggcagctatatgaagaggagatccgggagctgcagtcccagatctcggacacatctgtggtgctgtccatggacaacagccgctccctggacatggacagcatcattgctgaggtcaaggcacagtacgaggatattgccaaccgcagccgggctgaggctgagagcatgtaccagatcaagtatgaggagctgcagagcctggctgggaagcacggggatgacctgcggcgcacaaagactgagatctctgagatgaaccggaacatcagccggctccaggctgagattgagggcctcaaaggccagagggcttccctggaggccgccattgcagatgccgagcagcgtggagagctggccattaaggatgccaacgccaagttgtccgagctggaggccgccctgcagcgggccaagcaggacatggcgcggcagctgcgtgagtaccaggagctgatgaacgtcaagctggccctggacatcgagatcgccacctacaggaagctgctggagggcgaggagagccggctggagtctgggatgcagaacatgagtattcatacgaagaccaccagcggctatgcaggtggtctgagctcggcctatgggggcctcacaagccccggcctcagctacagcctgggctccagctttggctctggcgcgggctccagctccttcagccgcaccagctcctccagggccgtggttgtgaagaagatcgagacacgtgatgggaagctggtgtctgagtcctctgacgtcctgcccaagtgaacagctgcggcagcccctcccagcctacccctcctgcgctgccccagagcctgggaaggaggccgctatgcagggtagcactgggaacaggagacccacctgaggctcagccctagccctcagcccacctggggagtttactacctggggaccccccttgcccatgcctccagctacaaaacaattcaattgctttttttttttggtccaaaataaaacctcagctagctctgccaaaaaaaaaaaacaaaaaaaaaaaaaaaaaaaaaaaagaggggggcgcgcgcgcgcccaagaaggttccccccgagggggcgcccagatacccgcgcggcccccgggttttggggaacaagggggggccccccaataggaggaggagccgcgccaattataatagcgacagcgggccggtgggcgccggcggcttatcacacaacggcgcaggcgaccgggggggaaaacagcgcggccaccgccgcggcgaaacccctcggggagagagggacaccctataaacccgcgaggcgggagggaacaaatatggtgggagaccaaaacattgcgctctccagaggggaatttataaacgcctctctatcgaggggagagacacattgtatcgcagtttgtttaaacgcgtctgtgtaaattacgggtgggggtcaaaacataagctgtgagagatatgttagctgagtgaggtgcgaaggaaaaaactgttgagaggtatacaataggggatatattagattatgtaagaaaaaaattattttatcaccccaggggacccgctttggaggagtaagn

SEQ ID NO: 607200 - DNA, 2325 bp, Homo sapiens
  misc_feature (2325)..(2325): n is a, c, g, or t
ttgtcagactcctgccggcagctgccctgggggacatgtgtgcccatctggacatcctccagccccgtgcagtccgcgtcttcactgttccacggcctcccagtgcctcccagtcgattggacccatctccctcctgcagtttgaggccatgagaggtgagtggacctgacaagtgccagagtaaccgtgtagacagagcagtgtagacagcgctcagccccagtcccaggtgtggacctcatgctggtgatggctcccctgggtggcctgccagccacagccagtgccatcagggagctgaaggggctgtgacgcgcaggctaactccgagctgccccttcacgttggtcatcaaggacctgtgcgcgtccggctcgtgccgctgctcatgtggaattccgtttggagaagggtgtccctgttcgctagggacaagtaaagagttgtggtacgtcccgcaaacaatggaagaaggagtgttcgagagctacatcaacaaccttaggcggcagctggagactctgggccaggagaagctgaagctggaggcggagcttggcaacatgcaggggctggtggaggacttcaagaacaagtatgaggatgagatcaataagcgtacagagatggagaacgaatttgtcctcatcaagaaggatgtggatgaagcttacatgaacaaggtagagctggagtctcgcctggaagggctgaccgacgagatcaacttcctcaggcagctatatgaagaggagatccgggagctgcagtcccagatctcggacacatctgtggtgctgtccatggacaacagccgctccctggacatggacagcatcattgctgaggtcaaggcacagtacgaggatattgccaaccgcagccgggctgaggctgagagcatgtaccagatcaagtatgaggagctgcagagcctggctgggaagcacggggatgacctgcggcgcacaaagactgagatctctgagatgaaccggaacatcagccggctccaggctgagattgagggcctcaaaggccagagggcttccctggaggccgccattgcagatgccgagcagcgtggagagctggccattaaggatgccaacgccaagttgtccgagctggaggccgccctgcagcgggccaagcaggacatggcgcggcagctgcgtgagtaccaggagctgatgaacgtcaagctggccctggacatcgagatcgccacctacaggaagctgctggagggcgaggagagccggctggagtctgggatgcagaacatgagtattcatacgaagaccaccagcggctatgcaggtggtctgagctcggcctatgggggcctcacaagccccggcctcagctacagcctgggctccagctttggctctggcgcgggctccagctccttcagccgcaccagctcctccagggccgtggttgtgaagaagatcgagacacgtgatgggaagctggtgtctgagtcctctgacgtcctgcccaagtgaacagctgcggcagcccctcccagcctacccctcctgcgctgccccagagcctgggaaggaggccgctatgcagggtagcactgggaacaggagacccacctgaggctcagccctagccctcagcccacctggggagtttactacctggggaccccccttgcccatgcctccagctacaaaacaattcaattgctttttttttttggtccaaaataaaacctcagctagctctgccaaaaaaaaaaaacaaaaaaaaaaaaaaaaaaaaaaaagaggggggcgcgcgcgcgcccaagaaggttccccccgagggggcgcccagatacccgcgcggcccccgggttttggggaacaagggggggccccccaataggaggaggagccgcgccaattataatagcgacagcgggccggtgggcgccggcggcttatcacacaacggcgcaggcgaccgggggggaaaacagcgcggccaccgccgcggcgaaacccctcggggagagagggacaccctataaacccgcgaggcgggagggaacaaatatggtgggagaccaaaacattgcgctctccagaggggaatttataaacgcctctctatcgaggggagagacacattgtatcgcagtttgtttaaacgcgtctgtgtaaattacgggtgggggtcaaaacataagctgtgagagatatgttagctgagtgaggtgcgaaggaaaaaactgttgagaggtatacaataggggatatattagattatgtaagaaaaaaattattttatcaccccaggggacccgctttggaggagtaagn

SEQ ID NO: 607201 - DNA, 993 bp, Homo sapiens
  misc_feature (103)..(103): n is a, c, g, or t
  misc_feature (436)..(436): n is a, c, g, or t
  misc_feature (541)..(541): n is a, c, g, or t
  misc_feature (710)..(711): n is a, c, g, or t
  misc_feature (725)..(725): n is a, c, g, or t
  misc_feature (780)..(780): n is a, c, g, or t
cccgggctgcaggaattcggcacgagcttcccgctgccctgcgctcggcgggctggcattccggcccggggaaagcggaccagcccttctgcaggtctgcggngccaagtgtcccggcggcgcacctcgtggcgagaatcgggagaaggaggagactacaaggataggcccaggagtaatggagtccaaagagaaacgagcagtaaacagtctcagcatggaaaatgccaaccaagaaaatgaagaaaaggagcaagttgctaataaaggggagcccttggccctccctttggatgctggtgaatactgtgtgcctagaggaaatcgtaggcggttccgcgttaggcagcccatcctgcagtatagatgggatatgatgcataggcttggagaaccacaggcaaggatgagagaagagaatatggaaaggattggngaggaggtgagacagctgatggaaaagctgagggaaaagcacgtgagtcatagtctgcgggcagtcagcactgacccccctcaccatgaccatcatgatgagttntgcctttatgccctgaatctgatggcttccctaaagtcatacggaaacagacccctgctttcgacttacatcgtcatgatgtgcccttgtgtaaaccttaacctgtcactggctacgtgggtctctattaccacttctaactgaatatggcgttttgaaccagtctganngattttgttgcagngaattaacctatgcatgaaagacctcttttaggaagtaataggcactttaaagcnaaaaaaaaaaaactcgggggggccggcccatattgcctatgggagggtttaattacttgcgggtttaaactcgaagggaaaccttggttaccattaaggcttggcataccctttgacatgggaataaaaaaggccgaccgtgccttcaaattgtgacctaatgggagggaattgacggaaattttaaaatcggaaattttgtaaacacttttt

SEQ ID NO: 607202 - DNA, 1903 bp, Homo sapiens
  misc_feature (1903)..(1903): n is a, c, g, or t
acttggagccatagcaagacggtccagccaatgcgtcatgagtacaaacactgtatgtgatctcattcagtagccttaggcggtagacggatactcatgggctcatgcgcacgctgaagcgggatgtggagctatgtgaacagtgcagggtgttgatgaggacttcaagaacaagtatgaggatgagatcaataagcgtacagagatggagaacgaatttgtcctcatcaagaaggatgtggatgaagcttacatgaacaaggtagagctggagtctcgcctggaagggctgaccgacgagatcaacttcctcaggcagctatatgaagaggagatccgggagctgcagtcccagatctcggacacatctgtggtgctgtccatggacaacagccgctccctggacatggacagcatcattgctgaggtcaaggcacagtacgaggatattgccaaccgcagccgggctgaggctgagagcatgtaccagatcaagtatgaggagctgcagagcctggctgggaagcacggggatgacctgcggcgcacaaagactgagatctctgagatgaaccggaacatcagccggctccaggctgagattgagggcctcaaaggccagagggcttccctggaggccgccattgcagatgccgagcagcgtggagagctggccattaaggatgccaacgccaagttgtccgagctggaggccgccctgcagcgggccaagcaggacatggcgcggcagctgcgtgagtaccaggagctgatgaacgtcaagctggccctggacatcgagatcgccacctacaggaagctgctggagggcgaggagagccggctggagtctgggatgcagaacatgagtattcatacgaagaccaccagcggctatgcaggtggtctgagctcggcctatgggggcctcacaagccccggcctcagctacagcctgggctccagctttggctctggcgcgggctccagctccttcagccgcaccagctcctccagggccgtggttgtgaagaagatcgagacacgtgatgggaagctggtgtctgagtcctctgacgtcctgcccaagtgaacagctgcggcagcccctcccagcctacccctcctgcgctgccccagagcctgggaaggaggccgctatgcagggtagcactgggaacaggagacccacctgaggctcagccctagccctcagcccacctggggagtttactacctggggaccccccttgcccatgcctccagctacaaaacaattcaattgctttttttttttggtccaaaataaaacctcagctagctctgccaaaaaaaaaaaacaaaaaaaaaaaaaaaaaaaaaaaagaggggggcgcgcgcgcgcccaagaaggttccccccgagggggcgcccagatacccgcgcggcccccgggttttggggaacaagggggggccccccaataggaggaggagccgcgccaattataatagcgacagcgggccggtgggcgccggcggcttatcacacaacggcgcaggcgaccgggggggaaaacagcgcggccaccgccgcggcgaaacccctcggggagagagggacaccctataaacccgcgaggcgggagggaacaaatatggtgggagaccaaaacattgcgctctccagaggggaatttataaacgcctctctatcgaggggagagacacattgtatcgcagtttgtttaaacgcgtctgtgtaaattacgggtgggggtcaaaacataagctgtgagagatatgttagctgagtgaggtgcgaaggaaaaaactgttgagaggtatacaataggggatatattagattatgtaagaaaaaaattattttatcaccccaggggacccgctttggaggagtaagn

SEQ ID NO: 607203 - DNA, 138 bp, Homo sapiens
gctttgggggagagcactcagatttctccacgctgactctaacaataggtctagagagcaggcatgggacattggtggcttgggctttttacagtaatgaggagttggggttgaggttggggtgaaagttcttgtgca

SEQ ID NO: 607204 - DNA, 336 bp, Homo sapiens
  misc_feature (10)..(10): n is a, c, g, or t
  misc_feature (64)..(64): n is a, c, g, or t
  misc_feature (93)..(94): n is a, c, g, or t
  misc_feature (104)..(104): n is a, c, g, or t
  misc_feature (117)..(117): n is a, c, g, or t
  misc_feature (171)..(171): n is a, c, g, or t
  misc_feature (250)..(250): n is a, c, g, or t
  misc_feature (264)..(264): n is a, c, g, or t
  misc_feature (330)..(330): n is a, c, g, or t
caccttttgnctgtcattcttgacattaccacctccaggtacatgatgagcattttcaagaganccaactttagcttgggccttttctttganntcttgttttnccctctccttttncccccgtccgccccctggcctgtggcgggtgttcttcggggggccacgtttggntgtctcttggcttgggtcttttttcttggtttctttttgtgcctgcccccctttgggctggtttttgttgttgtctgtngttccgtttttggntttgtctttcttcgggtctggcggtggttggttatttggccgaggctgcttgggagtagcaggagnttttgg

SEQ ID NO: 607205 - DNA, 265 bp, Homo sapiens
agcgaacctctcgaactatatccgtctgggcggaacggggcccacgtattatatttcagaccttcagcgtttcacgatcgcaaagtacttctcgtagggtgcatcgcacatagtggagcgtcgcgctttgcgcttgttacaggccggtcgctgaactacagtttctggtgactggaaaaccctctgcgtgagctcacccgcatgttccgtaaaggattggtgaacctagaacgtcgggctttccagactaaggatcttgacggag

SEQ ID NO: 607206 - DNA, 464 bp, Homo sapiens
  misc_feature (43)..(43): n is a, c, g, or t
  misc_feature (79)..(79): n is a, c, g, or t
  misc_feature (104)..(104): n is a, c, g, or t
  misc_feature (188)..(188): n is a, c, g, or t
  misc_feature (230)..(230): n is a, c, g, or t
  misc_feature (235)..(235): n is a, c, g, or t
  misc_feature (418)..(418): n is a, c, g, or t
  misc_feature (422)..(422): n is a, c, g, or t
  misc_feature (441)..(441): n is a, c, g, or t
  misc_feature (445)..(445): n is a, c, g, or t
  misc_feature (453)..(453): n is a, c, g, or t
  misc_feature (461)..(461): n is a, c, g, or t
  misc_feature (464)..(464): n is a, c, g, or t
caagaatcaactcgaagccaaagtaatccggaatcatgttacntgaaatcgaattccggcaacgaatcgcgttgttcangccccgtgtttgaattttgcccaancgttgtctcgcgcgctcgttcggctggaatgctgatcgccgcgaaagccgaacgagtacgtcacccctggttgaatgccgtcgnccgcgatgccgcgtgcgaacagcgaaggcatcgcaacgaagngcttngcgacggcggcagcggtgacacaagttcgaatcgttttatgcatggtacggacccccaaagaatggtttccattctccctgtagggtcttttcgccatcttgatattggtcaagccagcgtaaacgtggggcggttttgcgcaggctcggtcgcacagcccgtcagcagcaggtccagcagantcgncacgcctcggatcgcacgncganacggcacntcgcggcnatn

SEQ ID NO: 607207 - DNA, 250 bp, Homo sapiens
gtctgattcatcagagcaacagtcatattctgagactacactctggcaactgcttcttcatgtagggaattgataatttagaaactagttgcattattcagtatgtctccaaaggatttttttttataagtaaactatccgcctaaatagttaagccctttaggggcaagcaaaaacagcccttattaccccatcaacaacccagtttgacacggtaattcagtgttctatagggcaaacagtgtttttc

SEQ ID NO: 607208 - DNA, 389 bp, Homo sapiens
tagacacatagaggatccctctctgcctccataattccctcagaaaataattctgcacacactgcaccctggcaaggagactcatagcccttcaagagtcccccacatggccagacacagtggctcatgcctgtaatcccagcactctgggaggccaaggcgggcagatcacttgaggtcaggagttcaagaccagcctggccaagatggtgaaaccctgtctctactaaaaatacaaaaattagccaggcatgctgatgggcacctttaatcccagctactcgggaggctgaggcagagaattgcttgaacccgggaagcagaggttgcagtgagctgagattgcaccactgcactccagcctgggtgacagagtaagactccgtctc

SEQ ID NO: 607209 - DNA, 290 bp, Homo sapiens
ggggtttttttttctccccctgcccggggttaaagaatgggggcccgaaaaaaaaaaaaaaactaacccccttgttgggttgaaggttcctttttgcccgttatgttcgggaacccccataccctgaaaaagtttggctttgaggggccattttcattttcatcaagggtgataattgtccaagggctttttccctttgttggctaaataaccccccaggggggggttttttgttgtttggggggtgaattttaggttccaataaaaattttttttttgttttgccccca

SEQ ID NO: 607210 - DNA, 206 bp, Homo sapiens
cggggtccaagcggtccaggttatattgacccgggatgggtcttcactcgctccttcttcctcgccagtggggtgattcacggtagcatgagcggtccttgttagtccaggattgcccagccacatcgatgtgatggacgaaaatggaccctcctgagtcctacccgcttcctgtggtgcttaattgctagtccgtagtaagtaga

SEQ ID NO: 607211 - DNA, 121 bp, Homo sapiens
  misc_feature (70)..(70): n is a, c, g, or t
  misc_feature (80)..(80): n is a, c, g, or t
gatccacctgccttggccttccaaggtgttggaattacaggcgtgagcaaccgcgcctggtctatatgtnatttcaaatnaggtggccttataaatataagcagatgggtttctgggcaaa

SEQ ID NO: 607212 - DNA, 182 bp, Homo sapiens
ttagatggctgtgtcatagcagccgtgtccatgaaagtgggatcaacacaacgaacataagatgtcagtcgattaggcgataatcttcttctgttttttttttggaaacaaattctcactcatggttttggccatgtgggccaggcggttcttaaactcctgacctcaagtgatcctccccg

SEQ ID NO: 607213 - DNA, 1100 bp, Homo sapiens
  misc_feature (48)..(48): n is a, c, g, or t
  misc_feature (61)..(61): n is a, c, g, or t
  misc_feature (247)..(247): n is a, c, g, or t
  misc_feature (275)..(275): n is a, c, g, or t
  misc_feature (635)..(635): n is a, c, g, or t
  misc_feature (688)..(688): n is a, c, g, or t
  misc_feature (864)..(864): n is a, c, g, or t
  misc_feature (966)..(966): n is a, c, g, or t
cccgggaagacgcggccatctggggttgggtgcgcccgcgccacttcntgtctcatcaatngtgctctggctgggtcgtagtgcgcaggagccatctcgtccgcatcggtggcgcagcgagcagggttatagatacatgtacagtaaagcaacgcaccggcagttgccaacgaagtagagcaagggacatcaaaaataaaatagcacccaatcaaccaggagtgcgagagaccgccggctccacccntatttctcatcatccctctctatcaccngtatataggagtgcgcgaggaggatatgaggtatagtggaagaagagcgatgaacgaaagccgagggagtgagacgcgtggtatcgcgcgacatagagaggaccacgccgccaacacagccccacgccccgcgcaccaggcccacgtccgagtgtggaagaccgcgagtacgcgtcgagcgcatatctaaatattaccccgtgagtgttgagcgtgcgattggatatatgtttcgctgctgttgtgcgtgtgtccgtggcggggtgtgtgctttgtgttggtagtggttcggcgcgtgcgcgcgcgacccggcgcatctgactgcacgccagtcagagcggttaacgctgcatgacggtntctagtgaaattatcagggaattgtactagcataggatgatacagtgagaaanagtgtcaaagcatttatattacagtattgtacaaagacagctgtatcgatacaacttcatgtgtttaatcagcaccacggcaacgtcgcgctccaccgagcagatcgcgcagaacagaataagagtgagttgtgagagactgggtaagcgatgaagtggtatagctcgcgaaccantagtagactccgacgcacacagacaccccacttcacgacggacgctccaccgtcacgtgatccttgctccactctaccgctctcacgggcgtcgcgcccgangcacgtcgcggcgtgtcggcagagacgctggagacgggacggaagtacatagcgagacacggctcagagcaggatctctggcaacgtacaggtagcgtctgagcgcgttgtcgtacgaaagtgaacgataagtt

SEQ ID NO: 607214 - DNA, 134 bp, Homo sapiens
cagccacagagaaaaatgaggaagaacaaaaagcggaaaccctgataaacccatcagatctcatgagatttattcactatcacaggaatagaacaggcccctttgattcaattacttccccccctgtggaaaag

SEQ ID NO: 607215 - DNA, 310 bp, Homo sapiens
gattaatgtagaacgagcaggaaaaggggtgatacggagctcaagggcacacactgggaatggactcacacggcagccttgagacgcacagggatacaactgaccaccctccaacataggcatgtgagaaaacgaacacgaggcatgcgttagacagatacatgtgagggatgcagattccagtggttaccttaagaaactggagttaggcataatcccactcagcagacaatcccgatcagtggacagcctatgaaacgcatggggccatcatgcagaccaaagcggcccgtgagttttgtacgatcct

SEQ ID NO: 607216 - DNA, 352 bp, Homo sapiens
agggaggctttttaacccaggaggcaaaggttgcaacgaacttagatcgcgcccctgccctccagcctgggtgataaagtgagattccgtttccaaaaaaaaaaaaaaaaaaagctgtgcgaaaaaatttgtttttctctggggccctttctttcttttctttttaaaccaacccaaaaattttacatcccagtttttaaacaaagtggggccttccaaactttttgtattacaataaccttcaaaagccccttccccttaaagtttgttgtttttgttttaatcatccccccaaataaatgttttagctttgttttaaactgtgagttttcataaaattgtgttcccccca

SEQ ID NO: 607217 - DNA, 209 bp, Homo sapiens
gtctctaggtcgccgggtccaccgccgcacatgcctcggggaagcgcagcgcgctccggcagcagcgcccgcggcctctgccaccgccggccacgcctgggcgcccaccgccctgccggttgtgtgggagcaggcgcggggtacgtggccggtgtgaccgtatgcgaggcctgcccgacgtcgcgggggggtcgagcctcttcggcgtc

SEQ ID NO: 607218 - DNA, 1059 bp, Homo sapiens
  misc_feature (301)..(301): n is a, c, g, or t
tgggtttaaaaaaggggtattttttggggggaaaaaaaaaagggggggccccaaaggccccccccctttaaagggggttaactggaaaatgggaaggggggaaaataagggggggggggaaggactgggggcagagaacccccccaacaggaggggtgtcctctctctctcttctcatcttgtgtgagtgactcttgagtgggcgagccggggtgcccaagggggatcataacctccttgggaggcgcaatgtggtggcgcacataagaggctaacaccacccttgttgtgcttgctaccncaaaatctccgctgcgtcatacaccaagaaaaactgaactctcgacgaaaagatggcctcggtagacgcgaaagtgcacagccacaaagggctacaacggttggagaggagggggatcgccccgcttgtcaaaaaaagctcaagaaggacacacccccgtggggcgcatcatagcggccgcccaaggaggaccacattaagggggagcccccaaagaacgccgttgtttccaaccacttttacgtaggcagcgcacaccacatactcgggggacgacttccaacaaaaaaccggcaggccatcaagtgctccccccctcgagtaacacttctgcaacacgtcgggcgacacgggacgcgacagtgcaagagaacaattccagagtaaagccaaagggggagaatgaccttggcacccaaaagccccctggcaaccaccacaaaaaagagcccggcgaaaattctctcggagagaccaccccgcgggtgaacacaaccgcaccaagctctcccgagaagggccaccacaagattctgggggggagcaccacatagtgcactgaccaggggacgccggacgtccaccgaaaaacagagtgcgacagcgaaaccctgggcaggggtcaaccagtgtgcgctcagcgaagcatagcaaacatgcagcgacggcaccaacggcaccacacagacaagggtgattaacgcagccaacgacaccaggccaccgacacaatagctacctactgggtagacacgcaa

SEQ ID NO: 607219 - DNA, 145 bp, Homo sapiens
taatcaaggtacttttttgtcattgccaaagcaacgaagaatcccctttttcccttcattattgacagcttcagttctctgtacttactgtgtcatcctatcctttcctttcccttgagctctggactgctcttcccaagggaga

SEQ ID NO: 607220 - DNA, 1004 bp, Homo sapiens
cgctcctgtgcctgcctgctcatgctccaacagctacaggagtgtggacgggcgagtgaagaacatgacgtggaggcgtgcaccaggacccaagctgaagacgatccagcagggtcgactccgagcctgtcgcgagcgcgtggacagagagagggacctgccggacgacagcacacaaagttatcctgcgtgtcggcgcgctgcctcggtggacggcagcttgcattcattgtgccttctttactctgaggtttcctgtctgagacacctgcgtctgctctatcgcttggaccgagtatccaggaccgggctgactccggctgtgacgtttgagtggggccatgctgccatcctcactcgtggcggcttgatgagcatgtgctgtggatgaaggctgatctgaatcactccgagtaggtgcgtgcagacgtccccagccgcttgttctcgggcgagattgcgccgcagaagaagaggggtagttgggcgtgcactcggctccctcggtgtggccgagagctatggcgccttgtctcgctgatgttggattgagttgagtctagtctaaccttggatgtccaggcttgccttggtcctcgattctcttttttcttttgttgtctttgcatccaccacgcttcattcatctccaagaaaggagcgcatggtgcagaaacggggtccggcttttccaacctgggagcctgctgctcatcgtggccatgggcgggatcttgtgcccgtctttgggcctgccctggtttggtgctgcatgtccgtctgtcactcaaggccaacgcgctcacttgtcatgagcaaggtgtgggcacctgtgggaaaggcccaagattccaggcagttcaagagcagcgggtggagcggggtggtggttggcctgtggtggctttcctgtttcacgggatctggccggggatcccctgggcggggcttggattcttgctggaggacccctaaggagcagtcttagaggggtttgggcatgc

SEQ ID NO: 607221 - DNA, 650 bp, Homo sapiens
  misc_feature (46)..(46): n is a, c, g, or t
  misc_feature (61)..(63): n is a, c, g, or t
  misc_feature (72)..(72): n is a, c, g, or t
  misc_feature (83)..(83): n is a, c, g, or t
  misc_feature (148)..(148): n is a, c, g, or t
  misc_feature (155)..(155): n is a, c, g, or t
  misc_feature (157)..(158): n is a, c, g, or t
  misc_feature (160)..(161): n is a, c, g, or t
  misc_feature (165)..(166): n is a, c, g, or t
  misc_feature (168)..(168): n is a, c, g, or t
  misc_feature (170)..(170): n is a, c, g, or t
  misc_feature (175)..(175): n is a, c, g, or t
  misc_feature (189)..(190): n is a, c, g, or t
  misc_feature (193)..(193): n is a, c, g, or t
  misc_feature (195)..(195): n is a, c, g, or t
  misc_feature (222)..(222): n is a, c, g, or t
  misc_feature (224)..(224): n is a, c, g, or t
  misc_feature (228)..(228): n is a, c, g, or t
  misc_feature (231)..(231): n is a, c, g, or t
  misc_feature (234)..(234): n is a, c, g, or t
  misc_feature (244)..(244): n is a, c, g, or t
  misc_feature (246)..(246): n is a, c, g, or t
  misc_feature (248)..(248): n is a, c, g, or t
  misc_feature (250)..(250): n is a, c, g, or t
  misc_feature (300)..(300): n is a, c, g, or t
  misc_feature (303)..(303): n is a, c, g, or t
  misc_feature (307)..(308): n is a, c, g, or t
  misc_feature (310)..(310): n is a, c, g, or t
  misc_feature (321)..(322): n is a, c, g, or t
  misc_feature (332)..(332): n is a, c, g, or t
  misc_feature (341)..(341): n is a, c, g, or t
  misc_feature (345)..(345): n is a, c, g, or t
  misc_feature (361)..(361): n is a, c, g, or t
  misc_feature (572)..(572): n is a, c, g, or t
  misc_feature (586)..(586): n is a, c, g, or t
  misc_feature (638)..(638): n is a, c, g, or t
tggggggtgtggtggttagaggagaggtgaaggaggaggggggggngggggggggggaggnnngggttgganagaggggtganaatgtgtgtgatggggtgatggaagggttggttgaggttgggaggtgggatgaagaaggaatagnggatggngnngnngtgnnanangatgntgatgtgtaatttnnggngngtgttaaaatagtggaggaagtgtttnanggtnatntgntgaggattangntngnggggttgtaggtgaaagggatgggagaatgtggagtgttggttatagtantgntganntngtgggggaagnngttgagaganaggaaaganaggnatggtgaatttgaggnaaggattgttgtaggagtgaaggtgtgggtgggggtggagaaggttgtagaggtggagagagagaaggggaaggaggggtggtgtggtggtgggaatgggtgggatgatgttgggtggaatgaggttggtgttgtgggggtgtggagaaggaatgtgatagttttgtggggggaggttggatggagggaggatgaaatggatatgaaagtnggtgtgatgatggntgtgaaagtgaatggggtagatgttgaatggagggaggtgtgttggggtggngagagtgggttg

SEQ ID NO: 607222 - DNA, 784 bp, Homo sapiens
tacgagcacgaggtctcctgcttgaggtaggagggagactggatgaacccgtccagcttcagactccagctttaactatcatgtctgctcctaatgggaggcccaaagctcagggctgggagagcctggaggtccccactatgaatctccagcaggagggtccttctctccactgagaaccgtcactcctcccaccccctccccctgggtggacaaatcaggacacaacagagggcaagaggacaccattagcatttaaaatgtagccccaggatatggagcctggagaaacacatgtactggaccacttaccctctggaggcactacagcgtttccactccggaaggctggagagggaaggtggagataagatgatcatttggagctataaggagtaccaagcccatattcctactgagtgccacacagctgaaacaccatgacaccactcagtgggcacagtgaaacatacagactgtaggtcctcaagagccttcagagatgatccagacacaaaaccccatatagcagacgagggaaaacatggaggcacaagacaggacacggaagagcgaccacaccacggacccaagaacccacgggcacacagacaggagactgaaaacccagggacataggaaaaagacgtcaggggaccaaactcaataggccataaacacaaggacacccatcagcacagggacgcaaaaggcatcggaaacagaagagcaactgaggccccagaaacaaccgccatggaggaccggcacaagaggccaaacc

SEQ ID NO: 607223 - DNA, 1332 bp, Homo sapiens
  misc_feature (285)..(286): n is a, c, g, or t
  misc_feature (291)..(292): n is a, c, g, or t
  misc_feature (298)..(299): n is a, c, g, or t
  misc_feature (319)..(319): n is a, c, g, or t
  misc_feature (324)..(324): n is a, c, g, or t
  misc_feature (328)..(328): n is a, c, g, or t
  misc_feature (330)..(330): n is a, c, g, or t
  misc_feature (334)..(334): n is a, c, g, or t
  misc_feature (346)..(346): n is a, c, g, or t
  misc_feature (352)..(352): n is a, c, g, or t
  misc_feature (354)..(354): n is a, c, g, or t
  misc_feature (356)..(356): n is a, c, g, or t
  misc_feature (360)..(361): n is a, c, g, or t
  misc_feature (367)..(367): n is a, c, g, or t
  misc_feature (370)..(370): n is a, c, g, or t
gcaatattgaatgatgataatggagccttagaggtcttgaatcattggttcggctgctttttatgtagtttaggctggaaatggtttcacttgctctttgactgtcagcaagactgaagatggcttttcctggacagctagaaaacacaaaatcttgtaggtcattgcacctatctcagccataggtgcagtttgcttctacatgatgtctaaaggctgcgaatgggatcctgatggaactaaggactccaatgtcgaactcttctttgctgcattcctttttcnncactnncaagannggcctgaaggaggactttcntgtanccangnacantttttagggtcnaagtgntnanaatnnactcanccnggttactttttaatggctttcataacactaactcataaggttaccgatcaatgcatttcatacggatatagacctagggctctggagggtgggggattgttaaaacacatgcaaaaaaaaaaaaaaaagaaatttggtatatttaaccatttaaatcttttataaagtttggaatgtccatgtttgattgctgcagttggtgaacccatacataaataaatgaagtaagccatactggatttaattttatgggatgttatttcccctaagacctgaaaatgaacatagtatgctagttattttccagtggtaagcctttaactttcctcacacaattgggaatcatataatataaggtacttggtccctgattaaatattggtgacgggatagaatggcatcacgtggtttattatcgaaaagagtgggaaaagtatatagcttttagcaaagggtgttggcccattctaaaaaaatgagacgaatatatagaaatagtgggggcatttcttccggtagggggagtgtatgtgtggacatttctcccaatctcttcccactcttgttttctccccattattggaataacgtgactgtgaagatgattgaatccttatcataaatttaatgtttaaagaaaactgtagtgacaagtgagactcctccctaattcaagctaggagcaccggaagaagagtgccaaattaatgccttgaaagagaaagcgccagggatgggccatatggatcttttataacctctggggtaaagatgatctgtacatataacagttgttaacggtccggtgtgataatgaaaccctaggtttgagccaacccggtgctagaggcttattcctcctgcaggcaactccggtatacaggatagagagagactggcgaacattgcttttgttgcagacgatttcgaacaacaacaacgacggctttgtggtgttgttc

SEQ ID NO: 607224 - DNA, 664 bp, Homo sapiens
agcggtcgcccaggctggtgcagtggcatgatctcagcttactacaacctctgcttccggggttcgggagattctcatgcctcagcctcctgagtgtctgggattataggcgtgagccactacgcccagctaatttttatatttttagtagggacggggtttcacgacgttggccaggctggtctcgaacttctgaccttaggcggtccgccagcctcggcctcccaaagtgctgggattacagacgtaagccacagtgcccagcccacccctatatttgaaatcgtgtctagattgcatatcatagctagtcccatgtaaactactatgtcagttgtcgttactggctgggtgtagtggcggtgcaggcctgctaatcaggggtgctggcggtcgggaggactcgcttgagactcatgaagttctagaccagcctttgcaaacacatgcgaagacctctgtctctattttttaagcctcgttacatgccatgcacttcgcggaggccaaggtgggcaggactcgctttgagctcaggggttcagagacccagccttgggctatcatgggcgaaagccccatctctacagaataaacaatactaaaaatcggctgggtatcgtggcatgcagcctgtgttcccagcctatccggcgaggggcct

SEQ ID NO: 607225 - DNA, 124 bp, Homo sapiens
tggctaacttatgttgttgtttgtaagtgtcgaaacttgcaggttccttagtcttacttctccgagaggtccaaactccttatccttggtatgtccaatctcgacgtaacggtgagagtaagtt

SEQ ID NO: 607226 - DNA, 457 bp, Homo sapiens
tgccatgcccccatcctgggcctataaaaaccctgagaccctagcaaggctcctccatcagctgagagctgcttccactcaataacacttcgcactgattctccaagcccaggtgtgatccgattcttctggtacacccaggcaagaacccaggatacagacagccctctgtccttttgataactagagggtctcattgacctggttaacacaagctgcctacagacggcaaaactaaaagagcaccctggaacacacgcccactggggcttcagctgtaaacattcacccctagacacggctatggggttggagcctgcctgtctgtatgctcccctagaggtttgggcagcagggcactgaagaatcaagccacacccccatcgcacaccctgcgagggggacaagggaacctttctcttttcagttggtcttaataaacactgagtaaatgaaa

SEQ ID NO: 607227 - DNA, 114 bp, Homo sapiens
gccatcacgcttgcaggcatcagcttggcaggcatcaagcttggcaggcatcaagcttggcaggcatcaagcttggtcaggcatgcaaagcttggtcaggcatgcacgcttggt

SEQ ID NO: 607228 - DNA, 869 bp, Homo sapiens
  misc_feature (8)..(8): n is a, c, g, or t
  misc_feature (747)..(747): n is a, c, g, or t
  misc_feature (757)..(757): n is a, c, g, or t
  misc_feature (808)..(808): n is a, c, g, or t
  misc_feature (854)..(854): n is a, c, g, or t
gaacaatnagctaggtacgaggctgggtgttgaatcggccgaggcttctccgctccttctaggatctccgcctggttcggcccgcctgcctccactcctgcctctaccatgtccatcagggtgacccagaagtcctacaaggtgtccacctctggcccccgggccttcagcagccgctcctacacgagtgggcccggttcccgcatcagctcctcgagcttctcccgagtgggcagcagcaactttcgcggtggcctgggcggcggctatggtggggccagcggcatgggaggcatcaccgcagttacggtcaaccagagcctgctgagcccccttgtcctggaggtggaccccaacatccaggccgtgcgcacccaggagaaggagcagatcaagaccctcaacaacaagtttgcctccttcatagacaaggtacggttcctggagcagcagaacaagatgctggagaccaagtggagcctcctgcagcagcagaagacggctcgaagcaacatggacaacatgttcgagagctacatcaacaaccttaggcggcagctggagactctgggccaggagaagctgaagctggaggcggagcttggcaacatgcaggggctggtggaggacttcaagaacaagtatgaggatgagatcaataagcgtacagagatggagaacgaatttgtcctcatcaagaaggatgtggatgaagcttacatgaacaaggtagagctggagtctccnccttggaaangggttgacccgacgaagattaaacttcctcaagggaagcttattttgaaanaaggagattccggggaagcttgcaagtcccaaggattttccggganaaaattctgttgggt

SEQ ID NO: 607229 - DNA, 2088 bp, Homo sapiens
  misc_feature (8)..(8): n is a, c, g, or t
  misc_feature (2088)..(2088): n is a, c, g, or t
gaacaatnagctaggtacgaggctgggtgttgaatcggccgaggcttctccgctccttctaggatctccgcctggttcggcccgcctgcctccactcctgcctctaccatgtccatcagggtgacccaggccgtgcgcacccaggagaaggagcagatcaagaccctcaacaacaagtttgcctccttcatagacaaggtacggttcctggagcagcagaacaagatgctggagaccaagtggagcctcctgcagcagcagaagacggctcgaagcaacatggacaacatgttcgagagctacatcaacaaccttaggcggcagctggagactctgggccaggagaagctgaagctggaggcggagcttggcaacatgcaggggctggtggaggacttcaagaacaagtatgaggatgagatcaataagcgtacagagatggagaacgaatttgtcctcatcaagaaggatgtggatgaagcttacatgaacaaggtagagctggagtctcgcctggaagggctgaccgacgagatcaacttcctcaggcagctatatgaagaggagatccgggagctgcagtcccagatctcggacagcatcattgctgaggtcaaggcacagtacgaggatattgccaaccgcagccgggctgaggctgagagcatgtaccagatcaagtatgaggagctgcagagcctggctgggaagcacggggatgacctgcggcgcacaaagactgagatctctgagatgaaccggaacatcagccggctccaggctgagattgagggcctcaaaggccagagggcttccctggaggccgccattgcagatgccgagcagcgtggagagctggccattaaggatgccaacgccaagttgtccgagctggaggccgccctgcagcgggccaagcaggacatggcgcggcagctgcgtgagtaccaggagctgatgaacgtcaagctggccctggacatcgagatcgccacctacaggaagctgctggagggcgaggagagccggctggagtctgggatgcagaacatgagtattcatacgaagaccaccagcggctatgcaggtggtctgagctcggcctatgggggcctcacaagccccggcctcagctacagcctgggctccagctttggctctggcgcgggctccagctccttcagccgcaccagctcctccagggccgtggttgtgaagaagatcgagacacgtgatgggaagctggtgtctgagtcctctgacgtcctgcccaagtgaacagctgcggcagcccctcccagcctacccctcctgcgctgccccagagcctgggaaggaggccgctatgcagggtagcactgggaacaggagacccacctgaggctcagccctagccctcagcccacctggggagtttactacctggggaccccccttgcccatgcctccagctacaaaacaattcaattgctttttttttttggtccaaaataaaacctcagctagctctgccaaaaaaaaaaaacaaaaaaaaaaaaaaaaaaaaaaaagaggggggcgcgcgcgcgcccaagaaggttccccccgagggggcgcccagatacccgcgcggcccccgggttttggggaacaagggggggccccccaataggaggaggagccgcgccaattataatagcgacagcgggccggtgggcgccggcggcttatcacacaacggcgcaggcgaccgggggggaaaacagcgcggccaccgccgcggcgaaacccctcggggagagagggacaccctataaacccgcgaggcgggagggaacaaatatggtgggagaccaaaacattgcgctctccagaggggaatttataaacgcctctctatcgaggggagagacacattgtatcgcagtttgtttaaacgcgtctgtgtaaattacgggtgggggtcaaaacataagctgtgagagatatgttagctgagtgaggtgcgaaggaaaaaactgttgagaggtatacaataggggatatattagattatgtaagaaaaaaattattttatcaccccaggggacccgctttggaggagtaagn

SEQ ID NO: 607230 - DNA, 773 bp, Homo sapiens
  misc_feature (275)..(275): n is a, c, g, or t
  misc_feature (308)..(308): n is a, c, g, or t
  misc_feature (326)..(326): n is a, c, g, or t
ctccttcggagcctcgagagcctttttcgacggaaactggacactggaccggcagcgtgaggagactccagccccgctggctgctgcttatctcactcgtgttccctgccactgtctagatccgaggcggacccacaggctcgttagcagtgccacaagatcttacagaggacgaacaaacagtagaagattccataattgaggatgaagatgatgaagccgacgtagaagaagatgaacccacagatttggtagaagataaagaggaagaagangtgtctggtgaacctgaagcttcaccgagtgcngatacaactatactgttngtaaaaggagaagattttccagcaaataacattgtgaagttcctgcgaggctttaccaacaagggtacagaagattctattgatgaatccttagatgcctcattccgttatcctcatgactaccagttttatatccagaatttcacaagctcttcctctgaacactgtagagccaccccagagacaggcaacttttgagaactctgtcaatcctgcagaagccatgggcggaccaccatttgtttggacatcaactgaactacaaagatctgacgggaatgtatccaagatgcagccttcatcaaacagtaccagtattgaagataggatggctatatggataaacaatcttaagtataaggcccttgtggcctcgtgctctgggaaactgtggccttcataactcctaaaatatatacgcctacgacccttccaggtcggcgtcct

SEQ ID NO: 607231 - DNA, 1113 bp, Homo sapiens
  misc_feature (8)..(8): n is a, c, g, or t
  misc_feature (873)..(873): n is a, c, g, or t
  misc_feature (878)..(879): n is a, c, g, or t
  misc_feature (885)..(885): n is a, c, g, or t
  misc_feature (891)..(891): n is a, c, g, or t
  misc_feature (898)..(899): n is a, c, g, or t
  misc_feature (903)..(903): n is a, c, g, or t
  misc_feature (906)..(906): n is a, c, g, or t
  misc_feature (912)..(912): n is a, c, g, or t
  misc_feature (925)..(925): n is a, c, g, or t
  misc_feature (939)..(942): n is a, c, g, or t
  misc_feature (947)..(947): n is a, c, g, or t
gaacaatnagctaggtacgaggctgggtgttgaatcggccgaggcttctccgctccttctaggatctccgcctggttcggcccgcctgcctccactcctgcctctaccatgtccatcagggtgacccagaggacttcaagaacaagtatgaggatgagatcaataagcgtacagagatggagaacgaatttgtcctcatcaagaaggatgtggatgaagcttacatgaacaaggtagagctggagtctcgcctggaagggctgaccgacgagatcaacttcctcaggcagctatatgaagaggagatccgggagctgcagtcccagatctcggacacatctgtggtgctgtccatggacaacagccgctccctggacatggacagcatcattgctgaggtcaaggcacagtacgaggatattgccaaccgcagccgggctgaggctgagagcatgtaccagatcaagtatgaggagctgcagagcctggctgggaagcacggggatgacctgcggcgcacaaagactgagatctctgagatgaaccggaacatcagccggctccaggctgagattgagggcctcaaaggccagagggcttccctggaggccgccattgcagatgccgagcagcgtggagagctggccattaaggatgccaacgccaagttgtccgagctggaggccgccctgcagcgggccaagcaggacatggcgcggcagctgcgtgagtaccaggagctgatgaacgtcaagctggccctggacatcgagatcgccacctacaggaagctgctggagggcgaggagagccggctggagtctgggatgcagaacatgagtattcatacgaagaccaccaggggtaagcagngggcnnagctcnggctangggggcnnaaanccnggccanataaggcgggccnagtggcggggggcnnnncctancggacaatctcaggcgggggggaaaactaacaccgtggggacggggtggacccgagccgccaaagaaagggggggcccagacacccccgggccacggaggggcgccggcggcgagagaccggaccccccggagagaagaaccgcccacaaagtctcacgcccaaaa

SEQ ID NO: 607232 - DNA, 1882 bp, Homo sapiens
  misc_feature (258)..(259): n is a, c, g, or t
  misc_feature (269)..(269): n is a, c, g, or t
tcgccccacttgattttggaaggatctcgcttcctgggagatggtgatggaatctcccatgaatgaacaagcctcccggtctcaagccctgacggtgccatggaattgcccatgggtggaatcatattggaacatgtaaacccatgtaagttgaggtcaatgaaggggtcattgatggcaacaatatccactttaccagagttaaaagcagccctggtgaccaggcgcccaatacgaccaaatccgttgactccgacnntcaccttccncatggtgtctgagcgatgtggctctctgctcctcctgttcgacagtcagccgcatcttcttttgcgtcgccagccgagccacatcgctcagacaccatggggaaggtgaaggtcggagtcaacggatttggtcgtattgggcgcctggtcaccagggctgcttttaactctggtaaagtggatattgttgccatcaatgaccccttcattgacctcaactacatggtttacatgttccaatatgattccacccatggcaaattccatggcaccgtcaaggctgagaacgggaagcttgtcatcaatggaaatcccatcaccatcttccaggagcgagatccctccaaaatcaagtggggcgatgctggcgctgagtacgtcgtggagtccactggcgtcttcaccaccatggagaaggctggggctcatttgcaggggggagccaaaagggtcatcatctctgccccctctgctgatgcccccatgttcgtcatgggtgtgaaccatgagaagtatgacaacagcctcaagatcatcagcaatgcctcctgcaccaccaactgcttagcacccctggccaaggtcatccatgacaactttggtatcgtggaaggactcatgaccacagtccatgccatcactgccacccagaagactgtggatggcccctccgggaaactgtggcgtgatggccgcggggctctccagaacatcatccctgcctctactggcgctgccaaggctgtgggcaaggtcatccctgagctgaacgggaagctcactggcatggccttccgtgtccccactgccaacgtgtcagtggtggacctgacctgccgtctagaaaaacctgccaaatatgatgacatcaagaaggtggtgaagcaggcgtcggagggccccctcaagggcatcctgggctacactgagcaccaggtggtctcctctgacttcaacagcgacacccactcctccacctttgacgctggggctggcattgccctcaacgaccactttgtcaagctcatttcctggtatgacaacgaatttggctacagcaacagggtggtggacctcatggcccacatggcctccaaggagtaagacccctggaccaccagccccagcaagagcacaagaggaagagagagaccctcactgctggggagtccctgccacactcagtcccccaccacactgaatctcccctcctcacagttgccatgtagaccccttgaagaggggaggggcctagggagccgcaccttgtcatgtaccatcaataaagtaccctgtgctcaaccaaaaaaaaaaaaaaaaaaaaaaaaaaccgggggctctaatgccgggggcgcgggaaaaacgaggagcgttagttgaagggcgccccagtggtccgtatgcgcttgtttcccgttgaaccccaggtctcttttgtgtgtaccacacggggcgataaactctgccgcgggctcccccaatatgtaggggcacgcccggatataaattcccggattagcccggtttacccgtgcttttaatactctccggcaaaacggcgacgacagaaacaacacagacacacactgtcaccaactcacaaccgtaacacc

SEQ ID NO: 607233 - DNA, 108 bp, Homo sapiens
accattgacactccgcttcataactctcacagtgctcttgtcggaggtgtcctgccctcctaccccagcgtgctgggagtgcgacgccagagctatctccctcctccc

SEQ ID NO: 607234 - DNA, 893 bp, Homo sapiens
  misc_feature (652)..(652): n is a, c, g, or t
gcccgaggacagggaagaggccaaaggcacaccaacaaggtgggtggagaggaaactggtactttaagcttctccgctccttctaggatctccgcctggttcggcccgcctgcctccactcctgcctctaccatgtccatcagggtgacccagaagtcctacaaggtgtccacctctggcccccgggccttcagcagccgctcctacacgagtgggcccggttcccgcatcagctcctcgagcttctcccgagtgggcagcagcaactttcgcggtggcctgggcggcggctatggtggggccagcggcatgggaggcatcaccgcagttacggtcaaccagagcctgctgagcccccttgtcctggaggtggaccccaacatccaggccgtgcgcacccaggagaaggagcagatcaagaccctcaacaacaagtttgcctccttcatagacaaggtacggttcctggagcagcagaacaagatgctggagaccaagtggagcctcctgcagcagcagaagacggctcgaagcaacatggacaacatgttcgagagctacatcaacaaccttaggcggcagctggagactctgggccaggagaagctgaagctggaggcggagcttggcaacatgcaggggctggtggggncttccgacccagttggcggtggatcctaagcgtacgagatggcgaagaattggcccctcagaggggtgtgagaacctcatggaacaggtgagctgaggctcccgggaaggggccagaaacaacctcagacaattaaaagagaacgcgaggaggcccaacttcgcacttgggggctgaaaccccggcgaaaaataacagagaaagaaaacccgaggaagaaacaaaaagggaggagagaaga

SEQ ID NO: 607235 - DNA, 1866 bp, Homo sapiens
  misc_feature (258)..(259): n is a, c, g, or t
  misc_feature (269)..(269): n is a, c, g, or t
tcgccccacttgattttggaaggatctcgcttcctgggagatggtgatggaatctcccatgaatgaacaagcctcccggtctcaagccctgacggtgccatggaattgcccatgggtggaatcatattggaacatgtaaacccatgtaagttgaggtcaatgaaggggtcattgatggcaacaatatccactttaccagagttaaaagcagccctggtgaccaggcgcccaatacgaccaaatccgttgactccgacnntcaccttccncatggtgtctgagcgatgtggctctctgctcctcctgttcgacagtcagccgcatcttcttttgcgtcgccagccgagccacatcgctcagacaccatggggaaggtgaaggtcggagtcaacggatttggtcgtattgggcgcctggtcaccagggctgcttttaactctggtaaagtggatattgttgccatcaatgaccccttcattgacctcaactacatggtttacatgttccaatatgattccacccatggcaaattccatggcaccgtcaaggctgagaacgggaagcttgtcatcaatggaaatcccatcaccatcttccaggagcgagatccctccaaaatcaagtggggcgatgctggcgctgagtacgtcgtggagtccactggcgtcttcaccaccatggagaaggctggggctcatttgcaggggggagccaaaagggtcatcatctctgccccctctgctgatgcccccatgttcgtcatgggtgtgaaccatgagaagtatgacaacagcctcaagatcatcagcaatgcctcctgcaccaccaactgcttagcacccctggccaaggtcatccatgacaactttggtatcgtggaaggactcatgaccacagtccatgccatcactgccacccagaagactgtggatggcccctccgggaaactgtggcgtgatggccgcggggctctccagaacatcatccctgcctctactggcgctgccaaggctgtgggcaaggtcatccctgagctgaacgggaagctcactggcatggccttccgtgtccccactgccaacgtgtcagtggtggacctgacctgccgtctagaaaaacctgccaaatatgatgacatcaagaaggtggtgaagcaggcgtcggagggccccctcaagggcatcctgggctacactgagcaccaggtggtctcctctgacttcaacagcgacacccactcctccacctttgacgctggggctggcattgccctcaacgaccactttgtcaagctcatttcctggtatgacaacgaatttggctacagcaacagggtggtggacctcatggcccacatggcctccaaggagtaagacccctggaccaccagccccagcaagagcacaagaggaagagagagaccctcactgctggggagtccctgccacactcagtcccccaccacactgaatctcccctcctcacagttgccatgtagaccccttgaagaggggaggggcctagggagccgcaccttgtcatgtaccatcaataaagtaccctgtgctcaaccaaaaaaaaaaaacatatgatacataaaacagtttttcgagtcggacacctatgggaccctcctgggaagaacctgttgtaacaacaaaccagctttcggcattgggggcacacaggtgtgcccgccaatgttggagttaagttgcaacgttggtggagtcaatacagcagtttgtcccacaaatggggaagaactacgtcgggtaccaaagcacacaaaatggcgtcagggagttcctcccaggccatattctagtaaccattccgccgggagggacaacgccaggaagcatg

SEQ ID NO: 607236 - DNA, 567 bp, Homo sapiens
  misc_feature (8)..(8): n is a, c, g, or t
gaacaatnagctaggtacgaggctgggtgttgaatcggccgaggcttctccgctccttctaggatctccgcctggttcggcccgcctgcctccactcctgcctctaccatgtccatcagggtgacccagaagtcctacaaggtgtccacctctggcccccgggccttcagcagccgctcctacacgagtgggcccggttcccgcatcagctcctcgagcttctcccgagtgggcagcagcaactttcgcggtggcctgggcggcggctatggtggggccagcggcatgggaggcatcaccgcagttacggtcaaccagagcctgctgagcccccttgtcctggaggtggaccccaacatccaggccgtgcgcacccaggagaaggagcagatcaagaccctcaacaacaagtttgcctccttcatagacaaggtacggttcctggagcagcagaacaagatgctggagaccaagtggagcatggtgctaccagcagaagaccggctcagaaccaacatgtactacacactggagaccgaatgaacaacattagaggccgtgagcgtc

SEQ ID NO: 607237 - DNA, 1069 bp, Homo sapiens
aattacggcttaggtacgaggctggtgtgcaagctgagaacgggaagcttgtcatcaatggaaatcccatcaccatcttccaggagcgagatccctccaaaatcaagtggggcgatgctggcgctgagtacgtcgtggagtccactggcgtcttcaccaccatggagaaggctggggctcatttgcaggggggagccaaaagggtcatcatctctgccccctctgctgatgcccccatgttcgtcatgggtgtgaaccatgagaagtatgacaacagcctcaagatcatcagcaatgcctcctgcaccaccaactgcttagcacccctggccaaggtcatccatgacaactttggtatcgtggaaggactcatgaccacagtccatgccatcactgccacccagaagactgtggatggcccctccgggaaactgtggcgtgatggccgcggggctctccagaacatcatccctgcctctactggcgctgccaaggctgtgggcaaggtcatccctgagctgaacgggaagctcactggcatggccttccgtgtccccactgccaacgtgtcagtggtggacctgacctgccgtctagaaaaacctgccaaatatgatgacatcaagaaggtggtgaagcaggcgtcggagggccccctcaagggcatcctgggctacactgagcaccaggtggtctcctctgacttcaacagcgacacccactcctccacctttgacgctggggctggcattgccctcaacgaccactttgtcaagctcatttcctggtatgacaacgaatttggctacagcaacagggtggtggacctcatggcccacatggcctccaaggagtaagacccctggaccaccagccccagcaagagcacaagaggaagagagagaccctcactgctggggagtccctgccacactcagtcccccaccacactgaatctcccctcctcacagttgccatgtagaccccttgaagaggggaggggcctagggagccgcaccttgtcatgtaccatcaataaagtaccctgtgctcaaccaaaaaaaaaaaa

SEQ ID NO: 607238 - DNA, 517 bp, Homo sapiens
tcaggctttgtcacaaccaaggtcccatttccaaggaccctccgttttaagcctatgttacagcaaggaatcgagctactcacatcagatccatcctgggtgagttctgcatcctggtacttcctcaatgtatttgggcttcggagcatttgctgtctgcttctgcgcaacggtcctgccggtggccgaccacgcatgatgcaggagcagatgacgggagcctcctatgccatgcccgcgagacagcggacgacgctttcaatacagaggagggaagctcaggagctggcggggcaccagtgggcactagatgctgccggcgaggatgctgcatgaccaacgcgctccacttcgaaggcgcgttcaagatggacggacggtcctgtacagtagggcgaccggccagggatggggtgtgtcaggaacttggccttgcaccaaacctggagactacggatcgcgctggcagcgccttggagtatagtggctgatgctcgagctggcaggcatgcaaaaa

SEQ ID NO: 607239 - DNA, 913 bp, Homo sapiens
gatatccagtattaaaactatttacatgtgtggtgctggccaatcttttgacatgctgtttcaataacatatactgacagtgaaaaagactagaataattctcctttcaagagtttcaaaatgttcatgtttacaatatttgtactgcatattgactatgtatacatgcattatagtcagcagatgtacaaaaatggtcacaggagtctttcttacttagctgaaatgtatctacatgtctatggctttatcttttaaactgcctgagagtcacaaattcttaaagtcaaatagaatagaaaacttgaaattatagtacttttggatcaagtatcatatttcaattgttgttacaagtgtgcagaattttgacttcttggattgaaggtcacattacttattgtcacatgaatagaatgtataaccgttaaatatctgtggtttgtacgacgaatggtaataacattagttcaaattttttactagaactgaaaagtataaaatcatgagtttacaatgattgaaaggtcaatgtatttaaacgatttttcatcgaataacataatacagtctatctctccaatctttatgatcatttttctagacccatgtggtgtgtagaactttacaattatctcaatttagctgaaatggagttaccccatttcctttgttgacctaaagatttgtgacctttctaccattagctgtctactccgactgatttctcctgatgacaatgtagttttgaggaatcttataaacaggaaaaaaaaaaaaaaagaaacaattgggggaccccgaaaattaaaacttggtgggggcccctgaaaagctccttcaaaacaggaaagtgtccacaaaaccggcgcgtgacaaagttgtttcaaatcaccccacgcagggaaaaaat

SEQ ID NO: 607240 - DNA, 819 bp, Homo sapiens
  misc_feature (8)..(8): n is a, c, g, or t
gaacaatnagctaggtacgaggctgggtgttgaatcggccgaggcttctccgctccttctaggatctccgcctggttcggcccgcctgcctccactcctgcctctaccatgtccatcagggtgacccagaagtcctacaaggtgtccacctctggcccccgggccttcagcagccgctcctacacgagtgggcccggttcccgcatcagctcctcgagcttctcccgagtgggcagcagcaactttcgcggtggcctgggcggcggctatggtggggccagcggcgtgggaggctagttcaccgtcaaaaacagaacaaccaaaaccaacagaaccccctaaaccagaaaaaaaacccgcagggaggcgcaggagggcgcaggaaggcggggggcgccaggggaggaagggagggcgggtaagcagagggacgccgcgcgcgagagggcgcaggagcgcgagccgagggctaggggagagagagtcgggtaggggagaggaggggcgagaggaggggggggggagaggggtcggcgggggggggggagggtggggggcgggtggaggagggtgggccgaagccgaagagagaggggagagagagggcgggcggggggagggggggagggggtggggagagggggggcgggaggggagggggggcgacgcggacggcggggagggggggctgcggggcgcgggcgcgaggaagaggcggagggggggagagtccgccgcgaggagaggggcgcggagggggggggggggagcgcgcgaggggaagaccggaggcggggggggggcacgcgcaggagaaag

SEQ ID NO: 607241 - DNA, 1585 bp, Homo sapiens
  misc_feature (258)..(259): n is a, c, g, or t
  misc_feature (269)..(269): n is a, c, g, or t
  misc_feature (1585)..(1585): n is a, c, g, or t
tcgccccacttgattttggaaggatctcgcttcctgggagatggtgatggaatctcccatgaatgaacaagcctcccggtctcaagccctgacggtgccatggaattgcccatgggtggaatcatattggaacatgtaaacccatgtaagttgaggtcaatgaaggggtcattgatggcaacaatatccactttaccagagttaaaagcagccctggtgaccaggcgcccaatacgaccaaatccgttgactccgacnntcaccttccncatggtgtctgagcgatgtggctctctgctcctcctgttcgacagtcagccgcatcttcttttgcgtcgccagccgagccacatcgctcagacaccatggggaaggtgaaggtcggagtcaacggatttggtcgtattgggcgcctggtcaccagggctgcttttaactctggtaaagtggatattgttgccatcaatgaccccttcattgacctcaactacatggtttacatgttccaatatgattccacccatggcaaattccatggcaccgtcaaggctgagaacgggaagcttgtcatcaatggaaatcccatcaccatcttccaggagcgagatccctccaaaatcaagtggggcgatgctggcgctgagtacgtcgtggagtccactggcgtcttcaccaccatggagaaggctggggctcatttgcaggggggagccaaaagggtcatcatctctgccccctctgctgatgcccccatgttcgtcatgggtgtgaaccatgagaagtatgacaacagcctcaagatcatcagcaatgcctcctgcaccaccaactgcttagcacccctggccaaggtcatccatgacaactttggtatcgtggaaggactcatgaccacagtccatgccatcactgccacccagaagactgtggatggcccctccgggaaactgtggcgtgatggccgcggggctctccagaacatcatccctgcctctactggcgctgccaaggctgtgggcaaggtcatccctgagctgaacgggaagctcactggcatggccttccgtgtccccactgccaacgtgtcagtggtggacctgacctgccgtctagaaaaacctgccaaatatgatgacatcaagaaggtggtgaagcaggcgtcggagggccccctcaagggcatcctgggctacactgagcaccaggtggtctcctctgacttcaacagcgacacccactcctccacctttgacgctggggctggcattgccctcaacgaccactttgtcaagctcatttcctggtatgacaacgaatttggctacagcaacagggtggtggacctcatggcccacatggcctccaaggagtaagacccctggaccaccagccccagcaagagcacaagaggaagagagagaccctcactgctggggagtccctgccacactcagtcccccaccacactgaatctcccctcctcacagttgccatgtagaccccttgaagaggggaggggcctaggagcaaagcgtgtcagtaccacaaaagtagcggggggggggggggtgcggggggggggggn

SEQ ID NO: 607242 - DNA, 547 bp, Homo sapiens
  misc_feature (8)..(8): n is a, c, g, or t
  misc_feature (502)..(502): n is a, c, g, or t
  misc_feature (538)..(538): n is a, c, g, or t
gaacaatnagctaggtacgaggctgggtgttgaatcggccgaggcttctccgctccttctaggatctccgcctggttcggcccgcctgcctccactcctgcctctaccatgtccatcagggtgacccagaagtcctacaaggtgtccacctctggcccccgggccttcagcagccgctcctacacgagtgggcccggttcccgcatcagctcctcgagcttctcccgagtgggcagcagcaactttcgcggtggcctgggcggcggctatggtggggccagcggcatgggaggcatcaccgcagttacggtcaaccagagcctgctgagcccccttgtcctggaggtggaccccaacatccaggccgtgcgcacccaggagaaggagcagatcaagaccctcaacaacaagtttgcctcctttcatcaacatgtagcagcaagaacaagaatgcctgggggactaagttggaaggcttgcaaggcacagaagaattccttcngtggtaacatgtgacaaccattttttaacaaggttncaattaacc

SEQ ID NO: 607243 - DNA, 1323 bp, Homo sapiens
agtcagtcttatctccttatgtgttgccagacgaaccgcatcactacagatccacagtagggccgggtgcaggtcggatgtcaaggaattggcccctgtcggcttgcctggatcaccgacggcgtgcatagacacgtctgggtgaaccggtgagatattgctgagcccagtaaaagtgaacctcgctttcgattagaagcatcaaagtcacggtggatgcttacgatgttcgccaattgatggagttccagccgagtggctgagattgccatggcaccagtcggaggctgagaacgggaagcttgtcatcaatggaaatcccatcaccatcttccaggagcgagatccctccaaaatcaagtggggcgatgctggcgctgagtacgtcgtggagtccactggcgtcttcaccaccatggagaaggctggggctcatttgcaggggggagccaaaagggtcatcatctctgccccctctgctgatgcccccatgttcgtcatgggtgtgaaccatgagaagtatgacaacagcctcaagatcatcagcaatgcctcctgcaccaccaactgcttagcacccctggccaaggtcatccatgacaactttggtatcgtggaaggactcatgaccacagtccatgccatcactgccacccagaagactgtggatggcccctccgggaaactgtggcgtgatggccgcggggctctccagaacatcatccctgcctctactggcgctgccaaggctgtgggcaaggtcatccctgagctgaacgggaagctcactggcatggccttccgtgtccccactgccaacgtgtcagtggtggacctgacctgccgtctagaaaaacctgccaaatatgatgacatcaagaaggtggtgaagcaggcgtcggagggccccctcaagggcatcctgggctacactgagcaccaggtggtctcctctgacttcaacagcgacacccactcctccacctttgacgctggggctggcattgccctcaacgaccactttgtcaagctcatttcctggtatgacaacgaatttggctacagcaacagggtggtggacctcatggcccacatggcctccaaggagtaagacccctggaccaccagccccagcaagagcacaagaggaagagagagaccctcactgctggggagtccctgccacactcagtcccccaccacactgaatctcccctcctcacagttgccatgtagaccccttgaagaggggaggggcctagggagccgcaccttgtcatgtaccatcaataaagtaccctgtgctcaaccaaaaaaaaaaaa

SEQ ID NO: 607244 - DNA, 471 bp, Homo sapiens
atcttatatatattaggtaaattacaagaaaacattatcaaagcaatactacagaccagctacatcgcacaatttacaaatgagttagtaagtaccataagtttgtaagaatatcaggtgctatcagagtattacatcaaacagttacaaaagagattaggttcccaatcagttcacaaaagctaatttaaagaatgtagcttaactacagtactgaggttgtcacacacttaactttcggtctctagctaatatattcatatctgaggttcactgtaatctactaggatacattccgcccacacccacaccttggtccccacatcaagcagctcctcacagcaggaagacatccgctatcagacatggttttctgaagtagtgcttaggatttcagaggaggaaaaattcagaggttctaatagccttcggtaactgaggtagaatatggggctcccaagaatatcttcc

SEQ ID NO: 607245 - DNA, 170 bp, Homo sapiens
caacacaagtcctgaaccacttcttatgcccagtttcatacataacattgaaaggtcgctcatagacacttggcgctgggggatacattatgaaaatctaacctcccgctctacgcagttacactatctatccccattacatcctttgacagctgccgccgaagctggat

SEQ ID NO: 607246 - DNA, 445 bp, Homo sapiens
  misc_feature (98)..(99): n is a, c, g, or t
  misc_feature (185)..(185): n is a, c, g, or t
gccctccatgagttagcgtccccccgtttccagcggtgccgccctgggtcccatcttcagggaaaggcactgcccacgccaggctgcactttcgcaanncagacggtgcagcagacgggctgccggggcgtgctcccgactgcgggtccaagggcatgcttcccgctcaaccagggcaccagganctgaggtggctggttagctcccggacgggacggacagtagactggacgggggtttggggaccggccctgtaaggctgggtgggtgcctgcctggcttggggagccccagggatagcggtcggacttcaggttcttggccaagggcttgaggggaaccccctgtgcttggcaaagcctgggaacttcggggccaaactgaccccggggcgttggggggccggaagaacgcctttgtgccctggcattgttgccttccacaa

SEQ ID NO: 607247 - DNA, 1543 bp, Homo sapiens
  misc_feature (258)..(259): n is a, c, g, or t
  misc_feature (269)..(269): n is a, c, g, or t
tcgccccacttgattttggaaggatctcgcttcctgggagatggtgatggaatctcccatgaatgaacaagcctcccggtctcaagccctgacggtgccatggaattgcccatgggtggaatcatattggaacatgtaaacccatgtaagttgaggtcaatgaaggggtcattgatggcaacaatatccactttaccagagttaaaagcagccctggtgaccaggcgcccaatacgaccaaatccgttgactccgacnntcaccttccncatggtgtctgagcgatgtggctctctgctcctcctgttcgacagtcagccgcatcttcttttgcgtcgccagccgagccacatcgctcagacaccatggggaaggtgaaggtcggagtcaacggatttggtcgtattgggcgcctggtcaccagggctgcttttaactctggtaaagtggatattgttgccatcaatgaccccttcattgacctcaactacatggtttacatgttccaatatgattccacccatggcaaattccatggcaccgtcaaggctgagaacgggaagcttgtcatcaatggaaatcccatcaccatcttccaggagcgagatccctccaaaatcaagtggggcgatgctggcgctgagtacgtcgtggagtccactggcgtcttcaccaccatggagaaggctggggctcatttgcaggggggagccaaaagggtcatcatctctgccccctctgctgatgcccccatgttcgtcatgggtgtgaaccatgagaagtatgacaacagcctcaagatcatcagcaatgcctcctgcaccaccaactgcttagcacccctggccaaggtcatccatgacaactttggtatcgtggaaggactcatgaccacagtccatgccatcactgccacccagaagactgtggatggcccctccgggaaactgtggcgtgatggccgcggggctctccagaacatcatccctgcctctactggcgctgccaaggctgtgggcaaggtcatccctgagctgaacgggaagctcactggcatggccttccgtgtccccactgccaacgtgtcagtggtggacctgacctgccgtctagaaaaacctgccaaatatgatgacatcaagaaggtggtgaagcaggcgtcggagggccccctcaagggcatcctgggctacactgagcaccaggtggtctcctctgacttcaacagcgacacccactcctccacctttgacgctggggctggcattgccctcaacgaccactttgtcaagctcatttcctggtatgacaacgaatttggctacagcaacagggtggtggacctcatggcccacatggcctccaaggagtaagacccctggaccaccagccccagcaagagcacaagaggaagagagagaccctcactgctggggagtccctgccacactcagtcccccaccacactgaatctcccctccccaccctgaccgtgctaactgtgtgtacatatatattctacatatatgtatattaaaactgc

SEQ ID NO: 607248 - DNA, 590 bp, Homo sapiens
tgtcatcatgaaataccttataactgaatttgttggtaaagaaagtaaatttgcaacttgcaaaataggatttttctttgtgctaaagaaggtactgtttcaattgaattgaagaataagcttttgtttagattttatataatgagacatcaaattatttttactatgtaatttctttttgtttttggttgttaaacttagcacatgaaaaatatggattgtggtttccaagggattattactgtgattaaactctgctaaatgtgtaccctagatagtatcttcttaaagttggctcttcaggctgggtgcaatggctcatgcttataataatagctctttgggaggccaaagtgggaggattgtttgggcccaggagttcaacaccagcctggacaacatagggagaccctgtctctacaaataatttttttttttaattagccaatgtgatggcatgcacctgtggtcccagctactcaggaggctgaggcagaaggatcacctgaacccgagagctcaaggctgcagtgagctgtgattgcactgttgcgctccagcctgggtaacagagcaagacctgtctcaaa

SEQ ID NO: 607249 - DNA, 1625 bp, Homo sapiens
  misc_feature (258)..(259): n is a, c, g, or t
  misc_feature (269)..(269): n is a, c, g, or t
  misc_feature (1527)..(1528): n is a, c, g, or t
  misc_feature (1530)..(1531): n is a, c, g, or t
tcgccccacttgattttggaaggatctcgcttcctgggagatggtgatggaatctcccatgaatgaacaagcctcccggtctcaagccctgacggtgccatggaattgcccatgggtggaatcatattggaacatgtaaacccatgtaagttgaggtcaatgaaggggtcattgatggcaacaatatccactttaccagagttaaaagcagccctggtgaccaggcgcccaatacgaccaaatccgttgactccgacnntcaccttccncatggtgtctgagcgatgtggctctctgctcctcctgttcgacagtcagccgcatcttcttttgcgtcgccagccgagccacatcgctcagacaccatggggaaggtgaaggtcggagtcaacggatttggtcgtattgggcgcctggtcaccagggctgcttttaactctggtaaagtggatattgttgccatcaatgaccccttcattgacctcaactacatggtttacatgttccaatatgattccacccatggcaaattccatggcaccgtcaaggctgagaacgggaagcttgtcatcaatggaaatcccatcaccatcttccaggagcgagatccctccaaaatcaagtggggcgatgctggcgctgagtacgtcgtggagtccactggcgtcttcaccaccatggagaaggctggggctcatttgcaggggggagccaaaagggtcatcatctctgccccctctgctgatgcccccatgttcgtcatgggtgtgaaccatgagaagtatgacaacagcctcaagatcatcagcaatgcctcctgcaccaccaactgcttagcacccctggccaaggtcatccatgacaactttggtatcgtggaaggactcatgaccacagtccatgccatcactgccacccagaagactgtggatggcccctccgggaaactgtggcgtgatggccgcggggctctccagaacatcatccctgcctctactggcgctgccaaggctgtgggcaaggtcatccctgagctgaacgggaagctcactggcatggccttccgtgtccccactgccaacgtgtcagtggtggacctgacctgccgtctagaaaaacctgccaaatatgatgacatcaagaaggtggtgaagcaggcgtcggagggccccctcaagggcatcctgggctacactgagcaccaggtggtctcctctgacttcaacagcgacacccactcctccacctttgacgctggggctggcattgccctcaacgaccactttgtcaagctcatttcctggtatgacaacgaatttggctacagcaacagggtggtggacctcatggcccacatggcctccaaggagtaagacccctggaccaccagccccagcaagagcacaagaggaagagagagaccctcactgctggggagtccctgccacactcagtcccccaccacactgaatctcccctcctcacagttgccatgtagaccttgagagggagggctaggagcgcttnntnncatcataagtctggtcccaaaaaaaaaaaacggtttttggggaagggtaaggcggttttcccctttgaaggatcggcattgttataacaaaaaa

SEQ ID NO: 607250 - DNA, 1380 bp, Homo sapiens
  misc_feature (258)..(259): n is a, c, g, or t
  misc_feature (269)..(269): n is a, c, g, or t
tcgccccacttgattttggaaggatctcgcttcctgggagatggtgatggaatctcccatgaatgaacaagcctcccggtctcaagccctgacggtgccatggaattgcccatgggtggaatcatattggaacatgtaaacccatgtaagttgaggtcaatgaaggggtcattgatggcaacaatatccactttaccagagttaaaagcagccctggtgaccaggcgcccaatacgaccaaatccgttgactccgacnntcaccttccncatggtgtctgagcgatgtggctctctgctcctcctgttcgacagtcagccgcatcttcttttgcgtcgccagccgagccacatcgctcagacaccatggggaaggtgaaggtcggagtcaacggatttggtcgtattgggcgcctggtcaccagggctgcttttaactctggtaaagtggatattgttgccatcaatgaccccttcattgacctcaactacatggtttacatgttccaatatgattccacccatggcaaattccatggcaccgtcaaggctgagaacgggaagcttgtcatcaatggaaatcccatcaccatcttccaggagcgagatccctccaaaatcaagtggggcgatgctggcgctgagtacgtcgtggagtccactggcgtcttcaccaccatggagaaggctggggctcatttgcaggggggagccaaaagggtcatcatctctgccccctctgctgatgcccccatgttcgtcatgggtgtgaaccatgagaagtatgacaacagcctcaagatcatcagcaatgcctcctgcaccaccaactgcttagcacccctggccaaggtcatccatgacaactttggtatcgtggaaggactcatgaccacagtccatgccatcactgccacccagaagactgtggatggcccctccgggaaactgtggcgtgatggccgcggggctctccagaacatcatccctgcctctactggcgctgccaaggctgtgggcaaggtcatccctgagctgaacgggaagctcactggcatggccttccgtgtccccactgccaacgtgtcagtggtggacctgacctgccgtctagaaaaacctgccaaatatgatgacatcaagaaggtggtgaagcaggcgtcggagggccccctcaagggcatcctgggctacactgagcaccaggtggtctcctctgacttcaacagcgacacccactcctccacctttgacgctggggctggcattgccctcaacgaccactttgtcaagctcatttcctggtatgacaacgaattggctacagcaccggggggccctgccctggctcgggtaaaccggcacaccagaaagggaaact

SEQ ID NO: 607251 - DNA, 432 bp, Homo sapiens
aaactggcagcaacatactcccactaggataagcggtgacaacatctataatggacagaactagactccagtctatacccacctaccaacccacctacactcactgctgtacagattgtctagctaaattcctatgtgacgacatcacagcctgactttaggcctttccagaattctcctggacctgcgggataatgtgaaaaccttatggcagaatttatgtgagcctttatgatctgtcctctaggtataatatagcctaatatttagtcaataggagataaagcagacattcagccaatctttggccatgccctgaatctggctgtctctggctgggttgtgccattacctctgcctcagccctctaaccgtacttggctcctgctgcattcctacccattccttatcttttgcaatcccaggtcagag

SEQ ID NO: 607252 - DNA, 1536 bp, Homo sapiens
  misc_feature (258)..(259): n is a, c, g, or t
  misc_feature (269)..(269): n is a, c, g, or t
tcgccccacttgattttggaaggatctcgcttcctgggagatggtgatggaatctcccatgaatgaacaagcctcccggtctcaagccctgacggtgccatggaattgcccatgggtggaatcatattggaacatgtaaacccatgtaagttgaggtcaatgaaggggtcattgatggcaacaatatccactttaccagagttaaaagcagccctggtgaccaggcgcccaatacgaccaaatccgttgactccgacnntcaccttccncatggtgtctgagcgatgtggctctctgctcctcctgttcgacagtcagccgcatcttcttttgcgtcgccagccgagccacatcgctcagacaccatggggaaggtgaaggtcggagtcaacggatttggtcgtattgggcgcctggtcaccagggctgcttttaactctggtaaagtggatattgttgccatcaatgaccccttcattgacctcaactacatggtttacatgttccaatatgattccacccatggcaaattccatggcaccgtcaaggctgagaacgggaagcttgtcatcaatggaaatcccatcaccatcttccaggagcgagatccctccaaaatcaagtggggcgatgctggcgctgagtacgtcgtggagtccactggcgtcttcaccaccatggagaaggctggggctcatttgcaggggggagccaaaagggtcatcatctctgccccctctgctgatgcccccatgttcgtcatgggtgtgaaccatgagaagtatgacaacagcctcaagatcatcagcaatgcctcctgcaccaccaactgcttagcacccctggccaaggtcatccatgacaactttggtatcgtggaaggactcatgaccacagtccatgccatcactgccgcggggctctccagaacatcatccctgcctctactggcgctgccaaggctgtgggcaaggtcatccctgagctgaacgggaagctcactggcatggccttccgtgtccccactgccaacgtgtcagtggtggacctgacctgccgtctagaaaaacctgccaaatatgatgacatcaagaaggtggtgaagcaggcgtcggagggccccctcaagggcatcctgggctacactgagcaccaggtggtctcctctgacttcaacagcgacacccactcctccacctttgacgctggggctggcattgccctcaacgaccactttgtcaagctcatttcctggtatgacaacgaatttggctacagcaacagggtggtggacctcatggcccacatggcctccaaggagtaagacccctggaccaccagccccagcaagagcacaagaggaagagagagaccctcactgctggggagtccctgccacactcagtcccccaccacactgaatctcccctcctcacagttgccatgtagaccccttgaagaggggaggggcctagggagccgcaccttgtcatgtaccatcaataaagtaccctgtgctcaaccaaaaaaaaaaaa

SEQ ID NO: 607253 - DNA, 1544 bp, Homo sapiens
  misc_feature (258)..(259): n is a, c, g, or t
  misc_feature (269)..(269): n is a, c, g, or t
tcgccccacttgattttggaaggatctcgcttcctgggagatggtgatggaatctcccatgaatgaacaagcctcccggtctcaagccctgacggtgccatggaattgcccatgggtggaatcatattggaacatgtaaacccatgtaagttgaggtcaatgaaggggtcattgatggcaacaatatccactttaccagagttaaaagcagccctggtgaccaggcgcccaatacgaccaaatccgttgactccgacnntcaccttccncatggtgtctgagcgatgtggctctctgctcctcctgttcgacagtcagccgcatcttcttttgcgtcgccagccgagccacatcgctcagacaccatggggaaggtgaaggtcggagtcaacggatttggtcgtattgggcgcctggtcaccagggctgcttttaactctggtaaagtggatattgttgccatcaatgaccccttcattgacctcaactacatggtttacatgttccaatatgattccacccatggcaaattccatggcaccgtcaaggctgagaacgggaagcttgtcatcaatggaaatcccatcaccatcttccaggagcgagatccctccaaaatcaagtggggcgatgctggcgctgagtacgtcgtggagtccactggcgtcttcaccaccatggagaaggctggggctcatttgcaggggggagccaaaagggtcatcatctctgccccctctgctgatgcccccatgttcgtcatgggtgtgaaccatgagaagtatgacaacagcctcaagatcatcagcaatgcctcctgcaccaccaactgcttagcacccctggccaaggtcatccatgacaactttggtatcgtggaaggactcatgaccacagtccatgccatcactgccacccagaagactgtggatggcccctccgggaaactgtggcgtgatggccgcggggctctccagaacatcatccctgcctctactggcgctgccaaggctgtgggcaaggtcatccctgagctgaacgggaagctcactggcatggccttccgtgtccccactgccaacgtgtcagtggtggacctgacctgccgtctagaaaaacctgccaaatatgatgacatcaagaaggtggtgaagcaggcgtcggagggccccctcaagggcatcctgggctacactgagcaccaggtggtctcctctgacttcaacagccctcaacgaccactttgtcaagctcatttcctggtatgacaacgaatttggctacagcaacagggtggtggacctcatggcccacatggcctccaaggagtaagacccctggaccaccagccccagcaagagcacaagaggaagagagagaccctcactgctggggagtccctgccacactcagtcccccaccacactgaatctcccctcctcacagttgccatgtagaccccttgaagaggggaggggcctagggagccgcaccttgtcatgtaccatcaataaagtaccctgtgctcaaccaaaaaaaaaaaa

SEQ ID NO: 607254 - DNA, 397 bp, Homo sapiens
  misc_feature (397)..(397): n is a, c, g, or t
ggctaaataccggcacgagaccgatagtcaacaagtaccaaaaaaaaaaaaaaaaaaaaaaaaaaaatttgggggcggcccggccgaaaaaattttaagagacacaatctcggtgggggcgcgcgcggggccccaaggaagggtaggttcgaacctgggggcataaacggtgtcacaataagggaaaatccggggccaacaggaaaaaggggcgcgggggttccttcacaaatataaaaaaccgccgggggggaaaacacagagccggtttggagacacaaactcccacgaggggagtcgcagggggagaacaaagacgggagtcttatatcaaaaggggaggaggccaaagaggagcaccaagaatattaaaattaagcgcccggcgcggagaagn

SEQ ID NO: 607255 - DNA, 212 bp, Homo sapiens
aagaaaaaggaaagaaagaaaaaggaaagaaaggaagaaagattttaaacatggtagtaagactaaggacctcaattttttaattttaatttttttcgagacagggtttcactcattttaaccttgacttatggctcgagccatcctccttcctcagcttcctgagtggctagaattataggtcctcgccactattccttgctaatgaaatt

SEQ ID NO: 607256 - DNA, 745 bp, Homo sapiens
  misc_feature (612)..(612): n is a, c, g, or t
  misc_feature (642)..(642): n is a, c, g, or t
aagtagttgtggccacgaagcagtcgatagcaccctgggtttcggcttcgcagcttttatccaatgccgggtggttggggtcggtgtcctgctggcccaacaggtaagtgatgtcgcgtgagacgtagtcttgttccagctgctgggcacctcggccccccacgtaatccggcaggttttgcatgccgtacttccagtcgttgaagcctgggcaattggcgatgtcgaacgtcaccgggcgttgcgggctgaagtacgcataggacgacgggttagccaccacataccgcaggcggatgccctcggaattcagcaatgggtggtcgtggccggtgagggcgaagcgctgcaccacttggccgccaccggaatgcccggcgaccacgatttctttcagtgccgggaacagtttgcggttgcccaagtgcttgatgatctggtccagagcgccataagagctgatctgccctgggcggtggacgctcgccggcatccagtcgttacccttccaacgcactacctcgtcgcccaggtggttgcgtttcacgtcggcttgattgagaaactgcggcgcgatcaccagtgtactgccgcccaccccggcatgctcgncggcgtcgatcccgctttgcaggtaggttngtgcattgcgcaggcggcatgcacgatgatcatgcgcgcgtgaccttgggcagcggctggccccagttttggctcaggcccaggctgagggcgtccgtagcgg

SEQ ID NO: 607257 - DNA, 333 bp, Homo sapiens
cttccttacccctagcaaccttccatttcctgtcagaatgctcacagcagcactgtccacaatagccaaaaagtggaaacaaccccaacgtccaccaatggatgaatcgacaaacaaaatgtgggatatccacacgatgggatattatccaaaaataaaatggaatgaagtacagatacacgccacaatataggtgaaccctgaaagcattagactaagtgaaaaaagctggacataaaaggccacatgttgtatgactccatttgacgaaatgcctagaatgggcaactccatggagacagaaagtacaggagaggaaggttgctaggggta

SEQ ID NO: 607258 - DNA, 303 bp, Homo sapiens
  misc_feature (111)..(111): n is a, c, g, or t
  misc_feature (159)..(159): n is a, c, g, or t
ctagtttagaagtttcaatagcagctagctacggttcaaagtaaaagtgtgggaggcagtccccgttaaaacaagaaagatgaggatgcctctagcagatgacagggtaantgggcaggacagaacatttatgtcgtgttcagagcgatggaacagcangaaaggcttggactattaagaaggcacacccagatgagccggcccagcgcagagtggcacaaagagcaccagctttctggcacaaggatgatggccaagtgggaaatataatgagagaatgctattgaaacttctaaaactagg

SEQ ID NO: 607259 - DNA, 307 bp, Homo sapiens
ccagtctccagtgtttatactctataggcgcactatatgtcctggttctattgctggacctacctgtatcgagacatgagattcaccattttccacagtggtaccatgacgaacagtctatgacgcactatgttaccctgcggattgctgctatctggactatgtgtgagtaggccttgacagacagattgtgctctagaaggaatgtgtgccatctgcactctgacactattacggaccttgatatgtctgcactaacaggtgatgttgtaccactggaggctatatgtggctatgctttagccgg

SEQ ID NO: 607260 - DNA, 528 bp, Homo sapiens
  misc_feature (129)..(129): n is a, c, g, or t
  misc_feature (142)..(142): n is a, c, g, or t
  misc_feature (172)..(173): n is a, c, g, or t
ccgtggtggacctgagccgcatactagaacgagatgcgtgaccagtatgaggtagtggaacgctgctaccgtggccacctccgccactgcggctgctgcttgcgcggctgctgctgaagtggaactgcnggcaccgtacttngtcggtagtctctggcaccaaaccctccannaaatctgctactcttagaacgtccacgactgctacccttgtagtggtgtacataagccatgttttctaaccaagacggcacttctatgtttagcttcaacaagaagatccaacaaatccttagtaatgtttatgtccctctcgtaaaagaatgaggttgccaggccatggtttccattgtatttaatagtctgtttatgctaaatcgggccgaagatgagctttgtccaccactaaaatgcctctgccactttgaatgctgtgctaatggggtggccagagtgcggtgatcaaaccgctccatctttgaacagtggcataggaagacggcaaacatttcctagggtgcaatagat

SEQ ID NO: 607261 - DNA, 497 bp, Homo sapiens
  misc_feature (1)..(1): n is a, c, g, or t
  misc_feature (98)..(98): n is a, c, g, or t
  misc_feature (111)..(111): n is a, c, g, or t
  misc_feature (141)..(142): n is a, c, g, or t
ncttctatatctacctgttgtagctccatagcactcacagtctcctgctacgtgcactcgcactgggtgtgttgccggtgtgctgaagtggaactgcnggcaccgtacttngtcggtagtctctggcaccaaaccctccannaaatctgctactcttagaacgtccacgactgctacccttgtagtggtgtacataagccatgttttctaaccaagacggcacttctatgtttagcttcaacaagaagatccaacaaatccttagtaatgtttatgtccctctcgtaaaagaatgaggttgccaggccatggtttccattgtatttaatagtctgtttatgctaaatcgggccgaagatgagctttgtccaccactaaaatgcctctgccactttgaatgctgtgctaatggggtggccagagtgcggtgatcaaaccgctccatctttgaacagtggcataggaagacggcaaacatttcctagggtgcaatagat

SEQ ID NO: 607262 - DNA, 468 bp, Homo sapiens
atctagcaggatgctagggagccttaacctagggggggcggacaagatccgacatcgtgtcccgggccttgattggttttctgataacgccccacctccttgagcggcttgagattatcaacgaggacatggccaagaggacgtgtgaggagcaccagctctgtgtggtggctgtgctgccccatatccttgatactggagctgcaggcagaaattctgatctggaagtccttctgaagtgggcagacaaatacaaaaagaaaatgtgggggtggctgtggaccagaagctggagcccagtctgaacttgagaccgcgctggggatggcagggttcgggtacccggccagggcccgccatcaatgcacgcaagatgaaatcggctctgctacaaggctccttcagcgagcaaggcatcaacgagtcgctcagggagctctctacgggccgtggctccacggcaccggt

SEQ ID NO: 607263 - DNA, 502 bp, Homo sapiens
  misc_feature (423)..(423): n is a, c, g, or t
  misc_feature (482)..(482): n is a, c, g, or t
ggcgcggatcagcattaaacgtggggtgtttgctgagggagatttgaagcaggcaagagggatctagctacttggctcctgttagcagataagcatcccctacattccgggaactattgcatgccatagcggctatactcatggactactatgattgaggtggctgctggcttcagtgaacactcactatagctgactcttccttcccacagttatgcaatgccaaccaaaaccatagaagtgttgcagttgcaggaccaaggcagcaaaatgctcctggactcagtgcttaccacccatgagcgagtggttcaggtaggcactccaggagaataaaaaatgtatttgcttctcctgagtcttttctctgtccactttttcactttctattatgctcttttcttttctttcttgaataatagngttctccaggttcagttcttgatgccccattgcctctccttccttgaactctttctttncaatctcaactcattcactg

SEQ ID NO: 607264 - DNA, 975 bp, Homo sapiens
gaaacagaaatggcgactgcctagagtggtgtacaacctgtgtcatggcaatgcctcttgtgccgtgtccagtcccacattgccttatcacgtcttttacatttgtctagttttttcgctcttccttcaggacctaatgttccagggtacacccttcatccataaacatgtggctcacaatggaatcagccgtgccatgcttcacccttctccgatcactccagttgtcctttaacattgatcgttgacttatgtagctccattgtcgccatagtcaagtagtctttatgacgatggtcttcccaattagaagtgcagggtcctctagaatgccagatccatgtgtttaagattaccttctgtaccagtacaggtgccattgcattgtacgttacctcatagtcaaatggttgctgcggacgttttttaactattaccttgacatattaaccattagttttccttttgtaccatttgttcttgctatgtattgctttggggtactgcccacggagatttgcgcttcctttgttgtgccccaggttgtgcgtttgtatttgtgcctgtgccctcgtgtttgcactggtaagccctgtgcactcgcgggggtaccaggcgtattttctggccttagtctcgccagtgtcgtctgggttcacgagtggtgcgctaccccatgctgtggccacggctgaatgttcgggactctttgagtgacaggccgccgtttcccccctttggttggcccggaagtggttctcgactatattgcctatgctcgcttggaacacgtcaccggtgtggtcccccagtccggttaccacggtgcgcgttggcgcctatggattccctcccaggttcgcccttgtgtggctcaagctctgtccatgttgccctctgcctgggccccatgggtggtacaggggggcgaccggccccatattttcctttcttacgagcactccgcaccgcggg

SEQ ID NO: 607265 - DNA, 758 bp, Homo sapiens
  misc_feature (80)..(80): n is a, c, g, or t
  misc_feature (94)..(94): n is a, c, g, or t
  misc_feature (117)..(117): n is a, c, g, or t
  misc_feature (138)..(138): n is a, c, g, or t
  misc_feature (142)..(142): n is a, c, g, or t
  misc_feature (394)..(394): n is a, c, g, or t
gggcgcatcatggcggctggccgggcccaggtcccttcctccgaacaagcctggcttgaggatgctcaggtcttcatccnaaagaccctgtgtncagctgtcaaggagcctaatgtncagttgactccattggtaatngatngtgtgaagactgtctggttgtcccagggaaggaaccaaggttctacactgcccctcagctatagcttcgtctcagtacaggacctcaagactcaccagcgtctcccatgctgcagccacctgtcgtggagcagtagtgcataccaggcctgggcccaagaggctggaccaaatgggaaccccctgccccgagagcagctgttacttttagggacactaacagacctatcggcagacttggaacaagagtgcnggaacggaagcctctatgtgagagataacactggcgtcctgagctgtgcagctcatagacctggaccttacttggtcgggccatcttactcctgttccccgcgttggcagttacctccctccatgccacggtggacatttcctcatgtggtacagtggccacttgcgaggcctgtggcgatgcccctgctgccaagtgcttcctttgaccattcagtcctggacccagttcacgcttatccctgatactctaccccagagagtgcttcctgcctgctcaggctcagacacaagctcagaggtgtgcagtgaaacatggctgcgagtctactacgatctgagtgctcttggtgaccagttaaacg

SEQ ID NO: 607266 - DNA, 708 bp, Homo sapiens
  misc_feature (706)..(706): n is a, c, g, or t
gcatggtggcacactgtagtcccagctactagggaggctgaggcaggaggattacttgagcccaggaattcaagcctgggcaacatagtgagtcctcatctcctaaatttaaaaaacaaacaacaaaaacttctacgtgtggtaaagggttaactcagcaagcttgggttgcttaaaccttgcacattccaaagaaaggtctgaccccagtgctgacctttgactggctactgggaaatgagctctgagcccctggataggaatgtttctgtttgcctgaggcctttgaccatgccagatagtttatgctaacaatgtgatttatagtgaatacctgttttcctgtgtctaagaccctgggctgcactgtattaatttgaccttgggtatttggggagctgagactgagtagctgaagtgagtcacataagcactaaatgcttacctgactgacccccagtaaaactctggacatccagacttggatgagcttccttgggtggcaacacttttacgtattgtcacacaccattgctggggggattaagcactgtctgtaaaactccactgtgaaatgacaactggaaacttgcacgtggtctctcctgattctgctctattcaccttttccctttgctgattttaatctctattcttttgttgtaataaaccataatggtgaataagggggggggggggggggggnga

SEQ ID NO: 607267 - DNA, 149 bp, Homo sapiens
atcattaagctcctaggccatacgccactgggtcaattcacagaggaggacaaggcttcttttacaagccttctgggcaaggtgtaattgtgaagatgtcttgaggagaaacccttggaatggctccttgttgtcttcccattgaccca

SEQ ID NO: 607268 - DNA, 139 bp, Homo sapiens
ggccacagggagcgagaccagatggagtcgacgctcaactatgaagatcactgcttcagcggggcacgcaccatactcgccgagaacctgtggcccgggcggctgttcttcgtccagcagattcttcagctctcttacc

SEQ ID NO: 607269 - DNA, 424 bp, Homo sapiens
tgaagtagaacccacactatgctgttctggagagggcctctggagaaggctctgaatgaggcgagggacccttcctacattgttcatcatccgcagataccccttgggtcattattcatactgacaaggaaccgagtcaatttggtgaataggaaaagccttctcatgaaaactacaatagaatactgttaccaaattcttcataagaaagatcatattatgggaatgataatcctgtttactgtggattaggtatagtgccaacagtttgaatggtaagacaacataatatatatgatagtgatgaatccttctgtgagttgtttgttccagaacacactgtctagtagaattgtgggtattttcttcttttgaatcgaacacagttgtgcatatccaattccccattgagtatttctatcaa

SEQ ID NO: 607270 - DNA, 124 bp, Homo sapiens
  misc_feature (17)..(17): n is a, c, g, or t
  misc_feature (49)..(49): n is a, c, g, or t
  misc_feature (100)..(100): n is a, c, g, or t
gcgccgagggtggggcngggcgtagtggccgggcagtcgcgggtgcccnaggccgtgagtgtgcgcttttgagagtcgcggcggaaggagcccggccgcnccgccggactgagctataagaccg

SEQ ID NO: 607271 - DNA, 688 bp, Homo sapiens
cgaggtttcttttgtttttctttaaaaaggaaaacccggtaatagatgtcggggttgagggataggaggaaaatgggggataggtgtatgaacatgagggtgtttcctcgtgtgaatgagggtttaatgtggtaaatgtggggggtgagttgagccccattgtgtggtggtaaatatgtacggagggagtatagggctgtgactagtatgtggagctccgtgtaagtcggagagtgatattggactcaggagaacgtggttcactagcacagagagtcctcccagtaggttcaatagtgggggggtaaggcgaggttagcgaggcttgcttaaaagtcatcaacaaagctattacgggggcagtacgatgttttgaagtccttgacgagcaggattatgatcgcgactgtgagtgcgtccgtagttggagttggctaggcggaatacgtaagtgaggatgtaaccccctgtgggcgattatgagaatgactgccccggtgaacgctatcagggggttgcggcatgaaaatgggctgttactaacgaagggctatgtggcctgattgaccagtctgccatgagcgatataagcctgttagcccaagcacatgggcctgttataattatgcccctaggattccccaggcaagggaacgccaaggcttcggcccggtctcaatacttgacc

SEQ ID NO: 607272 - DNA, 253 bp, Homo sapiens
  misc_feature (44)..(44): n is a, c, g, or t
atcagaggatccccgtggtgtaccgtctcttctatttacataanctacttattattttacttattttagtgggacgcagggtataatcttaacaggagcagaaagaatcagagaggtcttcattctactggaccattgctccatgacactctgcttcccctcagagagtaagaaacacattcaaaatgagagattagattctaagtatgtagtaggtgtctactccaatatcacttttacggtaacaccacag

SEQ ID NO: 607273 - DNA, 108 bp, Homo sapiens
tattactatatgaagactctcagtcgcgcagactgtacagactcaagaggagcatcgtgatcgactacactgcccttccttatcactctgctgtttacagacctgggc

SEQ ID NO: 607274 - DNA, 143 bp, Homo sapiens
cgagcacacacccagtttctaagggatgctaagtgccctcctgactcagtcccctcctgatggccatacctctcaagtactgttgcattggggatcacatttcaacaagaattctggaagggacaaaagcattcaaaccgtag

SEQ ID NO: 607275 - DNA, 90 bp, Homo sapiens
tcgatacgacttttttttccccttgacaattagtgtattttaggaccaagaggatgaaagtttttactctctcccttctgtcgtcttctc

SEQ ID NO: 607276 - DNA, 138 bp, Homo sapiens
  misc_feature (86)..(86): n is a, c, g, or t
cctggacaacttggacgactggtccttacggactcctaccaacacgactaggtcctactgtctactactgctgttacactggaacnggggactcctcatagacgtcgacccgtgcaggcactgcacacgcttggcacc

SEQ ID NO: 607277 - DNA, 251 bp, Homo sapiens
caggtcaggggggactgtctggtcctcctgctcatgacgtctctcagttgtatgcagaagtcagctgagtctcattaccagcacccagtttcacatgtgtagttgagcctacaattcatcctcacacccacacaccctgagcactctgatttgttgcttcatggtagacaatgaggcatctatacatctgcgtagaaacctcgatatcgaggcgcccccaacctacactaaccttaaccgccttataagcc

SEQ ID NO: 607278 - DNA, 146 bp, Homo sapiens
cccaaacccacttccaccttactaccagacaaccttagccaaaccatttaccccatataaagtataggcgatagaaatttaaacctggcgcaatagatattgtaccgcaagggaaagatgaaaattatacccagcatatatagcag

SEQ ID NO: 607279 - DNA, 954 bp, Homo sapiens
  misc_feature (258)..(259): n is a, c, g, or t
  misc_feature (269)..(269): n is a, c, g, or t
tcgccccacttgattttggaaggatctcgcttcctgggagatggtgatggaatctcccatgaatgaacaagcctcccggtctcaagccctgacggtgccatggaattgcccatgggtggaatcatattggaacatgtaaacccatgtaagttgaggtcaatgaaggggtcattgatggcaacaatatccactttaccagagttaaaagcagccctggtgaccaggcgcccaatacgaccaaatccgttgactccgacnntcaccttccncatggtgtctgagcgatgtggctctctgctcctcctgttcgacagtcagccgcatcttcttttgcgtcgccagccgagccacatcgctcagacaccatggggaaggtgaaggtcggagtcaacggatttggtcgtattgggcgcctggtcaccagggctgcttttaactctggtaaagtggatattgttgccatcaatgaccccttcattgacctcaactacatggtttacatgttccaatatgattccacccatggcaaattccatggcaccgtcaaggctgagaacgggaagcttgtcatcaatggaaatcccatcaccatcttccaggagcgagatccctccaaaatcaagtggggcgatgctggcgctgagtacgtcgtggagtccactggcgtcttcaccaccatggagaaggctggggctcatttgcaggggggagccaaaagggtcatcatctctgccccctctgctgatgcccccatgttcgtcatgggtgtgaaccatgagaagtatgacaacagcctcaagatcatcagcaatgcctcctgcaccaccaactgcttagcacccctggccaaggttatccatgataactttggtattgtggtaggacttatgaccacagttcattttattactttcacccagtagattgtggatggtgccttcggtttattgttgg

SEQ ID NO: 607280 - DNA, 897 bp, Homo sapiens
  misc_feature (258)..(259): n is a, c, g, or t
  misc_feature (269)..(269): n is a, c, g, or t
tcgccccacttgattttggaaggatctcgcttcctgggagatggtgatggaatctcccatgaatgaacaagcctcccggtctcaagccctgacggtgccatggaattgcccatgggtggaatcatattggaacatgtaaacccatgtaagttgaggtcaatgaaggggtcattgatggcaacaatatccactttaccagagttaaaagcagccctggtgaccaggcgcccaatacgaccaaatccgttgactccgacnntcaccttccncatggtgtctgagcgatgtggctctctgctcctcctgttcgacagtcagccgcatcttcttttgcgtcgccagccgagccacatcgctcagacaccatggggaaggtgaaggtcggagtcaacggatttggtcgtattgggcgcctggtcaccagggctgcttttaactctggtaaagtggatattgttgccatcaatgaccccttcattgacctcaactacatggtttacatgttccaatatgattccacccatggcaaattccatggcaccgtcaaggctgagaacgggaagcttgtcatcaatggaaatcccatcaccatcttccaggagcgagatccctccaaaatcaagtggggcgatgctggcgctgagtacgtcgtggagtccactggcgtcttcaccaccatggagaaggctggggctcatttgcaggggggagccaaaagggtcatcatctctgccccctctgctgatgcccccatgttcgtcatgggtgtgaaccatgagaagtatgacaacagcctcaagatcatcagcaatgccttcttcaccaccaactacttatcaccgctaaccaatgtcatccatgacaacttttatatcctttgacccttcaagtaaactg

SEQ ID NO: 607281 - DNA, 557 bp, Homo sapiens
  misc_feature (1)..(1): n is a, c, g, or t
  misc_feature (43)..(43): n is a, c, g, or t
  misc_feature (118)..(118): n is a, c, g, or t
  misc_feature (154)..(154): n is a, c, g, or t
  misc_feature (217)..(217): n is a, c, g, or t
ntccaaaaatatatattgagcacctgctggggtataggctctntgcctgcccagttgaagataccatgattacaatgttgtgcttgcttggtttcacagtcctgtgggtacatggtgnagtaaaataggtccaattaattttctcagagctgtncacagcaaccacacagaaggagagataactcacccagcttcagaggggtgggacagagaatgnggttagcctcccagatgtccttgtgctagttttagctgttttcaggtgttgataaaagctccaggagctggcaggaggagagcagaggaagctagagcttacaaagcacaaaggccatgacagcatgccagacgggtgaaagaggacaggggaaatgtaggcaagtgtctcttctcagaggatgttatatactatgtttaaaagtgttgatctgctgggcacagtggttcacgcatgtagtgtcagcactttggggtgccaaggtgggaggattgcttgagctcaggagtttgagaccagcctgggcaacatagtgagaccccatctcttaaaaaaaaaa

SEQ ID NO: 607282 - DNA, 935 bp, Homo sapiens
agcggtggtctccatctcagaacttcctgccgtcgcgttggcacctcgctgctccagcctctggggcgcattccaaccttccagcctgggacctgtcggcagaagataacaatacttacttattcttcttgccccagtacataccttgaggcgagcaaacacaacattaaatttcaaccatgagggaaatcgtgcacatccaggctggtcagtgtggcaaccagactcggtgccaaccgttctgggaggtgagtccgtcgatgaacactggcatcgaccccaccggcacctaccacggggacagtgacctgcagtctggaccgcactctctgctgtactacaagtgaagccgacagggtgggcacagtatgtccctcgctgccgatcctggtggcatctagaagcctggagcaccatggtaactctgtatcgtctacacgctcctctaagcgccagatgctaatagaacccagacatacttccgtattatggctcagtctggggcagcgtaactgactgggcccaaagcgcccactaacacaggagggcgccgagcatcggtcgactctctagctcctcggcatgctggctacccgcaacggaggcaacgagacctagtgacatgcctgccagggctaccaactgacccactcactgggcggggcgcacaaggcctcctggcaatgggcactctccttatcagccaagatcccgacaagcaataccctgatcgcatcactgaataccttcagtgtgcgtgccttcacccaaaagtctctgaacaccgtggtcgagcccctacaagccacccataaccgacccaacaaaggcacaaaataccggctgacgaacaaacggccatgaacacaaggccctccagaacatccggccccccgcccctcgagccgaccacaccaacacacgggaacccacca

SEQ ID NO: 607283 - DNA, 158 bp, Homo sapiens
gcgacaatttctacaccgtgggaggcttgttgacgatgcttgctggaggatagaagaagttcccaaagtttgcggcctgccagtgagctgtggacgaccagctgtgaggggtccacagcaaaagtatttctttaatctaagttccacgacattgtgat

SEQ ID NO: 607284 - DNA, 223 bp, Homo sapiens
aacgggtgatgcggttgattggaggctaaaagttcaagggcgataccgccgccagtcaacgccgtggcggacacagggctcttctcaagggaccgcgaccacatggtgaatcgtcccttgccagcgttttacaacgtcttaacttgtatacatcatcaactgtggcatagacagcgtgacgttgtacgattacaccatcatgtatgacactctgtgcaacgtc

SEQ ID NO: 607285 - DNA, 703 bp, Homo sapiens
  misc_feature (9)..(9): n is a, c, g, or t
  misc_feature (75)..(75): n is a, c, g, or t
  misc_feature (117)..(117): n is a, c, g, or t
  misc_feature (145)..(145): n is a, c, g, or t
  misc_feature (148)..(148): n is a, c, g, or t
  misc_feature (152)..(152): n is a, c, g, or t
  misc_feature (155)..(155): n is a, c, g, or t
  misc_feature (159)..(161): n is a, c, g, or t
  misc_feature (168)..(168): n is a, c, g, or t
  misc_feature (183)..(183): n is a, c, g, or t
  misc_feature (185)..(185): n is a, c, g, or t
  misc_feature (187)..(187): n is a, c, g, or t
  misc_feature (217)..(217): n is a, c, g, or t
  misc_feature (219)..(219): n is a, c, g, or t
  misc_feature (222)..(222): n is a, c, g, or t
  misc_feature (230)..(231): n is a, c, g, or t
  misc_feature (235)..(235): n is a, c, g, or t
  misc_feature (240)..(240): n is a, c, g, or t
  misc_feature (244)..(245): n is a, c, g, or t
  misc_feature (252)..(252): n is a, c, g, or t
  misc_feature (257)..(257): n is a, c, g, or t
  misc_feature (271)..(271): n is a, c, g, or t
  misc_feature (274)..(274): n is a, c, g, or t
  misc_feature (285)..(285): n is a, c, g, or t
  misc_feature (295)..(295): n is a, c, g, or t
  misc_feature (317)..(317): n is a, c, g, or t
  misc_feature (324)..(324): n is a, c, g, or t
  misc_feature (329)..(329): n is a, c, g, or t
  misc_feature (351)..(351): n is a, c, g, or t
  misc_feature (369)..(369): n is a, c, g, or t
  misc_feature (384)..(384): n is a, c, g, or t
  misc_feature (389)..(389): n is a, c, g, or t
  misc_feature (393)..(393): n is a, c, g, or t
  misc_feature (402)..(402): n is a, c, g, or t
  misc_feature (475)..(475): n is a, c, g, or t
  misc_feature (554)..(554): n is a, c, g, or t
  misc_feature (604)..(604): n is a, c, g, or t
  misc_feature (622)..(622): n is a, c, g, or t
  misc_feature (641)..(641): n is a, c, g, or t
  misc_feature (688)..(688): n is a, c, g, or t
acatctganggctttcccacattgattacattcatagggtttcactccagtgtaagtcctttcatgatatcaaanggaactagaatacactcatagggtttctctcccgtgtgactnctttcatgacattgaaaagaagtaaaangcntganggntttnnnacactgnttacattgatagggntngngggcagtgtgagtgctttcatgatatggananggngtgggganngtgngggtnttgnnacattgnttgtnttcatagtgtttcnttncagtgtgagtntattcatgtncataaaagggacaagggtaggngaatggnttggnaaaatttttatatttatatggntttttttccatatgagtnattgcgtgtatatgnaaggnaganaaataattnagtggttttgcggcattccttatattcatagtgtttttttccaatgtgtgttcttgcatgtatttgaagaatnttggcagatgtgaatccattcccacaatgcttacattcatagggcttctctcctctgtgcttcctttcatgtatttganaagaagagaatttacagaatgctttttcgcattccttacattcatagggnttctctccagtgtgagtnctttcatgcatctgaaggnttgaggcagatctgaaggctttcccacattgcttacactcatagggnttctctccagtgtga

SEQ ID NO: 607286 - DNA, 94 bp, Homo sapiens
aggggagacccctgcagctgtttgcttttttaggcaaaaagcaagcctgacctggccctggcccccccattatgtttgcagaggggtgaaaagg

SEQ ID NO: 607287 - DNA, 163 bp, Homo sapiens
  misc_feature (124)..(124): n is a, c, g, or t
ctgtgctggtactctagagatcccgtcgacatgcaagtcagttccatctagtaatggtgactgagtatatcacagttgcacttttggcagcgtgtgtcacttttatattcactgtctcatacanctacagtgtactatgatgcactctatttatagtcaaaca

SEQ ID NO: 607288 - DNA, 261 bp, Homo sapiens
caccaaggaaacatttagaacctgcgaccgacatcgatcgcaggctcgaattaccatccctcgagattcaggccaaacagtgaagcaaagcactccaacatctcctcctccgtcatatgctcacctttagtaacgagcagtctcaggaagtcctctcttcgaatggactttttccctttggagtaggtataaccgagcacctcaaagctcttgtggataccactcatggtgttaccacaaggtgactcgtggaaatgtcca

SEQ ID NO: 607289 - DNA, 302 bp, Homo sapiens
  misc_feature (273)..(273): n is a, c, g, or t
cagccgaccgacgcttctcttgggcgaggcgggcgggttcttagtgcagattgagaccagcctagccaacgtggtgaaaccccgtctatactaaagattacaaaaattagctggaagtgctggtgcggccttgtggtcatagctactcgggggggagagagaggggaggatcgcttcaacccaggaggcagaagttgcagtgagccaagatcatgccacacactcctgtgctgggcaacagagtgagaccctttcctgctgctgcccccccancccctcccagccccccacagagagagcgt

SEQ ID NO: 607290 - DNA, 233 bp, Homo sapiens
ggggggcccccccccccttttttttttctccttttgggacccggggggcgtccccccccccgggttttttttttggggggggggggggttcccttttttccccggggccccctttttccctttggcctttttttggggcccttttgccccggtttttttccaaaaccgggggggggggggggggggttttccggggtttttttccccccccggcccccccccggggccccgga

SEQ ID NO: 607291 - DNA, 164 bp, Homo sapiens
tctatgtttagttctgaggaatccccatactgttttccacagtggttgcaccaatttacaatcccaccaacagtgtaatagggttcctttttctccacacactctctagcacttattgtttgtagacttttggatgatggccatcggagcagttccacttaggc

SEQ ID NO: 607292 - DNA, 504 bp, Homo sapiens
catagacgggaagctgataaatgagaggcgattgatgacagcgatggcgctgtatacgaaggtgaacggagaaagtgacaagaacgtctccaggacgccaggcattgtgttaaagaccttagaccccatcctcatcaccatcatagccatgagtgcactgagggtcctcctgggggctgtctgtggggtcgtgctgtactgtgcctgttgagcataatgggatgtcagaaagaaacttgtctagacctggagaactataactttgaacttgtggatagtgtgaagttgaaaaaagacaaactgaatacacagagtacttattcggaggcatgaaggcagacagagattaaaagacagtcaaaggacggaagtggcaggacgggagtgagctggggagctgttgatctttcactatacaggctgggacgtgtgtagataaccactgagccaggcttttctcaggagcttcaatgagtatggccgacagacatggacgaggagctg

SEQ ID NO: 607293 - DNA, 187 bp, Homo sapiens
gacagaaggtggctccgtggctcagactgtcgtgagtatgaagaacacttatgacggtggtgaatcccctgtttgagaaaaggcctaagaattttggcattggacaggacatccagcccaaaagagacctcacccgctttgtgaaatggccccgctatatcagtgttgcagcggcgttggatgcagt

SEQ ID NO: 607294 - DNA, 153 bp, Homo sapiens
tggagtccaatagaatccccaatggaatcccctatgtatcccatattgctgaagcagaataagacaatgattatccaaaacatatcctcccttttccttaagcacaatgtctgaccaaattgcttgtttctttttcttggactactttaattt

SEQ ID NO: 607295 - DNA, 126 bp, Homo sapiens
ccgacgtgacgaacattgtttgttggtgtatcatattgtaattgagcattgctcgagggaataggtatcatgtgattaggagtaaggttaggatgagtgggaagaagaaagagaggcagtaaagtt

SEQ ID NO: 607296 - DNA, 869 bp, Homo sapiens
tcacgggccccccgggcgatttttggccactaccgcgagatttcttgatgtggcctttttcctctgggccacccgccagattttctctggatctcggagattcaaccctcctagcttttggggattaccctcggggggtgggcccgaatatccaccggtgccccggagttgagacgccccctcgccgtagtggggttttcttcgtgtcccgcgttcttctgcctcccacacagccagcctctacccctaatctcgatctggtcttccctgtggcctgggaccacacctggtccaaggtattgggcaccctggcgctatactgccaactgtgatggccccaccccccatttggcccaccccccaggcgtattcttgtgaccccggtgagcctgttcttcttcccacgagttgggagtctccctctctgttgcgttctctggaggccaaggatggcccccggcccctgcttaatgggagttctccagacgaaaggccaacaccccttacaccgctatgagtggtggggacactcaactccacgccccttcgtgcttcacgcccttatccgcctatactggctgtgtcgctgccaccccggccccacgcactccacgactctgggagtttaattgaagggagaagaatcacttgtagatgaacctgtgagcccacgaaagttatatcccgtaccccacccacaggccggaccccccccgtgccccttcctggcctggtttgctgatggcccgactctgtttgctggctacccggaccacctggtgcgagtgtggccggggacccttggcacccgctagaaatttatggccgagcctttacccaaatataaaaaaaaacctggccttttttta

SEQ ID NO: 607297 - DNA, 328 bp, Homo sapiens
tcattatatatatacagtgtggatataactaaaattaacatatgcgttatctatcttatgtagtcatggtattgtggtgaaaacattttacatctactttcttagcatttttcacgaatgtcatatattaagtatagtccccacatgttgtacaataatctctagcaattctacagttagtcagttacccagttgaaagcagcaataaatgtacttagagctcagaggtgcctacgtgtgaatccaaaaatagcagcacgtagcatggaaaaacaaattgtatacagtattctgtggtgccttcaggacagagttacccaatttcccc

SEQ ID NO: 607298 - DNA, 312 bp, Homo sapiens
cacgagggttgctgctgcctgttctggaggcatactgggtggggccagccgagactggaggtggtggatgcccgggccggtcatgacccgcttcttgcagctgtgaattcctttggacaattgatgatatttaccaatgtgcccattttctacaaataaaagatgggtggattattttctcgatggaggacaaaaccttcatctgtaaaagatcgagaaagtggacatgaggaaattcaaggagtgcaataatttagggaaaaatatcacagattagaaaaagtatgggttggaagattaattctgtacacc

SEQ ID NO: 607299 - DNA, 277 bp, Homo sapiens
tccggggctgctggcacctgctgcttgattggtctgatggaggcgaggaaccttccaccctctgtcagcccagggatccggaccatcctcgcaggtgaggaggctgtgctggtgacagggcccagatcacggacagcacggttgtattttatgctttctacacacagcaagctgtcatcctctccaaaaagcacctttgcgatgtgggagacgacagtgctggctaatcggattcctgcagcccgggtgatcccctagttctagagcggccgcaccg

SEQ ID NO: 607300 - DNA, 666 bp, Homo sapiens
  misc_feature (48)..(48): n is a, c, g, or t
  misc_feature (581)..(581): n is a, c, g, or t
  misc_feature (650)..(650): n is a, c, g, or t
ttttcttttccagggatttatttaatggggatgtgttcaaggcaagancgaattcagaaggatatcgacgtcgtgatccagaagtccagagctgaggactgcctgtttgcagctaaacaagcactggccttgagataagcaatgctgaagcacttgcagctcacctattaccataaactgactgagccctccctacacaagccgtaactactgctttgattggacaagagactgatttcagtagttttctcttgataagagaccactggccgtgggcgggttctggacagtttacagaagctatgcacttgattgcctttgtgtccctgcttcaccttatgaagcatagggcctaattataatgtatttaaatgttgtctccaccccaaagtgaacatgggttgcatgtaacaggcatgtttactcagcatgcatgcagcaggatcccttcacaaatattcagagctccccctattccctgttgaatatgtatatgtggccagccagatcaacgtaaatcactattcggcctccccttcctgtaaacctactattcgggtttcagcaggaagctatgcctnccagtctgtcagaatggccacttgcaggctgtaaccctttataaaaaataaaatctcctttctaaattntcaatttcctggccgc

SEQ ID NO: 607301 - DNA, 318 bp, Homo sapiens
  misc_feature (48)..(48): n is a, c, g, or t
ttttcttttccagggatttatttaatggggatgtgttcaaggcaagancgaattcagaaggatatcgacgtcgtgatccagaagtccagagctgaggactgcctgtttgcaggtgagttcttgcttttccagaacctcggacccagcgcccccttcccagttttctgaccgcgacgtctgtggctgggggtggggtggagggttgcacgtccccattctggggttcatttggcaacagctgctgcaacgagcgcgggagccaaaagggggagggggctccagcctctccccttcccctccccaccgccaagtctgagg

SEQ ID NO: 607302 - DNA, 144 bp, Homo sapiens
tcactctagaggatctgtgaatattcagagagtcaacctttcttgcggaacgccgagatgccagccaagagaaaccacattgtatcgcggtcataggtgccgttggaaaaggttggttgtacgacccgctttacggtccaaacc

SEQ ID NO: 607303 - DNA, 446 bp, Homo sapiens
  misc_feature (54)..(54): n is a, c, g, or t
  misc_feature (56)..(56): n is a, c, g, or t
  misc_feature (246)..(246): n is a, c, g, or t
  misc_feature (371)..(371): n is a, c, g, or t
  misc_feature (381)..(381): n is a, c, g, or t
cttgatcctgccatggcctggccttgccatgtccctgtcctggccctggttctncnctgcttctggccctggccttggtcctctcatgtccctggctgtgaccctgcccctggtttttctctggccatgaccctgccccagttctgtcctatccctggccctgtctcagttctgtcctagccctggcctttcacagtactttatgcttagtaagggctccatggtgtctgtgagttgaatgttgtnttcatagtatctgccaaaacagaaagaaaaaaacaaaatattttgataagaagttaaagctttgtatataatatgccttgaattgtaagtgcctgttattagttgtattacatataggtcatggntttgtacacntaactccaaaccattgatactgttaaaagaatatatgaatatatgaaagaatgtataaacgtaaa

SEQ ID NO: 607304 - DNA, 675 bp, Homo sapiens
agtctccaagggccggttcttcagcaccagagcccgaagagcccgcagcaagcgtctcctggtagctgctccaccgtaagcggaattctccatgcccgagcggtctgtggggaaagatcgacagcagtgtaggcggactccccgagctcctctgaggaggaaccggaggtctgcgaggacctggcaggcaatgcagcctctccctgaagccccccagaaggccgatggggaaggagaaggagatgccataccttctcccaggcctctgcccacaagagcatggaggtgccgtgaaagtctgggagccgtgggctcagcacgggctggtcaacctcccatcccgtatagaccaccttcccttcctgcaagcaggccaaacatggccagactcccttgctctttagctgtagttagttgccctcatgcctgggatgcccttcccgcactttgctgctgccgtggcgaacaatcatgttacttgtccttcagaggcccacaactcaagtgtcagccatccttccccagctcccccaggcagaaatagttgtctgtgcttccttggttcatgcttctagctgtgacacttatctcactgttattataatgagtcgggcatgagtctgtttccgcaagctagactgtgtctgaatcatagccgatggccagtgcccacgt

SEQ ID NO: 607305 - DNA, 301 bp, Homo sapiens
gagaaccagcgaaggggttaaaacaggcaatccctgtacccccaaagaataaacgccttcccaaaatggcaacccaaagccccatttcagacctgctaagacttttaagtgaggaatgccagtgaggtttctctcaataagtcccagttctcttaattttcaggaagaaagggaaattccagctcctcagcccccaggattgccctctgggaagtaatggaaccgttggtcacagcccgtgggttcaggtgtgccaaaagcttccaaatgcgtccaaagggaaataaagtgtgttggcgtt

SEQ ID NO: 607306 - DNA, 118 bp, Homo sapiens
tacgggcaatgctaccggcgacatcgatggcgggtgcagtggatcgtggacgcctacaccacgtcaacagctacccgtactcctccccgcaggagctgcagtgaagccacctgctgga

SEQ ID NO: 607307 - DNA, 173 bp, Homo sapiens
atttttggtaacatacatcaagtggcactaattacacagtaactataaggtaactaacatgaaaccacagaactgtaactctgccacagctgcatgaactcgggttgtcctgaccgagcccatccccaaaaaaccgcccaccccagagctacgccaacaaaaaccgttattaa

SEQ ID NO: 607308 - DNA, 217 bp, Homo sapiens
  misc_feature (92)..(92): n is a, c, g, or t
  misc_feature (217)..(217): n is a, c, g, or t
gccatgagtgggcccagaaaaagtaccacaagttctcactgtggtctgtggactccacctgaaactgacagcccagcccccatgcttcaggntgtcactggcttgaaggtggggcttcaccacgaatgtccccctttccacccaggagcctgtcttccttcctgttgccatcaataatgtccattgcacccaggcgtgtttgtgtccaaaggggccn

SEQ ID NO: 607309 - DNA, 114 bp, Homo sapiens
gcgggcgtgctatcttaggggcgtcgatagccgccggacagagctgagagcaggtgcagcagctaggagcaacggcggggtcagcatggtgtgggctgatgcaagcagcagccc

SEQ ID NO: 607310 - DNA, 717 bp, Homo sapiens
  misc_feature (60)..(60): n is a, c, g, or t
ctgtctatatgttatttaaaagaggtgtcaggtttttaagtacagttttgggaccccccnagccctccacctcttactccaaattcggccccgccggccccgcgcccaagtagcctggtccctagacgcccaagcccagggtctgtcacccacagcatggaaagcgttcaggtccactcagcctgtgctgcgatctgaaggaatgataacatacgaggagaaggccctttggtcctaccctgtgaatgagtaaggggcagctgcaaaatgctaagaatgctgagtgcattaagtgaagtgtttctcccaggtgtgcacagggtgtggcttccaaggggaatgtggatgctggaatgagggaggcagccacctaggccggtcaagtcagaggcccagcaaggagaaagcgagccaaggcaaacgccgacagaagagaccgataaatccgcggcgcactcggcagaacgtccaccgcaccgcataatttagcggggcaatgccgccgggagtccacgccaagttaatggaatatttcctgtaaatactcttttcccttcctgtctcatcatctcatttcattcaaaaatctttactaatccgggggagtgaaagtaatgcatcaatttccagagccaatgcccctgcttccgaaatacccttaggaatcactggaagccaccgcggctgcttagggacaggcgcccagcccgtttactc

SEQ ID NO: 607311 - DNA, 462 bp, Homo sapiens
  misc_feature (3)..(3): n is a, c, g, or t
  misc_feature (18)..(18): n is a, c, g, or t
  misc_feature (54)..(54): n is a, c, g, or t
  misc_feature (60)..(60): n is a, c, g, or t
  misc_feature (89)..(89): n is a, c, g, or t
  misc_feature (118)..(118): n is a, c, g, or t
  misc_feature (137)..(137): n is a, c, g, or t
cgnggtggggcaccgtgncccttcctagggcggaaatccacaagtacattgtangggaanagatcaaaacaatgtaaaagcctttccancgggttttttggttttggtttttggtttnttttggagacagggtcctnactcctatcacccccaggcgggagtgcagtggtgtgatcatggctcactgcagccttggcctccgaggctcaagtgatcctccccacctcagcttcctgagtagttgggaccatggatacatgccactgagcctggctaatttttttttttttctggtagagacagggtcctgctatgttgcccaagctggtctcgaactcctaggcacaagtgatccgtctgccttggcctcccgaagtactgggattacaactgtaagccactgtgcccagcctcatctgttgttgttgttgttgttgttatttttgagacagagcgagaatt

SEQ ID NO: 607312 - DNA, 282 bp, Homo sapiens
tctagcttcttcctgttagttacatgaagcctcccacactaatactgagaaacctggctctcaacctctgtcatctatttacttaatttttcaaattcagtgtgcacatatagcagtatctgaattgttaacctgtatacccatggggaacaactttatcaactacagcacagtgtgtatgtacataaaaatagtaatatttttagaactccaacagctctttgaaacaaagtggtctgcaaaattctggaattagggatttctgtgatctgagtttccaag

SEQ ID NO: 607313 - DNA, 138 bp, Homo sapiens
tccccatttcatctgcatctctctctctctctactttctttccatctcgcttcctcttctaccattcaccatccctccacgcattcgatcatttcttctcctctctgcaaacctctcctgtgctgctgcctgggcacc

SEQ ID NO: 607314 - DNA, 194 bp, Homo sapiens
ccccccttttggagggaaagggccccttgggccccccccccttgcccccaaagttcaaagacaatttttgacgcccccttttggggttacaacaaacaaattttttgcaattagggtggaaggaaacaatggggggcaaccccccttaaaaccgggttcccttaattacggaaaaataaccctttaaaaaccca

SEQ ID NO: 607315 - DNA, 620 bp, Homo sapiens
ccgcgttgcccgcgtttttccaccacatgtgcggggtcaaaaaacaaaaagccattttactatgggcaaaaggatataagggattgtcccatatgttggaattgcaccgcaaagtatgtaggcaggagcctcgtatgagttggaaccacaatgctctattagttttttagagcgcttataataatagggcagtgtgttaacatcaagagctgaaaagaatgctgccttgtcccctccagggagtgctccaacccccttgccccggacactcttggggcacacacccccgtaagccgcccacccttgggggacccacaacgtcggcggagacccacctagcaagcccacgattccgaagcccccccgcgcctcacaacactgcgtacagaccccgtgtcggttgtacgctgagaccccacaagcgaatctggcggaatgtctccagagggaaccggcagaaaccacaaagtacgacgacagggggcgttgccgcccagcggaatagatcccagtcgcagaatctgcgggaacaccacagagcgtgcacgttgagtcgaaccgatggccaccccccggccctgcttcactacggggcgagcccacccccgtcccacaaaaca

SEQ ID NO: 607316 - DNA, 500 bp, Homo sapiens
tgggacatacgtttaacgggtatagacttacagttctgcaagacgaagggttctggagcttgcttgccacaacaatgtgaatgctacgaatgcacagttaaaaatggtaaaggtggctcatgcctgtaatcccagcactttgggaagctgaggcgggtggatcacctgaggtcaggagttcgagaccagcctggccaacatggtgaaaccccgtctctactaaaatacaaaagattagctgggcgtggtggtgcatgtctgtagtcccagctgctggtgaggctgaggcaggagaatcgcttgaacccgggaggcggcggttgcagtgagccaacatcgcgccactgcacttcagcctggcaacagagcgagactccatctcaacaaacaacaacaacaaacaaacaaacgaaaacccccacaaacatggcaaagaaagaatgagatttaatgagaaagcaaaagctacaaattgttgatagtaagccaaagtctgtagg

SEQ ID NO: 607317 - DNA, 434 bp, Homo sapiens
ggtgagtgcagcattcatgaagaagtacatccatgtgcgccacaatcatcaggcctgtcctgacacaggagtcggacacctacattagcagaggagtattcacgctgcgcagcagggatagcatgagctcagacaccgccagacatctccagttacagcccgaacactggaactctgattcgactggccacagcccatgcgaggccgcatgagcagactgtggacctccaggatgcgaagcgaagctgtggagttggtccagtatgcttactttaagaaggttctggagaaggagaagaaacgtaagaagcgaagtaaggatgaatcagagacagaagatgaagaggagaaagccaagaggccaggagcagaagaggagagaggagactcggccagccagatgccaaagatggggattcatacgacccctatga

SEQ ID NO: 607318 - DNA, 701 bp, Homo sapiens
ggaacctgtcatgtggcagtcttctagattagctctctcatgccaaaagctttgaactgtgtgtgtgagggctcaggcctttagtcacctccccaaacatgcttgacagtgcatcacgcaacagtggtcgtttaatctctcaagcaggtccatacgtctagcttacacgtgcgtccattattacttcgaacgaagtctcatgttaagaaaaactcctgtcttaatagcgatcaaaccttaattatatataggcattttctcacttttacaatgtgttttcatgcataatgtttcattttaatctcacagcaaacctataagaaaaatattaaccctgtcttacagttcaggacaccaaaatgcacagtaacttgcctctgttcacagagctaatggtaagacatatactaaaactcaaatatctgcattccaaatcaaatgctttttctcctcaaatcatgccagttttgcttttagaaggcaataattcttttagccatattttaccatttttcaaccatagaatatctggaactagttaaaggaatagtagaggacttccctgaaggtcccacattgactaagagtcagtcttctatagggcatggattctgatcctgaatgcttccaagactgcagaggaatttcgccgaatttgctatgcccatgcctcccctaaatatgtactctgctcttcccag

SEQ ID NO: 607319 - DNA, 669 bp, Homo sapiens
acaccaaatggcggatgactgccggtgcatgctgggggggccctggggtgccctgtgtggccctgggattggggaaccgcggtgtgcttcctgcggagtgtttctggcagtggcatcctggggcctggggtctgcggcctgtggactgtgggcctggtggccgatggcctgcggagctctgctggagtgcaatggccgacgtgataaggagttggatgccctgtcaccacagttagggcctgcttgagtcgaaggaccatgaaagatcacagtccccttggagcgagaatctatctcttactcccatgcccaattacaggaactcagaagatcaattgcattttcattacctgtgcgggcctactcttcaagtgatcgaggtatagacagatatatgcccagtgcaacaagcatgaacccgttgcctggccaggcgcacccaggttccaacggcatattgtcagctatacggggcactacaattggcccaccgtcgggtctggcgtgttcaagtgctccaacggagagtggccaacgacaatcgcgtgggagcccatcactcctggccaatcgctctccatcagtcaccccgtgactcaagacggctacatggcgcggaacaacgactcaggcaagcagacaaaatttgtcacttgccacggtgaccat

SEQ ID NO: 607320 - DNA, 118 bp, Homo sapiens
ttaaatatacaaataatgacctttactctccttctttcccccaggcactccctgcactgctcacttatctaattatgtctgcttagaagatttctggtgaattgaatccttggagaca

SEQ ID NO: 607321 - DNA, 101 bp, Homo sapiens
agcataatatagcaaggactaaccccgagcccttctgcataatgaattaactagaaataactttgcaaggagtgccaaagctaagacccccgaaacctgat

SEQ ID NO: 607322 - DNA, 346 bp, Homo sapiens
tgtcacccatggaccagctccagaatgtggtctgtgagaacgcgaagaccagccagaccatggagctcgtccccaacttccagggtatcgtgggcacctctgtctccccatgtgccctatcactctcctgtgcacacccgcaggctgctcgtgggcttgccacgtccagcagtcactccctcccctcggggtttgctcccgaggccctcacattcaccacaacccagcctcaagggtggggatgtcctcagagggtcggcaatgccctggactcagagaggttgcaccctctccctctcagtctctggtcacacctgcctctgttccaagccctgtccaggtgcct

SEQ ID NO: 607323 - DNA, 1054 bp, Homo sapiens
gcagtacccaaagggtttacggtcgccaggctgggtggcgcggcctggcgtggagcagagtggacacaggttcccacgctggcgccgtgcgaccgggtggggctgcgtgacccccgtctcttggccacatgtgaccaacgcatacctgggcacacgagtgtttcacgacactgctgcacgtgagcggcgtgtacaatggggctggcggggacacgcaccgggccatgctgcccagacccctcaacgtccggctggagtgcccctgcagggatggcgtggagcagcctgaccgcgaccttcgccctggacaccaacacacggctcctttcttcacaccctgtgaggtgcccccgattccgggcactcccagtgcatctatgccgcatcgcacgcatgccccacagtgcttggctttccagagtgtcatcgcccagccttggccccgcgaggagcgggcccatcacagctgctccttgcggtcagccttttcctccccctgaacacgccccaggacccttggaaccttgcaactcagggatccttgacattcccagtggcaagccctggccattggccccacgcctcttcaccacggtacctcgtattggccaccaccacatcacccccttgagcagccccacgccgcgggcccaccaggcacaggacgcggtacccccatctgccctggtgggaacgaatcctagctagccccccacgcgacccttgcaccccactttgccgggcaccgcggtgacgcgcagggccttaagcgaacacgtcgcccacactctctcccgtgccaccactctcgcgtctgacccaccggctacacgaccacaacggcctgcaccagtactcaaccgctcctacttggctagttaccccactgaatgcgacacacctcgtgcaacctctcgaatgtcgcccacaagcgctaactgcctcgttctaacttccagcgccctcacctcgactgccatgacgccctcgtcgtcacccccacgcccaccagtgcgtctaaacactgtcgtcgactctggacccgagccgacac

SEQ ID NO: 607324 - DNA, 154 bp, Homo sapiens
tggttctactggtctccaatcctgtatatccaattaccgtatttggcacctgcatctggattctaagttctgcatcgtcactcgtttactcatctgagaacgtgaagtctgtgattgtgttctcctgcagaacgcctctgcgcttggacagttt

SEQ ID NO: 607325 - DNA, 237 bp, Homo sapiens
ttgaggacccgtatggatactcggcgtgtgcaccgagagtcatactgcacacgccgaaagcgtaatcgccgatcttcacgtgcacacgccgaatctccataccataatcgccgatcttcacgtgaagatcggcgattttggtctggacactcgcgcgtgtgcagtatggtagactcggacgtgtgcacagggcaaggtcatggatactcgcgcgtgtgcaaagatctggcgtgtgca

SEQ ID NO: 607326 - DNA, 602 bp, Homo sapiens
  misc_feature (370)..(370): n is a, c, g, or t
  misc_feature (375)..(375): n is a, c, g, or t
tgagatggagtttcactcttgttgcccaggctggagtgcaatggcacgatcttggctcactgcaacctccacctcccaggttcaagcgattctcctacctcagcctccctagtagctaggattataggtgcctaccaccacgctcagctaattttttgtatttttagtagagctgggtttcactatgttggccaggctggtcttgaactcctgaccttaggcgatccacttgcctcagcctcccaaagtgctgggattacaggcatgagctaccatgcctggctgtgttttattttttttttagtgacttcttcatgtattaacaagtttataaaagccaatccatgctctgaaattatgaaaatatttnctttnctcttctattaatatttttcattttaaatggtgggccaatctagaattggctgtgtaggtggaggatatatataatatagagtaggtcggatgagtagattagaggaaatagtaagagtaaataaagggtttgtaagggcagggttaaaatgagggtactatccacacaatcaatgtaataaatcagaatactccaattggaatgtggacaccttggttcataacca

SEQ ID NO: 607327 - DNA, 124 bp, Homo sapiens
caagctttggcaggggtggtggccataagctgatgacttcatcataggtcaggcttttccactcatctagtaggaggtccctgctttcaaaggactgatcataaggatcgtgccacatggttca

SEQ ID NO: 607328 - DNA, 214 bp, Homo sapiens
gtatgcgctccctacttaccagatggggcgacaggcagaggtgctccccacttcccagatggggtggcgtgctgggcagagacgctcctcacatcccagacagggcggctgggcagaggtactcctcacatcccagacggggtggccgggcagaagcgctccccatttcctaggcagggcagcctggtgagatgtgtgctccccattttcccag

SEQ ID NO: 607329 - DNA, 335 bp, Homo sapiens
ccagaggcaccatagagaaggtaatgggataatccagctgcctgggcaccatagtgaaggtaatgggataatccagctgcctgggcaccatagtgaaggtaatgggataatccagctgcctgggcaccatagtgaaggtcatgggataatccagctgcctgggcaccatagtgaaggtaacgggataatccagctgcctggtcaccatagtgaaggtaatgggataatccggctgcctgtgcacacagtgagggctatgggagacggcgtttcaccgcgtcagccaaggtgtctcgatcttcttgactcatgatcctcccacctcagcctccttg

SEQ ID NO: 607330 - DNA, 859 bp, Homo sapiens
  misc_feature (239)..(239): n is a, c, g, or t
  misc_feature (397)..(397): n is a, c, g, or t
caccttttaagggtactgaaaagataaagtaaaggtcctgggcaagtaaaaatgtgaactttatgaagagttacccccaaggaacccaattctggagggagcccttggatgagggtcccaccccgaatatactaaatctgttctgaaaaaggggagattaaaagcaactttcccacaaagggaggatgttgtgtcagctgctggtgatacagggaccctacaaaagattgggactgttntttgatgactgaataattccaacacagtgccaagaagagagagaaaatgcccagccttttaggttttaaggtcggagtatggccaagttatcacgaggattgggatgaagctctcttgaactattgagtataaaggagaaaaggctcgaactggaganttgaaccccgaatgggcttatcggagaagaaaggagcacgcctgatgcccacaattccccccaattgccaaactcaacttttgagaggtggagatttatgtggagtattgagttgagaattatgcacgtgctttcacgcctctataggagtaattatgcccaccacatgataaaaacttggccttgagaggaaaatttatcaccacaactagtttatgaaacttgtttaactaattgtaaaaggagagaagtcacaactgggaaatttccacggaggttatatataaaatttgtttaacttggtcccagcttttgagagattaatcccttatgaatccctggtttttaaataactttcctacagctgtgtaaaatactggtcaaggagaactttttccttttacctcatgttgtaaacttaagtggctccataaaaattgatcccctgtcttgatctgacca

SEQ ID NO: 607331 - DNA, 457 bp, Homo sapiens
gagacttttccccccgccgacgcccccccgatgcgcttacgtcgcctcctgacctgctggctgccctagggggccaactcctccccccagcgcccaggaccatccagaagattttggaccacgctgggtaatcgaggcggacgacgaccggctccaccaggttatccagtgagctgaatgggaaaacaccattgaagacagtccattgccccgggtattggccaagcttgcccagtgtaccctgcatggtggggctgtagcccgtcttcttgctgcccccaggctcttgccagccccctgctgctggttcttgccccctgctgccagccagaggagaagaaaagatgagaagaagggaggagttctgtaagagtccagatgatgacctgggatttggccctttttgattaaattcctgctccccctgccacaattaagccctttttaccacccactc

SEQ ID NO: 607332 - DNA, 110 bp, Homo sapiens
gagttgctacgcatggtcagttcaagggcaaaagcgattcacaggctagagtactaagacagcacaagtactaacagatttcatcaagttagtgattctggttctccaaa

SEQ ID NO: 607333 - DNA, 302 bp, Homo sapiens
gaatcgagctcggtcccccctttacggattacctcaagtagggaatttcccccaaaaccctgacttcccacctcagcctcctgagtagctgggactacaaatgcgcaccaccacaccaagtaaatttttgtatgtttttgtagacggtcttgccgtgttgcccaggctggtctcaaactcctgggctcaataacctgcctgcctcagcttcccaaaatgctaggattacaggcatgagccatcgcgcctggcccttcccatgttttcaatgtgcctctttgtgttgaggtaatcgtgagtgg

SEQ ID NO: 607334 - DNA, 935 bp, Homo sapiens
agctaaaaaaaaaaaaaaaaagaaagaaagaaaaaaagccatccagtgaaacaactttttttaaaatggtagaattattttattattagaaaaatcctttaagaaacccacaaactttttcccagaaaactcttagaactaattaaacaagtttcagcaaggtttacaagaaatgagatcaacatttttaaaatcagctttatttctgtacactagcaataacctaaaaaattactttgagaaattaaattttcccactttgtacactaaattatctcaaagggcaaaaaataccttaggcagtaaattttaacccaacaacgagttgtacagacttgaaccaccagagaaaccaacaacaattatttgcttggaaagaacatttacaggactctaacatacattagattaggccattattgttgtgaactgtggaacgacaatatttaagaatggcatttactacccaaagtgatctacagatttagctgcaatccctattcaaaatcccaatggctttttaaaaatttcccccccgtagaaatttgaccaaatttgaccctaaaactaatctttagaagggcaagggacccagaggtagccaaaaaattcttgacaaaacaaacggaagtccccagtcgtacacgaattatacctttcgtgggttttaaaaaccttacccggaaaagcaccaataattccaaaacgctgggtgaatactgaccataaggaatagtcataaagaattgacttgacatacgttattgcagaggtctacacacataacggcctttcaccttacattggtccagtggacttttaaaccagaatgggtagaacattccaaggggccacagaattggctttttccaacaaatggctgtggcaaactgggaatctgggctgaaacacgactttgaccccacttctacccg

SEQ ID NO: 607335 - DNA, 435 bp, Homo sapiens
cgcactcgaaggccgctaggccacctgcatgcggttcttgtgcggcccacggctactggtcatcgatgaattcgcgtacgcccgacgcaaccccgaccccgaggccaataccgcgctgtttgaggtgatttcacggcgctacctgaagtcctcgaccatcctgacctcgcataccggcatcgccggctggggcgagcgcctcggcgacccgatgctggccgccgcggttttagatcgagtgctacacaccgggattgtggtctccatcgacggtccgtcgtatcggatgcgggctcaccagaaacgtagcgacgcgctgcgccgcgccctacacccggaggccataccatgaccaccgccaactgccgggggaaaccacgccgacaccagtcgccctcccgcggagttacagctggccgccgccatgccgcccag

SEQ ID NO: 607336 - DNA, 4430 bp, Homo sapiens
ctgcctagtatggaggaggggataaaaaggtctgcctgcagaggggaggagctaagggctgcctggtgtggggatggccccttctgctgtgacctgggtggatatctgggcttgggatgcacctgttggattctccctgagctgcttcctattcctctgacactgcagcccttctggcccctgggcactggagtggcacggggcttcctggcagcctttgatgcagcctggatggtgaagcggtgggcagagggcgctgagtccctagaggtgttggctgagcgtgagagcctgtaccagcttctgtcacagacatccccagaaaacatgcatcgcaatgtggcccagtatgggctggacccagccacccgctaccccaacctgaacctccgggcagtgacccccaatcaggtcagacccccgacacacccaccagccttcccaagccaacccccttcccccaggtcaggccctccctgcccagtcgctgccctttggggtcaatcctacccccggcaggcccttacccctggactcaggggctgtgtggccagcctgccttgagacctgagcggggctgccttaggtacgagacctgtatgatgtgctagccaaggagcctgtgcagaggaacaacgacaagacagatacagggatgccagccaccggtgagcaggccttcctcccaaggggtgaccaaaatatgtactacccagcgaggcccaggtggtccctgcaaagcagctgcagcctcaggacaggagcagcgtgccggagcactcattgttggctggtgggttggttgggggcctgctggaggaacggaggggcagcaccgcacaggcagcagttggctgccagtctgaatgtaagcgcgttagtgtttgaaccaccgttacagccatagtggtgctggcaacctcccctgcccccagtttagtctgctgccctctatgtggccagttgcgatttcactttattcactcctctactttattccaaagagattttttttaaaagagaattgggatggagagctgctgatagtcagctttaggctggtgccctagtagaggtgggtccctgactcctcctcccctacagaacccccacatgcagcagctgggctccctatatgcctgggatgggcagagggggccttgggcacagcacagccttctttcccagggtcggcaggcacccaggaggagctgctacgctggtgccaggagcagacagctgggtacccgggagtccacgtctccgatttgtcttcctcctgggctgatgggctagctctgtgtgccctggtgtaccggctgcagcctggcctgctgtgagtccctggcagacccacctctctctcatgatctcagtgtaggagttagcatatccagttgaatcctagagacagtgtgcttccctgcatctgccgacagtcttgtgagactctaatgcattcagatagtggagagctttgtgaatggcacaggcccccaaagccaggagtagtgtcactgggttgggcactgggtagcagagactacacacctaccttcaagccttcttgtaccccagctgctgcttgctgtccctcccctcctgctgcccttcctcccctcagtggggctaggttcttgtctctagttggcttttctccctgacatcccacagggaaccctcagagctgcaggggctgggagctctggaagcaactgcttgggcactaaaggtggcagagaatgagctgggcatcacaccggtggtgtctgcacaggccgtggtagcagggagtgacccactgggcctcattgcctacctcagccacttccacagtgccttcaagagcatggcccacagcccaggtgacctgaaggaaaggcgggcaggataactgggatggggaggtgtgtgtgtgtgtgtgtgtgtgtgtgacagagggagaaggcggtgtgtgtgtgtgtgtgtgtcagaaagaggaagaaggcgccctctgagggccagcctgggagaggtgtccttctgggttggagagtgactgtctgttctgagagtacagtattggcaccccccatccacactgatgccctggctctccccgcaggccctgtcagccaggcctccccagggacctccagtgctgtattattccttagtaaacttcagaggaccctgcagcgatcccgggccaaggtggagagtttaggcagggctggagctgagcagggaggagtgggcaggggggtacccagtggagatcctggggtgatggtgaggacattcagaaagtggggaggactgggacctcaaaacatcacacttagagctgttaggacttattgcaggaaaatgcagaggatgctggtggcaagaagctgcgcttggaggtgaatgcaggcaggggcgggtcggtctcctaccccacattttatcccctttcctggtactgtcttccctatttctcatcccatgtcttgttccccaccccaggtcctgtaacccccccatccagcctccctgcctagtctcactccccttcccttcagccccttgtgttcatctgtacgcatcccctcccagctggccctgcccctctaccctccctgcctgagcacttacctccttagatggaggccgagaccccaagtactgaggtgccacctgacccagagcctggtgtacccctgacacccccatcccaacaccaggaggtgagagccaggctttgtgtgcaggcagaggcccggggagggcagggcaggggcgtttcatgggagggaaagaactttggagctggccttggctccacctgaccctgtgtcctgggggtccacgcaggccggtgctggggacctgtgtgcactttgtggggaacacctctatgtcctggaacgcctctgtgtcaacggccatttcttccaccggagctgcttccgctgccatacctgtgaggccacactgtggccaggtggctacgagcagcacccaggagatggacatttctactgcctccagcacctgccccagacagaccacaaagcggaaggcagcgatagaggccctgagagtccggtaaagactgaaggcgtgtatgtatattggggcatgggaagaggaagagggtctcgtcaaaccagcgctttgctgggggtaactgaatgtcgtcttctactagcatgtaagctctgtgaaggcagggatgcctgtctgcttacacttcttgttctctcaagtatctaaaacacagccagacactgtttgtaaatggttttaagtgaatgaatgccaaggctcacctttgctccgaaggggtggcctcaccccccgacctcactccaccctgggcaggtcactgaccagaccacatggtggcttttccaggagctccccacaccaagtgagaatagcatgccaccaggcctctcaactcccacagcctcgcaggagggggccggtcctgttccagatcccagccagcccacccgtcggcagatccgcctctccagcccggagcgccagcggttgtcctcccttaaccttacccctgacccggaaatggagcctccacccaagcctccccgcagctgctccgccttggcccgccacgccctggagagcagctttgtgggctggggcctgccagtccagagccctcaagctcttgtggccatggagaaggaggaaaaagagagtcccttctccagtgaagaggaagaagaagatgtgcctttggactcagatgtggaacaggccctgcagacctttgccaagacctcaggcaccatgaataactacccaacatggcgtcggactctgctgcgccgtgcgaaggaggaggagatgaagaggttctgcaaggcccagaccatccaacggcgactaaatgagattgaggctgccttgagggagctagaggccgagggcgtgaagctggagctggccttgaggcgccagagcagttccccagaacagcaaaagaaactatgggtaggacagctgctacagctcgttgacaagaaaaacagcctggtggctgaggaggccgagctcatgatcacggtgcaggaattgaatctggaggagaaacagtggcagctggaccaggagctacgaggctacatgaaccgggaagaaaacctaaagacagctgctgatcggcaggctgaggaccaggtcctgaggaagctggtggatttggtcaaccagagagatgccctcatccgcttccaggaggagcgcaggctcagcgagctggccttggggacaggggcccagggctagacgaaggtgggccgtctgctttcgttcccacaaagaaagcacctacaccccagcacagtgccacccctgttcatctgggctgcctggcagagagccttgctgtttacaattaaaatgtttctgccacaaaaatcaaacaaaacaaaatc

SEQ ID NO: 607337 - DNA, 126 bp, Homo sapiens
tcttggatgagtgggactggcatgaagaaggactagagcatggtacacgctcgtggacagtcatgtggtgatctgtaatttgtgctctgtcttaaaatagtcgaggaactgtttgggatcaccaag

SEQ ID NO: 607338 - DNA, 208 bp, Homo sapiens
ggagcccatcatggcgacgcccttaagcggcgggcggttggaggccacgggggagaaagtcttgcgttacgagacctctattcagttacgttcttgcagcagggacttgtcgaaaggatgcttggaccattgagacaaggtatatagcagcttggccaaattaccttccaactgagaaatgtcatttgagcgattccaggaagctaag

SEQ ID NO: 607339 - DNA, 1103 bp, Homo sapiens
agtgaagaaagcagaagcgggggcagtggggccgagtgagaccggagatgcccacatcattggcaggattgagagctactcatgtaagatggcaggagacgacacacacatgttcaagcagttctgccaggaggtgccatgccccactgtgtctggagtgcactattctccaccaccagacttcagtgacttgatgccccatgcacgactcatgccaccacatgcccaagtgcctgtgtgcagcgacgtgacgtggccccccctcgcgcgcccgccacacgacccccctctttcctcacgcttgacttgcccacctgtctccaacttgacgtcctctctctcgtgtctcttgcatcttacttgaccttctcacgtcccctatgtccccttgccatgccctagttggatggtttctatgcttctgcgtgattgctctcatggctcgttctactgccttgcgggcttcggctcgatcacttgcccaccgctccacacctcctgcccctggtctttcgctctccctctgtggccgtttgctcgcccgggctgcaccgtcggagcgttagccatcgtgctgtcaccttcccttcgccccaaccccatccaccgcccttcgctcgccgccctctcccccgagctctgtgtccctggacgtcgtcaggaactccgttcgctccgctgcgtgccctcggtcaccctcggcttgcacccgctgctccctctccgccacggcgcctcccgttccccccccgcccaccgcccccgctctggggcccctctcttctggggaatcttcccgccgatttctcggcggcgggtcacgctgcacttggcgtgtcgtgggcgccgttccgttgcgccttcccccgattctgctccaccatttaatcccctcaatctctacaaccgtttaaccatacaatcacaacacggccctgcggcacccgtcaccaaacacgcacggaaaaagataccgcgtccacactagctcctgtctctatatcacgccctttggcctccccgcgtcattcacccagtttctctagttctctgtacaacccctccccaacacccctatttaatctctctcattcacccctctt

SEQ ID NO: 607340 - DNA, 495 bp, Homo sapiens
  misc_feature (142)..(142): n is a, c, g, or t
  misc_feature (148)..(148): n is a, c, g, or t
  misc_feature (312)..(312): n is a, c, g, or t
  misc_feature (359)..(359): n is a, c, g, or t
  misc_feature (373)..(373): n is a, c, g, or t
  misc_feature (378)..(378): n is a, c, g, or t
  misc_feature (395)..(395): n is a, c, g, or t
  misc_feature (405)..(405): n is a, c, g, or t
  misc_feature (424)..(424): n is a, c, g, or t
  misc_feature (429)..(429): n is a, c, g, or t
  misc_feature (435)..(436): n is a, c, g, or t
  misc_feature (438)..(439): n is a, c, g, or t
  misc_feature (443)..(443): n is a, c, g, or t
  misc_feature (446)..(448): n is a, c, g, or t
  misc_feature (457)..(457): n is a, c, g, or t
  misc_feature (471)..(471): n is a, c, g, or t
  misc_feature (484)..(485): n is a, c, g, or t
atagagctgctgacctgctgcaacgcaactgtggaagagattgaagcatgaatgaaggctgtgacaagcatttacaaccttctctgcaccaaagtagagcagcaagaatccaagcgcacctggggccctggccttgcaaccntctttnccgtgaatgggcagcctgctggtacagcaactcccagtagcgagagacggcacccagaatcagatcccagcttcggcatttgatcagaccaaacagtgctgtttcccggggaggaaacacttttttaattacccttttgcaggctcccacctttaatctgtttnataccttgcttattaaatgagcgacttaaaatgattgaaaataatgntgttctttagtagnaactnaaatgtgtcttgctgtnatttatattncttttcccaggaaagaagnatttntgaaanntnntgtnaannntcaatatgnagaatggcatttgnaataaaaggtttnntaaaatggtc

SEQ ID NO: 607341 - DNA, 435 bp, Homo sapiens
tcgttcctagagtatcccccgtaacaggcttggagccaagttggggtgtagggggacgtcttcgtttcaggactcttgtcattttcctgggcatggaccgggaccagagcccagatcttattgctcatgttgtttctgcctccccagattggagaaggaaatgcaagagagaacgtgacggaatttggagctatttttcccttctcttctgttttgggtggaatggccttgcctgtctttggctgtgagcttgagtcatcctcagtagagtcccaggtgctggtgcccaggtggagcttagagcttaacaaggaggaaaggcactggggctccagaggcccagacagctgcggtggctcctgctgtcacgctggcctccccttagaagaaagccacctgtccatgtcatgctatcacactgcggtgcacccacca

SEQ ID NO: 607342 - DNA, 300 bp, Homo sapiens
  misc_feature (85)..(85): n is a, c, g, or t
cgatgtgggcacagtaagttatttgaatgagaatgagaattagttccttcaccattttgagaacttaaaaaataaggaacatttnccatccagaatagtgacttaagtgcttttacaaccccaccccgcatttaataattaagcaggtgaggttggctgaagttaaaatgtatttttggcctttttattaagatgatgatgccgctgtgtatttccatgagcgatgaagaagacgcccatgccttattccaggtgctgatttggaaactgttcattaaaactttcatgctgttcctaaaa

SEQ ID NO: 607343 - DNA, 410 bp, Homo sapiens
ccatcgacaactacctcttctcactatttagggactttaaaagtcttggaccaggaaccttcacagaaacagagcatataacctgatatagcagataacataagggcagctgttaatcaggagtggttataaaagaaaaatgtatatttacatgaaatgcacataataaagagagttgaaattgcaatcttaaggatccaaaatgaacagaaaaaagctgctacaaggcataaagctttctgctcgttcgaggtctggaaggctatgaaagaaaaggaagcatagaaaatagctgccaaaaagaggcttgaataaaaaaacaagaagaaaactgaagaagaaaatgctgcaagaaaaggagaagcactacaagcttttgaaaaatggaaagagaaaaagatggaatatct

SEQ ID NO: 607344 - DNA, 1521 bp, Homo sapiens
  misc_feature (1020)..(1020): n is a, c, g, or t
  misc_feature (1075)..(1075): n is a, c, g, or t
cccagacgcaaaggtgtgtcgacccaagacatagtcccgcgctcttgtattaataatccgcgcctgctccccccatttatacttttttatccccgcgtccctatatagtgtgttaacacggatagccccctctcggggtgtgtgcccgaacttttctcggccccaccgtggggggacctcaccctgcttcttgctttcgccaaatcgatgccctgctttgccgggtgcctcctgtccctcatcctggtcgcctggtgtaaaattttgcgccgacggaaacacaagttgatttgtgcgccgtccactaagaagttggccctttaatttccattggggtttcttgtggataacaccccgctcatgacctccgccttcctacatggtgattttgggcccctttgggccacgaccatttggggggggaaacaccaccaccctcctgggggccacaaatgggggctataaaacaacacaggggcctctgacccctaatacccctcggggggccgcttcacacccccccggggggcaaaaggcgaaacccccccacacagggggcctcttaatacccctcggagaccccagaggcaccatctctcccacagggcgcggctcttagcgccccttctgggagagccaccccctctggggagagtctttttatttccctgccgggagggacacaccctgcgacacccttctggagagttcttaacccctcacagggccacacacacaccacagcgcggcccccctctgggggccttaatacgcacactgtctgttctttggaccacagcccccacaaagttgggcccccccgcgagagtctctataccccctggcccactctggggcacccctattatgagcgcgcgccccccccgcgctcggggcccccacacttggagattgttggccgcgtctattatacactctcgcccctcttggcgccctcgcgggagagatggtgtgccgctcgcgcaatagtcgtcggatatacacccatattctgggctnctccagcgtgtgaagaccccccaataggctcaacacgcagagatatatgtctctnttagagatatttccccaagagagagagggaaatagagatagattcggcctctgcgcccacattgttaacacccacagctctctcacataggagagacaccacaccagaggagagagatccattgtgtttgtcgcaatacaccaaagacgtgggatataataaacatgtggggaagaggggaagagaaagacacacacatcgggtttgtctcccatttgtgaaaatggggaaacccatatccaaaataacaagtgactgggttgaacctgagcccacattcacaggttcgccagtggaatagatagctccacattgttcgccagtgaccaatacatccgggtttaaaaaacatccaatgaaatccacgccaactgggaatttctggtgacatagacctcacccgtgcttcatataccctgatataatctgtaaaggggccagattta

SEQ ID NO: 607345 - DNA, 163 bp, Homo sapiens
  misc_feature (6)..(6): n is a, c, g, or t
  misc_feature (10)..(10): n is a, c, g, or t
aaaaancccngttttttttaaagggcccgggagggggttcttttaaattctctggcttgagggccccaaaagccccccgtaggaattttccctttgttgggggggggttgttttccccctttttggaatttttaaaattttaaaaaaaaggggccccttttga

SEQ ID NO: 607346 - DNA, 339 bp, Homo sapiens
ggcacccccccccggagccgggccccaagggagcccccccccgtttccctgaaaggagtttcggggcccctttaaaggttttttggtgtttttccccaagttttaaaacccctttggggtttccccttttccttgggttggggtagcccctgcataaaaattaaattatagggggggggctctttccctcccctcctaaaggaaaggaaaggggtttttttccccttagggggttgggtaggtttttttggtttggggaaaattttttgaagggggggaaaatggcaagtttttttttttttttcccccctccaaataaaaaaattgggccctttttta

SEQ ID NO: 607347 - DNA, 171 bp, Homo sapiens
tgccacctgactcagtcagaaagaccggtgacacccgtcaggtgcgtccattgtggatagatggtcaggatggcaaggtcatctcctcccgcgagctggtcatccagaccacccgctgaggactcatgtaccccagcccaggcctcttccccacccagccctcttcccctg

SEQ ID NO: 607348 - DNA, 344 bp, Homo sapiens
  misc_feature (22)..(22): n is a, c, g, or t
  misc_feature (29)..(29): n is a, c, g, or t
  misc_feature (35)..(35): n is a, c, g, or t
  misc_feature (38)..(38): n is a, c, g, or t
  misc_feature (44)..(44): n is a, c, g, or t
ttgccagctgttgcaaaatacnacccaanatgggnaanaaaaanagtttaattggacttacagttccacatgactggggaggcctcagaatcatggcaggaggtgaaaggcacttcttacatggtggcggcaagagaaaaatgaagaggaaacaaaagcggaaccccttgataaacccatcagatctcttgagacttattcccacaacacgtgggaattctgggaaatacaattcaaattgagatttgggtgggaacacagccaaaccatatcaccaaatacatacctatttaataatccagaaaatacaatcttatgtacttaacagaagtgaaattattatc

SEQ ID NO: 607349 - DNA, 403 bp, Homo sapiens
tgataattggggacacaagaaaactgagtcccagagtggttaaaaaagtttgacataggaccagaatgcagatataataaatcacagctcagctcaaagtgatttttctatgtgctctacattaagtttataagtgtctgctaacaaaacagaattaagtgcagagaaaatatcgccagtagaaattcacagacaaaatctgaagtcaactgacggctagcaatatttaacttcaaattcttttctttgtttttttggagacaacgagtgtggctctggtggcccaaggctgggagtgggagtgggtacagatctacagctcactggcagcctctggcctcctggggttcacagcaattctcctaactttagccctctcgaagtagctggggactacagggca

SEQ ID NO: 607350 - DNA, 230 bp, Homo sapiens
tgcaacacctgtggcctgccttagttgggccaccagccccggttacctcttgtcggtggagggaggtggcctctcggggacataagctggctccccccgtggtggctgtatccgcctcccccactgcctcctggggccaagggaagaaggcctgccagcttccaaggaggccccaaactgctaaagcttggactgagttaattatcgattcttggcttttataatggcca

SEQ ID NO: 607351 - DNA, 84 bp, Homo sapiens
gagagagatgaagggtcttactactgtgcctgtgacacccgtactgggggatacgcgggctcctgggacacccgacagatgttt

SEQ ID NO: 607352 - DNA, 339 bp, Homo sapiens
cgagaggtacacgatagagtatctcctgtaagagcagtaacatggtcacgtctcacagtgagaaagaaatcccgaataaatagcctaaacaagatatcaaataaacagccagagctataacttgtcctcatcacatatctgtatcgcagaaattggaagaagaatgtaagactgtactgtgagcccgttcgtgtgccatgtgcaagtcatggtataagtccaccactattccttaagtatatgtatgggcctcaagtgaatcagccacacagaccccccacattatctacatagaaccgtcattcacacaagcaaacaccctcatgttcataccctctt

SEQ ID NO: 607353 - DNA, 259 bp, Homo sapiens
ggtccctgtcacatgcggcagttcagagagagaggagcgtgggcctgactccgggatgtggcagccctgtaatggcctgtaccgggtccggatcccaaggcgacccgggtccctggatggcctggaagctgtgtggctatgtctcctcctttgtccctgctgtgctccctgtgtggagtcgcacctgtcggaccatgctgaccctgcgacgtggattgtggccggccaacgtggtgggcgtgtcggtggtgactgcacc

SEQ ID NO: 607354 - DNA, 215 bp, Homo sapiens
ggactaaaggcatccttgtcttttgacctgttcgcctcagtagaaaaggctctaaggggagatcactgtagtttagttctgttgacgtgtgcccctcccccttggaaatgtatgctgggattttttttcccctcccctacccatatccctcccgtgtgtggttggcaacttttgttttttggggtttttttttttgaataaaaaagattctacta

SEQ ID NO: 607355 - DNA, 575 bp, Homo sapiens
ggattactcacgaacaaggtccccctcagaaaagagtccctcaaaacagcactaccctcagaatagggcctctgcagagcagaatcctcacagaacagggttccctcagaacagggtccccacagaacatggtcctctcagaacaggatcctgacagaacaggttccccacagaacagagtcttcctcagaacatcattctcaggacagagtcccccctccccagggcaggacctgttcagggcagagtccccatagctgctgtggggagggcagggccctgggacttgtttccaccttggctgctaggctcataggtttttctttcaggtgttccagctccacgaagggcatgtagcaggggtcacaaaaatggagtagactttcggataggcaggggcagcactgggggaagtgagatttctcttcaataggagcaacggtacaggtgttcacatgtggacaacagtgcaggtcgtgcattgactgttcaggggtctcactcttgcttaacgtgcctggaacagttctccctccctctcaggctgctcatgagttcaccacgtgagcgcccaa

SEQ ID NO: 607356 - DNA, 409 bp, Homo sapiens
  misc_feature (9)..(9): n is a, c, g, or t
  misc_feature (20)..(20): n is a, c, g, or t
  misc_feature (253)..(253): n is a, c, g, or t
cacgaatanatgtgtatatntaaacttgtaatgtgtatgtatgtatacatacatcctatacatacacacacatttttctggagttaggggctggagccagacagagacagataaataagccccggtatggtggcctcactcttgtaacccccagcaatttgggaggccaaggcgggaggatgacttgaggcccaggagttcaagaagagccctgggcaacatagtgggacctcacctctacaaaaaagaaagnaaaatcagacaggcatggtggccaatgtgcctatcgtcctagctactcaggaggagtaggtgggaggattgcttgggcccatgagttcaaagttgcagtgagctatgatcacgccactgccctctagcttgggagacagagcaataccctgtctct

SEQ ID NO: 607357 - DNA, 326 bp, Homo sapiens
ccaccggtatccgctacacaaaaactgtatatggttaatgtccatggcagacattattcacgatagccaaaaatagaaataacccagatgtccatcaactgatgaatggatagacaaaatatggtctattcatacaatggaatattattcaaccatagaaaggaataaagtatcattatgcgctccagcctgaatgaaccttgaaaacattaagtgaaagaagccagatacaaaatgccatgttttatgtaactccatgtatatgaaatgtccagagtaggcaaatccatagagacagaaagtagactagtggttgccaggcattg

SEQ ID NO: 607358 - DNA, 112 bp, Homo sapiens
aaaccacaagccttaaaaatgttgaattcccagattgatgattagttagggagcttcctgccctatcccagtaacaagtggggtgtgaggtgatggaactaaggcagccagc

SEQ ID NO: 607359 - DNA, 506 bp, Homo sapiens
attgtgcggccaaaccagcccagggggttggcagcagggttaaacacctgcctgggggtcctccctgagggacccctgcctggagagcaaaaaagggggccttttgttcccgggggattttttgttttaatccccgaaggggctttgctgggtgcgggggggaaaatgtttcccaacaattaatttttcctccaaagggggatagggccttggcccccccttttccaagggccggggggggggtttcccctgggatgggaaaggggggccctttttaaggcccgggaattcaaatggcaacccccccgggggccccccccggcccccaaaattttggggggttaaaaaacagggggccctcggggcggtgttgaaacccccggggggccccgccttttttttaattaaaaaagggggagcccccccattgggtttttcaaaatttttttccttggggggggaatttggtttttaaatccggctaaaaaaaaggaattgggacccca

SEQ ID NO: 607360 - DNA, 418 bp, Homo sapiens
  misc_feature (30)..(30): n is a, c, g, or t
  misc_feature (33)..(33): n is a, c, g, or t
  misc_feature (64)..(64): n is a, c, g, or t
  misc_feature (66)..(66): n is a, c, g, or t
  misc_feature (100)..(100): n is a, c, g, or t
  misc_feature (210)..(210): n is a, c, g, or t
  misc_feature (218)..(218): n is a, c, g, or t
gtacagtcactacagaacagtatagaagtnccncctcgaaaactacaactagaactcccatatnanccacgcagtcctgctactcggcatttacccaaangaaagcgaaatcaggatatggaccgagacacctgcacctccacatttactgcagcactattcacaataaccaagatacagaatcaacctaaatgcccatcaacctaaatnatgacagnttgactagagatgtggtacatatacaccatggaatactatgtggccacaaagatgggaacacagacactggggtctacctgaaggtggaaggtaggagggagagggccagaaagataactattgggtactgggcttaatacctgggtgatgaaataatatgtacaacaaacccccacacacgagtttatctatgtaacaa

SEQ ID NO: 607361 - DNA, 893 bp, Homo sapiens
  misc_feature (307)..(307): n is a, c, g, or t
  misc_feature (311)..(311): n is a, c, g, or t
ggacgaccctggacatcgtcagagccaacacctttgttgcagaagctgaagggtttgtgatccagctcgagtcaacagtctcctgtcattggtggccatgctgggaagaccatcatcccccttgatctctcagtgcacccccataggtggactttcccctaggaccacgtcgtgacacgtcatcgtcactggtgcggatcctaggaggccggcgcggatgtgtggtcaaaggctatagagctctggagacatggtctctgccagcccgtctccatggcgctatgcccgagcgctccgcttttgatcnttcntcctctctgtgtggatcgtcaagtcgaactgcgcaaagcgaaaggctagtaagtgtgaaattgcttccttatcgtatctagagctcgactacgcggaagactggtcaatgctaccatacctctcctccagcacctgctgtctgcttgtgcaggataaggcgtcgatcgtataagcatatctaggccttcgagtgactgctccctacttaatgaagagagaagaatgatctcggattgccatccccgagctgaaggcctccatcaagaagggggcaagatttcgtgaagaccctgaagtgagccgctgtgacgggtggccagtttccttaatttatgaaggcatcatgtcactgcaaagccgttgcagataaactttgtattcttaatttgctttggtgatgattactgtatctgacatcatcatgccttccaaattgtgggtggctctgtgggcgcatcaatagaagccgtccttgattttcatttttcaaggtcccttctgtaaatgctgtgctttcttccctgtgagagccaactttagagtgtctgctacctcttcattaccaatcagaattaccatgc

SEQ ID NO: 607362 - DNA, 344 bp, Homo sapiens
aagtcttcctgaactaatcttggcatctgctcagttgcaggttccctagacactttactgcatcttcttttccctagttagctgtccacttatagggtcactttcctgctcagtagcacctccaccagtgggcatgaaagagggaataaagtgcgtgcatggtggctcacgcctattatcccagaactttgggacggcaagggtggggtggattcacctgaaggtcagggagttcaaagaccacccttggcaaaaactgtgaaaactcgtctctactgaaaatacaaaaattagccgggcatggtgtcgggtgcctgtaatcccagctacttgggaggctgagg

SEQ ID NO: 607363 - DNA, 456 bp, Homo sapiens
ctgcataaaatagttgatgccgggcacctgatgccgaactagtacgggtgcacctggcggggactagtacagctacacgattgccacgatgccgtgcttgtactacaaggtgaacaggtactaccggcataccggacagccgataccttgaactacacgtgctaatattaacgactatcacggtaccacgtagcgactacaagacgacggataccatttactacttaaacttgaacatataggggaggaaccggggacgaaggaagacaaaaaggagaggaaaggaacaggaaaagactcctacggaataaggaccacctacacaaacgtggtacgaaacacgggaatgaccgggaaacgagcaaccttaactggcgcgcagtgcttggtattgaactgatgtacaggggttattagctacgtccaatagtattaaggaacggggaatatataaaa

SEQ ID NO: 607364 - DNA, 548 bp, Homo sapiens
  misc_feature (117)..(117): n is a, c, g, or t
gagcggagtggctcgccgggtcgttgggccctgtcgacctgtaggcgggcgagcgagccagcggacaagactgcgaggtgatggctgatgctagcagagtccggccaggctaggggnagggtgctgctcctggtgctgctgagccgcatgagccctagtccgcggctgccggtcgccggccagtcgtggggccgggaatggctgctaaggtcggagtggcgcgggcgctcggcgctgggcatgccgggtagagtcctgtccccgcccctcgccttgcggcctgatcgccggccgtctgctgcccggggaccggagcggtcgggccgcctttgcccaggacacacgctctggcgtttgttcctttgggcgtgacgccagcttcaacgggtacgcggttttcccgacgggtgctgatctccgagtcgctgttgtcacgcggactgctgtcctccagattcaggccggtgggtctggggagcccggattggtcttggaggagcaacggtctgcgcaggtgactcggtggcctcaagtgtgtaggtacctgg

SEQ ID NO: 607365 - DNA, 179 bp, Homo sapiens
  misc_feature (54)..(55): n is a, c, g, or t
  misc_feature (136)..(136): n is a, c, g, or t
  misc_feature (175)..(175): n is a, c, g, or t
acatgtgactttgctactgaactccttcatctcctggcagaagcctctgcccannccctcaagggctgcaggccagttctcatgctgcccttgggtgggcatctgttaacagaggagaacgtctgggtggcggcangagctttgctctgagtgcctacaaagctaatgcttggtntaga

SEQ ID NO: 607366 - DNA, 353 bp, Homo sapiens
gttgacctactatgtagatgaggacctagtatacacatctgtacacaacaatgtggaagaatacaagtcgtgactgagtacacgagatcttcatgagataaatagtaccatcaaatgtattccctctaatacttaatttcaaaagctactagtctcaaattcactaacctgagtttcataacttttaatgaaacatcaagttaaattgcagggtatgatccactaggggctcataaaattaacttacagggtcctgaccagtagtagattgtaagtagtaagcataagcagtttactaaaagttttgtttcatttgatagatatatgtatgtgtgtactaggtttgtaatgaa

SEQ ID NO: 607367 - DNA, 146 bp, Homo sapiens
gcataagtataatcaggtactagagtagtcaatcatagaagagatagaatcgtggtatctcagtggtgatgtgtgggaagaaggaactggatgtgtaaacttgtttaatcatgtgagtactgtgaattttatgtatccacaatgaa

SEQ ID NO: 607368 - DNA, 755 bp, Homo sapiens
gcccactggagaagccccacaacggcctcctcttcccccagtcacggcggactatcagtacggccgcaacaatcagtcttaagcagaccacttccaatacagccggcagagctacccaaactcgtacagtttgaaccgctatgatgtgtagagctccaaaggacacggaccagactgcttcggtgacatccttccccggtcgccccatcagcaggtatcagaaacttctgacaatcacgtgaatgtagcaacccagctcgagggtgacggtgcataagctctccatcatgataagcccgtggggttcctggttcccccgtgagccgccggaggatgcgttgcctgcagtgcatgacggccgtgagctctgggctatacctaaacagatgaccagttgtctcattgctctttctttcctggatgtctgtcgatctgagtggccgtgttccctgcggagatcttggccacgttgtacctttccatgtgcgaacttattccccatgccatgtgtatctcagagcacttgtgtctgcattccagataacattcaggacctgtgtgaaaagctggggtcactgtgtgctgtagaccatgaactgtccagtgcgtggtgtccaccggcggctgcttgagaacgtcagactggctagtctaatgccctggcgcagatcgcataggaccacagggtcaccagccaaaggaagccggagatcttcaactccccgcacaatgatccatctggtacccctagtcca

SEQ ID NO: 607369 - DNA, 1570 bp, Homo sapiens
gttgcgtttgttcgtgttgctcgtgttgtgttggttttctttgtgggctgtgttttcttgttttgttgtgtggtcatgtgtcgttgggtgcaatggggtgttgttgcgttgtgtgtgtctagttaatttttttgggtgcgttgtgttgcttcgcgggattgtgtagcctattattgtggttgattctacgctcgtgtcttattgtgtgttgtcttctggtgggtgtcttgtttgtgtgtggtatggggtgtgtgggtttcttgtctgcgttgggagagggctcagcgtctcgtttcttgcttttgtgtggcgtttaatgtgttttgttggggtcttttccccgatgggtctactggcttgtggtcgtctgcttttcttgttgacggtgcggcgagaggcgtctcgtggaggtatttatgcttgtctttgttggtctcttgttccttgccgcggggttctttcttttcctgtggagggtgtggtgagccgctcttcgttggtctgaattttattagatgtttatgcgatttggcccttgtgtcttaccccacggcacgtgctccaggggttgcatgatacctccaaatatggagtcgtcctcgtacaaatttgatgatttttggtgctcttattctgtttatgggttacgtcgactataggtggttttcggttccacccacatgagatttaatttttctaaatttctgataagcctgaagcggttcattcctttgtgaactactcacatgtgcattctcccgatgttgtgttctccacagcgtttcttccacccacgggtgcttgtatgtgcttcacgggttgtgagatgggcctgcgtggccttggctgcctcacggcctggatctacttaggaagagctccacggttctttacatgaagtgtgtttttctttggtttcttctgttttccaactaaatatttttttctaaataaatattttcaacaattgatttgaaaaatttgtcaggattatttcaacttttcacatttgttatctgaaattcctatttcctgttaacataggaggtgtgtgcagactttattaatgtgaggaaaagaaatgctcaattgaaggacatttccctgttttctataaagcaatggttgaactcattttctattttgttatttctaaaaggaactgcataccaaaaaaatgcattctttctattaaactgtgagaactacaaaaactactgtttccctttttgtcttttctcctaggaatctcaaagctaaatataatgtttaatttttgttacaatcctaggtacctttatgattatttggttccaacctaatacttttcagtttccctgtttactttaaatatgttttaataccataacattgaagccacttcaatttgtgtttgtaacaatatggaatttaagttaaaatcaattaacaaatcatgactccatatcataaagaatctggaagatgttctttgtaaaatgagtgaaaataccagtatttctggatgtaaagaccaaattgtataatattgcgcaatctctaatgttaactttagtaaaattctaatcaa

SEQ ID NO: 607370 - DNA, 875 bp, Homo sapiens
  misc_feature (94)..(95): n is a, c, g, or t
  misc_feature (99)..(99): n is a, c, g, or t
  misc_feature (246)..(246): n is a, c, g, or t
  misc_feature (298)..(298): n is a, c, g, or t
  misc_feature (300)..(300): n is a, c, g, or t
  misc_feature (324)..(324): n is a, c, g, or t
  misc_feature (453)..(453): n is a, c, g, or t
  misc_feature (455)..(456): n is a, c, g, or t
  misc_feature (458)..(458): n is a, c, g, or t
  misc_feature (515)..(515): n is a, c, g, or t
ggtcgcaactgcgtagaggcttcgcggcctttctcagatactgaggaggcttgaacctgtgggtgggaggtgaagcggaacggtcccggcgganngaantgcagtcgggaaggggaggacgggaagtctagccggcttggacccgccccactctgttacctgccagatgacgctgaggaaactgcttttcttctcgaggcctccgttgcctcgtctgtgcccgggcggtggtgcttacccggcggngtcgcagggaggtctcgtggcggcgcgtgttgggtctgcgtttcccctctgngngtcgcttgggcagcatgagcccangggctgtggacaggcctggtgctcacgggttctgtggctccacagacttcccaagaaggacaacccgaggcgaggcttgtggctggccaactgccagcggtggaccccagcggccagggcctgtgggancnngnatccgagtacatctacttctgctccaaacactttgaggaggactgctttgagctggngggaatcaggtgggcctccctgccggccgacgcatggggtaggatgtggggctcccggacggacctgggacaggtgcagggtcatggaatgtccacttgaggcaggctgacgtccaaaggggcgctggtattcctgtacccgagcatctgaaccagtgaaagccagcacccaggatcactggagcctgtgacacaacggggaaaagcagtgagcctttccagaagagtactctttcaaaaggcccagtcttggaccagtaagtcccgcgagtgacaagacattctatctgggtgggtaagcccatgtgggataatgccgggcttccagaaaccctggactgtgacgcagtctggggggaa

SEQ ID NO: 607371 - DNA, 817 bp, Homo sapiens
attaaagagattgtctagacagattttttttttatcagataccacaattgagcacgtaagaattctcaggagggaggaatatcttaaagatttcaacctggaattctctgagaaaaggaaaaagaaaaatcatatgattaatcttgttttcatttgtttttaagccagactttttagcttcaaattaatactgattagataacaaaatcatattttattattataataatagttgtaccttttgctattccatttcaggactcagacgtctactaagtaaacaggaaactgggactgaattcagtcaagaacttagacagcttgttggccttttaagcccaatggtctatcaggaagtagaagagcaggtattaagttacaaaaaaaaaaaattgcatgatatttgctgactatattaaaccttagttttccttaaatgttcctcactttctttctcttaagatttcaagcaaaatacccccaaaacagaaatatctttaaattttttactcaggaggttgaggcaggaggattgcttgagtccaggaattggagactgccctatgatcacacccatgagtagccactgcaccccagcctggtcaaaatagcaaaaccccatctttaaaatataatgttacaaaattgtatctctccgccattcaatctgctggaaaacataatttcaatctcccatttacatctgtttataaatactgccacatcagtttcattcatcatttctcatgaaagccccatctctgatgtttatcttcttttatctataagctatttaaacttttaaaactgtttttcc

SEQ ID NO: 607372 - DNA, 836 bp, Homo sapiens
  misc_feature (94)..(95): n is a, c, g, or t
  misc_feature (99)..(99): n is a, c, g, or t
  misc_feature (246)..(246): n is a, c, g, or t
  misc_feature (298)..(298): n is a, c, g, or t
  misc_feature (300)..(300): n is a, c, g, or t
  misc_feature (324)..(324): n is a, c, g, or t
  misc_feature (453)..(453): n is a, c, g, or t
  misc_feature (455)..(456): n is a, c, g, or t
  misc_feature (458)..(458): n is a, c, g, or t
  misc_feature (515)..(515): n is a, c, g, or t
ggtcgcaactgcgtagaggcttcgcggcctttctcagatactgaggaggcttgaacctgtgggtgggaggtgaagcggaacggtcccggcgganngaantgcagtcgggaaggggaggacgggaagtctagccggcttggacccgccccactctgttacctgccagatgacgctgaggaaactgcttttcttctcgaggcctccgttgcctcgtctgtgcccgggcggtggtgcttacccggcggngtcgcagggaggtctcgtggcggcgcgtgttgggtctgcgtttcccctctgngngtcgcttgggcagcatgagcccangggctgtggacaggcctggtgctcacgggttctgtggctccacagacttcccaagaaggacaacccgaggcgaggcttgtggctggccaactgccagcggtggaccccagcggccagggcctgtgggancnngnatccgagtacatctacttctgctccaaacactttgaggaggactgctttgagctggngggaatcagtggatatcacaggctaaaggagggggcagtccccacgcatatatgagtcttctccaagttgcgccggacaagcaagaccaaaggacacagttacccagctggccccctgaagtcagccggctcagacgatgcaggaagcgctgtgtccgagggccgagggcccacaactccattttctccactccacctgctgatgtcacctgctttcctgtggaacaggtctcagatctgccagtttggcggcctcccagtctgggaggctgaagcctggccttagcagccccttttcagagctactgggcccttgggtgc

SEQ ID NO: 607373 - DNA, 91 bp, Homo sapiens
tgtctgtgcaaggttcacagtcagctgcaaggccagggtgcacactgcagacacctgtgagacctgtggatgccgaggaggaccaaagggg

SEQ ID NO: 607374 - DNA, 526 bp, Homo sapiens
tgctgcttgagtattgttgtctgcctaatacagtctgcagtcgtggttggttcgttggctgaataaacatgggagcggagagctctggagaaatacagccatttactggctgtggaaatctcaagttaactactctaaaatcgcttcgattataaaatttagacaataattattaaaatgtcattgatgagttcctgggtaatgaccaaacacctgtcatttcacacaaatgcgttgggaatgtcagaaagagagctcctgcccttaatttagatgtaaaccattgagtttcagaactaaccacctgataaaatctataaacttttgatcattaactagagcagatgtctgttatgtgatgtcaatgttatgtgagttgacgtgtacagtaagtgaatgcatatcaattaatcctgctaacaaatttgacacttaaggtgatgctgaaaatcctttacacttaaagtagatggaatcttaagtatgggagccttgagtgtccggaaagaaaagctgcatgcgacaa

SEQ ID NO: 607375 - DNA, 211 bp, Homo sapiens
acctcgcttagatgctccgcggacgtgtgggtctaggtggacctgcctgcctgtgttgacggcgctcctgttgatgagggcccagaccatcctgccaaatgtgtctagagcgagcacgtagtgttggggacgacggacccacttctggccacacgtgggaccgagggacacgatggggccctgcggtcccaataggcttgcctgaacggtg

SEQ ID NO: 607376 - DNA, 142 bp, Homo sapiens
aggaggccgaggacggcggcgatgaagaggaggaagaagaggaagaggaggaggaaggaatctccgctctggacggcgaccagatggagctaggagaggagaacgtgtttctcgggggcggtcgactcgggcccgatggagg

SEQ ID NO: 607377 - DNA, 244 bp, Homo sapiens
tgctctaccggatctttatgacgagcttacacaatagcttttatagtaagataactctttacggactccacttatgactcccttaaagccatgtcgaagccccatcgctgggtcaatagtacttggcgcagtacttcttatgaattaggcgggctatggtataactactgcctcaacactcgattctcaaaccccctgacaaaaacacataggccttcccctttccttgtactaaatccctatg

SEQ ID NO: 607378 - DNA, 196 bp, Homo sapiens
gccaggcgggacagagcagggctcatctcaaaaaacaaaacaaacaaaaaaaggaaaaggaatatatgtaccattttcattttaattttaaaaaatctttctaggccaggcacggtggctcacgcctatagtcccagctacacgggaggctgaggcagaagaatcgctggaacccaggaggctgggcgtgcagggg

SEQ ID NO: 607379 - DNA, 121 bp, Homo sapiens
ctactggcttcttcgatgacgtattctgctgcactgatataaccattgcatcctgtcaaagactcggaatgcctcacggatttcttcttcactctttatttcatttattcgaaccaattag

SEQ ID NO: 607380 - DNA, 129 bp, Homo sapiens
gttacaagattccatgagtcggaatctggagaatacagtccagcactgggcctgctctgcccaggagacatttggtgacacagatgcacaagcgctagacgtggggcaaccgctcttaccgagaccgct

SEQ ID NO: 607381 - DNA, 509 bp, Homo sapiens
gagaggatcccccggaagcacacgcaacatattatggcatttatcctcaatgaaaatctgtccagagtcctttgattttgggaatatcctgtaaacaatcaaaccaccagaacatgatgtacaacagtaaaagttctctggcattaaactgaagatatctgtttaataaaaaaagaaaatgtaggaaaggtacttagagctcttactttctaagtacagaacaccctagacaatgtcaaggcatcttaatctccatcaagaacaaaaaaaaaaataattttggtcatggcggtgaaatcgatcattagggataaaaggggggcaaatgggtcaaagggatccaagaaacacggatgtccacgcgggcatatgggcaactaatacgtcaacggggggtcactagagagtcaaaaagatcttccctttcttctggtccttttccagggttctggaagagtccggtggtcctaaaatacgtggtggagcttcccagttggctttctcatcct

SEQ ID NO: 607382 - DNA, 410 bp, Homo sapiens
  misc_feature (191)..(191): n is a, c, g, or t
  misc_feature (301)..(301): n is a, c, g, or t
cggtctcttactataatgccttggagaaagctcgtgtagagaaccaggatcttcaggtacagctgggtcacgcactccagcaggcggcggaccccaatagcaaagggaactcgctgttcgcagaggtggaggatcgaagggtggcaatggaacgccagcatcaacttgatgaaagacaaataccagtcacntgaagaagcaaaatgcgttcaccagagatcagatgaacaagatgaagttacaaatctccacattgctgaggatgaggggctcgcagacttgagtttgaacagcaggagcnggttgtttgccatgatagaacagaagaatggtgaaataaaacaccttttaggggaaattaataaactggagaaatttaagaacttatatgaaagtatggaatcgaggcc

SEQ ID NO: 607383 - DNA, 412 bp, Homo sapiens
ggcacgaggtgtgtgtgtgtgtgtgtgtgtgtgtgtatgtgtgtgtgtgtgtattcaggcacacacttaggaaaacactaaacaaacgaataaatatattttaaaaatccattgttttgatgagtccttgcatgacagggagctctttaactgttgtctgtgtattaaaactggtttgtgataaataatcttcacatggttactcaacccaacagaattcaaatgatttcagatttgaatgtgctatcagggcagcagcaggaaaggcaatgctggagcgatggctcagaggttaagagtgctaactactcttgctgaggactgaggtctggttcccagcacccacaaggtggcttccaattatgtataatgagttctggagagtctgatgtcttcttctgtcttccatggg

SEQ ID NO: 607384 - DNA, 153 bp, Homo sapiens
gagagatgcagacaaagtaaacaatgaaggttgttttataaaggtgatgaccattatagagtcagaatggagtcgttgcaggatttcctttgagttgcttcttccactcttggatcttctcgcctactgcctctctcgtgccatacaatacca

SEQ ID NO: 607385 - DNA, 877 bp, Homo sapiens
aggactttatggactttctactttcaaggatgctcgacatgcagcagaaggagaaatatataccaaatgaatcaaaaaatgatgaattggtcagctggctgattatgactggacaagtgtctgagccagatgaagagctagtggtctattataatggacacttataaattttggagaagcatctttcaagtgttcactcattgggccttggacaagttgctcagacagcttgcatgtcagcctgccagcatcctgtcaacatccttaatgcagatgcttactggccagtgaggttcaacaccacacataagcatgggagctgttcagcagtttaacttagatgtcatacagttgtcgaatggttggccagctctgagcttgtgccaggattccagggggataccctgcagctagcattcattgacctcagacaactcctgtgacctgttaatggtgaggaatggtctacttacctagctgatatgggcagcaaggttcaaagtaccttcgggtgaatcaaacaacagcctttactctttgggagaagatgacaggctactagccaacaaaggaacaatatattggctccagtccaggaaagaaatgatcgagacaaacaggacagtggataggacacacgtcggaaaccagtcggaaagctggtggacggtaaggtcccagcacatgtaagacctccacatggtggctcagtgcagccaactcactgtcaggtgactgaccacagatggccgaacacggaatggggtacgatccacaatacatggaagaaactgggggtcacaaacaggacaaaacaatgggggtaaaaccgcaatcatatcgaacgacttccgaggagagcgcaggcaacagcaca

SEQ ID NO: 607386 - DNA, 727 bp, Homo sapiens
  misc_feature (727)..(727): n is a, c, g, or t
cgcggtggctcacgcctgtaatcccagctctcagggaggctaagaggcgggaggatagcttgagcccaggagttcgagacctgcctgggcaatatagcgagaccccgttctccaggaaaaaaaaaaaaaaacaaacaaaacaaacaaaacaacactgtgtggcggcgcgcgcgcccgcggcggcccctcggaaaagacgcttcttatagacacaccatatcgcggtggggcgcgcgcgcggggcgcccaaggaggggcaaaggggaacaacgtggcgccataacagagcgggtttccctcgagaggagaacacccgcgggccacgaggaccacaaagagggcgagggatattctcccaccacaataaaaaaaaagcgcccggggggggaacacccgcgaaggttttcgcgagaaacaaatccaccaagagaagggagacaccagcgagagggagcaactaaagggggggggctctatatcaacacaaagggggaggtccacaacagaggagagagcgcacccagggatatatcacaaaaatatataggccccccccggcccactgctgggtgggggcggtcacagatcacacacaatcacaagacagtaggaacaactaacaacagcaagcaaagacagcaacgaaacacgaaaacctaaacaaagcgcacaaaaaacccagccgagactgcatagacaggatcaacgacaacgaaagccacgagcn

SEQ ID NO: 607387 - DNA, 105 bp, Homo sapiens
ggtactctaaggatccccatccacgtacattgtgaactttgggggatagtcgctccaacgactgctgtacttcaccgttccagtttttacatactgagtcaatgc

SEQ ID NO: 607388 - DNA, 597 bp, Homo sapiens
  misc_feature (243)..(243): n is a, c, g, or t
gtcaacgcagcagcacctgaagaaggtctatgcaagttttggcctttgtatgtttgtggcggctgcaggggcctatgatccatagtggtcagcctcattgtcattgcaggctggcgctgctgtcgtgccttgcggcgtcccctgatattgatgagtttggctgagtggcgaacaccgtcgatagccgatggaaactgtaactagaaacagactgggcacttgcttgctgtgatttgcgattcncttacaggcagttggcctgtggctcctgccccttggcagttttaggtattggctgtctaaccccagtcatccttcccagctgctttcagtgggtcacggcaagtgatctttatcctgcttcaccctcagtgcactctatgccaggcagccgtagctagccatctttctgggaggatatcttgatgtcagccctgagcttgtgcgctttctgtcttcgcctgtgggaatcgttgttcttctgtgcatccattctcggctttttccagcgcaaacgctgtattgtggcggactgggtgggtcactgttgttgaggcttacgatcccttttttctcgtatttaacttctaaactttc

SEQ ID NO: 607389 - DNA, 232 bp, Homo sapiens
gtgtggccagatctatgcacatgaattagtgactccctaacatccggttcaggtgatttcctaaaaaataaagggtcgcaaccacttccagattcagatgcgagaccgacacagacaccacgacgagcaccaccagcacacggaatcgcgtcaccaccagtgtcatcggatgcaggggtagctgggatctctcgtgccgcagagtaaacataacgttcaaaaggggtggccg

SEQ ID NO: 607390 - DNA, 104 bp, Homo sapiens
  misc_feature (59)..(59): n is a, c, g, or t
ttcccgtcctacatcgtgttggtatagaatggggtctcctcctccggcggggtcgaagnaggtggtgttgaggttgcggtctgttagtagaacactatgtagga

SEQ ID NO: 607391 - DNA, 337 bp, Homo sapiens
tctcttcacgattccccgcgtttctgccactgtttccccgccttgcagccgactttgaatctggtgctggatccatggtaatccgcactgttgaattatagtacaatacgcatcgctgacagcgctcgcggcgggtgttgacgcgatttgatttctgcccagtgctctgaatttcatagtgaagaatttcaatgaatgcgcgggttaactgcgcgagtaactatgactctcttaagcgttactcaattcctcttcatctcacttcgtgacgctctatcaaattgattaactagattcccactgtccctttcctactattccgcgaaaccacagccta

SEQ ID NO: 607392 - DNA, 125 bp, Homo sapiens
tggccggcacgttgcatggtggcctctatatataatctgaagttatatatcctgtaaatttaaggtgccattattaatgcattgtgataatctcatttacggtccggccactacgtgtccggcca

SEQ ID NO: 607393 - DNA, 344 bp, Homo sapiens
acctcatgagcgagttccctacagcatcatacacgctgctgcccgtgcgcatgcgggacggagggctcagcggggtgctcctgtgcgtcctccatctgggcatcgcccatggcaccaacgcccaggaccagttcctgttgaagcagattgtttccaatgtgctcattttctcctgcaccaacattgctgggtgtctgcacccactatgcggctgaggtctcccagagacaggctttccaggagacccgagagtgcatccaggcgcggctccactcgcagtgggagaaccagcagcaggaacggctcctgctgtctgtccttccccgtcatgttgccatggagat

SEQ ID NO: 607394 - DNA, 216 bp, Homo sapiens
ttgtgctgcggtcgctctgacggactcccactggacgaccccaggctgacggactgacgcgctgggaggcagccctgcgggcccttgagggcctggtctacaggagccccacagccactcgggaggtgagcgtggagctggccaccagggctctctggcgcagccctgcaaatcccaccacacaggtcttctcctccagatgcaggggtaccgagc

SEQ ID NO: 607395 - DNA, 87 bp, Homo sapiens
ttattatcctaattggacatttaaaaatacacattttgaaaaatttggaaaatcccttttttaaaattaaaatttttaaaatcttca

SEQ ID NO: 607396 - DNA, 359 bp, Homo sapiens
gtgaattttgtactgcagggagatagcacctcctccttgcagtacaaattcaccaagagcctagagagatgaagagagatgccaggaagaagagagacgccaggaaacagaagcccacagctggcagagctggggcctagctgtggtcactctggagcctgccccgtggtgtttttatgagtggtggaaagaacagtgacaatatggagcccacaaaggaagctcaagcagtaacatagcaagagggaagacaattcaaagggaagaggcccatggtcttctttctttttctttgtgatttctactgtcagggaggctccttatttataaagaacatgactgtgtttatctcccaaaaa

SEQ ID NO: 607397 - DNA, 199 bp, Homo sapiens
caacatattcacaattatgagaaagaagtcaaacagctcaggaaagccaatgatattttaaaaaaggtgcatgtgtactataccatgacagatcatgctaagaatagtacactgtaattcaagatttggatgcgaatgctatcactgtatcttctgcctcgttaacatgcctagtgtattagactacttcgggtctact

SEQ ID NO: 607398 - DNA, 414 bp, Homo sapiens
  misc_feature (17)..(17): n is a, c, g, or t
  misc_feature (64)..(64): n is a, c, g, or t
  misc_feature (152)..(152): n is a, c, g, or t
  misc_feature (161)..(161): n is a, c, g, or t
  misc_feature (200)..(200): n is a, c, g, or t
tcacctttgaaggtganaaaaagctgttccctataccgtgacccactacccctgccccggtatnagtgttagagatttcagggtgtatgtgtgtgtgttttgtttgtttgtttttgagatggagtttcactcttgtttccccaggctggagncagtggcanagtctcagctcactgcaacctctgcctcccaggttcaanaattctcctgcttcagcctccccagtagctggcattacaggtgcccaccaccacacccagctaattttcctatggtttagaaagtaacccttaaaatataatagccaggtgtggtggagcatgcctgtaatcccagtattttgggaggtagaggccaggagtttgagaccagcctgggtgacacagtgagaccctgtctctaccccccttaatt

SEQ ID NO: 607399 - DNA, 293 bp, Homo sapiens
actctagaggaccttatttctgcaccacagccactactgactgcagcagcacaggtacagagccacaggacccaagaatgagcttacaaagtggctttccaggcctgggaagctcctctcactcttcagtcccttctactgtcctggctactaaatattttatgttacatacagcctgaaaaggacttactggctatgcaacgggtccctttaaagattttctgcttgaaagtctccccttgggaaatctggcatgagcacaaaattatggtaatttttcacctgagaagatt

SEQ ID NO: 607400 - DNA, 627 bp, Homo sapiens
  misc_feature (28)..(28): n is a, c, g, or t
  misc_feature (67)..(67): n is a, c, g, or t
  misc_feature (73)..(73): n is a, c, g, or t
  misc_feature (76)..(76): n is a, c, g, or t
  misc_feature (83)..(83): n is a, c, g, or t
  misc_feature (98)..(98): n is a, c, g, or t
  misc_feature (100)..(100): n is a, c, g, or t
  misc_feature (114)..(114): n is a, c, g, or t
  misc_feature (118)..(118): n is a, c, g, or t
  misc_feature (122)..(122): n is a, c, g, or t
  misc_feature (126)..(126): n is a, c, g, or t
  misc_feature (148)..(148): n is a, c, g, or t
  misc_feature (153)..(153): n is a, c, g, or t
  misc_feature (155)..(155): n is a, c, g, or t
  misc_feature (196)..(196): n is a, c, g, or t
  misc_feature (199)..(199): n is a, c, g, or t
  misc_feature (202)..(202): n is a, c, g, or t
  misc_feature (233)..(233): n is a, c, g, or t
  misc_feature (241)..(241): n is a, c, g, or t
  misc_feature (270)..(270): n is a, c, g, or t
  misc_feature (293)..(293): n is a, c, g, or t
  misc_feature (304)..(304): n is a, c, g, or t
  misc_feature (312)..(312): n is a, c, g, or t
  misc_feature (586)..(586): n is a, c, g, or t
ccttcattttctgtccagttgacggcantttctgcttttggatttttaaagacctgtgctatgtacngtggtnctncatcaantgcccatcgttcacngngtgggggtgaaaangtcngtgnggcngcttctcgggtaaatattttgnccccncnctgtgtgtccctgtttcctttgccccaaggggaccacaccnganggnggggcccatacttgggaggggtgggggggtnggaaggcngggcgattggttctttttctaaatgggcncgggttccacatgctatggcgcntttgtttgggncgagggcngtgggtcgtttggccccttttctattttctcagcatctggggactttgtggctccatcggcgtctgccatagggctcttttctcctcgagaactgaatatacccattctaatcgctccaccttttccacgattcttcaccagggttatcacacgtactttgtcacttccatatttctggcaatatttaaaagctacctttgaggtctgatctttactgccatcatcaactactatcacttcataagtaaacgcaggatctcgtttctgtctctnctctagatagctcagagcttcatccatcatcacaggcaacc

SEQ ID NO: 607401 - DNA, 549 bp, Homo sapiens
gaggaccacgcaggcctccctctgcatgaggtcttgctggaacaagccaaggttgtctggcaattccgggtgacagaagattaggataagtggccagtgacttctgataagacgattggaggcagaagtgccgtgtatttgaaaatgggcaagaataaccaaagtgcactgttatatggaactctgagctctgaggcgcctcaggacggggagtctacccgaagtgggtactgtgcaatgatatccaggataccaaggggtgcttttgagaggaagatgtcttacgattggtcccagttcaatactctgtatctccgtgtacgtggggatggtcggccttggatggtgaatatcaaggaggacacagatttcttccagaggacgaatcagatgtatagttacttcatgttcacccgcggggaaccctactgacaggaggtcaagattcctttttccaaatattacttctctaatcgaggaagaatccgggatgttcagatgagctccggttgaaagatccatcataggatacaccttgctgtgtccgat

SEQ ID NO: 607402 - DNA, 422 bp, Homo sapiens
  misc_feature (42)..(42): n is a, c, g, or t
ctgcactccagcctgggcgacagagtgatactctgtctccanaaaatatatatatataattttatttattcatctgtgtatgtacccacctaggtggttctcacaatgcaggagaggagtacaagttaaaagccgggcacaggccaggcatggtaactcaacgcctataatcccagcgctttgggaggccaaggcaggtggctcacgaggtcagaagatcaagaccatcctagccaacatggtgaaaccccatctctacgaaaaatacaaaaattagctgggcatggtactgcatgcctgtaatcccagctacttgggaggctgaggcaggagaatcgcttgaaccagggagtcggaggttgcagtgaactgagattgcgccactgcactctagcctggtgacagagcgagactccgtctca

SEQ ID NO: 607403 - DNA, 629 bp, Homo sapiens
tagactcgagctgagtacccccctagcgagctaccgggtactggggctgaagggactcacgtgaggatgatcaagtcctccttgatgtacatgagctgctccacccctgcggactcagctcactgaagtctttccgaagaatctcgagcgccttctgcaggaactgctgcatggtgtagccctttctcatcttgactgtccgccggttgcccagatgccttcccagtagctgaaggtgatctcgatctcctcactcttgatcttctccttgcttggattcccactcctgccgcagttctttcccgaagccgattctcctcctcctcatggtctcgatcaggcaagaagcttgtgtcaacgtctgggtccttccccagttttcctcttcttcgtggtgatctcttccctttccaatctcctcctcatacattggccgcctcctcttcctcctcgcctccctcttcttcctcctccagggtgaaggccaggctggagatccttccgcttgcgtcccttcttacgctccttctctcgaagcttctccagctccatctgcagctccttggactgctccttcttgcgcagctgcttctcacgctccttcaccagagcctcccggtaggggacat

SEQ ID NO: 607404 - DNA, 108 bp, Homo sapiens
  misc_feature (52)..(52): n is a, c, g, or t
aatcagctcggtaccccagttctaatcatgttggaatcaaaaacactcctanagattacttaaataaaaaaaaaaaagtggaaaaagcacacctccatgttttgcttt

SEQ ID NO: 607405 - DNA, 305 bp, Homo sapiens
atgacttatgtgttaagaagaatggtggctcagagatgaagaagggaggctatgacaaacagaaatttttaagacagggtaaatgaagttcattgttattgagaagtcacagtaatttatattaataggaaaaacattcttgaaatttaaagaaaaaatgtgaaactaaataaaatgttgcaaaaattgagtttcaatgtcttgaccctgtgtagtttaatactttctagtaaagtcaaatacaggaagtccttgctttgcatggccccaattagtgtgattttgaataaatttttttttcactt

SEQ ID NO: 607406 - DNA, 312 bp, Homo sapiens
cccccgaatttttaattaaaaccaaggttttccagggtttgccccctttgggggccgggaattgggaaatttccaccccctttggggaaaattttttaaagccttgggaaaatttttttattccccgggggggggcccgggccgccctttattttaaaaaaaaggttaaagggtttcccccccccccccccccttttttaagggggttttttgttttttttttggggggttcagaaagttttacgggtttgggggcaaggttttttgccttttggggctaaaaaaaaaaaaacccccctttttttggtttga

SEQ ID NO: 607407 - DNA, 103 bp, Homo sapiens
tactttggtgaatgctgacggcaaacattcatctccaagagagacaagagtgggaaagttgctgagacaagaaagcctagggaaactttagggctagatacaa

SEQ ID NO: 607408 - DNA, 864 bp, Homo sapiens
cctatgaaggtaatgtactatctcctactccaataggatgcttacgcttgcctcgaaatgtatgtgtacaaaaaggagactatacataaggtatcatcttgcgcgggactagaccttgacgtctatgtagtgaacgttcgttcaatcctccacgccgtactccggcgcatgcctccgagtggcagggcatcatacgttcacattcaaagatacgcaattcttataatgttgaccagtatatcatttggggaactcgttctagacccttcaaagatgtacctaacgatctatggacgctcgaggtctcaacacaagtcagtccttagtccttcaatgtcaatcctgctttgtatggttgcgtagccgtagctttgtggaaagccacgctcaccaaatccaggttgattgccaaactcgcactctttccagattaaggttgctggtactcgagacaagtttacaagggcgatttatcgtgcgcatagcctaggggggagttataatggcaccacataataggcaatatgggaacgaggcatttgtggacgtgtgcggaaaagggacttacttgggatggtcaaatacccatcaacccccgtggagaaatcactttttgcgccatctctcagacgggcttgaagtacctgaaataatcaggatcgttgttggaagatggtttccaaagagatccagttaaataactgcgcagtttcactcttgtttcatctagttccccacttgaccatgggtcagcaattaggtattacatttgtattaaacttggactattcccccaacacatggtttcttatctacgccccgcaataatgcactatataaattgaccgcctagcaagtatgcga

SEQ ID NO: 607409 - DNA, 871 bp, Homo sapiens
cggtcgcggaccccaagtgagggtgtttccagcgccttcccttgtgtctggtggcgcctccttggtttcccgccgcccccccagcgttgggggcccctaccccaggacccggaaggtcccttgtcctctgacgacgcgccagcttgtcctttgggtcctcggctgacgctccccatcgcttgtggtccccgcgggggcggccccaaaacgcgccccttgtgggggctcctcctcccggggcggtcttattgcccaacgtgccggcctcaatcgcatgagcccgcaatggttttgtcatctccgcaggagcctggagacaacctgctccccatgtcaggggcaccccggtcacccctccagctcggtgcccgcccccgcggcgcccccttccgccctcagttgtgacccgccggtgcgtttttttccccccagggagcccccctccgtcttccttggaggcacataggatgggccaccgccccccttttggaggtcttatctaccgaacggccacccaaccctttcccgcccttgagtgggtctgcgggagccaccttcttctgcccccgcctgtgttctgctcctcaatccccccgtttctgtctttcttcatgaccaacgggcccactctcccacgagttctgagatgtttcagggccaagttcttctttggtagtacgcgatccaggaatatctcccccgtcccgcccctgcgcggtgcccccccccgtcaccccccctcggtccgttggtcgtcgacggccccaccgctttcttttgctggcgaacgacccggccgcaccctgggtcgcgtagagccagctggcccccggccccccctaaaattcttgccaagcctctcccacaagac

SEQ ID NO: 607410 - DNA, 224 bp, Homo sapiens
  misc_feature (40)..(40): n is a, c, g, or t
  misc_feature (83)..(83): n is a, c, g, or t
  misc_feature (105)..(105): n is a, c, g, or t
  misc_feature (126)..(126): n is a, c, g, or t
  misc_feature (180)..(180): n is a, c, g, or t
  misc_feature (182)..(182): n is a, c, g, or t
gcggtcagaggctgaggccagagaggtagcagcggaactnacagggaggccaggggcagagctgaccctggagagggatcctnatgtcctagacacatggttttnttctgccctgttccccttttntgccctgggctggccccaagagaccccagaccttgctcgtttctaccccctgtnanttttggaaacgggcagcgaccttctgctgttctgggtgggcc

SEQ ID NO: 607411 - DNA, 646 bp, Homo sapiens
  misc_feature (481)..(481): n is a, c, g, or t
ggaatacagctaaccaaggaggtgaaaaatctctacaaagagaactacaaaacactgctgaaggaaatcatagatcacagaaacaaacggaaaagcatcccctgctcacagactagaagaatcaatattgttaaaatggccacactgtccaaagcaatatacagattcaatgttattcctatgaaactaccaagtcagttttcacagaattagaaaaactattttaaaattcatatggaaccaaaaaagagcccaagtacccaaagcaatcttcagcaaaaagaacaaagctggaggcatcacactacctgacttcaaactatactataaggctatagtagccaaaagagcatagtattgattttttaaaaatagacatatacaccgatggaacagaacagagaaccccaaattaaagctgcacacctacaaccatttggtctttgacaaagctgacaaaaacaagcagtgggaaaagcanctcctatttgataaatggtgctgcatatggctagtcatatgcagaagaataaaactagatccctacttttaccacataaaaagtaactcaagaagattaaagatttaatgatagatctcaactataaaaatatagaagacctagtaccctctcatattgcatggt

SEQ ID NO: 607412 - DNA, 325 bp, Homo sapiens
atgatatatcacgcgctgaacgctatcatgtgcctcatcaactactggtcctcgctaatcaagagcacgagtccagccacagatgcaatgctatcaatgaagtaacaaaaacgaaaagtgctccattaaactggcaccagttcaatgcttgaggctgggaatgcaggatgtgccaccttaaactcctcacaaagcagattataaaatatgccgcataacgagtttaataataaaagaaaaagtatacagaactaagagagggagaggcatagtgataaggcctcccaagtagctaggaaccacaggcgtgcaccaccatgcctgc

SEQ ID NO: 607413 - DNA, 134 bp, Homo sapiens
ttaaaaaaaaaaaacaaaagaaagaaaagaaatgtcacaaggagccgtaagagtagagctcttttaagggccctggaatcaagtctaacactgattcctttgggggtctcagatcaagttctggcggggtattt

SEQ ID NO: 607414 - DNA, 468 bp, Homo sapiens
  misc_feature (6)..(7): n is a, c, g, or t
  misc_feature (9)..(9): n is a, c, g, or t
  misc_feature (11)..(11): n is a, c, g, or t
cgcacnntntnccgtgctactcgcgctgtgagcattccaagctagagccgagtacacgggccggccatcatgtcacgctacgggcggtatggaggagaaaccaaggtatatgttggtaacctgggaactggtgctggtaaaggagagttagaaagggcattcagttactatgggcccttaagaactgtgtggattgccagaaatcctccaggattcgcctttgtggaatttgaagaccctagagatgcagaggatgcagttcgaggattggagtgggaaaggtgatttgtggttctcgagtgagggttgaactatcaacaggcatgcctccggagatctcgttttgataggccacctgcccgtccgtccctttgatcctaatgatagatgctatgagtgtggtgaaaagggacattatgcttatgactgtcatcgctatagccgacgaagaagaagcaggtcacgatc

SEQ ID NO: 607415 - DNA, 114 bp, Homo sapiens
ttcatgtcgagtgctttcatccctccaagctatctgtccagcgcagtccaccgcctgctcaggcgtgcggctggctgatgtaggagcaactgggggaacgtggggcctgcgctc

SEQ ID NO: 607416 - DNA, 508 bp, Homo sapiens
gtgtggagacgggggtctcagaagaaaaaaaacaacaagaaaaacaagagacagtgatacggtctggtgtgtttggtggtcccagaaatttcatgtttaaatcctaaccctcaaggtgatgatattaagaggtagggccttggaggggtaattagatcatgagaggaaagccctagtgaaggggattcatgcccttataatataggggcgaggggtgctcattcacccttaaaccatggtgaggacacagcaagaagggaccatctataaatcggggaacatgccctcacgcaggcagatatccaatctggcagtgccttgatctgggacttcccagcctccaaaagggtgagaaataatttctgacatatcggtggtatataagctaccaagtcaatagtagttggttatagcagcccaaaaggactaagacggagggggcaagggaaaaaaagattatcggttaaatttctaaaagtaaatcttctgtgaagaaaatgagttataa

SEQ ID NO: 607417 - DNA, 400 bp, Homo sapiens
  misc_feature (354)..(356): n is a, c, g, or t
  misc_feature (388)..(388): n is a, c, g, or t
  misc_feature (390)..(390): n is a, c, g, or t
tgtgggcatggtgtttcccctctctggggtaagaagtacgcccctctcgctgggcaaaagaggaagtggcacccctccccctcacccacagatgctgagatggtagcatagaaatgatggccgggcgcgtgtgcacgcctgtaatcccagcactttgggaggccgaggcgggcggatcatgaggtcaggagatcaagaccaccctggctaacacggtgaaaccccatctctactaaaaataaaaaaaaaaaattagccgggtttggtgcgtatgcctgtaatcccagctactcgggaggctgaggcaggagaattgcttaaacctgggaggtggaggctgcagtgagccaagannngccactgcactccagcctgagtgacagagcanantccgtcaaaa

SEQ ID NO: 607418 - DNA, 359 bp, Homo sapiens
  misc_feature (12)..(12): n is a, c, g, or t
  misc_feature (80)..(80): n is a, c, g, or t
  misc_feature (155)..(155): n is a, c, g, or t
agtagaagtctnggagtgagtccttcacaatgtttgccaaaaacttaagccctttttgaagcctccttgaagcactctgnatttatgaaggaggcactgtttgctaagaccccaccatgtttattgctttcagcacagtaaaatgaaaatgttgnaaatttgtatacatgcttgccaatatttgtgctttagaaattacaataatatttcttgtattggccagaatagaactccgtatcttttaatataatactatttttggctcctggagttaagtcatttgaatatcctgtgcgacatcatagagtcaggtttaccatgacagtttaaaatctgctacacactaatggaaataactt

SEQ ID NO: 607419 - DNA, 394 bp, Homo sapiens
acagcgatatctatagcaaggactcaccccgtataccttctgcataatgaattcattatacataacgtgtcaggatagccaaagctaatatcctccaaagcagacaagctacctcagaacagctcagagagcacatccgtctacgtagcacaatagtgcgaagatagataggttgaggcgactaacctaccgagcctggttattgctggttgctgtcgtgtataatcttagttcaactttaaatttgcccacagaaccctctaaatccccttgtaaatttaattgttagtccaaagaggaacagctctttggacactaggaaaaaaccttgtagagagagtaaaaaatttaacacccatagtaggcctaaaagcagccaccaattaagaaaacg

SEQ ID NO: 607420 - DNA, 425 bp, Homo sapiens
  misc_feature (18)..(18): n is a, c, g, or t
  misc_feature (31)..(31): n is a, c, g, or t
gccttggcctccccaaancactgggattaanaggtgtgagccattgcgcccggtcataaaatcttgtttttttgtttgtttgtttattagagatggaatctctctctcttgacccaggctagagggctgtggtgcgatctcagcccactgcaacctctatctcctgagctcaagcgatcctccttagcttcccaaatagctggaactaacaggcatgtgccatcacgtccagctaatttttgtatttttagtagagaaggttttaccatgttggacagggtggtctcgaactcctggcctaaagtggtccacctagctcagcctaccaaagtgctgtgattacaggcgtgagccaccatgcccagcctctaaattctgttttctattcaaagtaaaaatgcacatgtgtttgagtcaaaaaaaaa

SEQ ID NO: 607421 - DNA, 484 bp, Homo sapiens
  misc_feature (17)..(18): n is a, c, g, or t
  misc_feature (330)..(330): n is a, c, g, or t
  misc_feature (395)..(395): n is a, c, g, or t
  misc_feature (438)..(438): n is a, c, g, or t
  misc_feature (447)..(447): n is a, c, g, or t
  misc_feature (479)..(479): n is a, c, g, or t
tcttttccaatggcttnngtgactcccgtgaaagagtctgttgactccaaagaggtcatgacccacacagtttgagaaccactggtctagtctctttctcataggtactataaatatatgcatacatttttttttctgtaattgaaaagctatttctattcagagctggcaagatgaatctatgaatagaggttcttgctaggcaaacctgataatgtgagactcatccttggagggatataagtgtggaaggagacaaccaactccacaaaactggctttgtatctctacacatgcactgtggcctgagtgaccccctcaacatatatntacacacacacacacacacacacacacacacacacacacacacacacacacgactgctagtggantcaaagtgcatgtatgcttgtacacggacattgggttttatgngacccaacntcttcttctctgtaaagatttgtagctgtttntgagt

SEQ ID NO: 607422 - DNA, 1229 bp, Homo sapiens
  misc_feature (991)..(991): n is a, c, g, or t
cacctgccactacgggtaacacgccggagcacacaggagagcctgacagcaggcggaacagaccttaagagggagctgcaccccccagccacctcccatgaggctcctggcaccaagcggtcaccttctgctccagacagccagactcctctgcgctcttcttctacatcctcatacaaacgggcaccagactagctcagccccacagcctaagcccctaaagcgtacaagcgagctgcagggaacgaagggtgcatcgcacccgaacagggggccatggtgcagaggtctgaagacctgatatgacttcgtttctatctgtggctggcgagaaggaggatggcgcaacgcacgatggagattggggacagtggcttgctggagcttcgcgatggactcacgatcccagctgcctggggcttccagacactggaagcttcacagaagatgccgcagccatctccaccgttggagctacttcacagaaaccacatctcacacagaggcaagcacctgacacctaatgccacctgctgagctcctgggtagtcactggcagagcctcacagtcttcctagcacatggccctgggccatcttaacatcattccgcactgactaagacagtcctgatgggcacctgtccatggcccagagctggatgatcgacctaccgatgcacctgaaattctacaagatgaaccctggttgctacacccaatatggaccacaatacctgggaagacctggaccacgtatgcaccaccgtagccacaaacacattggcacactgtgctcaacgcgagtacgcgctaccctcaatatacgtatgtttggaaccacaccaaagaccagaagaaggaaaacacccagggattggcgacatgtgatatcagactgaggccgcacaccgaaaaacgaacagcccatacaataacggcgcgcaacgcacacgaccagcagatcgctcccgagacacaagcacgtctcgngacgaccaacacatcagcaccagacagacgcaaaccacccaacaactgaggacagacacacagaaacaaagaagcacaacccagcgcagcaagacaacacgcaaaccgacaaaacacacgacgacataccatcacgagacacgcgagcagcccgccaaagtagagcgacacacggcgcgacaccagacacaaaagaacacgagcaccacacagccgcaaccaaacaccacgacacccg

SEQ ID NO: 607423 - DNA, 366 bp, Homo sapiens
agcccttcagcctctcaatcagcgcatggtctttgcttctttcatccaaggatcctcgtataccacaggaagaagaggcttgaaaaccgaaagagtgtggtcttcacctcagcacaagccacgacttaggcataaattcttctcagataccatggatgtggatgacttccttcatgcctatcaggaggcctcttaaatggggtttagggtcttgccagaacactttagggtagtaagcagattcctcctccctgggcatctctagagggggttggccaggctttcattcagggggccttcgagcttccaccttccaaattttgggggggtaagggaacctttttttatacgaaacacaactttttt

SEQ ID NO: 607424 - DNA, 431 bp, Homo sapiens
  misc_feature (4)..(5): n is a, c, g, or t
  misc_feature (44)..(44): n is a, c, g, or t
  misc_feature (70)..(70): n is a, c, g, or t
  misc_feature (94)..(94): n is a, c, g, or t
  misc_feature (178)..(178): n is a, c, g, or t
  misc_feature (252)..(252): n is a, c, g, or t
  misc_feature (313)..(313): n is a, c, g, or t
ggcnncaaaacagcaaagggattcgaaagtaaagttttcaaccnaattatttttcaataaggtaaaattntgaaagtgtcttaaattgtatgtnaattaggggcacaaaaatagaatatttaaactttgtttttcccaggtactttaaaaaaggggcagtagggggcaggcatagtgntcatgcctgtagtcccagtgctttaggaggccaaggctgaaggatcacttgagcccaggagttcaaggctagcntgtgcaacatagtgaaacgctgtttctagaaaaaattttaaaaattagccaggcatggtgnttcatgcttgtgaagctgaggcagaagaattgcttgagcccaggagttcaaggatacagtgagctgtgatcgcgccactgcactctaacctgggcaacagagagtgaccctgtctcca

SEQ ID NO: 607425 - DNA, 792 bp, Homo sapiens
tggaaatggagtctcactctgtcacccaggctgtattgcaggggcgcaatctcggttcattggaacctccgcctctcgggttcaaggtgattcttctgggtctcagcctcccgagtagctggggattacagggcacgggccaccgcgccgggctaattttggtatttttagtaaagacgggatttcaccatttgggccaggctgggtctcaaactcctgaccttgtgatccgcctgcctcggcctcccaaaggggtggggatcaaccagggctatgagccaccgcacccagccccctttggtgattcagggggtgttccacagtttggacggagggaagatctaccttccaaatggcagtgggtgggccccatgaagaacatgctgggttaatgcaggaccagggtgaaggtgaagctgttcatatcaccccaggtctttgacggggaagcaaaaatgttcaaggcattccaggtcaaaccttcccggtttagaaaaccaactcggtggattcttcaacgacatttacctattaggctcatttttaccaagaagaccttattaaccgacaccttttaccagagagaaatccctaaatctagctaatttacctttaatcatactatcctagttcaggtctatttcagttgctggtgttcacactccctggtgtactttccttatggcgggtcaatctcccatgtctgggggatgatgtgtgtactcgggaccatttttcccagacctgtatgttcctcataatgcggtcaattgctaatttcccttccacagg

SEQ ID NO: 607426 - DNA, 1261 bp, Homo sapiens
ggcaaaacaccaaatgtgcggatgactgccggtgcagcgggggggcccggggtgccctggtggccctgggatgtgggaacctgctggtggcttcctgcggaggtttctggcagatggcatcctggggccgtcggtcgcggcctgtggacaggggccgggtgccgtaggcccgtcgtgatgctcagctggtagtgcaaatggcctgctggataagtgagttggattgccctgttcaccaagtatgggcctgcttgtgtcaatgtgacatgacgatcaagtccctggaggagatctatctcattcatccactgcacataagagggacactcagaaggatcagtctgagtattccttaccgtgtggagtgaccttcttcttacaagggaactgacgggtatttagagaggactatattgcgcgacgttgctacgatacggcagggattacctgttgacccgggtccaagaaggccaccccagtgggtttcacacgggcacttagcgatatcgcataatacaggaggagcatcttaaccaagttgggcccaaccggattcggagatactttgggggcttgcgttaaaggttggcatacgccaaacgtgcaagggttggagcacaatcactgacgcaatacacgttatgtgaggtggctcactacaattactcctatgagacgcaatacagacttcttcgcaaatccatggtccgcccgagttgtcgagccaagaaagatagcgtcacattgagtgatgtcgaaatcggaaacggaattccggggcgacacgaccgcgcccaagagggtaggctccactcagtatggaccgaaaggggcttggaagcgagggtgacgctgccttttggacgtgggacatttctttgggagggcgtcgggctaaacagtcgcatttccactttacccgccttttgtacgagccccaatagggggaccacagcatgggcagcaacctacgggtagccttcgcggaacaacgcgctatagtaatgggccgtttcagaggaaacaggcctatcggcgtccactaggaacttggggacctagggactcgtccgggcagtaggaagtttggataacccagcacttcaacgccaacatgggggtccctataggcgagtgtggcgcaaaccgacgttcggggggcaaacggttcgagcccaagagggccaagccactttttggaagtagcccgatcacctatcaaagaaccctttcacaagcggttaccccttgaacaccccag

SEQ ID NO: 607427 - DNA, 876 bp, Homo sapiens
ggacgcgtgggtccggacgcgtgggtcgacccacgcgtgcgattgaactcgagttggaagaggcgagtccggtctcaaaatggaggtaaaacctgacgcccggttcgcccccgagcctcgatctccggccgtcgccagtctgcctgccggggtggaggagggccagtgatccacaaggaaccagagcagttgagaaaactgtgtataggtggtctgagctttgaaacgtacagatggatagtttacgagcaacgattgtggagaaaatggggcacactcacagatggtgctgggtaatgagagagcccccgaaacaaaacggttgccagggtgctgttggtgtatagtgacattatgtcttgtgttgaagagcgtggatgcaggcaatgtgtgcatcgaactacaacaaggttgatgggcgtgtagtggaaccaaagagagctgttatctagagaggattctgtaaatgcctgtgtgcccatctaacagtgaagaaaagtttagtcggtggtattacagaaagatacagaagaatataagtttgagagcactactttgagaaaggtatggcaagcattgaagccatagaaggttatggagagacaggcagcagtgtgatgaaagagaggattggcgtgttgtaacttgttgatgatcatgatacaggtgataaaattgtggtacagtagcatgtatggtaacttcacttgtgaaaggtagaactaggttaacttgtgttgaactcaaatttggtaactggtacctttctggaggcgtgatatgggcatgactaggggaataagcgaagttgcatagtgtttgcctaggtaacaggatcggagtgagaaattaataaaatgtttgaacaaaaaaggg

SEQ ID NO: 607428 - DNA, 408 bp, Homo sapiens
  misc_feature (196)..(196): n is a, c, g, or t
ccgcggtgcatgtgggggcgggctcctttggcaaccccgggcgaacgggcacccagaggctgtgctgagctgtcgcacaggcagcagcatgagccggacccttgcatagggcgtgcccctgtcgagtgccgactactacgagaggctgggccaacttcagcacgggctgtgggacaggtaagggcactggggcggnggtggggagtcgggccgcgccgggggtctttcgcgtgccctggcccaatttcctttccggttccccgtgcgagggttcccggggcccaagcccgcgcgcaacggcccccagagcttccagaggggcctggaggacagagtgtactagagccaccccctgtattgggggtgggagcgctgagagaggagagagacggcccgcgcgtcaatggg

SEQ ID NO: 607429 - DNA, 296 bp, Homo sapiens
cgccagcgcaccgtattgggccaatcgcaccgtgtggggccaacgcaccggtgttgggccatcgcaccgtgttgggctgtcgcaccgttcctctattgacatcgctcatgaacacagggtccacacacactgccccaccagtgacgccgaccaccagtgggacgagccaagccgcgagctcattcagcacagccaaaacctctacatccttacattcacacacttcctccacacaccatcctgaagtcaccccaactgctaccaccaaaatcaccatcaaccccacggtgcgttgg

SEQ ID NO: 607430 - DNA, 160 bp, Homo sapiens
tcttatgttcagagggactgacaatttacaaaggtcagagatggtacgaggacagagtatggctaagtgtggtgtgcaagcccatctatgtgggagcacatgttgacggagggaacatggacgtggaagccagcgtgcggaaagagaagtctggaggccc

SEQ ID NO: 607431 - DNA, 339 bp, Homo sapiens
gcttgggtgatctagaggatccgtttgcggtgcttcctttgcggtgctgcaactgcggtgttacccgagataatttgcaaaaatatctctttgttacgtgtgttcacattgctctagtaatcaaatttagaaacaaaagacatcattctatttatagcattctgtttttaatagtggttatttgcacttacaaaatatagtagttcttggttgggtgcagtggctcacacctgtagtcccagcactttgggattctgaggccggcagatcaccttaggtcaggagttcgagaacagcgtgggcaacatggggaaatcccatctctactaaaataccaaa

SEQ ID NO: 607432 - DNA, 932 bp, Homo sapiens
  misc_feature (63)..(63): n is a, c, g, or t
  misc_feature (92)..(92): n is a, c, g, or t
  misc_feature (105)..(105): n is a, c, g, or t
  misc_feature (213)..(213): n is a, c, g, or t
  misc_feature (215)..(215): n is a, c, g, or t
  misc_feature (256)..(256): n is a, c, g, or t
  misc_feature (371)..(371): n is a, c, g, or t
  misc_feature (410)..(410): n is a, c, g, or t
  misc_feature (414)..(414): n is a, c, g, or t
  misc_feature (419)..(419): n is a, c, g, or t
  misc_feature (428)..(428): n is a, c, g, or t
  misc_feature (432)..(432): n is a, c, g, or t
  misc_feature (435)..(435): n is a, c, g, or t
  misc_feature (606)..(606): n is a, c, g, or t
  misc_feature (634)..(634): n is a, c, g, or t
  misc_feature (705)..(705): n is a, c, g, or t
  misc_feature (755)..(755): n is a, c, g, or t
  misc_feature (781)..(781): n is a, c, g, or t
  misc_feature (786)..(786): n is a, c, g, or t
  misc_feature (846)..(847): n is a, c, g, or t
  misc_feature (850)..(852): n is a, c, g, or t
  misc_feature (858)..(858): n is a, c, g, or t
  misc_feature (918)..(918): n is a, c, g, or t
ccaggacccaccctctggagacaggctcagcagcctgcgccgcctgggcctagtctacttccnctacctcttcctgttctcgggcctggagnacacgctgagctncttcacacaccagcgcttccagttcagtagcctacagcaggggaagatgtttttcctcatcggcctcaccatggccaccatccaggtgcctatgcccggcggatccancntggcggggaagttgctgccgtgaagcgggccctcctgctgntggtgcccgccttcctcctcatcggctggggacgttctctgcccgtgctgggcctggggctgctgctctactcctttgccgccgccgttgtggtgccctgcctgtcctccgtggncgctggctatggctcaccagggcagaagggcacggtcangggnacacngcgcagccnaggngcnctggccagggccgcggggcccccggtggccgccccaggcgagggcgcgggaaggcgccggggcaggctgggggccaagcaccagcccccgccccccaagcgccagcccccccggggactgggtgacgccaccgtctctccgcagtggactggctggccggggcccaggccngcttcaccacgtggtccgggctcttttngctccccttcttcctcctgcagaagctgagttacccggcacagacgctcaaggctgagtagctgagccacngtgcccaggctgtgggcaccaggcagagtgggagcctaggtcaggccccngcccacggcccgacccccaccccccnccagnccagggagaccctgggggggggggccggcccctaagcaggaagctcaggcagctccacannacnnncccccnccggcagggactccgggctgcagcactccaaggctgtcagggcttctgtttgtttttaanaactaagcaaccag

SEQ ID NO: 607433 - DNA, 279 bp, Homo sapiens
ccaagttctaggacggaagaactggaaggggacataagagtgtgtccaggaatggggagaagtgggcatcatgctcccttgtgttgcccagcccacctgcagtctcactgcctctattagaggtgatgggctgtctgggctagtctggggacttgtcgggctagtctggggacgtgtcgggctagtctggggacttgtcgggctagtcgtgggactgtctgtgctagtctgtgggacgtgtcgggctagtcgtgggactgtctgggctagtctggtgac

SEQ ID NO: 607434 - DNA, 1394 bp, Homo sapiens
  misc_feature (46)..(46): n is a, c, g, or t
ttgttggcccccagttgggccctattttattaggtgggacacaccnattatgatggacacaccagcgtgtgtgtgaccgcaacacaataacgccacagggctgtggtgaatcccgcgtgtctctcggagaatttttttccgcccgggggagatattatgttcgtgttgtggacaccaacacggggcgttctacctgtgttataggccgcgccgcttgtatacatacgtcacgacacatgtggggcccaaaaactccgttttgtggggtggttgtccctcctccttgtaatgcccggggggggaaacatcccctcccccgccatcaataccaacgcgtttgggaaggggttgtctgttttccatgaacacaggaaagatctcttgttgttccaccacgaggaaggggctttggaggggaaaattttccctctgtttaccacgaatgtcttttggggccaaccaacgggaagaattccgatttattgaccctggttgattccaaggctttcttggcccacaagaaggggggagcttcccccctccccaaaatagttggggcggtgagaccttgtgacagttgcccctccccgggggccccccccactgggaacaaattccccccactgccccacagagccccctctcccactccccccaagtggatggaaatgaagagagtgggggagaacacaggagtaaatgcccctgggagggagaagagaaatagaaaaggtgcccccctacaaggtggtttggaagattttgttccccccctcggggggattgaggggaatgtgtcctctgtgtccctcggtttgccccctcgggttaaaagaccacagaaaaggttctcgggagctctttcccaaagagagaaaataggcacttttctctggtggagttaacactcggagtcctccaccacccctgagtctcccccaagagattgaaagaatggagaaatgagttttgtggggtatagcacacatccacggagagaaagggtgctggaagagaggggtgaaatgccgcgtcaaagagcccacaaggtggagagcttttccacgacaacccactttccacacgtaacttttcacgaaacgctggggaatgctggtggcccaggcctccccaaggaggaactcacatgtataatggagattataccggggccttggggcactgagcgagatgaggcacgcctatggggaggctcaagggccactggtgctggagacctgaggggccttttaatgctgaggctttaatcaatatcactcacgcacgcacaacctggaggaaaaattgtcaaaccccaagggtgaagaaaaaccatttatgtactgaacccgggactagaagggaaaataaatgatcttatatgttgtgtggga

SEQ ID NO: 607435 - DNA, 808 bp, Homo sapiens
  misc_feature (63)..(63): n is a, c, g, or t
  misc_feature (92)..(92): n is a, c, g, or t
  misc_feature (105)..(105): n is a, c, g, or t
  misc_feature (213)..(213): n is a, c, g, or t
  misc_feature (215)..(215): n is a, c, g, or t
  misc_feature (256)..(256): n is a, c, g, or t
  misc_feature (371)..(371): n is a, c, g, or t
  misc_feature (410)..(410): n is a, c, g, or t
  misc_feature (414)..(414): n is a, c, g, or t
  misc_feature (419)..(419): n is a, c, g, or t
  misc_feature (428)..(428): n is a, c, g, or t
  misc_feature (432)..(432): n is a, c, g, or t
  misc_feature (435)..(435): n is a, c, g, or t
  misc_feature (482)..(482): n is a, c, g, or t
  misc_feature (510)..(510): n is a, c, g, or t
  misc_feature (581)..(581): n is a, c, g, or t
  misc_feature (631)..(631): n is a, c, g, or t
  misc_feature (657)..(657): n is a, c, g, or t
  misc_feature (662)..(662): n is a, c, g, or t
  misc_feature (722)..(723): n is a, c, g, or t
  misc_feature (726)..(728): n is a, c, g, or t
  misc_feature (734)..(734): n is a, c, g, or t
  misc_feature (794)..(794): n is a, c, g, or t
ccaggacccaccctctggagacaggctcagcagcctgcgccgcctgggcctagtctacttccnctacctcttcctgttctcgggcctggagnacacgctgagctncttcacacaccagcgcttccagttcagtagcctacagcaggggaagatgtttttcctcatcggcctcaccatggccaccatccaggtgcctatgcccggcggatccancntggcggggaagttgctgccgtgaagcgggccctcctgctgntggtgcccgccttcctcctcatcggctggggacgttctctgcccgtgctgggcctggggctgctgctctactcctttgccgccgccgttgtggtgccctgcctgtcctccgtggncgctggctatggctcaccagggcagaagggcacggtcangggnacacngcgcagccnaggngcnctggccagggccgcggggcccggactggctggccggggcccaggccngcttcaccacgtggtccgggctcttttngctccccttcttcctcctgcagaagctgagttacccggcacagacgctcaaggctgagtagctgagccacngtgcccaggctgtgggcaccaggcagagtgggagcctaggtcaggccccngcccacggcccgacccccaccccccnccagnccagggagaccctgggggggggggccggcccctaagcaggaagctcaggcagctccacannacnnncccccnccggcagggactccgggctgcagcactccaaggctgtcagggcttctgtttgtttttaanaactaagcaaccag

SEQ ID NO: 607436 - DNA, 469 bp, Homo sapiens
gtccatggatagtaagtgctgtcactaatatgcacggcctgaacacacgttcaaccttaagaccacgggggtgttatgtcaaagcccccaagggagaacgtaggctgtacagacgatttacagagttgccagtgttactgtaatgggactgccttcgtaattcattgcctctgcttcaacaatgtgcaactcatccttggcaccagcccgtaaactgaccgtcgttaaaaataactggtgctcattggcatcattatccaccttaaagtgataatctttgtcggcctttagttcacaaccgaaaagatagttctggggcctcagggggctcatgtccatgtccatcgaatcttccatcgggtggcggcacgcacttaggtaggagagaaggcggacggagataaaagaacgctgctccagagaacaaccgcgcaggacggaagattcgatggccatggagtaaatggca

SEQ ID NO: 607437 - DNA, 113 bp, Homo sapiens
ggtcccgccatgcactcttttcttcagcctctcaagtagctggatacaggcgcccatcaccacacccagctaattttgtattattagtaaacgatgagtttgtgccgtgttgg

SEQ ID NO: 607438 - DNA, 332 bp, Homo sapiens
tgagatcccctgtgagctcttgtaggaggcctttcaggttgatcttggggattccttcggggaccaaagacttgatgagggcatggctggcgttccacatggcttgggacaggtctcgatagagacggttatgttttcgtcaacgaatccttccacctggtacagcacctttccagcataatgctggatcctgaagcagctgtgaggcagagacgtgtcattgaggaaccgagagcacttgctcaatcctgctttcaaacatgctggtgggatggcacataccttggttcacagcttttcccaaggcagtgctcacagttgctgggataccg

SEQ ID NO: 607439 - DNA, 436 bp, Homo sapiens
  misc_feature (15)..(15): n is a, c, g, or t
  misc_feature (32)..(32): n is a, c, g, or t
  misc_feature (45)..(45): n is a, c, g, or t
  misc_feature (250)..(250): n is a, c, g, or t
tccggaaaagttttnccaaaccggtccttgcncttaaatcacccncgttaattattgacgatgacatccttagcaaaaacgaaataccggatagccagtatctttcagtttaaatacgccaccccaggccaggttttgcacgggagcaacaaaaaatgtcgccacactgaataccagacacaggctgtcgaaggtattccagcgcgctttttcattctctttttttcgcctgattgctattacgccgagnggaaaaataaataagccgaccaggtagctgtaccacgggaaaatcgtcaggatttcggtcgactcttccatattggtggagtgcaatgccagcaatgtattgaaattaggcgcgccgtaggcctgaggaaaagggaaattacaagccgccaccagcggactgacaccgaccaggactttttgtacg

SEQ ID NO: 607440 - DNA, 176 bp, Homo sapiens
  misc_feature (134)..(134): n is a, c, g, or t
  misc_feature (145)..(145): n is a, c, g, or t
aagtccgtgatgaattcaagtataatattaagtatgcatggacctctagataatcggccttaggcgtatggctgctgcttagggatagcatagaatcagtaatagttgaaaaatgtgcaacacttcaaatgtanaggttgagaangtggctacgcaagaaacaaagtttggttctg

SEQ ID NO: 607441 - DNA, 230 bp, Homo sapiens
gaagtgtggccccaccgtggctggcggaggaggccgctctgccgctggccctccaccggtcactgacgcctcaaggtcaggtggctgagcaggaggaggctgctgccctgcggcaagccctacaccctctctctgctggatcagcccccgttggaggcagacagacgcccccagatggggggactgatggcacggcccagctggtggtgcacctcggccttcgagccagg

SEQ ID NO: 607442 - DNA, 100 bp, Homo sapiens
ttttgtctctttctcttgtctgattgctttggtcaggattcctccggtaatagtgttaaggtggaggtgtaaaaagtaactgttcctgttcttgtcttgt

SEQ ID NO: 607443 - DNA, 510 bp, Homo sapiens
gttgtggcgcgggcgaggtggaggcccaggactctgaccctgaccctgaccttcagcaaggagccccggcagcgccggcactacgaactgccgtgggttgaacaaatatcggccagtaaagctgaatgaaattgtcgggaatgaagagaccgtgagcaggctagaggtctttgcaagggaaggaaatgtgcccaatcatcatcattgctgggaccctcctaggaaccggctaagaccgacaagcattactgtgcttgagcccagggcacctgactagggcaccagcactacaaagataggcatgtttaggaacatcaatgcatatcgagaatgacagggagcagttgagcgatatgtgacggaataagaagttagaaagtgatttgcatcaaacgaaagaagatcagctcatatcccaatatggccgaacgatacaggatcagtcaatatactgggactgaaagccatgacaggccactgacacgaccgagagaccccagcagatagcct

SEQ ID NO: 607444 - DNA, 321 bp, Homo sapiens
  misc_feature (288)..(288): n is a, c, g, or t
ttcagagtgttattaagaacaacttgtctaaatataattttgaaatagttggaattttaactctgcttagagattttaaaatattatatcatgttaatttcagttcaaatattatgaaaatatttctttttaaaatcactcttgttatattttccttaaaaggtaaatgccaattctgacttaaaatgcacagatagatggatacagatgtactaacatctgccttttgaaaatagaagaatgggttaaatgaaggggcaatatttggatgcatgtatacagataaantgtgaaaattatagtccaattaaatatattaaa

SEQ ID NO: 607445 - DNA, 101 bp, Homo sapiens
cccgtttgtctacactattctgcagtttctgtcagcactcatatggaaagggaataagggcatgtgagagcgaccaaggcaaggaagattagacggtagag

SEQ ID NO: 607446 - DNA, 1118 bp, Homo sapiens
acataaatgccacggcattccgaagattttgattaacgattaccattgacaggattactgtgtgtataattttttccacaactgaacactgtgattatggggtttgtaagtcttagcagaactctatactggtacgaacacaatagacctgaattctgtgtaaccttttcggcaacggttaccctcctgcatactccaacacttacatcactttggccataccactccccttggtcacacacggtaggtacacgaaacggttactacgacggaacttctacttggctgacatgctggcaaactttgcgacgctcgacgcaccaccacacttcagtctctggccaattttgacgtctgaccacttggtaacttccaccaagctacactgcctgcccggtattgctatcgagagacctctaacagacgacctctgaaccccttgactttggcgccctgatcagaccaacctactaacaacgctttcactgaacacaccaccacctgattcaacaacgttgatacttctcactccctgacgcgaccaccctccgaacactccatgcaacactggcgacaccactcactgtactgacagcggccacgcactacaacaccttgtcgtcttctactggaatcgacccctctgtacaccacacgctttccaacacggtggacttaccattacttccacactcacggacagcaaccacctctggaaccccacacacgtttttaccactcacatgacacacatcatagcttaccacgcattcagtggttcaaacccaaacttttatggcaaccaccctctcggatgcccttctcataccatcatgagtgcggtaaaacttccttcaccgctattatcccacctgtcggcatgcacaccccacacttgtcacgcgaataaacacaggcaaagatccacacacatggcccgcacgcattgagttctcttactggaaaactggacctccccttacatttcctgtgcttatcaccacttgcggcacatcaattcacaaccattcttcacaggaacattacaacatgatcaccattgaatgtatcatgcgagtcagctttgctttcgtttgtgcgtgtgcacgaactcatta

SEQ ID NO: 607447 - DNA, 106 bp, Homo sapiens
  misc_feature (41)..(41): n is a, c, g, or t
  misc_feature (93)..(93): n is a, c, g, or t
  misc_feature (95)..(95): n is a, c, g, or t
tgttcatctctccctcatttctggagcagggcctgagaccntgccacatctcctatgctcctgccatccacgcctcttttgcacatcaacggntnattgatgccac

SEQ ID NO: 607448 - DNA, 1000 bp, Homo sapiens
ggcggatgggcatccttgcggaaaaaatccatagagcgcagagggccttggctgtggtgttggtactaacagagcttccctctctcctagatggcggactgtggcggactcccgcagatctcccagccggccaagctcgctgaggccttcaaggtacttcgtgcagggcatgggatacatgccctcggctagcatgacccgggctgatgcggtcccgcacagcgcgtcctggattccagtcgatcacattctcgtggagtgggcgacccgcgaggccgcgttcccacagcccagcgagggcacccgaaggccgtcccacaccagacgagggcacccgctaggcgtatcgcatcgaccagcgagggggcccaccatggacatcacgcgccacaactcgggtgctgctgggaacagcgccggggccaagtccaatggaggtctcctgcgaggcggtctgcccagacatgccgtcctccgtatatctgactctcgtgttagtggtcgcaataccatccgaaggaacccctttacgacccccaggcctgcgatactgctgcctaggtcggtataaatccgaaagctaatggggcagggaggtgagctctggttgcgagacacaatgagtcttatcacatgggtgacactctccgaaggcccgcatagggggaggaccaaaaggacggaaagacgcggaggtccgcagtcggaactaaatgcaggaaaagccagggcgggtgccactctcctccccctgcctcagagacaccaaatgcacaaaagagcagcgtagcaggacgacactccacaaagcaagcctaggcgcccgagcatcgtgggaccagcgggatgcaggtccaaaagccaggccgcaccatccgcgccactcttacctgcagaacccgatcacgcgaggacaacaaccagcacatagcgcgcggggaaaagaagagccccgtaccggagaagacggagagggcccggaacacgactgccccccagg

SEQ ID NO: 607449 - DNA, 367 bp, Homo sapiens
agttcttacataacagccttttattttattttgttttatttatttatttatttatttttgagacagagtttcgctcttgttgcccaggctggagtgcaatggcgtgatcacggttcactgcaacctccgcctcccggttcaagcgattctcctgcctcagcctcccgagtagctgggattacaggcgcccagcaccgacgcctggctaattttgtattcttagtagagatagggtttcttcatgttggtcaggctggtctcgaactcctgacctcaggtgatccgcctgccttggcctcccaaagtgctgggattacaggcatgagccactgcacccagcctacataacagcttaatcaactgtttc

SEQ ID NO: 607450 - DNA, 129 bp, Homo sapiens
gcagttgattctcttgacgacgacagcatagctcttctcaccaccaccgtgagcttctcctttactgcattcagttctaggtcagacagagctaatccatgtacatgccgtgtcacggagactgataga

SEQ ID NO: 607451 - DNA, 473 bp, Homo sapiens
aggccctttttttattgacggggataccaaaccatccacttgaaaatcctgtggtctcccatcagctgaaattaaggagggactgtgtaacttggagatcatgtatacaactcaacacgggtggatacaaaaaagggaggcacgaacagctcacaaagaaggttataacaccggtcaaggtggactcaagggggaacctctgagtatgccaccgctgaacacttaaaagaggaaagaaggacagatgctcttcatttattccgaaaggaagttcatttgaaagtgcataaatgggcatcataagtcaaacgtataagttggaccttcaacctaagaaacaaaatttttttttgctatacaagaatacaccaaactgttaatgctcgcccatgaatcccaaagatttggctcatattgtacaatacgaatgggcgtgcctctttcctttcttcagacaaacaccaattcggctg

SEQ ID NO: 607452 - DNA, 1166 bp, Homo sapiens
cgacgtcgcggcggtggagggcgcaggcgtggtgggcgcctggcgagtggactgttcgagcgcgttccgctgggacccgggccctgcgctccggccccgcgattggatgctgctctccgctggctgagcctgtcagcgagtcctcgacgcgacccgtggtccctgaagtcggagcaagagccacctaggcaacgccatgagcgcacatatttcgcaatctggcgctcagataggtgtctgttaccactgtacgcgggatctctacgatgtctgtatgcgagcgaacgtgatagtgcaaaacgagatgctggaacagactcgatgcgtgaacctgctgtagccagaaggagtcgtccttcgagggggacacagtgaaaacagcttgctgcgtgccagctacgtggtggagacccgccaaaaggcgccccctgcggggaaacgacgaagtccaagctttccattggacaagggtcagggggaacgaaacgaaacctgggaaagtcgtcacaccgagcaatacagaacctgatgaacgcgctctgcgcataacatctattagggagaccactagggtataggtgagcgtagtttaccgttgcattattatggggccatgcccagttggctcgtcataagatacccggacaccatacagaagagaacaacaaagtagagatgagatcaatagtttgcgatagaggacgagaaattcacaaagaacgagcacacgcagaaaaggcccaggaacagtttcctttgacctataattcctggacacccgaataatggcccttatgagacacagatatcaagagctgtcccaaaggcaatgtaatgcgaattttatgcaaattagtcgccggtcgaggaatctatgaagagtgtaaacattcgcaaggaatgccgaaaattgtcgcgaatttaaaaagtgcgaggtacagttcaagttgtaaagagatagcataatctagttagaacgtgacactggcgtgtgaaataaaaacgacctacattaggttattccaagaatagaacaaggaaagtctcagcaatgagagactgacaagaggaagcttgtcctagagtacttgatacgtagacagagagtatgagaaacagacacgtcatacgaatgtggcaatataaaatgcgttggcctacagcat

SEQ ID NO: 607453 - DNA, 234 bp, Homo sapiens
gcgtcgacgcctacagtccctattgtagctattcataccaattgttgtagctccatcctgccaagctttggaattccctctctactaaaaatacaaaaattagctgggcgtggtggcatgtgcctgtagtcccagctacttagcaggctggagtgcaatggcaccacctcggctcactgcaacctccacctctggagtttaagcaattctcctgcctcagccccctagtcgacg

SEQ ID NO: 607454 - DNA, 147 bp, Homo sapiens
ggcggtgagcccccgcgccctgtccttccccagtcccaattcttctcatgactggttgcttatctttcagatcttaattcaaatctcacctcttcagaaaggccggtcctggccaccctaagatcatctcccacctggaggccatca

SEQ ID NO: 607455 - DNA, 297 bp, Homo sapiens
caatatgggtcgatcggagtagtatggaggcaagaacaacgacaatgtgggtcaccaattcatttaagaaataaaatgtttcctctggctatctccatgcacagctgcccagatactatggccacaatgtacaccacgcaagttagggctatattgtttggacacagatatctattacgaaacatcctacttattttatcattttgaacgcataggcttggcatgagtggctcacacctctgtcatctcagcatcgtttgggatggctgagtgtggagtggatcatccctgagctca

SEQ ID NO: 607456 - DNA, 310 bp, Homo sapiens
tccggtcgtgatcccaaatggggggggaaaaaaaaagaaagattcaagatgaagaataattttttttttggcattttcccatttaatttaatctggggataagagagtaaataacgaatttctctctcttatctctttatacactaagagctggatgggtcagcatggtggtatcctggacctttccccagaatctttctggtcttgtggaccttaatacacatggactggaattaaaccagggataaaatactatggaaagatatggacctcttaataaatctcagaacagtctggaaaactaaaactg

SEQ ID NO: 607457 - DNA, 641 bp, Homo sapiens
  misc_feature (213)..(213): n is a, c, g, or t
  misc_feature (245)..(245): n is a, c, g, or t
  misc_feature (252)..(252): n is a, c, g, or t
  misc_feature (291)..(292): n is a, c, g, or t
  misc_feature (305)..(306): n is a, c, g, or t
  misc_feature (308)..(308): n is a, c, g, or t
  misc_feature (310)..(310): n is a, c, g, or t
  misc_feature (312)..(314): n is a, c, g, or t
  misc_feature (317)..(317): n is a, c, g, or t
  misc_feature (320)..(321): n is a, c, g, or t
tagcctgggtgacagtgccagatcctttctccaaaaaaaaaaattttttttaatgcatgaactttcttatttggcgattccacttgtaggactttgtcctgctgacatatttgcttggtggtagggatgtacatgcaaagctatcttgcctacaaacaacaaactgttgtaacataaagtatttttcgttcactcattgtggaaacaacatgntcctgtgtgcctcttatttataaccaaatagnccatgtnttgaactggggaatatttactctgcttcaacattaaacnnctttttggccacnngngntnnntangcnnataatcccagcactttgggagaccaaggcaggaggactgcttgagcctaggagttcaagcccagcctgggcaacatagcaagatcccgtctctacaagaaattaaaataaaaagttagccaggtttggtggtgcacacccatggttccagctactcaggaggctgaggtgggagaattgcttgagcccaggaggtcaaggctgcagtgggttatgactgtgccactgcactccaacctgggcaatgcagtgagaccctgcccccacctccaaaccaagaaataggtttgttgacctcagcactattgacatttggggcag

SEQ ID NO: 607458 - DNA, 401 bp, Homo sapiens
gtgcaaccttccacgtgtgaagtgacagccttgtgtgtgatcttttctgtcttccccaagtttgcattttcgacattaaagtttactttttagttaaaagtttaaaaaatatatataaatacactgtagataacatttgtatgccagctacacctttttctacttctgtttggctttttttccccacaccaatggtaatttatcttcacagattgttcttcatttctagaaattgttacttcatggtaattacttgagcaaaagcttgaaaatccctgacaagtacttttcatctcatagtatattagttttcactcagtcattttatgaataatatagttatccacttaaacatttcaatattttaaccatcttgaaaattaaagattaaaaatcccctt

SEQ ID NO: 607459 - DNA, 849 bp, Homo sapiens
ctgactgtctatctgtgtgtatgtatctatgtgggtaggcatgtgtaaatgacagggatgatgtgccagactcatatgtacatacatgactgcctgttaatatatgtttataaaatatatggcatatatataactgcgctggagtatatgtccatatagtatatgatgtgtgtattaagttgaaccatgtaaaattgctacgtagtaggataaaacgagtgtgactatctgcagtattacctactggtaagccctgtagctaatggtgtgtctagatctaaatgtgcgtggtgtattcgactatgtgtgtatcgtctgtgtgtacagcgttgtatatatttaaccatggtttggagtacgatacatgagctgctcttaagtctaaacgacccatggtcgcactgcatctggatgaccatctgtgtgtgtgactgtctcgatggtacacatcggtgagtggagaacctggtttggagggagctgttaggaaaggcaggcgaaaggagagtgagtgtgaccagaccgagagcctctcaggccggatctggacacgccagggctttatccgcccgctccacattgcagctatcgcagttcttccactggaaatgccagctgtcatgtccccataccgtatactgtacattcgccaaggacagccccaggaccctcgccagagaagctctcccctgattgaaccaccggttccaccgggtatatgagtgcacgccagctccgttgggggcaaacctttggagggctagcgcacctttgacttgagacttgtgaatacgagggagttaaacttggacctaagacagttcccaggaaccttcgatgaatgggaag

SEQ ID NO: 607460 - DNA, 195 bp, Homo sapiens
gctggagagggtgccaaggaatttggggatatctttgtaacgcaaggattctaatgggggctgtctatgaagtcttgcagtagttaagcctaggtaatttgctgagcctaatgggtgtcagggtcagtctaagtgacagcaaagagaggctgggacgaggggtgcaggggaatagtgaagaaagcatctttacga

SEQ ID NO: 607461 - DNA, 143 bp, Homo sapiens
ctatgtggtatgcgcacacatccttaaagaaggcaacttaaaacaaaaggaaaaaccaaatcattttgagtttgcactcaacagtggtctgaacctctgctctccaatctactctgaagaatcccaacggtgaccggcgactt

SEQ ID NO: 607462 - DNA, 555 bp, Homo sapiens
  misc_feature (13)..(13): n is a, c, g, or t
  misc_feature (73)..(73): n is a, c, g, or t
  misc_feature (94)..(94): n is a, c, g, or t
  misc_feature (110)..(110): n is a, c, g, or t
  misc_feature (170)..(170): n is a, c, g, or t
  misc_feature (174)..(175): n is a, c, g, or t
  misc_feature (179)..(179): n is a, c, g, or t
  misc_feature (214)..(214): n is a, c, g, or t
  misc_feature (221)..(222): n is a, c, g, or t
  misc_feature (257)..(257): n is a, c, g, or t
  misc_feature (279)..(279): n is a, c, g, or t
  misc_feature (281)..(281): n is a, c, g, or t
  misc_feature (285)..(285): n is a, c, g, or t
  misc_feature (297)..(297): n is a, c, g, or t
  misc_feature (322)..(322): n is a, c, g, or t
  misc_feature (341)..(341): n is a, c, g, or t
  misc_feature (360)..(360): n is a, c, g, or t
  misc_feature (505)..(506): n is a, c, g, or t
gagagaacggganacagggggaagggcaggacaaaggaggaacaacggggaagggaccacagaggaagaaaangacaggagaaaaggacaaagnggaggggaggagaaangaaaacagaatcacatgacctagacgcaggcacggggggcgcgggacagggcgcggcganggcnnggcnggggaagagaggaaggggagcaggcaggggcacangcgggcnnccggggcgccagagacggcggccgagagccagacngggcgggggcgaagagcgagangnacgngccagggaaatngggaaaagccacgcgggcggggggnggcgccgccgggggggcgnggggggggcggccgaagcnggaacggcaggcgggggggggggggggggggggacagcaccagagccccgcaggcgcaccccaagggcccagccggcagggcccaggggagaaggaaaaggcgcggcaccgcgggcaacggcggcacagggaagagagcgccggnncgggcggccccgcggggccgccggcccacagacggcagcgccccgaccg

SEQ ID NO: 607463 - DNA, 808 bp, Homo sapiens
  misc_feature (477)..(477): n is a, c, g, or t
ggcctggtgtgaatcggccgaggctgtgtcctggcctttgggcatcatccagcgccatcggcctggcgcttcagccaacgcgggatgtggatgggccccttcttcttcgcagacagcgttctggccgctgcccgggctctagtgcgctggcctggacggcccagtctggagggttctggggcgtgagtgccctggtggtggtgttgctgctgctgccctggggtcctggcctctcactctgctcccctctcgtcctgcatgcctgcatgtggcctgtagtgcatgccatggctgcccagcctggaatggcatggtcttgaagccccacttccacaatggactgtgcatgcgtgctgctgtggccacgtggttcaaccatgcctggccctgtaatgatcctgcagactgtaatggccctggcaatgccaatggctgctgcctgcatctgccccgcgcccctgctgtctgtggtcccantcctgtgcccaatctgttgctgcttgccccactggttctgtgtaccacacgaatggtgcgcgcctggcctgctggcttcagcctggaggagctcagggtggccggcattcacaagaatggtgtgccctggaccatcggcatttctgtggatccgaggaggcggaacaagtccactggagtcccttgcaggtccaactgtgcagcgtgctgaagggagtacctgctccaaaactcatcctcttccccaggaagccctcggccccaagaaggagacagttctgctgaagaactgaaactggcaccactgacggacggcatgccgtctgaacgc

SEQ ID NO: 607464 - DNA, 537 bp, Homo sapiens
gatgaaatagatcatttgaatagtcttagaaccatcacagcagttgaattcataatttaaaagttccccaaaaagaaatctctcagatcagatggttttactggagaattttaccaaacatttaaaggagcaacaccaattttacacaatttcttccagaacacagaagaggaaggaacactttcccacttattttgtgaaactggctctatcctgacaccaaattaaagactagttttaaaatcctactacagaccagtgtctctcctgaacatagaggcaaaaatcctccactaaatacaagcaaatataatccaacaatgtataaaaataattatacaccaagaacaagtgagactcataccaaatacgtgagattgactgagcactgaaaaatcagatgatgcaacccatcagattaacaggctaaagaagaggaaaatgatataactttatcaatctatgcagaaaatatatttgagattggctgagcattgaaaaatcagatggtgcgatccatcagattaacaggttaaa

SEQ ID NO: 607465 - DNA, 266 bp, Homo sapiens
  misc_feature (45)..(45): n is a, c, g, or t
ggaaggggctttgtgtgccccccaggaggaagaggccttgagttntgggatcagacaccccttcaggtgtatccccacacaaatgcaagttcaccaaggtcccctttcagtccccttccctaccccctgaccggccattgccgcacacccccccagagcacgcccccccccatgggagtgtgttcaggagtcgcgggcagggtggacatttgtcccagagggggcagaatttccaatagaggattgagccctgctaaaaaaaaaaa

SEQ ID NO: 607466 - DNA, 226 bp, Homo sapiens
tggcgctttttcttcaggtaagctattttccttatggtcgtgcgtgattaccagggtatggtaaatgtgcaaagcagataggtctgcacggaggaggctggactgtgaccattaactgttcagatttagagatcaaatatggcacccacaaagagaaaataaaaattaatcaaaaaatgagagcaagagaaatgctataccaagatatattttcctatttcatgga

SEQ ID NO: 607467 - DNA, 331 bp, Homo sapiens
agctcttttttctgaggctattttatagttattttttaaacataaagatacagaagtcttcttgacttctgattttcaaaaccatttccctcagtatttttcaggcatttgacctcctgaatggggcttgggccctggggcttcagttatccttttatgtcctgccaggggggggtaaatggctgggggttttttggggtaaataagtcccaaggaatgttttattggggaaaaacttaaaaaccaaaggaattagttcaaattccggaaaaaaaattaaagtttttaagcctccctgtgaaataaatggggtcctgattgcctgggaaaa

SEQ ID NO: 607468 - DNA, 129 bp, Homo sapiens
atctagaggatccaggccggtcagaaatggaacagtactactgcgctcccgggcggcgcggttgttctgagccagctacactgctcccacccctgcagaaccagcagttcttctccaacccccccaagg

SEQ ID NO: 607469 - DNA, 944 bp, Homo sapiens
tgatctctaaggcccctcattcccccatccacctggtacatagatcctcctcccgcagtgtcggagccacacgctcacttctgtgcccacattaggagaggaggagctcacggctgctctgaggcttcattttcagagccttttctagttgtgcttcttaaaaccatgtccaagtctctttgtgacttcctaccggcgacagaggcgagaaaggatagtgggtaagagcacagcgctccagagtccaggtggccgtggcccaggccctgtgcgcttcactagctgtgtgcctttgagtgactccttgaccctctctgtgccttggtttgctcctgggtaaaatgtagataataataatagtacccacctcagagaggcatggggagcttgaagggccccaagcagggccgtggctcaccgaagcacgatggcatctgttaccactatcagtcacacttataacccctggggatggtcagaacagggccactgccttcctggcagtgaagccctgcacacatttaaaaatagctctaggccgggcacggatggtcatgcctgtaatcccagcagtttgggaggccgaggcaggaggatcgcttgagctcaggcattcaagagcagcctgagcaacatagtgagactctgtctctattttacttttaaacggtttttaagctagaaataaagtaaaataggcagtgcggtggttcacacctgtaatccagcactggaggtgaagtgggcgattggtcaggccagggttagaccaaccgggaacatgggaaacccattttaataatcaaatagtggtgtgggggctgcttagccgacggggggcggggggaacccggtcgggggggggtggcgacacccgtcccgggggggggacactttttgaagtcgggaaacggttgggggggagggtttgctttggctaaaac

SEQ ID NO: 607470 - DNA, 614 bp, Homo sapiens
gggaaactgtaccaagattggaaactttacaaagttttcaacggccttaacctctcgggggtgttttggcccttccttggggaaaattctaacggttccaaccaaaggaacatacaccggggtcgcaagtagcaattgttggccgcgaaaaggaggccctttccaacgatataactgcccagaggtgacaacactctggcaggaacgatcgggcgtccgggacccctggcgacaccatgctcgctcggacctcgggaggtctcacgtgtaaaggtataccatcgcttcaaaggcggggcaccagtgcctggagactggaggcagataggaatcgagcaacgtatcaccagccagctcccaccactccacggccttcatcctgccttgacagacgctgtcctccagttccccaagtgccctccaggtcctcaccggtccctcccaggccctgcctactctggagcagcgtgcccgtcgggaggcaagatcagctcggcgctgcatttactgccgggccgtgtgccgccgggcacgagagacgtgtggtgcctcttgtccagatgggagagaccgatgcgaacgtggccaagtttatacaccagactcagtgacta

SEQ ID NO: 607471 - DNA, 999 bp, Homo sapiens
  misc_feature (24)..(24): n is a, c, g, or t
  misc_feature (178)..(179): n is a, c, g, or t
  misc_feature (199)..(199): n is a, c, g, or t
  misc_feature (206)..(206): n is a, c, g, or t
  misc_feature (227)..(227): n is a, c, g, or t
  misc_feature (256)..(256): n is a, c, g, or t
  misc_feature (346)..(346): n is a, c, g, or t
  misc_feature (368)..(368): n is a, c, g, or t
  misc_feature (402)..(402): n is a, c, g, or t
  misc_feature (420)..(420): n is a, c, g, or t
  misc_feature (432)..(432): n is a, c, g, or t
  misc_feature (439)..(439): n is a, c, g, or t
  misc_feature (441)..(441): n is a, c, g, or t
  misc_feature (463)..(463): n is a, c, g, or t
  misc_feature (465)..(465): n is a, c, g, or t
  misc_feature (474)..(474): n is a, c, g, or t
  misc_feature (488)..(488): n is a, c, g, or t
  misc_feature (507)..(507): n is a, c, g, or t
  misc_feature (511)..(513): n is a, c, g, or t
  misc_feature (541)..(541): n is a, c, g, or t
  misc_feature (564)..(564): n is a, c, g, or t
  misc_feature (566)..(566): n is a, c, g, or t
  misc_feature (572)..(573): n is a, c, g, or t
  misc_feature (575)..(575): n is a, c, g, or t
  misc_feature (577)..(577): n is a, c, g, or t
  misc_feature (592)..(592): n is a, c, g, or t
  misc_feature (599)..(599): n is a, c, g, or t
taacatgatatagcactcattaancaagaatataaagtcatctacttagaatacacattatcttaaagatgcatactggaatgataagtttgaagatgtaactaacaacaattcttttcaaaatcatatcaatatattactctcatggaactagcacattctaagaagggtcattttnnccccccagtactgggaaggnatgcatntaaccatgtggtcagccaganaggctgttttatatatggtgtgtgtgacncataaaaagcctgtcctttctctaaaattgtacattacacaattgtagctacacctgaaaagaagtgagtttcaatgaccatcatcaccnaaaaacatgaataagttatgtntatataggaccagaggaaagatatatcgtactgnactaagcctacctctgtncagaggccagcngtctcancngatcttcagggagcctagactntntacccatcnattatccgggaaanatcagaagaaaaaaaaaanggannnagtcaggtattgagaataaatacctctnagggagtttttttcaaacctaancnacacannangnatattccctgacacnaaaagtncactgactcttcaaatcctagacttgtccaacattattttccctagttggataaggctgaattaaaggcacttcgttaaaggaagtagccttggcagaagaaaaaccgttgttctgtagaagtgtcattcaatatttaaaatctcctctgaaccaaaacaagagcctgaaagtaaaacaccttttattttttaactctgctgtcattgctactaaggattcatggtaaattatcccacagcccttcttggcttgagaggaggtacagtacaagtagcccacagggtctcaataacagaagtattctcaaggacccttgaggatacaaaggaatactgggctgttttaaaatgagaaaactgagaagaatcagttaggtttctagccctcttcctataata

SEQ ID NO: 607472 - DNA, 465 bp, Homo sapiens
  misc_feature (15)..(15): n is a, c, g, or t
  misc_feature (30)..(30): n is a, c, g, or t
  misc_feature (87)..(87): n is a, c, g, or t
  misc_feature (134)..(134): n is a, c, g, or t
  misc_feature (146)..(146): n is a, c, g, or t
tccacctgcctcggnctcccaacgtgttgngatgacaggcgtgagccatcacacctggccatgtaatactttttaaaatgtggattnttacagttacttagtcttcataataagataacattttattttgctgncatgtagtaggntggagatattctattctgctccatgaagtaatacagggatccacttgtcatggttgtacaatttcacacttcagtctgtggggaggagaaggaggaaattcaggacagtttgccattgaggaggtgagcaggaagttctgctatttcttttactcacattgcatcattggtgagaacttagtgacacggctatgcctacctataagggaggctgggaaatggagcctatgtgactgattgtatgctcaggaagaacatgagaatagatgttttgtgagacaactagtagtatggtttttcggcgtgtgcagggtaccga

SEQ ID NO: 607473 - DNA, 804 bp, Homo sapiens
ttcccttacaagggttatatatggaattatggtaccctccctcagacttgggaagatccccatgaaaaagttaagagcacgaactgctttggagataatgatcctattgatgtttgcgaaataggctcaaagattctttcttgtggagaagttattcatgtgaagatccttggaattttggctcttattgatgaaggtgaaacagattggaaattaattgctatcaatgcgaatgatcctgaagcctcaaagtttcatgatattgatgatgttaagaagttcaaaccggggttacctggaagctactcttaattggtttagattatataaggtaccagatggaaaaccagaaaaccagtttgcttttaatggagaattcaaaaacaaggcttttgctcttgaagttattaaatccactcatcaatgttggaaagcattgcttatgaagaagtgtaatggaggagctataaattgcacaaacgtgcagatatctgatagccctttccgttgcactcaagaggaagcaagatcattagttgaatcggtatcatcttcaccaaataaagaaagtaatgaagaagagcaagtgtggcacttccttggcaagtgattgaaacatctgaaattctgctgtcaagattcccatctctaaggactccaagactctttttccccaagtgctagagacaagggggtctatgagcatttactgacttcctgttaaaacttcattttttcaaactttttgagctatgcaatatataaataaacagtaagaattttaaattacaacacacaaaaaaa

SEQ ID NO: 607474 - DNA, 381 bp, Homo sapiens
cctcctcctcctcctcctttcccgggggtcctgggaaaccaggtcagtgatgtagttttccagtttggcaacttcctagccttagaatccctaaggggggtgtgggaaacacattttcccgttgcaagcatgcaactccaaaaaatttgtgatgcccctgaaattaaatgggaaagatccagcttttttagcattttggttgaacctgctttcattgtccctgggaaattgtggaaaaaaaggggactgtgtgatttgattttgtgggcaaggacttgcatcttgtgtttttatccccaagcctttctggtgtttccaactcctaccccattgcatggggtgtttcggacatccaataaaaatttttttagtggttttgga

SEQ ID NO: 607475 - DNA, 1193 bp, Homo sapiens
tgaaacggagtctcactctgtcgccagggctggagtgcagtggcgcaattctctcagcctcacgtgcaattcttccacctctccgtgggtttcaaggtgatttcttcctgtgccctcagccctcccaagtatagcgtggtgatttacagggccgcccgccacttaacgcccagcctaatttttgtgtgatatatttataagagataagaagaccgggtttgtgtgacccatgtgtgtgtggccacgtgcgtggtctcctcagaatttccgtgaccctcgtgtgatttcaccccgccctctcagaccttccacaaagtgtgcgtggcaattatacaggggcgtgtgacgcctttaccagcgcctgtgggccacacccatttgtgtagaatattctgtttatataccacatataatatattatattgttcacagaaacattttactctcaacaccgtgaaacattctcttcaaaacatgtgttattgttactgaaaggcgttataattctcaggttttttcccaagggggcaaagacctcctttttaaccacccaaatgtgacacagtggattgtcgccagcccaacaaacatttttttaggacccgcgtaacaccgcatttaaaccaccagagccatttaacacgattacacacatctagtgggacacctctcagcgggcaccaccacggaaagcacacatttcgtgcagagactaagtggtctctaccgtctatcttaggacccaaacacttactgtggcacctttaggcaaacatgttgggaacacggggggaccaccgcacaacaaccgcaacacgtggggcccccgtgggcaagcattaggtctttatacctgtgggggtcgcctttcttgaagttaccccccaacgtattgccatgcaacgacaaagagatcaaggcaaaacacacacgccccccgagaacatagacagcgccttgcgaacgcggtcattggtccccaagaaagggccctttgcttggactacttgagggggtaccttgtaagaagtatcaattcacgcccaaaacgtctccaggtgttttgcttcacccaagtgaagcgggcatcacgagggcgaactctcacgaaaacccgtaacttctatcacagttgggtgctcacagttgtatccccttccagttcacaagggcggtcccacagtcttcacaaa

SEQ ID NO: 607476 - DNA, 455 bp, Homo sapiens
  misc_feature (190)..(190): n is a, c, g, or t
gctctagaatttttaatgtagctttatataaggcttgggccaaatgagagaacttgggacgaaagtttgaagggaaatagctttaaatagagaaatgcaactttagatagcttatgactgtttgtatctgcctaaatacttcctaaaagtcgaaattaaatttgattaatcactcccttctccctcctcnttatcccttccctaataccctctttccccattttaaatgcagagcaagtgtggcacttccttggcaagtgattgaaacatctgaaattctgctgtcaagattcccatctctaaggactccaagactctttttccccaagtgctagagacaagggggtctatgagcatttactgacttcctgttaaaacttcattttttcaaactttttgagctatgcaatatataaataaacagtaagaattttaaattacaacacacaaaaaaa

SEQ ID NO: 607477 - DNA, 286 bp, Homo sapiens
  misc_feature (193)..(193): n is a, c, g, or t
  misc_feature (195)..(196): n is a, c, g, or t
  misc_feature (211)..(211): n is a, c, g, or t
taattaacagagcatttatcgggtagcaggtggatgtgggactcttatagtccttagaggtgcagcattcaattgaagcaaacatcagtacgacgaattcatatacggaaatacacacgtgatcacaatgcataatgcttgtgggtatatacacagagattgaagacatccccaaaaaacacattttaagtantnnccaacctaaactctnatgtacatctagatcaggaagctgtacctttaatttttaataaggatcccctaggttgaaatgtgcccatttcaa

SEQ ID NO: 607478 - DNA, 122 bp, Homo sapiens
agagttgaaagtactcactatgtaatcacggaataaatgagctcccaagaaagtgtcatcagagaagagcagtgggcaacgattgggttaggggacaaaccgctattgacgagatgtaattt

SEQ ID NO: 607479 - DNA, 509 bp, Homo sapiens
caagctccgcctccggggttcacgccattctcaggcctcagcttcccaaagtgcggggataacaggcatgagccattgaacccagccagttacagaatttctattcccggggagaaacatttacaaggtagataatagcattaatatatagctctttgggtcttaaaactggcggtactcagtccagggtacgggaaactaaaataagttctttacttccccacttcctttagggggtcatgtccagtgaagtcaggttaattggctagtgtaggatgccatttgggattctcccacatgtggatggttggtgtgtatgtatgttgggagtgaggatgtgtgaaacattactatggtacggggagtcagagctgtacagagcggttacaaaaggtcacttcctcatcacccctacagtgcccttctcactctctttttccacggtctcccagtcacactcaagtgcaagtaatcctggcggtattcttccaaatgagcagatacgtaca

SEQ ID NO: 607480 - DNA, 950 bp, Homo sapiens
  misc_feature (782)..(782): n is a, c, g, or t
ggatgggaggatggacatactggtgtctgagtgctccgcgcggtgctgcagcagttcagccgcaagttcttcccgggttactgagcgagaggatcctaataagcccatgggggtgatccattatcagacccagcggagtctgggctctgttgcccctcagcaattcgttcggggaacggcaggcaggccaacacccattataaaaatgttgaaaacgcggccggagcgcgggtggagctccatgccctggttaattccccagcaatttccggggaagggccggaggacagaacagaagcatttaaaattcttcctgaacgtggctggaaaattggacccgtgttggacacaacaccttggtgggactgataaaagaagaagcgttcatccccaaaattttgtgggaggtcatgttttaaccaaaggaaggggaagaacgagatatagcatagcaaagataataatagaacaaaaatatttgttgtgtggggcggcatggtggagggcacggagtaaaagagaggttttcataagacaacaaactttctgtggtagaggagcggacgcggagggcgccatagtatgaggtgaagtagtggaacaaagttggtgaagaaaaaggggtgagtaacccgaaagagaaagaagcgccgggagaaacgacaagcaatgccggtgccgatgggataatcctcacaccacaagaaagaaaccgccgcgggaggacaacaaccaggcgtgttggagcaacaaccacagagaagaggtattcagaaggaccnaacaggcgaggtccaaacaccagcgggggctccagagcagacacgagcatcaaaataacgcccgggcactcggtgaaggacacagagacgactgaagcagaccaaagcagagcacgaacgcatcgacaagagcagcagaacgacacagaacgcgacaaacaccagcat

SEQ ID NO: 607481 - DNA, 494 bp, Homo sapiens
gcgaattcactagtgattgtgagctgagatcgcacctgtaatcccaacactttgggaggccaaggcaggcggatcacttgaggtcaggagtttgagaccagcctgaccaacgtggagaaaccccgtctctcctaaaaatacaaaattagccaggcatggtggcacacgcctgtaatcccagctactggagaggctgaggcaggagaatcgcttgaacccgggaggcggaggttgctgtgagctgagatcgcaccactgcactccagcgtggcgacatagcgagactctgttgcaaaaaaacagtgttttagcttcaagaacatattgtggtgataactaaaacaccgtattgaagaacccaggtggttcatgtaatctgaaatatagcagtgagttatgatagtggctaataaaatttatattccacagaaaataaaaaccttaattataggctaaagaaattaatttgattcaatcatagtaattaaagaaaa

SEQ ID NO: 607482 - DNA, 200 bp, Homo sapiens
ccgcaggaacgcagacagggaacgggcagtcaagcctccctaacctgtagactcccatggggaacaacgggtggctctcggcttggggggacctcctagaggtgccactgttcttctgagcaatctgagctcgaaactggtcaagatctggctcctgacactgcgctatgcccacactggggatacgcgagctcgaaatt

SEQ ID NO: 607483 - DNA, 310 bp, Homo sapiens
cagtaatgggaggagagaaaggagaattgcttgaacctgggaggcagaggaagtactgagccaagacatgcgcctatgcactccagcctgcgcctgggtccccgcacatagagctgcctctggaggttctgggaaatgggccgcagatgcatgaagtagcagaagccacctcgggtacatacccgtgcacagactgaccgttgaaccagcggatactgagattcagtcacggcccgctctcaatcctccatacctccggaacttgacatagacgttgcccacgaggtgttcccaaagcttgcatgggata

SEQ ID NO: 607484 - DNA, 275 bp, Homo sapiens
  misc_feature (55)..(55): n is a, c, g, or t
  misc_feature (132)..(132): n is a, c, g, or t
  misc_feature (245)..(245): n is a, c, g, or t
ccacaccctgcctagttcactaattcctatagttcactgtatcacccagcctggnctcaaactcctgagctcaagcaatccttccacctcagcccccattcactctttagtgcagtcatagctcactgcagnctcaaattcctaggctcaagtgatcctcccactttaacctctaagtggtgggattacaggtgtgcaccaccagacttggctaatttttttattttggtagagaccgggtcttnctgttgcccacgctgttcttgaactcctgg

SEQ ID NO: 607485 - DNA, 1179 bp, Homo sapiens
  misc_feature (569)..(569): n is a, c, g, or t
tgtgtactcgattcgcttgttctcttcgtgggtcccaagagtcctgaacttctagaggtccttcaaccctgcccctgttccatccactgacctctccgttagtccctcccaccgggaaactgttcttgttgggatttatgagctccgagcacctgttagcaaaagagtggggtacctcagatgactgcccacgaggaaaaatggaaggaggcctggcatagcccgcagcatttgctaggactagtttctgcctcaatgaatggagtcagaagttctaatctggtaagaaaaggatggcgggcttatttccaggccctgatgcacaacttcccttctcactaataccaggaggaacctaattctgaaacgtgtcaccgaggcaagattcgtaataccagattctgcctcaagagagccgcaggtaatcaaggtgtaatcattgcggggtttagagagcagggtcatatgaaatacacagcccagaatatggagcattcaggacccaagtactgacttcatggaggccacagcaactcgtgttcccttcctagatccaactggaggacaangtccaggtccagtgcggtgtactctgagcacttactcacgaggctatacaccctacgcacgcagtcagccacctgtcagtcttggctccgtacgtacgtcgtcacgttcctgccgtccatccatgtgtacctagctactggtactcactcttgacacaagggcggagcctgccagcctgagcatgcgagtgattgtcccggccagcattagtgccactccccagtgaggacccttacctagctgagacgcatgcctgccttgcagtcagaagtgccgaaagacagcacacaccagtggttggacggctcagactgtgtactccaggcccctggcaacacgttctctgcctgcttgcatatatcatcgcctcacggcatcccagtgcagacgcctcaccctaggagttggccattccactgacctcttctcagagcctctgctgcacagaggtcccatcactccccgctgcaggcaaatcttacaaggaagggaggatggcttcctacgtggtagcccctctgtcatttaatgcatggacagatactcaggctagatatgagtatatgtgggggctctcagcaggagcctggggggctcccaatctgtgtc

SEQ ID NO: 607486 - DNA, 189 bp, Homo sapiens
tctcctcgtgcttgtagatgccggcggtgcatggcacgtgtttcttaggccgcaggtccaggggctatgtacttctatgcccttgtagaataacctgaggtatactttctgagtctggttactaactgtgagaacacgggcaatggattaccggacgactcggatcttagagagcttggaggccacgac

SEQ ID NO: 607487 - DNA, 670 bp, Homo sapiens
  misc_feature (295)..(295): n is a, c, g, or t
  misc_feature (353)..(353): n is a, c, g, or t
  misc_feature (370)..(370): n is a, c, g, or t
  misc_feature (379)..(379): n is a, c, g, or t
  misc_feature (385)..(385): n is a, c, g, or t
  misc_feature (395)..(396): n is a, c, g, or t
  misc_feature (402)..(403): n is a, c, g, or t
  misc_feature (410)..(410): n is a, c, g, or t
  misc_feature (413)..(414): n is a, c, g, or t
  misc_feature (416)..(416): n is a, c, g, or t
  misc_feature (421)..(421): n is a, c, g, or t
  misc_feature (425)..(425): n is a, c, g, or t
  misc_feature (432)..(432): n is a, c, g, or t
  misc_feature (434)..(434): n is a, c, g, or t
  misc_feature (438)..(438): n is a, c, g, or t
  misc_feature (442)..(442): n is a, c, g, or t
  misc_feature (448)..(448): n is a, c, g, or t
  misc_feature (451)..(451): n is a, c, g, or t
  misc_feature (463)..(463): n is a, c, g, or t
  misc_feature (471)..(471): n is a, c, g, or t
  misc_feature (476)..(477): n is a, c, g, or t
  misc_feature (484)..(484): n is a, c, g, or t
  misc_feature (486)..(486): n is a, c, g, or t
  misc_feature (492)..(492): n is a, c, g, or t
  misc_feature (509)..(510): n is a, c, g, or t
  misc_feature (513)..(513): n is a, c, g, or t
  misc_feature (518)..(518): n is a, c, g, or t
  misc_feature (527)..(527): n is a, c, g, or t
ggaacgagcaaacacgagaggtgtcctatggtcagacaccctattagacccccgtcccctggtcagccagccagctactagccacagctcatagactaaagccctttctgaaaatcaggatacagggaaaaaccaccactcttcagctacctctttgttccccaaaccctctgctcactgggaagtgggcaaagccttcagatgagaccatctgaggtctatataacccaaggtttgtttcacagctctcatagattatggctgtcctatcccctgccctgtctggaaacattangagctcaagactgaacatgaagctccaattgtgagctccaggaaggtggaagaaacanctgcaggcacaggttgntcaaaccanaatganacggaggggnngaattnnaactggncanngntgccntganggaagancncctntcangaacanaancttgggcttccnaattaacngaaannggccggntntaaccncttttcccactaaaaanntgntgggnaaaactggntcccaaacctggggttgggagggggccaaaattaattccagccggatggccccccgcaaagtggctccaatggagtaacagccctggtcttttaaaaccctggtttttacctcctgggggaaataggccgaaaaggccttcct

SEQ ID NO: 607488 - DNA, 984 bp, Homo sapiens
tcggttgtaggtggcctcgccgcccggtccggtgtcgcaggcgctcatccgcgccgggagcccttggctgcgtcgcccggggagccgcgtaaggacgctgcgaattgacgccttttataataaagacacttatcttgcccaaagagctggcgctggagtgtagtggcgcaattcttggagtcagccagcaaacctccggtctcccatgttcaagcgattctcccgcctcaggctcctgagtagcaattacaggtaaaagttgtgggcagaaagcacgggcagcctgggactcctgtcgccatagcgaacaccagactaccgtcgaggacttctagcgcgcttttaccagcccagcagcagccgctccatgcaaatacatatggggactccagtacctggaacatgtgaattccataaaaatggaagcatctaagaggcagtgaacactggcgcccacatggagaaccaggtgcatcagcgcattgcggaccctgaggaaagcaggtctgtggttcccagaggcgtctgctgaaaactgcaggaggcccacgacccaagtccactggaactatctgcctggaggacatgccgtggatggcacgaactttgccaggagaggtgcaaggtgggctccgtgaagaacatggtcagagctgagtgcccagcagtgcaggacgaggaccgcgccacggaggcctgggccaggagccaggaaccgaacaagctcaggcaagacgtcactgtcgtacaagagaattgagcgcctggatatagaactgccggtaaaaatcagctgtggcagcagtgccccctggaaataaacgcggtggcctgatagacccacaaaatgaaggtccacaaccccaccagcgtcgggaccaacaaaggaatagcaaacaccacaaaccaaacaaaacgcaaaacctgtagcaacaccacacaaacaacggcagtgacaaagtccatcaaaccccagtaaaaaac

SEQ ID NO: 607489 - DNA, 118 bp, Homo sapiens
tcgcgaatagtgaaatcctgaggatggttgtatgtaaatggcttcatcctgctaggaccctgatgagccgcagacacatgttctcctggggaaattccttggggccctccacactgtc

SEQ ID NO: 607490 - DNA, 329 bp, Homo sapiens
ctccataatgtgtgcccaggaactcaaggctgctgtgaacagagattccaccactgcactccagcctaggtgacagagtgagaccctgtcttaaaaaaaaaaaaaaaaaaaggccttccggggttcaggtccaccagggtttaagggttacccacccaaaaaaaaaaccccgggaaaacccggggaaacttttttgggggttttcgggggggggtttttttcccccttttgggccccaatttggggggggcccccctttttgggggggcccccgccccaaatttgaaaacaggggcaagggttttcccggggggaaaaaaccgccccct

SEQ ID NO: 607491 - DNA, 189 bp, Homo sapiens
acagctgcgatacacacaccacacagaatacattacacacacacacagccacacactacacacaccacacgccacatacacaccatacacacaccacacagatacatcacacacacaccacacacagatacaccgaaagcacacagataccacacacacccccacagaaagcacacatacacacacaca

SEQ ID NO: 607492 - DNA, 102 bp, Homo sapiens
  misc_feature (9)..(9): n is a, c, g, or t
  misc_feature (67)..(67): n is a, c, g, or t
  misc_feature (69)..(69): n is a, c, g, or t
ctcgtgccntcgggcaagatggctatcaagagtatcgcttcccgcctccggggttcccgtcgttttntnagcggcttcgtggctggggctgtagtgggcgct

SEQ ID NO: 607493 - DNA, 791 bp, Homo sapiens
agcgggtatgctgagaacctggagcaggaatgcggggaagctgactttgtgttcgctattctctcaaacatgtggtaatgttcactgtaatcgaagccacaattatgtgtgtttctttggttatccttcattcaagtatagtcatccacatcacttcctgaaaacaacatgcatgctctccgtggacaggttgttcagttcaagctctcagacattggagaagggatcagagaagataactgttaaagaatggtatgtacacagaaggacgatacagtgtctcagtttgatagcatctcgtgaagttcaaagtgatcaaagcttctgtgaccatcactagtcgtggatgatggacgtcattaaacaaactctattataatctagacgatattgcctatgtggcggaagccagttagtatgacatagacaacggaagctcttacaacagattcagaacgaagatgtcgtggaaactcctgcagtgtctcatgatgaacatacacgaccaagagataagatgggccgaaaaacactgtgcaactcctgcagcttcgcccgtctggcaatggaaaacaatcattaagctgagtgaagtggttggctcaggaaaagatggcgagaatacttaaagaagatatcctcaactatttggaaaagcagacaggagctatattgcctccttcaccgaaagtcgaaattatgccacgctccaacaaagccaaaagacatgactgttcctatactagtatcgaaaactccggtattcacaaggcaaagacaaacagaaccat

SEQ ID NO: 607494 - DNA, 634 bp, Homo sapiens
tgtaaaagcttatatgggatgctcgttttctctcctcccatgggttcatagagggctcacctcactcactcttgctaacaagctgccctcattttagagagagctggagtggggtctctaaccctccagcaacagcttaggagccagacttgaagccctgacagccaacactttccatatagaccctgttgtccatcctatcttaggaagacaatgcactcaagaggaaggtaacatctaccttcggaccccagaggctccaaggagcctctctctctcttcaagacaggcttcacctccaccttcatacagtggtactgggagatgaacaagggtagggcgaaccagaatttaatttacccctggagttccagtcgggtggtgcttggtagtggactcatttttggtcccattggatatttgcagccacctgctgggaaaggtgaactgttgctcctttttcacaaataaggacagatagtttgcagaggtcagaggacgatttgcggaaggaatggttgcaagttagtttttaacctaaagcctatgtttctaagaatttgccggggacttggcaaatccttttcctttgggggcttcaatactttttgaagttaagagtctgccagtggga

SEQ ID NO: 607495 - DNA, 307 bp, Homo sapiens
aaaagattaaccaaattaaaagagattaagatggcctagaattatccttaaaaggtgccagcgttcataaagaggcatgcggggagccagaatctgagggctgctgatgaaaacccgaacggtctaattctgtactctacagtaaagcagctattctcgaaaaggacctcaaagagaaatctggaaaatcgattgctggcattaacagaggttaaaacacaccacataaccaaatcatgcagtcacgtgggcttttcatctacagggattctcaatatgattctcaccacgggtctgccttcatctg

SEQ ID NO: 607496 - DNA, 193 bp, Homo sapiens
agtaaatccagtgcctcagatgacactataatataaatagttaaattaagaatgcttatgttagggatgtacggtacaactgctattattcatcctatgagggaaactgaggagaatgctaagattttgcgtagctgggttcggctgagtccacctcaactgcctgctatgatgggtaagattgagagagaga

SEQ ID NO: 607497 - DNA, 892 bp, Homo sapiens
gcctttgaagggtgtggcttcggaccgagaggtgaggctgctgtgtcttccccctggcttgtatcagctgtgcttcttttagtgtccaaattctctttatcacctaaaacagagaggaaatacttgcagtgaatgaagattcctctgcattcttagtcactgcattattcaagcgtggtagttggcttatgaatgaggatgacagattggaagagatgaagaatgaacgctgatgaccaggatccagtggtttctatgcccctcttatgcatgtcatgtatcctgtgtttaatgatgctagaaacgagtagattctgtctgcagtccagacactgagagccgctttcatctaaggctgaagataagcaaaatccaggtctcacacatagcacgatcattatgaaaggttgtagagtaaagaaaagcgtggaagttaacgttcactggagtcccttcgttcgtgatggcagctgatgcatgtagaacgagtatactgattgaacgaccatgagcccagtaattccagagagcttgaacgaacaggcatggaggcacttcaaaccaaattctcagtaagatcccatgatgagatcacatgacatgagtgaggtttctgcagacaagtcaaggatatagctaggtccactaacacagcaacttctggataccggtgaataaatgtcgttgcggtgaacatatcagttacccagaacccgacgggcacttgaaaccaccaagagcacaagaagttggtgaagtactccgaaagtttcaggggatattcgaaaacgtatttcacaagatggcaagggcataatgtgttacgaagtgccagcgaattattcataaaccattaatcttcaaacttcaaaatgtggctgagtgtaatgga

SEQ ID NO: 607498 - DNA, 171 bp, Homo sapiens
ccatgatgagttacaagacgtcaagccccccgagctgtatcctctgggactatacagctctgggactacaatatcacccaaatgctctacctctccacaccgactctacgtagagtagttccaaagatgcaatacacaatcctctattctctacctgtattaaatatatac

SEQ ID NO: 607499 - DNA, 400 bp, Homo sapiens
ggtgtctgtattttttttttccttttttggaaatggagtcttgccctgtctcaaaaaaaccccaaataattaaaaaaatatacaatttatagctgagtgttgtggttcatgcttataaccccagcacttgggaattccaaggcaggtggatcacctgaggtcaggattttgagaccagcctgaccacctgtggagaacccacttttctactcaaactacaaaattagctgggcaaggtggcacttgctcggtaatcccagccacccgggaggctgaggcaggaggtatcgtcttgaacccgggagttggagtgtgcggtgagctgaatatgcccctatgcatcccagtctgggcaacaagatttgcaattctgtctcaaaagaaaaaaaaaggaaatgtg

SEQ ID NO: 607500 - DNA, 408 bp, Homo sapiens
tagaggatcccggaagaacgtgctggccaaatttttgtattatagatattgcatgttgtcttcgaaagagtaatacagttcatgctcagtgtagtgtgtaagtgctcttttctatgtctcaggtcttggggtgttctgatgcataaaaatagtatctcaaataggtgggggtttttttgttcgtggttttatgtgtgtgaggtgttttggggtttgtggtgttgttttttttgggacagtgtcttacttccttgtcagacaggctggatgtcagttatgcaatcacagcccactgcaggctcaaattcctgggctcaagcagtcctctgccttcagcctcccaagtagcttggtctacaattgcacatcaccacacccagctagttttttaatttttcttttgtatag

SEQ ID NO: 607501 - DNA, 106 bp, Homo sapiens
aacaagcgccagtgccctctcacatggacagtggtagaccgaagaggactatagtgctagtcctggcacagatgcacatacgcacctagggcagtgagatagtaag

SEQ ID NO: 607502 - DNA, 145 bp, Homo sapiens
gctaccaaagtgctgggatttatggctaggctatggcacacgcgcacaggtgcctggacctagcccacatcttttaaatatcccctgttccttgaggtcaggaactaccaatggagaaaataggtcctgtacttgagcaggcaga

SEQ ID NO: 607503 - DNA, 148 bp, Homo sapiens
tagtgactgatgatataatgcagacaagtttagaacgaatgctaagccttaaagacctagaaatcagaacagtggcacaaaaaacatacaggaaacactcacgcacaaagacaaggcacggttgagaaaccgaaactgtttagaactt

SEQ ID NO: 607504 - DNA, 191 bp, Homo sapiens
gtacctctccctagtttatggagagaagctcactgaatatcattgtgctagtgcatgagcttcatgtagtctttgcaggcatcctcatgcaattgctcttttcaggccaagggagggcttccattgacacctgccttaagcttttatgtgaatgtatttgaattgtcccctctttttttatttcttctact

SEQ ID NO: 607505 - DNA, 182 bp, Homo sapiens
tgtgaggtttctgtgccccaagtttgtggcaaggtgggcactactgctggccaacagaacagcagctggcaaagggaggtctgcccacagagagatgaggacatttgcttctccttcatgccaaagaatgagctgacctcctgttgctgcaaattaaatattggactgattggccaaggctc

SEQ ID NO: 607506 - DNA, 131 bp, Homo sapiens
  misc_feature (105)..(105): n is a, c, g, or t
tggggtgctctaagatcccatgctgtctacagtgaagaatattagcctatactgagcggctctgttcacctaagaagcataaaagtgagatataaagctcatatnattcaaagtacttaacttgtccaggg

SEQ ID NO: 607507 - DNA, 99 bp, Homo sapiens
ggcagggttcagaaaggattacagggaagccagatgctgtgactctactagagttcctcagtgctatgcgctgtctattccatactatcaactattgta

SEQ ID NO: 607508 - DNA, 1761 bp, Homo sapiens
  misc_feature (750)..(750): n is a, c, g, or t
  misc_feature (1156)..(1156): n is a, c, g, or t
  misc_feature (1376)..(1376): n is a, c, g, or t
  misc_feature (1501)..(1501): n is a, c, g, or t
tttggccccggggggtgttttattttcttttattcatacaaataatttccatatataattctcccgggggcaaaccggagaaaatttgggaagctccgagaggggggggggtgtcccttctcaagaagacccactagggccgggggtgatctcggcgcgcagagatgtcgcccagggtctcacagggcgcaccttgtgtgtggcctcggtgctcccacttcttgtgagcgggtgtggctctcttattctctcacacactatctcacacagacgcgtggggtctctctcagaaaggagagagaagcggggagttagagaaatctcctctcagcaggagatctcttgagggagaaatatatatcagctctcacagagtattttctcccggtgtcgcacacaggggcgcgtccctctgtagtgtgagcgcgcgagacaaggggggagtgtatcacatatctctctcactggtgggggtatctctcccagtgtatttttcctctctcagaggctgttgggggccctattaatatgtcgagaaagagggctgggcggagaagaatattttcgtccccccacaagtgtggtgttttggggggtgttggtgtgtgtgttgtggcccccaaataatgttgtctcctattatacaaagacaacaaaagtcttccgccgggagcaacaaaggtcttcctcatgcggtgttcccccgagaagagccccccgcaagaagagaaatactccgcggtgggggangtgggcgtccatccccccacaagtattgcttgcggcccgagaaaaagaggccgcccgcaaatctttctcccccgcacctgcttttattaaacttattatcccgccgagggagaagacaaacacccgcctttttgttgatgcggccaccaagaaagaacccccgcaatgttttcatacaccccccgcggaagaataatgattaacgagggggtcgtaataatggagggggggcgcagaaattactgaaggacgaaccactctttttggttggaaacaccacccgcctggtggggaggcgccaccaaaaagtactaggacaatacttatcattgatgatcatcacaccgccggcagcgacgaggggggccgacaacacaacaagcatgagtgagtgttaacaacacancactatgttctttttgatttaatcaccacgcaccaagagggcgccattattcatactattatatattacgtgcccaggagggggagacatctattaataaaccccccccgcgtattgaatatatagaccaccacttgatcgctggggcaggaaatataaagtggtagggagagttatcatcagcccgttcgtttgggaggacaaagactactataacacnccttgttgcttggcgggaccacacagaggggggagagatgagaggcacagcccctataaggagggggcttgtaataagaaagaacgaacccccccccccgctggtaagagaaagtaatacccccnctgagaggacaagaagggacgggtcgatctaacccacctctttagataagcaggcaaacccacccgtgcggttcttaatctaaaaaggtagaggcacgcgaagacaaacaaacgcgcccgggcggtgcatatttattgtttgtttgttgcgcgccaccaacaacaatatatactctggtcgggggcagaccagcaagtacttaattacacgaggggagcataaggaggcggggcacagcaacaaaacagtcctttatacg

SEQ ID NO: 607509 - DNA, 1314 bp, Homo sapiens
tccaagatggcggcgctagagctgaccctcctgctggtgacggaagtaccgcctcctcccgtactgacgcccctacaggggaccctgcatcagctccagaccgccgcggccatgtactgggccaggcaacaaacgcgccgccggcgacgggggctcagggcccccggaaaagaagcatgagatcgatgaggcgaagaccagcacgaactcttatcgagcccattcgtcttggaggcatctcttccacggaggagctggacctgaaggtactacagttcaagaaccagaaactggcagagcggctggaaacaaacggcaggacttgttgaagatgaactccgagaacgaattgagcaagtaggagaagcggcaggccacagatgatgccacaatcctcatcgatcaatcgctactggagcccagactggctgaaactgtgaaagcccttctccgatgccatgagagccagagagagcttgtcttcagagactgaggcaccataggaaacacaggaggggccaaacatgtgatgggactccatctcccaagagccaggagaaatcagagactgaaagacaccctatggctaaatgcaaggatgagagacacaatacataaagtagagccggacctatgggatatatagtaggtggcactagaggtgatagaaaaaaatgagaaaatagaaaatgaaactagaaggctgaatagaagtataacaaaggaaagagatgaaacgatggatgagtaaaagtggcgtcagtaacggacatactgcgaccgggagtacaggaaaaataggtatagacgagatgtaacagaagagtgaaacagattgagaacacacaaaaagagaagaaaggaaaataacgaaaatatgagccatataaaccgttaatgataggaattaggacaataaaaatgaggaaaaacaccggataatatgggagaaaccggaaccactgtatgatatcacagagatccaagaatgaaacgagaacaagagagaataaaaaaactaaaaatatataagaagataaaacaaaagttaagtaaaaataaaagatgatggaatagacaacgtaggataaacggaagtgcgaaataacaaagataggagatagtagagactaagcgtagagtaatatagaagtatggacaatgaattaaagcaaacaaagatagtgggtaagaggagaaagagaaaggaaagataaagataaatgacgagagacgagatagggacaaacggagtagagaaggaaaagatgtagaagtataattgaaagtaaaggaggagaagagaataggaag

SEQ ID NO: 607510 - DNA, 1086 bp, Homo sapiens
ggtggccaagtgccctggacaacgtgaatgcccgcttgtacatggatccgacgctgtgtctactaccggaagtccactgctggagtcaggtcactactgggtcaccaaaggcaaggtgcaggtggtgatcccgtttcctgacagagtcgtacaggttgcctagccaggaccctaccgtgagaatgtccatccccatctgtaccctgaatgaagcttccctaatgccatcgagcacaccctgcagtgggctcgggatgagtctgaaggcctcttcaggcaggcagcagaaagatgtgcaagcgcatggtacctcagcagacgcccatagtttgtgtggagacgaagcactgacggctggctatggcactcaggtcccttggtatggttgctggatggtctgtgcagggcgagcctggtgtctgtcgagcgaccacagagcctgggtctgactgcgtgaccatgggcctgtgcagccacctggacagcacccagtaactcgaacaagatccggcagctgctgcacaacttccctcctgacgcagctcagcaagctcaggagtcgccgttctggtctgggccaaacgctgtccacatccgctcacctttgatgtcaacaatcccctgcatctggactatgtgatggctgctgccaacctgtttgccagaactacgggctgacaggctctcaggaccgagctgctgtggtcacattcctgcagtctgtgcaggtcccccgaattcacccccaaagtctggcgtcaagatccatggttcttgaaccaggagctggagaggcgccaatggctctggtgatgacagtcgtctaagaggagctcaaagggcatctgccaggccaagaaaagtccctggatcagaatgttcccattgactttggaaaagggctgctgtccagggactttcctatgggattcatccgggtggatccagccccggcggagaacttgaaatccttctgggaacggccagagcaacctgttgcgcggaatctccccgcatggtccgaacacaaaacgggtgctccttgctgggctgcacggttcagggcgccacgtgttcccccaaagg

SEQ ID NO: 607511 - DNA, 307 bp, Homo sapiens
tagacacgcgcctcgatctgactacgcggctcgatctgactacgcgcctctgtcttcaaccagcacccgccttgggctgcaccgcagcaccctgacttcggccctcccccccatggcttcaacgggcagtctccacacatgcggagacagggcccgctccacatcaaccacgatgaccccagcctgctccccaatgtgccctacttcgatttccctgctggactgatgccccccctcgcgaagcttgtagatcacgagtacaagcctttggaccctaaagacagccgcgtagacaggagatcctcta

SEQ ID NO: 607512 - DNA, 923 bp, Homo sapiens
tcccgcaccccctctacctacgcctagcttaggctaccgcggtctaccaagctagtagctatagacggcgcgcgggactccgacgccgcttcttggccagcgttctccacacccggacctgggtcgctatgtgcagcagctgcacgcgtctgagcttcagcgtcagccgcgacggcgcctcgtctcgcggcgccagggcagttcgtaggagcgggcaggtgcatcgacttcgcccgcacggaatccaggggtcgtcaatcatcatgtaaactcgacgtaccgtagctgcgatgccccagcagtcagtggccgcaatcaccttaactgggcgcctgtgcagcgcaggcagcagccatccactagccaagtcaggtacgcaggagatctcgcacgcctggctgcagcacagctggcacgagccagatcggagacttgcgacgctgactaccgacatccgacaagacccattacccacacacgaccaacccactagacactccacagggccacgtgcgcaaccccattcacccaaccaacgaccgaaccacgcttaccgaccagcggcctaccgaccccacgagcacggattcacggactccctgaccccagaaccacggttgcaacagcagcagctgcaaagcagttgacccccaccacacctgccatgcaccacaagacctaaaggcacctggcatccatcccgcgctacaaggcgtgccatacacttcccccctaatcgggcaactttccccaacaggccacacacgaggccacacactgggacacacccccaacaccaaccatggacgcccaccgacttaggacacccgaacgcggacacatggccttgaggcccacctatcactacgcaataccaacgacttgacccctaggacgcaccgatttcccaagctagagcccag

SEQ ID NO: 607513 - DNA, 158 bp, Homo sapiens
taccagatagtgaggaaagttgagcctataatgacgtttaagtcctgtgaaagcctgtggctactaaaaatgttgagtcctgtagatccgtcggaaatggtgaagggagactctaagtactctgagagcttgtagcggggtaccggaggctcgatatt

SEQ ID NO: 607514 - DNA, 485 bp, Homo sapiens
  misc_feature (51)..(51): n is a, c, g, or t
  misc_feature (99)..(99): n is a, c, g, or t
  misc_feature (430)..(430): n is a, c, g, or t
aaaaaacagttaggcaaagaacctaagcaaacccctcctgtggggccaagnaaagagaaatttaaaaataagtatgtggactttcaaccctccctgccnattaatccacataattgccaggaggtatcaccccagaaagataagtaacatgttgaacatgatttggctgttcctcccacccaaatcctcatccttgaaatatagttcatgtaatcccccacatgttgtgagagggacccagtgggaggtaattgaatcacaggggcagttaaccctcatgttctcgtgatagtgagtaagtctcacgagatctgatggttttataaggggctcttccccccgtggctgggcacttctctttgttgccgccatgtataagaggacgtgtttgcttccccttatgccatgattgtaagtttcctgaggcatnctcagccatgctggactgtgtgtcaattaaaactctttcctttatgaaaaaaaaa

SEQ ID NO: 607515 - DNA, 936 bp, Homo sapiens
  misc_feature (14)..(14): n is a, c, g, or t
  misc_feature (791)..(792): n is a, c, g, or t
  misc_feature (795)..(795): n is a, c, g, or t
  misc_feature (798)..(798): n is a, c, g, or t
  misc_feature (800)..(800): n is a, c, g, or t
  misc_feature (805)..(805): n is a, c, g, or t
ggcagccggccggnagtccgtcagctgtcccagagcctgtgtcgcgcccgtgccggtagcgcccgtgccggtagcgccgctgccaccgctcaccatgggcccgggtcctcggctgctgctacctctcgtgctttgcgtggggctcggcgcacttgtgttttcttcgggggccgagggcttccgcaagcgaggcccctcggtgacggccaaggtcttctttgatgtgaggattggagacaaagatgttggcagaattgtgattggcctctttggaaaagttgtgcccaagacagtggaaaattttgttgctctagcaacaggagagaaaggatatggatataaaggaagcaagtttcatcgtgtcatcaaggatttcatgattcaaggaggtgacatcaccactggagatggcactgggggtgtgagcatctatggtgagacatttccagatgagaacttcaagctgaagcactatggcattgggtgggtcagcatggccaacgctgggcctgacaccaatggctctcagttctttatcaccttgaccaagcccacctggttggacggcaaacatgtggtgtttggaaaagtcattgatgggatgacagtggtgcactccatagagctccaagcaactgatgggcatgaccgtccactcaccaactgctcgatcatccaacagttggcaagatagacgtgaaaacgcctttgtgggttgagatcgctgattggtgacacaactggcagaaaacaggatatgccttggcaggggtgtgtgtgttgtggttggnncgngtngnggggncccacagcgactttactttgtgcttcccgcacgggagataaaaccctctttgtcgtatttaccgggaagaaatttccccggcttcaaacacggtgcattagcctcgccacgcgtttcatgggacgttaccc

SEQ ID NO: 607516 - DNA, 492 bp, Homo sapiens
  misc_feature (188)..(188): n is a, c, g, or t
  misc_feature (209)..(209): n is a, c, g, or t
  misc_feature (427)..(427): n is a, c, g, or t
acagtaaaaagaggagctgccatcattagggaagcaggagttgaggagagtcagagtgacaccactgaaaaatcttctctgtcttgagactaacaaggtaccttccttgccagtcacaacccatggtcctaagatggtcacagctaaggaggcagcttggtactgcctgcaaggacaaactcctaaancaacagaaagcccagatgtcncaatacccatagcaatatgtgctttcaagataattatagatgtgctttgatgtactcatgtactagactgttaaggatagttttctttaaatcagtagcataatcaattttgtcatgctgtctgctccccctcacagagtcgcagcttggtttagtcattacgtagacaagacccctatataagaaaaacttaaaacaaagacggtgcattctctcgnaaggtcccgtgctctgtaatggagtaggttttaataaacgtgcttccttcgctgcaaaaaaaaaa

SEQ ID NO: 607517 - DNA, 1612 bp, Homo sapiens
tccttcgcctatatcttcacccactttctcaccaagtcgaattctcagataggagacgactcgactctcagaaacaaaggaagtttacgtgtgtcatactcctgatgctatcactctggaagcaaatttctaactgggataactaagtccgtgtagtcaccagagtccttactatatgatggctgctcgccatactgacataaattgcgtctcctatgcagactgcagatgtatagtcggctggtacgtcagatagtcgcgagcctcacgtgacttcagactacctctttacctctctgtacgactcaagggatgaaggatgacggaagacttaagagaactatatcctatccagcacgagtgtctcatcacgccgccgatggattgctggcgatggacatacacacctactgacagcttatcatggtaacttgcacggctctcgtacgaccaatggctacgacagtcacggctctcgtagcacatgcacaatggtctgctttacaccaaacactcagtcccagtgcattcctgaacgaacagcaaacttagcgacctggtcatgcaagggcatgattctgacacgcgcgacgaccacgcacacattaaactacatagctgatgcatcattcgcgttcgagtcaccttatacgccatgcataagccacgattcgcagtaccacattgaggatccacgcggcaaccccgacacatgacataacagtggcgcaaaagagaaaaccacccgacataggacataggaacacacaggaacaacgactcgcgactatatgcagcccattccacggataactcttggcagacaaccactcctacaagctaatcgacggccaacgagtacaacgcatcagcacgcccacgacaccacacaccgccgcgtcaatgaccctcgcgcacgaccaagcacgacacacaccaaaccaacgaaactcagactcacgtaggcacaacacacctaaccacaccaccacagtcggcagcaaaccacaaacgatacaagagcaacaccacagaatcagaagcgaaccacaccacacctaccccgcccccacacgaacagacgaaagcaccaaaacccaatgatgagacagccacagcgaagatgagacaccccaaccaccctagctcagtacctagaaccaccactacccaacacacacacccacacacggagtaacacgcagtacagtcacacaagaaccacacccagaaccagtgacagaacttccattacaactcacacagcagtcacactacaccagcactagcctcaggacacacgaacgcaactcaacacgcaagcctacgacacacacacaaaagagcacaaagccaacaagcaaagacagccagctcatggcaacaccacatagccacaaatcctgactacgatgcaacacgagacagccatcaaagcagacaaacatcacagacagaagtaaacaaaacgggccacaccagcccgatccagacctcaaccacaacactcgaccacacaatgcacagaacaacattctgacttcaccatcacatacaccacacagcactgagacacccacacagccagcacgacgagccacacagcgcacaa

SEQ ID NO: 607518 - DNA, 541 bp, Homo sapiens
gacccactgcacccagcccctcagactacatacttagagtccctgaatggcagtagcgtcagaattctagttggtaagctatttctacctataattctgttaatgttggatgggaattccactcccaacataatacattttggttcctcggctacccttacatcatcctgggccaatcctctccttctgtaacccaatttggtaccagggcacataagtttactcaccgaggagacaaggaggcaactcaactacttgcttgcgttcctgtacatgaacggaataatcgggtaccaggttcacggtgactgatcatcaccagacagtgaaagaagtgaccgggtgggccacggatggtgatgtcctccggtcattggtatcctgattggtgaccttaagatgtagcagtgaggttggtcctatattcagctactcacaataagtatacaggggtaccgacaaataggaatggtgccatggggtactgggggtcactaaactaaactatgagacctgaaaggggccgggaaccgagctcgaa

SEQ ID NO: 607519 - DNA, 940 bp, Homo sapiens
  misc_feature (795)..(796): n is a, c, g, or t
  misc_feature (799)..(799): n is a, c, g, or t
  misc_feature (802)..(802): n is a, c, g, or t
  misc_feature (804)..(804): n is a, c, g, or t
  misc_feature (809)..(809): n is a, c, g, or t
agaagcgtcccagaccatgcgtcgggcgcgcggcgcctagtacgtgagtgaaccatggtcatagctgtcgccttagcgatatcctggtcatcacgtagtgctgggatctctccgccgataagaatggcccgcggggcacctggtcgttctgacgagggtccagaatgctgtcctgagctcagttcactttcatctatcagacaggagtcccatgtcgagtcgtcgagtgatcggattacagacccaggtccggcagaattgtgattggcctctttggaaaagttgtgcccaagacagtggaaaattttgttgctctagcaacaggagagaaaggatatggatataaaggaagcaagtttcatcgtgtcatcaaggatttcatgattcaaggaggtgacatcaccactggagatggcactgggggtgtgagcatctatggtgagacatttccagatgagaacttcaagctgaagcactatggcattgggtgggtcagcatggccaacgctgggcctgacaccaatggctctcagttctttatcaccttgaccaagcccacctggttggacggcaaacatgtggtgtttggaaaagtcattgatgggatgacagtggtgcactccatagagctccaagcaactgatgggcatgaccgtccactcaccaactgctcgatcatccaacagttggcaagatagacgtgaaaacgcctttgtgggttgagatcgctgattggtgacacaactggcagaaaacaggatatgccttggcaggggtgtgtgtgttgtggttggnncgngtngnggggncccacagcgactttactttgtgcttcccgcacgggagataaaaccctctttgtcgtatttaccgggaagaaatttccccggcttcaaacacggtgcattagcctcgccacgcgtttcatgggacgttaccc

SEQ ID NO: 607520 - DNA, 843 bp, Homo sapiens
  misc_feature (14)..(14): n is a, c, g, or t
  misc_feature (502)..(502): n is a, c, g, or t
  misc_feature (513)..(513): n is a, c, g, or t
  misc_feature (517)..(517): n is a, c, g, or t
  misc_feature (519)..(519): n is a, c, g, or t
  misc_feature (528)..(528): n is a, c, g, or t
  misc_feature (536)..(536): n is a, c, g, or t
  misc_feature (540)..(541): n is a, c, g, or t
  misc_feature (551)..(554): n is a, c, g, or t
  misc_feature (564)..(564): n is a, c, g, or t
  misc_feature (566)..(566): n is a, c, g, or t
  misc_feature (570)..(572): n is a, c, g, or t
  misc_feature (577)..(577): n is a, c, g, or t
  misc_feature (586)..(586): n is a, c, g, or t
  misc_feature (594)..(594): n is a, c, g, or t
  misc_feature (600)..(600): n is a, c, g, or t
  misc_feature (608)..(608): n is a, c, g, or t
  misc_feature (612)..(612): n is a, c, g, or t
  misc_feature (616)..(616): n is a, c, g, or t
  misc_feature (625)..(625): n is a, c, g, or t
  misc_feature (631)..(631): n is a, c, g, or t
  misc_feature (645)..(645): n is a, c, g, or t
  misc_feature (647)..(647): n is a, c, g, or t
  misc_feature (651)..(651): n is a, c, g, or t
  misc_feature (656)..(656): n is a, c, g, or t
  misc_feature (659)..(659): n is a, c, g, or t
  misc_feature (664)..(665): n is a, c, g, or t
  misc_feature (668)..(668): n is a, c, g, or t
  misc_feature (674)..(675): n is a, c, g, or t
  misc_feature (686)..(686): n is a, c, g, or t
  misc_feature (693)..(693): n is a, c, g, or t
  misc_feature (696)..(696): n is a, c, g, or t
  misc_feature (701)..(701): n is a, c, g, or t
  misc_feature (706)..(706): n is a, c, g, or t
  misc_feature (710)..(710): n is a, c, g, or t
  misc_feature (712)..(712): n is a, c, g, or t
  misc_feature (715)..(715): n is a, c, g, or t
  misc_feature (724)..(724): n is a, c, g, or t
  misc_feature (728)..(728): n is a, c, g, or t
  misc_feature (733)..(736): n is a, c, g, or t
  misc_feature (738)..(738): n is a, c, g, or t
  misc_feature (741)..(742): n is a, c, g, or t
  misc_feature (745)..(746): n is a, c, g, or t
  misc_feature (748)..(748): n is a, c, g, or t
  misc_feature (751)..(751): n is a, c, g, or t
  misc_feature (758)..(759): n is a, c, g, or t
  misc_feature (763)..(763): n is a, c, g, or t
  misc_feature (767)..(767): n is a, c, g, or t
  misc_feature (769)..(769): n is a, c, g, or t
  misc_feature (771)..(771): n is a, c, g, or t
  misc_feature (773)..(773): n is a, c, g, or t
  misc_feature (775)..(775): n is a, c, g, or t
  misc_feature (777)..(777): n is a, c, g, or t
  misc_feature (779)..(779): n is a, c, g, or t
  misc_feature (813)..(813): n is a, c, g, or t
ggcagccggccggnagtccgtcagctgtcccagagcctgtgtcgcgcccgtgccggtagcgcccgtgccggtagcgccgctgccaccgctcaccatgggcccgggtcctcggctgctgctacctctcgtgctttgcgtggggctcggcgcacttgtgttttcttcgggggccgagggcttccgcaagcgaggcccctcggtgacggccaaggtcttctttgatgtgaggattggagacaaagatgttggcagaattgtgattggcctctttggaaaagttgtgcccaagacagtggaaaattttgttgctctagcaacaggagagaaaggatatggatataaaggaagcaagtttcatcgtgtcatcaaggatttcatgattcaaggaggtgacatcaccactggagatggcactgggggtgtgagcatctatggtgagacatttccagatgagaacttcaagctgaagcactatggcattgggtgggtgcggctggggccnggtgggggtgngcgncntgggtgtgngttgtttntgcnncttgcgcccnnnngctggttggncngccnnntgtgntgtttggancgtgcttnatgggntcgcgtgntgcntgcntcgcgctgnccgccntgctagggctgcgngngcantgcgncantgctnnctnctgccnnataagccgctngcggtgnccngggtnttatngttncnctnggtgcattnttcncgcannnngngcnnagnngnctntggtttnngcgnggtntntntntntntntatatgatgtgagtgtagtgttgtgtttgccttnttttggttttttttttttgtttgtttttgt

SEQ ID NO: 607521 - DNA, 126 bp, Homo sapiens
gtccctgtgtgcacctcatggccccaccccaccaggaaggtgagtgtcccagaggaggagctcggacggccatgcttgcaagaaggccaaggggcccatcaacttcaccgtctttctcaggctctt

SEQ ID NO: 607522 - DNA, 1371 bp, Homo sapiens
  misc_feature (14)..(14): n is a, c, g, or t
  misc_feature (1226)..(1227): n is a, c, g, or t
  misc_feature (1230)..(1230): n is a, c, g, or t
  misc_feature (1233)..(1233): n is a, c, g, or t
  misc_feature (1235)..(1235): n is a, c, g, or t
  misc_feature (1240)..(1240): n is a, c, g, or t
ggcagccggccggnagtccgtcagctgtcccagagcctgtgtcgcgcccgtgccggtagcgcccgtgccggtagcgccgctgccaccgctcaccatgggcccgggtcctcggctgctgctacctctcgtgctttgcgtggggctcggcgcacttgtgttttcttcgggggccgagggcttccgcaagcgaggcccctcggtgacggccaaggtcttctttgatgtgaggattggagacaaagatgttggcagaattgtgattggcctctttggaaaagttgtgcccaagacagtggaaaattttgttgctctagcaacaggagaggtatgtctcaattttatttcctttaaattgggtcttctttctttgaagccaaatataaagatgtcatctgagaaaataagtattaaattagtatgtcagatgaaccttaccacatttgactttattttccaattaaatatgtattatttgggcactcagtgcccttaggcttctggaaattgggagaaaatcatcatcaagtgaaaatatggtttgctctcttttaacttattcacattaatactctacttccataacatatttattttttggtcagctaatgataaatttctctcagtaaaccatagctgggatataatcaagttctgtaggcatttgtttaattttctcagtttgtcctttctagatcaacactgagtttatctttcagtatggcctctgttacttgttattcaactgaagcaatctctttagaaaggatatggatataaaggaagcaagtttcatcgtgtcatcaaggatttcatgattcaaggaggtgacatcaccactggagatggcactgggggtgtgagcatctatggtgagacatttccagatgagaacttcaagctgaagcactatggcattgggtgggtcagcatggccaacgctgggcctgacaccaatggctctcagttctttatcaccttgaccaagcccacctggttggacggcaaacatgtggtgtttggaaaagtcattgatgggatgacagtggtgcactccatagagctccaagcaactgatgggcatgaccgtccactcaccaactgctcgatcatccaacagttggcaagatagacgtgaaaacgcctttgtgggttgagatcgctgattggtgacacaactggcagaaaacaggatatgccttggcaggggtgtgtgtgttgtggttggnncgngtngnggggncccacagcgactttactttgtgcttcccgcacgggagataaaaccctctttgtcgtatttaccgggaagaaatttccccggcttcaaacacggtgcattagcctcgccacgcgtttcatgggacgttaccc

SEQ ID NO: 607523 - DNA, 338 bp, Homo sapiens
cgagtttggcggcgaccggggctcctccctcttctgccccgggctcccctgctcttaacccgcgcacgggggcgcccaggccactgggctccgcggagccagcgagaggtctgcgcggagtctgagcggcgctcgtcccgtcccaaggccgacgccagcacgccgtcatggcccccgcagcggcgacggggggcagcaccctgcccagtggcttctcggtcttcaccaccttgcccgacttgctcttcatctttgagtttgtgagtggctcctacatagccactctgctctacgtggtccatgcggtgttctctttaatcagatggaagtcttcataa

SEQ ID NO: 607524 - DNA, 963 bp, Homo sapiens
  misc_feature (14)..(14): n is a, c, g, or t
  misc_feature (818)..(819): n is a, c, g, or t
  misc_feature (822)..(822): n is a, c, g, or t
  misc_feature (825)..(825): n is a, c, g, or t
  misc_feature (827)..(827): n is a, c, g, or t
  misc_feature (832)..(832): n is a, c, g, or t
ggcagccggccggnagtccgtcagctgtcccagagcctgtgtcgcgcccgtgccggtagcgcccgtgccggtagcgccgctgccaccgctcaccatgggcccgggtcctcggctgctgctacctctcgtgctttgcgtggggctcggcgcacttgtgttttcttcgggggccgagggcttccgcaagcgaggcccctcggtgacggccaaggtcttctttgatgtgaggattggagacaaagatgttggcagaattgtgattggcctctttggaaaagttgtgcccaagacagtggaaaattttgttgctctagcaacaggagaggttaagccagtatatgaacccagtctgttgaaatccagagctaaggaacacagttgtaaagacgactgtacctctttgagaaggatggagtttggggactcatctagcagcatctcgacaggtgtgagcatctatggtgagacatttccagatgagaacttcaagctgaagcactatggcattgggtgggtcagcatggccaacgctgggcctgacaccaatggctctcagttctttatcaccttgaccaagcccacctggttggacggcaaacatgtggtgtttggaaaagtcattgatgggatgacagtggtgcactccatagagctccaagcaactgatgggcatgaccgtccactcaccaactgctcgatcatccaacagttggcaagatagacgtgaaaacgcctttgtgggttgagatcgctgattggtgacacaactggcagaaaacaggatatgccttggcaggggtgtgtgtgttgtggttggnncgngtngnggggncccacagcgactttactttgtgcttcccgcacgggagataaaaccctctttgtcgtatttaccgggaagaaatttccccggcttcaaacacggtgcattagcctcgccacgcgtttcatgggacgttaccc

SEQ ID NO: 607525 - DNA, 408 bp, Homo sapiens
cgagtttggcggcgaccggggctcctccctcttctgccccgggctcccctgctcttaacccgcgcacgggggcgcccaggccactgggctccgcggagccagcgagaggtctgcgcggagtctgagcggcgctcgtcccgtcccaaggccgacgccagcacgccgtcatggcccccgcagcggcgacggggggcagcaccctgcccagtggcttctcggtcttcaccaccttgcccgacttgctcttcatctttgagtttgtgagtggctccgagatttggagatgagagggagctgaatccggtttattttcttctggccttttaaagtttctggcgagggaacgtatttgcgaccaattcgatctggaaatgaggccatcgtttgcttggccgcagtccttctgcc

SEQ ID NO: 607526 - DNA, 122 bp, Homo sapiens
agcaacagtcacttgcaacaagcagacaggcagtccagtccgccaacgtctattattataccaaccccactgtgtcgttggccctacatggtgcgtttttcccacacggtgcgttgggccta

SEQ ID NO: 607527 - DNA, 328 bp, Homo sapiens
  misc_feature (277)..(278): n is a, c, g, or t
  misc_feature (307)..(307): n is a, c, g, or t
  misc_feature (322)..(322): n is a, c, g, or t
  misc_feature (326)..(326): n is a, c, g, or t
cgagtttggcggcgaccggggctcctccctcttctgccccgggctcccctgctcttaacccgcgcacgggggcgcccaggccactgggctccgcggagccagcgagaggtctgcgcggagtctgagcggcgctcgtcccgtcccaaggccgacgccagcacgccgtcatggcccccgcagcggcgacggggggcagcaccctgcccagtggcttctcggtcttcaccaccttgcccgacttgctcttcatctttgagtttgtgagtggctcctggcnnagtgaagggacggggtgggctgagccgtngctctcatcggcgcntganac

SEQ ID NO: 607528 - DNA, 161 bp, Homo sapiens
  misc_feature (58)..(58): n is a, c, g, or t
gctttggaacaattaaactacagctcattctcttgcctcctcgcctgagttctccagncaactcaagtggcactcctccatgaagcccctgtaggtttcctccactgggacaaggacgcgcagagatgaaaggcacgagaagtccaagcccgtaggggaaa

SEQ ID NO: 607529 - DNA, 1311 bp, Homo sapiens
  misc_feature (698)..(698): n is a, c, g, or t
tgtgtaagtggtcgacgatctcgccagatattggagtggtggcatcttaccggcgcgtatgtgacggcacctctgttgtcgccgcgttttggggacacggcgacatagggccgtggtgtaaaaacgaggtggtgtccagagggcatagtagcgatagtttcccgccccccttaaggggaattccccatttcgtgtgaaggggggatttaacaccagtgtcaccacagtgtgtcacccccgccgaatgaagaagcttgtatgagagtctcgccacgagaagtgatgccggccacggcgccccggcgtaaagcttttggaaaggggaaacccacaagagccatcccacttccgggtggaattaaaaaggaaaagtggtccccccaaacctaaactaaggtgttttggaaaactagcctctttggaaaggacttgggaaaagaaatatttaggagaggggggagtaaggggctctttcctaaggggtggaatagccagcacgccatggcaaccaaggaaggttcaactatgggtaacgcttttggagagactgaatataatgtaagagtggagactctgggagtttggaggcccattatgaaaaggggtataagagagttctctgaagatgtatataagaattgttggggaaaaaattatatgtgctgtgaacgcacctggctggctatagccccacacgnggtgttcaagggcgtttggcacagcactgtttgccccttcgcacacgcacagagcctatactttgctcacggcacacaatattttatacttctacagtggcgtttctaatagattgttcccacaaggcacataatgtttaaatgttatagtgagaccccggttttttatatgagatccacggtatagtataaccacgagtttataatatacgagaatgccacttataatgcttttcacacgttaaaatatactctataatgggagagcccacggccactcggtgtggcttaatgccccgtatatccccgcacctcttgggagggctgaagaataaggtggagtcacacttgagggtccacaggagagtttgaagaaccacagcctggccacacacacatggccaaaaccccactttttatctataacaaataccaaaattatccacgggggtggtggcacgacaccctgtatatcccacgctatactcgggagggctgaggtattgagaatctgcttgagaacccacggagggcacagaagggtgcacagtgaagccgagagtcgcacccacctgcactccagcctgggtaacagagtgagactctgtttcca

SEQ ID NO: 607530 - DNA, 232 bp, Homo sapiens
aggggatcgggcggtcatcatgagtcaacagataagggataccttagagagaccacaaagatctattctcactttgcacaacttgtactcagcctcctcaggtgtactacgatgtacagcaaagcgacccttggtgtcatagatcagactgaaattctactcccgtcttgtcgatgctgatgacatccattaatccagcagggtaggttatatcagttcggaccttgccatc

SEQ ID NO: 607531 - DNA, 311 bp, Homo sapiens
caaaatggcagagtatgacctcccaggggcacaccacccaaaaagggaagaaagccacagatgggcgtgcacacaacttcctaaacacactgcgcatgctcccctcccaagtgtaaggagggcactgcacttatgagtagcccagcctaagggaagaatcatgggaaaggggccagcgtataaataaagtcctaggatcaaggttaaaatggcacttgaccttcacgtgcccgcttgggtctcttccaagcattatttcatttctttcccgttctaaagctttttaaaataaacttccactcctgctttga

SEQ ID NO: 607532 - DNA, 228 bp, Homo sapiens
  misc_feature (24)..(24): n is a, c, g, or t
  misc_feature (190)..(190): n is a, c, g, or t
gcgtcgtctctacacgcatccccngttatcaccctaccctcatctttatttcgcgaaggggaggggcgaatcctgggtcgcgcaccctcaccctgctccctcccagcctcagcttcagctcgtccctcgtgccccccctttcgtggtgcaatgggagagcgaccaggtgggcgcttcaggtctctggaanctcgccacacgcgtgctgcactggggcagggtggagcg

SEQ ID NO: 607533 - DNA, 360 bp, Homo sapiens
tatgtagccatgaaaagaataaaatcgtgttctttgtagcaaaatgaatgcagctggaggccattattctaagcaaattaatgcaaggacagaaaatccaaatactgcatgttctcagttataactgggagctaaacattgggtagtcatggacataaaaattgcaacaatagatacatggaactattagatgggaggagggacaacggattacgaaaactaaaccgtttgggcacatgtagctaaagtatactgggctgaccacaaatcattgaacaatacccaaaccctacagcatccatatgccatcatgcaattataacccaggtaacaatacctgcgcatgttctacctttatct

SEQ ID NO: 607534 - DNA, 329 bp, Homo sapiens
  misc_feature (29)..(29): n is a, c, g, or t
  misc_feature (218)..(218): n is a, c, g, or t
  misc_feature (269)..(269): n is a, c, g, or t
  misc_feature (289)..(289): n is a, c, g, or t
gtttttctcagatgcagtgattttaagantcacatggagtgtttttaatgttctattccttccccccaacatacttgttttgttgggacctacaattctgcctttgctgggtgcagtggctcacgcctgtaaatcccagcactttggaaggccgaggcgggtggttcacctgaggtcaggacttcgagaccagcctgaccaacgtggtgaaacctgtntctgctaagaatacaaaaattggccgggcgtggtgacgggtgcctgtgatncccagctacttgggaggctnaggcaggagaatccgctttgattccgggaggcaagaggtt

SEQ ID NO: 607535 - DNA, 360 bp, Homo sapiens
  misc_feature (310)..(310): n is a, c, g, or t
ctaggaagccgctctgaccatgttcacgctttcgcgcgccgcgcgtttaccatatagagccggtctgtcttctagtcaccttggcggcgcccgggggtttaagggaagaatcccataatgctgaggctatggagaaaaacgccttagtcctggaccctgaaagaagccggtgagagaagtggtgacttggaatcctccataggaaagtgggtagaaaaggatctaagggtacctcaaggttctcaggacctcctttccccagatcttagggtcctgccctgtgggtctcctgtgtccaggggagaggatnctgggagtagaattgtgaagggcaaatccctgttcccggtggggatcctc

SEQ ID NO: 607536 - DNA, 104 bp, Homo sapiens
ctccctgggaggtgtttaatatccactgtgaataacactgatctggcattcccttccctggggcttgcaagggccttctggtccagccctagcctggcacagtc

SEQ ID NO: 607537 - DNA, 351 bp, Homo sapiens
cgtcgacaaaaggagccaagacgtttgggattcactccttcctagcatccaatacggtgacccatctctattatccagagttggcgcgtcagctctttgaattggctgttgaaatcaaggaaaagttgggcatttctctagactttatcaatctttctggcggtattggtgtcaattatcgtccagaccaggaaccaaatgatatcgccttgattggtgagggagttcgtaaggtatatgaagaagtccttacgccagcaggtcttggtcagattaagattttcaccgaattgggtcgttttatgttggcacctcacggtgctttggttacaagagtgactcatagtcgac

SEQ ID NO: 607538 - DNA, 320 bp, Homo sapiens
  misc_feature (39)..(39): n is a, c, g, or t
tgagagcaagatgcttgacagatgctagccttccatgcnccgttccctttccgagacagagtctcactttgtagcccaggctggagtgcagtggtgcgatctcagctcactgcaacctccacctcccgggttcaagcgattctcctgcttcagcctcctgagcagctgagattacaggcatgtaccaccacgcccagcaaatttttgtgttttcagtagggatagggtttcaccatgttggccgggctgatctccaacttctgacctcaggtgatccgcccgcctcgacctcccaaagtgctgggattacaggcatgagc

SEQ ID NO: 607539 - DNA, 602 bp, Homo sapiens
  misc_feature (325)..(325): n is a, c, g, or t
  misc_feature (393)..(393): n is a, c, g, or t
  misc_feature (406)..(406): n is a, c, g, or t
  misc_feature (448)..(448): n is a, c, g, or t
  misc_feature (457)..(457): n is a, c, g, or t
  misc_feature (464)..(464): n is a, c, g, or t
  misc_feature (470)..(470): n is a, c, g, or t
  misc_feature (472)..(472): n is a, c, g, or t
  misc_feature (486)..(486): n is a, c, g, or t
  misc_feature (488)..(488): n is a, c, g, or t
  misc_feature (496)..(496): n is a, c, g, or t
  misc_feature (537)..(537): n is a, c, g, or t
  misc_feature (541)..(541): n is a, c, g, or t
  misc_feature (598)..(599): n is a, c, g, or t
aagcctcgtcaaagcaaattataacgaccagtactatttttttttggaattgaaaacccaagaagccctaaaataagaacagtgagatcaaaggctggtttctaaaacaatgcagaaaatagaaccatgttggaattcctaaattctagctttcaaatactactgtttccaacagtgaatccttgacagagactgaatgcagatggaattttgaaacattttcagtagctacctcctctcctgaaattcctataagtggcagaggaaaatccaaatccctttaatataacatgttccatctcatgactccctgcttacacacatntgtgtttgatttgcttccatttctggaagatgggaatttgcagaactggtgacatttccctttattanaacacccgaaatnccccgaaaaaaacaattctgtgcctcccccttttaggattcnggttatganacctaanaaagtngnggtaaaaaatcccngngaccgccngttaaaaaagtgaattggaaaaaaaagggttccccaagttnaaanaaatttttgtttcccgaaatgccccaaaaaaatccctttattccggcccgggggttnnatt

SEQ ID NO: 607540 - DNA, 750 bp, Homo sapiens
tttctagtaccattcggtttaggacgcgcgtgccctaggtaggtataggtcgacacgatggtgcatagctggttatccgtatgagatccttgggtcgatcgacctagtgcttgtggattctcaaccgaataatacaacgcccggtgtgaaccagatgctgttctagagctaggtccaggatggaggttctagaggtcataacttggatctattcaatcgaggatttccaaggcgaggctcgtatatcaaattacgaccccgcccggggattgattcaatggaaggtagcatgctgaatggctaaatgggcaacaatttgaatttcccctgaaattttcttggacacaatgatggcacaagaaaaacacatgcaaaggcacacacaaggaaccagctggcaacgcacaagcacacatttcagcagacagccatttacacggtgatggcttgtggataacagcgactggctaaattgggccttagttatttcaggttgcctggccacggacaacctttcgccccaatggttgcattgtaccacaagagccctttggtgacagcagcacaggatttaaacccaggattggaaacgcagaggttaggacttgaacattgaaatacaggggggacaggcgaggtattatttggcatgggtggattgggctccacgagtagagttattgaaaggaggtttgggtagaagattggatggaccagaccagtagtggcacgaggcttggtacccgcaca

SEQ ID NO: 607541 - DNA, 155 bp, Homo sapiens
actcacacagagaccaaacttcttagttaacacatgtgaggcaatgtgcggtgctccttcatgttcctccttccgaatacttacaaggtaggaaatttcttattcagatgttcatgtgtatatgggggtgttatacacacacgcctatatacctt

SEQ ID NO: 607542 - DNA, 122 bp, Homo sapiens
aacattcgtgtactgggggtaccgccaattctgctccatggacatccggaaggacaggcagttgttgatagttggcataacattggccctgtagtcgtcaggtgcttgcctctctccagaaa

SEQ ID NO: 607543 - DNA, 332 bp, Homo sapiens
tgacacaggctcttgcttttttactcaggctgtgatgcaccggcatgaccatagctcactgcagcctcaacctctgggctcaagtgaccctctcacctcagtctcccaagtagttgggactacaggtgtgcgccgtcatgcccagctaatttttataagattttttgaacggcatctcactgggttagcccaggtttgtctcaaactcctgggatcaagtgatcctcctaccttggtcccccaaagtgctgggattataggtgtgagctcgcctcccggtcctaaatttagtcataaatttagccgtcgttctaaagttcccagcttaccac

SEQ ID NO: 607544 - DNA, 463 bp, Homo sapiens
cttgttgtaacatgggtgtattgaataatggtggaaattgggcttctagtgtacccatcatccaaatattaaacactgtacccaacaggtaatttttcaacgcttactgccgctcacactctttcccctattggagtccccagtgtctgttatctccatctttatgtctgtgtgtacccattgtttagctcctacttttaagtgagaatatacgcaatttgttattttttatgtctgaatttagttcacatagaataatggcctccagctctatccatgttgctgcaaatgacatgatttcattcttttttatagttgcataatactccatttatatatctctctctatatatatctcacgttttctttatccagtcaattgttggtagatacttaggttggttccatgaatttgctattgtaaatactgctgcaataaacatacatgtacaaataaaaaaaa

SEQ ID NO: 607545 - DNA, 478 bp, Homo sapiens
  misc_feature (400)..(400): n is a, c, g, or t
ctggtcgattacaggatccccgccgtacagttggagtcagcacgtgcctggagctgacaggcgctggtgtgtggccatgctcttatgtggcactcgggcagtccgctagtgcctcagcatgtcaaactccagctgtacgcacggagtctggagtccacaccagagcagctgcaggccatgaggcacattgttatgggcaccacctgtcccagcccctcacatcatctttggagctcccaggcactggcaagactgtcacgttagtggcggccattaagcaggtggtgaagcacttagcccaagcccacatcttgagctgtgctccatccaactcaggggctagactactctgtcaaaggctccgggtccaccttcctagctccatctaacgactcctggncccccagcaggacatccgcatggtacctgaggacatcaagccctgccgcaactggtacggcggggggtaccgagctcg

SEQ ID NO: 607546 - DNA, 144 bp, Homo sapiens
ccgagatcgcgccactgcactccagcctgggcaacagagcaagactccgtctcaacaaacaaacaaacaactcaaaaaacccttaactccatattctcttctggcacgacacactggcacgtggatccacaatggcacgtggat

SEQ ID NO: 607547 - DNA, 1467 bp, Homo sapiens
  misc_feature (940)..(940): n is a, c, g, or t
ttttttttggagggaatgtcagtccacctttatggggcgaaaccctgcaggggtaactggtttaaaataatctcgtggccctggccccacccatgtggcccgggggggctcaagacagatcatctccagctggccggggcatactccagatgagacctggtttgggccagtttctggtgggagggagaatgggtgggtggttcttcccgggtctttctgagcgtggctgggtctgggcaaaacactggtgagtaagtgttgtgtggggcgcccgaggacccacctctcgtctttctgggcggtgtaatgttctgtgtgctattcttattggcgcggtgtggtgttgtagaaagaagagaggagatctccgggggtgtgtgcctctcaggtgtgaaaaagcgagatctttctcttcagagtagggcctctctctcagaattgcacccccaggagcgaatctctcatttcgcccgtgaattaggtgttcagagagcagcgagagagtgtgtcacaggtgaacagaagaggggtgtgtagctctctctgcggagcgggggaaagtgtgtatcaccccttgtggcgcccgagggcaaaccaccttttgggtgtgttaagctgtgtcacactttcacaattcgagggtatattgtgccctcccgagggggcacccacgggggggtgccttgggaatgtgttttaagaccatgtgtgggcctcgtgagtaagtgtctccccttgtggcgagggtccaggccgcggctctccacaaaactctcccgggtgggtggggaaaacacctcgagaacaccaacgcgcggggttctcggtgggggcaaacagcacgaggtgaaaactagaccgggggaaccgctgttttttggaaaggtggcgccccaaaagagaaaggctgtggtggttggccatatatataagggcgacnttaggaatcataccgggggggggaaggctgtagcctcccccattgttggtacaattcaaaaaaaggctttatgacttaaggcatattttctgggaagactgatgtgggggccctacattgtttaagagccggccttctagaaaaacgagggaagggcggggcagcaacatcggctccgcacttgctggcagcacatcaaccaaagagcaaatcggcaccacccacagttggtggggcggcccccccgtcgaaattttcttccccaaggcgtcatgttggttcacacgcgggcgggcacccacaagaaaatttatcaaagcactgagacatggatatgggcgcgacaacgacgacttagtgggtggtccccccttgttgtgagggttcgtgcgccaaccaaaagcatgctttagggcgtcttcaccagagaaacaagaaccactatatgttgttgagatgtgctcgcaaccacacaggtttcagtttccccccggcagcatagttggcgttactatcaattcttcggg

SEQ ID NO: 607548 - DNA, 784 bp, Homo sapiens
tttctacttggagatggactcgtatcagaggctgcagcagctgcatgtggcgctggggtcaaaccgagccaaacatcccctgaggcatgccctctgaggggggagcaggctctgggttgctcctgctagcccccaggtggtggtgggcttgcccagtgcccagtacacatcatgcatggtcacaatgcctggcacccactacctagggtaacgccagcgcggtgggcccgcgaagcaacctacgggccaagcagaggtacttggagcctacagcaggagcggggaaccgcctaaggacggggagcacggaggcgagccaaggcttggactccatggggccttataaaccacgctagtagcgttgtgaagggcccggaggcgaagaagaggcacaaaaaccgaccattagggaggaaggactatagaaggcccaccagacaggccttggatactccaataggtgcgaagaaccaatagagccccacaatggtgcataggagccccagggggctggagaaaacgaccgcaaggacggtggaggggcacctccgcaaggcacaatcaatgcgcgtacgaaaggaagcgcaaacagagcaaacgtaggagaagctgaaatacacgccacgagtggattaggggcgcaaggaataaatacaaaagccacaaaccagacggcaacaatagaactgcgcgacataaacgcaactcatagaaagaggccatgaaacgcgaggcagacccagacgaaattagggccaaaagcagagcagccaggggcaaaacg

SEQ ID NO: 607549 - DNA, 386 bp, Homo sapiens
atacccagtctcctagtttaaggcttctccagtgtgtgcctgacctcctatgattgactaccacacacttgtcttagctctttatcagttctatcctcacctcccaccagagactgcaatcatccacagtcactgtccctctgaaatgagacccagctccagaacagatggcagtctgaacttccagtcctgggatagacctcataaagccattaccaggaagcagacagccagagagcaagcagagtgtacagggctagactacagcaaggaggggacagctattcttgatttcaaaacagatatcaccagaggacttttcgcagtagaaagcccacttagtaactaactgtgccccctacctagccatacaccctaaagatacc

SEQ ID NO: 607550 - DNA, 186 bp, Homo sapiens
atgcctctcgtcttaggtgggctggtggggtggggctggcagtgtgaagtgaggctcctgggctggagaatcacaggcagggcccatccgcactgtgctcagtgctcattcctcggacacccacacccacccagttcacttgtcagagcttggatttcatgtgcaaatgagttgaggggagaggaa

SEQ ID NO: 607551 - DNA, 391 bp, Homo sapiens
aaaaaaggtttttaaggacctaaatgggaaggtccaaattctttgaagggattaacgaaatttttaaaccgggtcaatccatttgaagaaaaagttgggcaaaataatcagcattgctccctcttttatttaatatttggggactggttttatccacctggaagttgaaggtaaggggttttgggaaatacttggatttactctgcttacctttttgtttaagtgtttacacagtttggttcaattttaaacaattggccctttactatgttatttttattttgtttgaaaaccttatcccccctatttatttttgttacaatttttacttatgttattttgttttgcatttacaaccccctttttaaataaagtgtttttgggactttta

SEQ ID NO: 607552 - DNA, 529 bp, Homo sapiens
  misc_feature (81)..(81): n is a, c, g, or t
  misc_feature (181)..(181): n is a, c, g, or t
  misc_feature (395)..(395): n is a, c, g, or t
  misc_feature (417)..(417): n is a, c, g, or t
  misc_feature (518)..(518): n is a, c, g, or t
  misc_feature (528)..(528): n is a, c, g, or t
caatcatcgcccgtttgataatgtcggcggcggttccctgccattggcgcgttaatggctgcacgttcagccgctgcacgncgagcaccattgctggatttgatatccggcagatacagacggcgtctggatggtgagatgagtgaaggcgagctggtggatgcattccgccatgtgagtnatgcgtttgagcaaaccagcgaaaccatcggcgtgcgcgcaataacgcgatcaacgacatggtgcgtcaacgtctgctgaaccgctttaccagcgagcaggcggaagggaacgcaatttaccgtctgacgccgctcggcatcggcattactgactactacatccgtcagcgcgagttttctacgctgcgtctttctatgcagttgtcgattgtngcgggtgagctcaaacgcgcanagaatgccgccgaagagggcggtgatgaatttcactggcaccgtaatgtctatgcgccactgaaatattcggtagcagaaattttcgacagtatcgacctnacggaacgtnt

SEQ ID NO: 607553 - DNA, 461 bp, Homo sapiens
gcacgagggcaaaaagcagccaagtcatctttttgttggctctgtttttgcagtgccattattgtcctggcaaattggaagaatttagacaaggaattagtgaattacacatgcatgtgtgttaataccctttcttttattactttttctttggtttttgaaatttaatttgctgacatttgaaaatatacctacaattacttgttactgaataactacttattcaaaatatcatggaggaaaatcacaagacctctaccgtgattcagtaactaaattatgttaatagctacctgaaatttcctaaagaaagtccaaaccaatggactccactaaatgatctcttagagaattactgcttatctctcattatgatggctggttaggataagagagtctgtgtcctcaagagcctagcagccatgtttaggggtgggctgtatgaatatatttcattgact

SEQ ID NO: 607554 - DNA, 570 bp, Homo sapiens
ggacaccttctgtgtacagagctctggacatgcattgtctgagctccacagaatgccccattatgcagatgaagaaactgaggccccaagaggtttgagagttgctcaagtcacagagcccaatttgacaggatctgatgcctgggcaggtgctccccttactcaatcctgccccgcagggtgaccctgtttgcagcacgatgtctgaagaagaggcggctcagatccccagatccagtgtgtgggagcaggaccagcaggtgagggctgcctctcccatggagcagggacagaaggtatcgtgtgggacagtcccttctaggagcgtttcaggccaggtatcccgccccaatcctctccttgctgggaaaacctgagtcataaaatattttggtccatggaggggatggtctatttcctagtgggggcttaatgaggccctgggaggggagtgtctctcaaagacacccagctggcttctgtggcccctcacaccacctgagtcccctctactattttttaaccaaatcaacaacaacctatttagctgttccccaaccttttcctccg

SEQ ID NO: 607555 - DNA, 397 bp, Homo sapiens
gagtcttgggatctgtcatctgatgctgtgtgggcacctaaggtgaatgtcatggcagaaagtgtcggtgcttagtgatggctgctcacctgtacaactcatgggacctttgccacatgagtgagctgcactgtgacaagctgcacgtgtatcctgagaacttcaggctcctgggcaacgtgctgttctgtgtgctggcccatcactttggcaaagaattcaccccaccagtgcaggctgcctatcagaaagtggtggctggtgtggctaatgccctgggccacaagtatcactaagctcgctttcttgctgtccaatttctattacaggttcctttgtaccctaagtccaactactaaagtgggggatataatgaagggccttgagcatctggatt

SEQ ID NO: 607556 - DNA, 652 bp, Homo sapiens
gggagcctcgtctcgatgctagcccgggagctacccgccgtcgtcgcccctgtccgggccagctaggattagcgcgctgagacgctgtggcttctgcgatgagtcgcctcgtgcccttcgagtcgacgccgagtagcacgtagggcctctaccggacgcagtcttctcgtccagactgccgattcgcagaaagccaggtgatcaccgttaatgcccgtagctgcctgtggaggaggcgggtgaggacttatggctaagaggctgagacaggcattccaaggggactccatcccggattttcgatgctgctgatcctgggggtgggccccgatggtcgacacctgcatcacgtcttcccagaccatgcccctcctacaggagcgggacgaagattgtgggctccgcatcatggtgactccccgaagccatccgacacagggtgtgaccctcacgctatctgtcctgaatgcagctcgaactgtcatctttgtgagcaactggagaaggcaaggcagctgttctgaagcgcattcttggaaggaccaggaggaaaacccgctggccgccggcctggtccagccccgacaccgggaaactgtgcgtggttcttggacgaggcggctgccgcctcctgaccgtgcccttcgagaag

SEQ ID NO: 607557 - DNA, 140 bp, Homo sapiens
atatcgtcgactgagctgaaggaatttttctcagtactactactaaactgaaaaaaagtcagcacttacattaagaaaattggctacaaggcccacacaggagcatttgtgccaatttctgcgtgcaatggtgacaacat

SEQ ID NO: 607558 - DNA, 437 bp, Homo sapiens
  misc_feature (5)..(5): n is a, c, g, or t
  misc_feature (32)..(32): n is a, c, g, or t
  misc_feature (77)..(77): n is a, c, g, or t
  misc_feature (208)..(208): n is a, c, g, or t
aaaanttccccccacttcattgacaaaggtangaacctggaagcccccctaagatgtccttatcaagcttgtttggntgtgggaacaaaagggacaagggtaataatagggcttgaaagctgtcaagtgggcaaacatcaaaaatggagtcagagctgggcacaagtggttcacacttgtgatcccagcactttgggaggccaaggcnggcagtattgcttgagaccgtgagcttaagacctgcctggagaacataggaagaccctatctctacaaaaatttaataattacccaggcatgatggcacgtacttgtagtcgtagctacttgggaggctgaagtgggaggatcgtttaagcccaggagtttgaggctgtagtgagctatggttgccccactgccctccagcctgggtgacagagtgagacctcgtccct

SEQ ID NO: 607559 - DNA, 402 bp, Homo sapiens
gccagaatgttcctgcgacaactatctgttgatggcctgcagaagtccattctgtattacgcggatgcttgcttggttgagtgtcggagggatagcatctacgtcgctgggtgcgtcagccttcccccctctcgttgcatgtgcgatatgcggcatattttcggtgcgtggctgattagtgaacgcggcgactggtcggcacgtgaccgatgaccgtcatagttgtgtctccttctcgttctgcacgactcatgccccgcatagcggacttccttcaagttgggggttggtagaactaccaacgatactaatcttttcgtgatgaacctcaccctacgcttctcttgagaatccgataggcctgtcgcgtcttttaaacaggattttctgtgcccttttcaa

SEQ ID NO: 607560 - DNA, 345 bp, Homo sapiens
tgcttagaggatcccgcagaggggtctccagatcacctaagaaaccccagacagagggtcccagactcacctaagacacccccagacagagggtccaagctcacctcagagacacccccagacagagggtcccagactcagctaagacacccccagacagagggtcccagactcacctgagaaatacccccagacagagggtcccagactcacctaagacacccccagacagagggtcccaaactcacctcagagacacccccagacagagggtcccaaactcaactcagagacacccccagacagagggtctcagccaacccaacagacacccctcgtgcgggt

SEQ ID NO: 607561 - DNA, 706 bp, Homo sapiens
ggtcccttagaggatgttgggccctaaaattaccttgccaagagataaataagtgggggttaaaacaaatcatgttataacaggccgggcgccccatggtttcggttgtgtttgcgcgccacgctttggggaaaaaaataaaattggtaaaaggcagccacatacccattcttgtggcaacaataactacaaagtgagtttgtatgtatatagagagacacgctgtttgcatcacatccgcaaggaggcaaatcattccagtctcttttaaaaaagactctccccactctcttcttatataaatctctcttagcaaaacaaaaaatctctatattctacattaacgcgcgtcttgtataacaatataaagactcgctctatgtaaactattttctctctcaggagaaactctcgtctgattatggagcgacatctttcgccgctgccgcaccctgagaagagaatctttttttcccacgggcggcacacgtgagatgtggaagaattctttttgtgtctatataaaagtcactgtgcagcaccaccatgtatgttcttaaaaagatacagtgaacacatattttcggagctctccctcatgccgcactggtgagggcccccctccctccatgaagaaaaaaatttagagacgtgtattctgaaaaaaaaacaacggatacttcttgttaaaagtcccacaatcgtc

SEQ ID NO: 607562 - DNA, 653 bp, Homo sapiens
gcacgaggttttccctactcttacatcttgtcatcatacgaatactcacctttggaaaccactgcaagcaatacatacccattcaagatcctaaattcagagttatcatatggaccaatcactgttcaggaatttatggaggttaaaaacgctctagtgtcttctgaagccatggagcagcatctaatgaaagtgagttaccacttgactgactagctgaaaattatgcactataagtagctcggaaactatgcttattaatcaataggaccgtcaactatttggtgtattcttcacatataggtgctttctaaataaaattttgaaagtaacttctaatcttgaatgtgtcttctactgaaaattttatgactatgtttgttcattctttttgctttgtggacttaaatcacttaccctttggttcgttaattttccaatgttctttctcatttttaatctatattactttaatattttctttttctatttatatttacctctttaattatttgccttggaataaattgtattgtatctataatatctcggttattccttctttctttatttatattatctttggttgtattagctgtttatttattcctctatattctatatattacttatacttattgttgtattcttca

SEQ ID NO: 607563 - DNA, 1149 bp, Homo sapiens
gtccaggtctgtgcattcatggggccgagagggtagaggctggcagttgaaaggaggaggccctggcgaaagagaggaggtccaggtgtcatcagtagcgtcgccaatcctcttgggctgaagcccggcgttcgcccagccaagggcatgtaccttgagccctgagggccttcatcggcagtggtcaggaagcccggagccattggcaacctcacgctccgaggtcttgacatctcagcttcatctcccttcaatgcgtccaggtagcagagacatgcaagacagacgaacagcagcctgcgccaagccctgtgagggcggtatgggatccgactacgccgccccgggaggtgccaatcaccgagagattcaacatcccggcgggaccacagaatgagcagtcttgtggctgttgcaagccatccgtaggtatggcaaagactttggggctattgcagaggtgattgggaacgaagactcgtgacccaggtgaagactttctttgggagctaccggcgccgctttcaatctggaggaggtgctgcacggacatgggagcgctgagcggggactgcgggcccctggaagccacacaagtacaccatgggaggaggctaggagaaggggctccataggcaggcaccgagaccctagaggaagatgatgaggctccagattgcactcgggctccacgtacgtgccccgaaaaaagggcgaaagatcgccaaaaaggaaacgagacacaaacacaccatgagagaccacacggggtacacacgcccacaccgccataaagggaacgacgacacagcaacccaacgacacaatatagctcggagagccacatacacatgaacacatacgtagcaatggacaacagagcaggcaagaacaaaacaacaaaaacgaatacaccgcacaaggacggcagagagaaccacaacaactgagggaggaccgacgacgagagcaactcaagaaggggcacagactacgaaaaagatacaacaagcgagccacacccgcggagacgacagctcgaggaagacgaaccagacgagagatcacacaacacaaacgcaacgcacagccacacacagacgcacgcgggagcacacacataacaagtgacacacgaacccccaacgg

SEQ ID NO: 607564 - DNA, 319 bp, Homo sapiens
  misc_feature (103)..(103): n is a, c, g, or t
  misc_feature (109)..(109): n is a, c, g, or t
  misc_feature (112)..(112): n is a, c, g, or t
  misc_feature (176)..(177): n is a, c, g, or t
  misc_feature (180)..(181): n is a, c, g, or t
  misc_feature (185)..(185): n is a, c, g, or t
  misc_feature (199)..(200): n is a, c, g, or t
  misc_feature (202)..(202): n is a, c, g, or t
  misc_feature (226)..(226): n is a, c, g, or t
  misc_feature (240)..(241): n is a, c, g, or t
  misc_feature (244)..(244): n is a, c, g, or t
  misc_feature (265)..(265): n is a, c, g, or t
aagctgagtgtgcagatgtgcgtttaacaacggacacccattcccaattcatgacttcccacttcatgactttgcttctttggagataattaccagctttggncaaagnacncactgagaaaactattagtttcctagttactaaactgcaatgtttgctacttttctatgaaggnnggnncctntaattagcacccanntnacagctgctgaaactcggccgcangtaacgcaggcccnnctngtgggttgtctttcctgcccnaaggtctgaagcccatctggtctgagtgcctagctctcttgccatcaatacccc

SEQ ID NO: 607565 - DNA, 83 bp, Homo sapiens
gggtccaaagagggtccggcacagagaagggctaaggctgactgtgacatcagcaggttgaaggagcagctcaaggctcgaaa

SEQ ID NO: 607566 - DNA, 911 bp, Homo sapiens
atctgttctggatctcaaacatgccttctttactattcctttgcacccttaatcccagcctctcttcgctttcacttggactgaccctgacacccatcaagctcagcaaattacctaggctgtactgccacaaagcttcacagacagcccccattacttcaatcaagcccaaatttcttcctcatctgttacctatctcggcataattctcataaaaacatacgtgctctccctgccaatcgtgtccgactgatctctcaaaccccagcaccttctacaaaacaacaactcctttccttcctaggcatggttagtgtggtcagaattcttacacaagagccaggaccgcaccctgtagcctttctgtccaaacaacttgaccttactgttttagcctagccctcatgtctgcgtgcagcggctgccgctgctttaatacttttagaggccctcaaaatcacaaactatgctcaactcactctctacagttctcataacttccaaaatctattttcttcctcatacctgacacatatactttctgcttcccagctccttcagctgtactcactccttgttgagtctcccacaattaccgttgttcctggcccagacttcaatctggcctcccacatttattcctgataccacacctgaaccccatgactatctctctgatccacctgacattcaccccatttccccatatttccttctttcctgttcctcaccccgatcacgcttgattcattgatggtggttccaccaggctaatcgccacacaccagcaaaggcaggctatgctatagtacaagccactagcctgcctcctccaaaactctaattcctttccatcgtggaatctatctcaggaataatgtctccaggtccatctgctgtactaaaattct

SEQ ID NO: 607567 - DNA, 270 bp, Homo sapiens
atcgtgtgcaccagcttgacctacagcagcattttttaaaggtagatttttggccacatttaaaaaaatcatattttttttggagtgctaaggaaaaaatgggtgacagtccagaaaatattataaagatgagtgggccaggcacagtggctcacgcctgtaatcccagcactttgggaggccaaggtggatggataacctgtggtcaggagttcaagaccagcctgaccaacatggagaaaccccacagcctgtgcaacacgaaataag

SEQ ID NO: 607568 - DNA, 351 bp, Homo sapiens
  misc_feature (182)..(182): n is a, c, g, or t
  misc_feature (292)..(292): n is a, c, g, or t
  misc_feature (337)..(337): n is a, c, g, or t
  misc_feature (350)..(350): n is a, c, g, or t
gaggcagggttgggagttggagcaggaagctgagggtcttgtcatgcccgcccttccttccacgtggctccaccaggctgccctctgggaaaggaggccctggaatgcccgcagcttcacagcaggaagagagcacggtccacgttgcccacaggttcctgctcaaatccagagtgagcctncaggacagccagaaagcccacccaaggtgcctcagcctggagctcacccaggacgcagagcaggtgcaggtgcaggtgcaggtgcaggtgcaggtgcaggtgcagacggnagacggacgcatcaggggcgtggtgtgaataacgccccgcttganaagctcaggcctng

SEQ ID NO: 607569 - DNA, 125 bp, Homo sapiens
acgaatcgagccggtaccgatactatacccacttcacaggccatccagaggagctaatgaattatgtaacctagcaaagcctggtacaaaacacacccgttggcctggatatgaacacatattcc

SEQ ID NO: 607570 - DNA, 345 bp, Homo sapiens
gtcaaaatacccagtaatgtatacttagattttatttatttgagatggaatctcattctgtcacccaggctggagtgcaatggcacaatctcagctcactgcaacctccatctctcaggttcaagtgattctcttgcctcagctcctgagtagcagggattacaggcatgagccaccacaccctgctaattttttttgcatttttagtagagacggggtttcaccatgttggccaagctggtctcgaactcctgacctcaggtgatccacccacctcggcctcccaaagtgctgggattacaggcgtgagccaccgtgcctggcccacgcaatgagtacagatta

SEQ ID NO: 607571 - DNA, 959 bp, Homo sapiens
acgcaggacagaccttagccaaaccatttatcgccatattgaaagtatagagcgatagagaattgaatcttggtgcaatagatatagctagcgccatggggaagagatggaaataatctaatacgcgcacgtcataattatagcaaggtactaacccaccttataccctatctggcaatacatgacattaagctagtacatatatctttgacaaggagtagccctaaaggctgaaggaaccgcgcgccgtgagagatccaggtaaacgagctctagcctaataggaacagtctaaagaagcatgacaacatccccggtactactgatagacaaacaataggtaggggacaggattttcatagcggtacggagcgaccgagcagaatccctagcgcgaagctcatgggtgtagtgagtccgtgggttgggtcgcataggtactaggaaatctttagttgggcatactgtgtaaagtttgcccacacgagaaatcgcgatcataagatgcacccgtttgggtaaaatttgttagaagctgggtatgaggtgccagatagagatggtacacacatgtgctgcatgttgcgagacgcatgcgtaaggaaaaacagaaagagccgttggaatagggaggaacgaggtaatagagaaacatgttaaaagaaagctcaaattacgttgatgggtcgcgttagacataggtctagggcgcgaccccaaaggtttcacatggaaagaggccggtgtacaaaggtccgttccaaaatcgacacactaagcgtaaactctgtaacacaaaatattccccctagaataagcacttagttacaaccgtggaagaccattcacgttccaacaaggcagcgaaactaaggggaaccaagaatccttactctaggactctagttaagaaaaggaaagcttgaaatggttaaggcaattaaaagctcaagcgatgg

SEQ ID NO: 607572 - DNA, 162 bp, Homo sapiens
gataccccattatgtttcatgcctgtagtcccagctacttaggaggctgaggcaggagaatcgcttgaaccctggaggcagaggttgcagtaagccaagatcgcaccactgcaccaggctggagcctggtgacagagtgagaccctgccacacacacacaca

SEQ ID NO: 607573 - DNA, 109 bp, Homo sapiens
gtgtatagtccagctggtaacctcctctgccgtcgccacctgtctgggtgccgtgtctccttcctgcctggccgtggtgcgtcctccccgtcatcgggcgtgtgcgctt

SEQ ID NO: 607574 - DNA, 293 bp, Homo sapiens
acagacattgaaactctttgcacgagctggccattacaatgaaagagagagaagccaaagagatgcatgaaaggaaacgacaacgggaagacagagattgaccctcaacgaaaaagccaacacgggaacagagagtggcagaacaacactttgacggaaacgtccagcatggctcgtgctggacacgcctggccgaaaccttccacagccaactaccgaacggggaacgaacagagaacgaacaaactccggacccttccctgacgcacccacccgacaacgtacaaaacctg

SEQ ID NO: 607575 - DNA, 216 bp, Homo sapiens
ctttggcttttgagggtgctccccccccagccccccccccccccccaaaaagtttcagggcaaaattgaacaggtttcgggaaggacccttcatgccagctaaaaaggctttgggcccaggaaaaaattgggcttcgggcaaaaaaatgtttgtgctatttagtactatgtaacaaatccctccaaaacttcattgcttaaagcccccagcctgta

SEQ ID NO: 607576 - DNA, 193 bp, Homo sapiens
agcggccacgctgaggcgagggtgacacaccatgctcacggcccctggagaccgtcgtgctggcgagccgtgctccgtagctccccggtccgcctcggcagcggtcagagtcgcctacaggagttgagccgcccgcgccagaaggttttggcgaagctcttggagaggcgtcgagcacagtagggcggcgggg

SEQ ID NO: 607577 - DNA, 193 bp, Homo sapiens
agcggccacgctgaggcgagggtgacacaccatgctcacggcccctggagaccgtcgtgctggcgagccgtgctccgtagctccccggtccgcctcggcagcggtcagagtcgcctacaggagttgagccgcccgcgccagaaggttttggcgaagctcctccagtagcaggacccggtctcgggaccagccg

SEQ ID NO: 607578 - DNA, 379 bp, Homo sapiens
ctgccctccaggttcaagtgattctcctccctcagcctcccaagtagctgggattacaggcacccacgagcatgcccggctaattttttgtattttcagtagagatgggtttcaccatgttggccaggctggtctcgaattccagacctcaggtgatccacccgcctcggcctcccaaagtgctgggattacaggtgcgagccaccgtgcccggcctctggttttgttttgtttttttttttaatgggggacaaaagagagggaaagacccctataaaatctatatataacaatgtaaccatatacttgcatgtcttaatacaaactgaagaattagcctaactgccatatcaagttggcagattttaatccatgggaa

SEQ ID NO: 607579 - DNA, 429 bp, Homo sapiens
gggctaggtacgaggctgggttgccagaaggccggcggaggagccggatctgagccgggaggcatggaagaagacggaggagcctgggcgacatgctacccacgtgaattgccctgtgcacctccttctatcgcccaatcgtgctcctgttcatcgctgcttccccgctgccgcaattgagaatggttgcctcatgggatgacggatgttccttcgatcgtatgactcgcacgccctttttacgactggcacgatgacggaatgtgacgtgctggactgcgcagtggaccctccatgggatgacgcaactcgccagtggtgcctgcactatggacttgcttgtgtggcgtcgggaggcgcttcgaggtcattgcttctggacgccaatccagctactgctgtagcccacatgtgtcagctgcggggtgg

SEQ ID NO: 607580 - DNA, 476 bp, Homo sapiens
ggctgccccaaacgcagagaggatctgttagtaaattttctatcaatttccttaaagatatgctaggaagttgttagtacttccaatccctcatccaaatcccaaaaagggccagccctgagaagcttacctgaaatatttctttccttctctcatggaagtccataaaagccacccctcctccttatcctttcaactgggcaactatagagtgagggagattctaattgtattaggcactttccctcactagttagatgttgacttttcctctaaaactccattttcagattccccctcacaaccagcagaaagatgactaccttgcttgactatgtttgtatttaaaccttgggggaactaaaaatctattcaaatctcatggacaaccttattttcctctctgcgtttcaaacgcagagaggagaggcagaggaaacagctttacaggacttttcttatcaaaatctgggaag

SEQ ID NO: 607581 - DNA, 357 bp, Homo sapiens
  misc_feature (23)..(23): n is a, c, g, or t
  misc_feature (67)..(67): n is a, c, g, or t
  misc_feature (76)..(76): n is a, c, g, or t
  misc_feature (91)..(91): n is a, c, g, or t
  misc_feature (100)..(100): n is a, c, g, or t
  misc_feature (116)..(116): n is a, c, g, or t
  misc_feature (126)..(126): n is a, c, g, or t
  misc_feature (148)..(148): n is a, c, g, or t
  misc_feature (157)..(157): n is a, c, g, or t
  misc_feature (192)..(192): n is a, c, g, or t
  misc_feature (216)..(216): n is a, c, g, or t
  misc_feature (218)..(219): n is a, c, g, or t
  misc_feature (226)..(226): n is a, c, g, or t
  misc_feature (246)..(246): n is a, c, g, or t
  misc_feature (249)..(249): n is a, c, g, or t
  misc_feature (253)..(254): n is a, c, g, or t
  misc_feature (262)..(262): n is a, c, g, or t
  misc_feature (271)..(271): n is a, c, g, or t
  misc_feature (276)..(276): n is a, c, g, or t
  misc_feature (285)..(287): n is a, c, g, or t
  misc_feature (355)..(355): n is a, c, g, or t
aaaaaaaaaaaaatgagaaaaangaataaaagaaatataaagaagaaaaaaaaaattttaatttttnaaaggaaanaaaaaaagaaaaganttaaaaaanattgaaaaaaatattnaataaaaatntaaaattaagagaaataagaanatatatagnagataagtaaaaataaaaagaaagattaaaaagangattatgaaaatgggagggaaaantnntttttantgtagggaattaattaaacnggnaatnngggtttanggataaganggganggggggggnnnagaaaaatggaagttaggtttaaagtatatcgattttatttattttttcgaaatgcaatttcaggggntt

SEQ ID NO: 607582 - DNA, 497 bp, Homo sapiens
  misc_feature (170)..(173): n is a, c, g, or t
  misc_feature (175)..(175): n is a, c, g, or t
  misc_feature (177)..(177): n is a, c, g, or t
  misc_feature (249)..(249): n is a, c, g, or t
  misc_feature (254)..(254): n is a, c, g, or t
  misc_feature (257)..(257): n is a, c, g, or t
gacatcttggtgaaggtcagtctatagaaggaagaagctgtagatggagatgtggtgttgcaagtctagagggatgaggtgtgggaaggtggaagacaagaagaagcgggataaccctgaagatgtatcatcgagactgggaagatcgggtgggaagcctttgcatcgcnnnnananggcacaggtgacatctttcttggagtggaccggtcggtgcaggccctgtagtccgccacagggctctgagcngcacnggncccgggtgctggcatctggtggagcggaccactcccctcacattccacaggcccatggactcactttggtaacaaactcctaccaacactgaccaataaaaaaaaaggtgggtttttttttttttttttttttttttttttttttttttttttttttttttttttttttttttttttttttttttttttttttttttttttttttttttttttgtgggggagaaaatgggcggcggagga

SEQ ID NO: 607583 - DNA, 273 bp, Homo sapiens
tgtctgacgtcggtcgctctgaggatcccggcaccattgtgctggcatctggtggagcggaccactcccctcacattccacaggcccatggactcactttggtaacaaactcctaccaacactgaccaataaaaaaaaaggtgggtttttttttttttttttttttttttttttttttttttttttttttttttttttttttttttttttttttttttttttttttttttttttttttttttttttgtgggggagaaaatgggcggcggagga

SEQ ID NO: 607584 - DNA, 519 bp, Homo sapiens
  misc_feature (170)..(173): n is a, c, g, or t
  misc_feature (175)..(175): n is a, c, g, or t
  misc_feature (177)..(177): n is a, c, g, or t
  misc_feature (249)..(249): n is a, c, g, or t
  misc_feature (254)..(254): n is a, c, g, or t
  misc_feature (257)..(257): n is a, c, g, or t
gacatcttggtgaaggtcagtctatagaaggaagaagctgtagatggagatgtggtgttgcaagtctagagggatgaggtgtgggaaggtggaagacaagaagaagcgggataaccctgaagatgtatcatcgagactgggaagatcgggtgggaagcctttgcatcgcnnnnananggcacaggtgacatctttcttggagtggaccggtcggtgcaggccctgtagtccgccacagggctctgagcngcacnggncccgggtgctggcatctggtggagcggaccactcccctcacattccacaggcccatggactcactttggtaacaaactcctaccaacactgaccaataaaaaaaaaggtgggttttttttttttttttttttttttttttttttttttttttttttttttttttttttaaggggggtttttttttggggggggagggggtggggggcgacacagggggggagagaaaggggggcgtgtgtaaaaccccaggttgccccaaac

SEQ ID NO: 607585 - DNA, 111 bp, Homo sapiens
ggggtggggggggggtaaaaatggttggcctgcataaggtggccttcccatttaagggccttttttgtgaatgaaagccctagtgtgatgagaattaaagagaaagccaga

SEQ ID NO: 607586 - DNA, 911 bp, Homo sapiens
atcgaggtggatggaaagcaggtagagttggctttgtgggacacagctgggcaggaagattatgatcgcctgatgcccctctcctacccagatatttctgtcccaacgtgcccatcatcctgggttggggataagaaggatcttcggaatgatgagcacacaaggcggtgagcctagccaagatgaagcaggagccggtgaaacctgaagaaggcagagattatggcaaacaggattggcgcctttgggtatccttgcgggtgtcacgccgcagagaccaaagtgtgggtgagagaggtttttgaaatggctacgagagctgtctgaagctagacgtgggacgaacaaaatctgggtgccttgtctgtgtgaacccttgcttgcaagcaacagcccttatgcggtgaatttggaagtgcgtgttaataaaatcctagtgtatgattactgcctcggccattatctaataatttacctaaagattacaaatcagaagtcatcttgctaccagttatttagaagccacctatgattattaccgatgtcaacccgtcgtggccccgcaggtccttttgacactgctctaaaggcctctctggatcccactgacacacaaggcgctaattcaggaattctaacttctgtctttctagaaagagaaacagtggcacttgtgtgaatagggcggactacttatacctaacatgtcggctaatatttgcacgcgaaggacctggtgggcccttacggcttacccgaacaactgtggatccctgggggcgcggtttgcgatggcaccaaaacccactctcgggcgacgtgggcagtggcacatagacggagtcgcagtgtgcaaaaactctcccgagtttgtttgtccacaacacaccggcgcgtcatactcttctctc

SEQ ID NO: 607587 - DNA, 476 bp, Homo sapiens
  misc_feature (170)..(173): n is a, c, g, or t
  misc_feature (175)..(175): n is a, c, g, or t
  misc_feature (177)..(177): n is a, c, g, or t
  misc_feature (249)..(249): n is a, c, g, or t
  misc_feature (254)..(254): n is a, c, g, or t
  misc_feature (257)..(257): n is a, c, g, or t
gacatcttggtgaaggtcagtctatagaaggaagaagctgtagatggagatgtggtgttgcaagtctagagggatgaggtgtgggaaggtggaagacaagaagaagcgggataaccctgaagatgtatcatcgagactgggaagatcgggtgggaagcctttgcatcgcnnnnananggcacaggtgacatctttcttggagtggaccggtcggtgcaggccctgtagtccgccacagggctctgagcngcacnggncccgggtgctggcatctggtggagcggaccactcccctcacattccacaggcccatggactcactttggtaacaaactcctaccaacactgaccaataaaaaaaaaggtgggtttttttttttttttttttttttttttttttttttttttttttttttttttttttttttttttttgtttgtgggggggggggggggggggggggggggggggggggg

SEQ ID NO: 607588 - DNA, 173 bp, Homo sapiens
atctctcgggacaactggcacagcgccgcaaaccggggggcaagagaaagcccttccacaagaagcggaagttttagtttgggcgcccagcttgcaacaccaagtttggccccgccgcattcacacaggtccgtgtcgggagggttcaagaattcccgtcccctgggttggac

SEQ ID NO: 607589 - DNA, 310 bp, Homo sapiens
  misc_feature (4)..(4): n is a, c, g, or t
  misc_feature (48)..(48): n is a, c, g, or t
  misc_feature (56)..(56): n is a, c, g, or t
cgangttgcagtgagccgagatggcaccactgcactccagcctgggcnacagagcnaactccgtctcaaaaaaaaaaaaaaaaaaaaatcttgaggcaatatttaaaccttcttctctagggctttccatttgatatgtattaatagttccaagatcttctacgctagtgttactaaaaatctgtcaactgattttgactaggagcttgttcaaaaaactcccaacattaactggttaccacggccttcagatgaaacaggagacctcaatactctaatcacacaccaagttaagttggctaaggcaagg

SEQ ID NO: 607590 - DNA, 212 bp, Homo sapiens
gagaagacgacagaagggcaactttaaaaaaaaaaaactaacactaattttttccctaattaaaaatgaagatctggccaggtgcagtggcgcacacctgttaaaccctgtctctactaaaaatataaaaattagccaggcatggtggtgcgttcctgtaatcccagctactcgggaggctgaggtaggagaatcacttgatcctgggagga

SEQ ID NO: 607591 - DNA, 546 bp, Homo sapiens
  misc_feature (471)..(471): n is a, c, g, or t
cacaccgccaccttggccagaccccacacccccggagccagaggaggagatccggggatcagatgatgaggagcaagaggacccggcggactacggcaaagggtggatatcatccagtgaaaatgggagacctcttcaagggccggtatcatgtaattagaaagctgggatgggggcacttctctacggtcgggctgtgcggggatatgcaggggaaaagattggtggcaatgaaagtggtaaaaggtgcccagcattatacggagacagcctgggatgaaataaaatggctcaaatgtgtccgagaaagtgatcccagtgacccaaacaaagacatgggggtccagctcatggacgacttcaagatttcaggcatgaaggggatacatgtctggagggtcttcgaagtactgggccaccatctcctcaaggggatcatcaaatccaactatcaagggctcccagtacgtngtgtgaagagtatcattcgacaggtccttcaagggttagattacttacacagtaagtgccagatcattcatagtg

SEQ ID NO: 607592 - DNA, 102 bp, Homo sapiens
cctttaaaatggttttcttgcacgctttattatacttaaaaacgaacaataaagaaactattttatccaacgttaggttttgttttcaagtgcattcattct

SEQ ID NO: 607593 - DNA, 1158 bp, Homo sapiens
atgggaagagggagggaaaagaagatgcaagcaaaaggttttgtttgtcttcttctcattgttttcttttcttcttttaccgccgcgttttttttacgatgtattccactatttttttatttctcgtttctgatctgtttcttatttttcttgtttttgcagatggggtctcctcttggttgctctcttgctcttctgtgttgtatctctgtttttttacccgtcccttttcctgccggttttccttgtttctcctctgtctttcacttggtttgcttatcttagttctctagttctgctgtcatcctagcgtgatctctttgttcgcacgaattggtgattgcatgatcaattctgagcagagtctgatgcttagttccgcagctttccattgagaagtcgttcttcgttcccgtaatagcattccttaatgacctgcttggctcacatgtcctttctacattagggaacgtatctgctatgatatccacaaatttttcagatagtgccctttaaacaattcttatatgcctcactgcttgttattcttaggttattcccacacttgactttatcattgtttactactagtaaaaagcaccattgcctaataatccctaattgttccactaagaaatataatgaaatgatgttaagctttttgaaaagctttaggttaaacctactgttgcttagattaatgtactttgcttgcttccctgttatctggaatgtggcattagcttttgttatctttaaccctcctctaattctgtattcaagttccgatgacgttaaggttggagagctaaacacgtgggatctctttggataactagacatgacagttttgcatcaattataatcggcattgtacatagacaaggatatcggctaccttattgtctaaatctgcactttcctaaatatcaaaaaagggaaatgaagtataaactcaatttttgtactcaatctcgttctcgaaacactgacgttttagttctgcgttaatatatagggctttgccccttttctgtaacgtctcttgggatcctgtgtatgaacgctgttctcattaaacaccatacagttaagtccattctctggtactagctactaattcgtattaaactcgagctgacattatactttttttct

SEQ ID NO: 607594 - DNA, 339 bp, Homo sapiens
accatacattaatgcactgctggagagaattaaaagaaaagttatgaacaccagaacagaggaacctgatcgggatgaacgtctcacaaaagagaagcaagaaagacgaggaacgagaaaaagagcgggagagagaaagagaagaacgggaaagaaaaagacgacgagaagaggaatgaccgggaacacatgaaagaagctcgttgacaattaaaatataatatacaaaaggtgtgttttactcttgtagggatattatcccctattgtgtgtggagggtgtcaccacattctcacgcgctgtgtgcgcacctgtgtaccgcgcgagagtatctgtgag

SEQ ID NO: 607595 - DNA, 135 bp, Homo sapiens
tagctggctcctggaggataaggcgtggtgctaataggtggaggtacgtgaggatacgtaacggttcggcaagtcgtctgtccctattgtctaggtgtttaatattgacttgattggtacttgtgtctatcacag

SEQ ID NO: 607596 - DNA, 183 bp, Homo sapiens
tcgtgtctagcgaaactctgtacacgggaggcatgcaccgcagtggtgaatacacgtcgaccaggctccatgttaacgatatttggacagtcatcacggttctcacatattgaaggaacatgtctagggagacatgcatcgcagtcgtgaatacacgtcgagctggaggcatgccctgcgatg

SEQ ID NO: 607597 - DNA, 171 bp, Homo sapiens
acctatatggacagaacggttatcctgatatcaccactaggaaaacactggccaacaaatttgattagtccggttcacgtgataaacgtaagttcaacctcgtatgcatgcttcttagatttttttttttttatattattttttttttttattttttttttttttactttt

SEQ ID NO: 607598 - DNA, 316 bp, Homo sapiens
  misc_feature (86)..(86): n is a, c, g, or t
  misc_feature (148)..(148): n is a, c, g, or t
  misc_feature (238)..(238): n is a, c, g, or t
agcttcctggtggccaagccgaggttagaagctagttctggtgggtgccgaaagcccccgatgtcggcagctctgccaccaggccngcacaagcaggtggtgtaagaggggaggcgttggggccggcagtgctcaagtcaggattgancccgtctatctggaaggtctgttgagggtgtgtgctggtggccggaggtggtggcaggctgactacctgccattttcctgcagtgcctangcccaggagagggagcagcccccggtcaggacccagctgcaggacaccccatcctcatggaccttgcttcccgctctc

SEQ ID NO: 607599 - DNA, 807 bp, Homo sapiens
  misc_feature (32)..(32): n is a, c, g, or t
tgttttatgttggttggtatcacttacaaagntgatgtcacccccttccactcgccaagtctgctgcccaagttctagccaatctggtgccctactacccagctgatgtctgaatctgattggaggaatcttggaagccaccagagccagggatgggtccattatatgatccatgaaccagaacctcacatcttgctgttccggcgcccactacccaagaaaccaaagaaatgaagctggcaagctacttttcagcctcaagctttacacaggtgtccttagttcctaacatctttctgataacattattacgtcgccttcttttttctcactttgatatttaaaacaggttcaatacactggttgaatgtgctggtaactcgctttgctttttgagtacacgcatcaccaccatacccgatccagaggaccgctcgtgttggaccgcaagcctagtccgcccgagaccccctacgccacgattagctcgcggcgtcggaccgcccccggaccatggtagccctccacgcccccccgctgcaccgtctcgcaaagccacaatctcgtaagacccacccgttccatatctcccccgcggcggatgcttcttcgctccatatctccccgcactcataatcgggctcccgagcccgtcctgtgccgccctccccgactgctcagtcgccccggcgccgcttagtcggcattccctccgctcgcgagacattacccagtcgttttccggccgccccgccaccatcccatgtcttccggtacccagcgcagcgagaatatcgcgttcgctct

SEQ ID NO: 607600 - DNA, 216 bp, Homo sapiens
gggggaaattttttttttaaatggccccacctcttggggggtgtttttttgctggggcctcccaaatatttctaaaaaaacccttttttttttgggaaggggttaaaataccctcccccccctttttttctataaaaagaattttgagggggttcccttaaatttttttccccccggccctttttcccctttaaatttaaaattaagtggttttta

SEQ ID NO: 607601 - DNA, 888 bp, Homo sapiens
gactgactctcttttcagactcagcccacctgcacccaggtgaaataaacagctttattgctcacacaaagcctgtttcgtggtctcttcacactgacgtgcatgaaatttgttgccatgacttggatcgggggacctccctttggagatcaatcccccatcctcctgctctttgctccgtgagaaagatccacctatgacctcaggtcctcagactgaccagcccaagaaacatctcaccaatttcaaatccgtacaagaaggcaggaatgtcaggcctctgagcccaagccaagccatcgcatcccctgtgacttgcacgtatacgcccagatggcctgaagtaactgaagaatcacaaaagaagtgaaaaggccctgcccggccttaactgatgacattccaccattgtgatttgttcctgccccaccttaactgagtgattaaccctgtgaatttccttcccctggctcagaagctctcccactgagcaccttgttgacccccgaccctgcccaccagagaacaacccctttgactgtaattttcctttaccttcccaaatcctatacaagggccccacccgtatctcccttcgctgactctcttttcggactcagctcacctgcacccaggtgaaataaacagtttattgctcacgcaaaaaaaaaaaaaccacaaacgaaaagaacattttgtggccgagcacaggagccgcagaaaaacgatctcaaacacaagcgattgcgatcgggggccaccaacggcaagagacaccggcgcaaagagggccaatgagaaaaccgaggcagaacaggcgcggaatcaccaacaaaacccccgggcgcaggaagcttaacaaccaggagacacagcgacaaggagcca

SEQ ID NO: 607602 - DNA, 369 bp, Homo sapiens
  misc_feature (132)..(132): n is a, c, g, or t
  misc_feature (174)..(174): n is a, c, g, or t
  misc_feature (179)..(179): n is a, c, g, or t
  misc_feature (257)..(257): n is a, c, g, or t
  misc_feature (297)..(297): n is a, c, g, or t
  misc_feature (313)..(313): n is a, c, g, or t
actgctgctgggatcaggttgaatgaatggaactcttcctgtttggcctccaaaacagcctaaaaattgaggggctgtgtttgaggggaccctccccctggggaagtccgaggggctggggaagggtttttnacgcccagcctggagcaggggggccctggccacccctgttgntcacncattgtttggcagcctgtgtccccaatatttgtcagtcctcgacagggagcctgggctccgtcctgctttagggaggntttggcaggaggtcctttcccccatccctccatttggggntcccccaacctttgcncagctttccaggtgttgagatataatgccccagcccaataaacctttattccggca

SEQ ID NO: 607603 - DNA, 152 bp, Homo sapiens
tctagaggatccgagtgaccttctgctctggttgggaacttgccgtgatttttctagcagataggtctcacatgttggctcccacgatgtaaccctgtgacgtcgaagttgatgcggataaatttgccgaatcgtgaggagtagtcgttctt

SEQ ID NO: 607604 - DNA, 738 bp, Homo sapiens
cctttcaacaattcctgttgactccaacactcctttgaccacttctactgaagccagttcacctcctcccactgctgaaggtaccagcatgccaacctcaactcctagtgaaggaagcactccattaacacgtatgcctgtcagcaccacaatggtggccagttctgaaacgagcacactttcaacaactcctgctgacaccagcacacctgtgaccacttattctcaagccagttcatctcctacaactgctgacggtaccagcatgccaacctcaacttatagtgaaggaggcactccactaacaagtgtgcctgtcagcaccacgccggtggtcagttctgaggctagcaccctttcaacaactcctgttgactctagcagtcctgtggtcacttctactgaaggcacttcatctcttacacctactgaaggtaccagcatagcaacctcaacgcctagtgaaggaacacctccattaacaagtatgcctgtcagcaccacaacagtggccagttctgaaaccaacagtctttcaacaactcctgctgacaccaggacagctgtgaccacttatcctcaagccagttcaactcctacaactgctgacggtaccagcatgccaacctcaactcctagtgaaggaagcactccattaacaagtatgcctgtcagcaccacaacagtggccagttctgaaatcaacagtctttcaacaactcctgctgaccccagcac

SEQ ID NO: 607605 - DNA, 172 bp, Homo sapiens
cacagtatgccatccactgattggggaaaaaactagatgatacaacatgatccctgttgtgtaagggatagttaaggtcatactaggagcaattaggagccatatgcctgggctgagaagagctaggcagtagtgaccttaggatatgagtaaactcaccgaacaatgccaa

SEQ ID NO: 607606 - DNA, 451 bp, Homo sapiens
  misc_feature (179)..(179): n is a, c, g, or t
aaggtggcctgggtctctctgctgtcactgaaggggttggaactgaattacctgcaagaaaacaagaattataatgttctcctcatcgtctgtgaagtgagtaggaaatacagaggacaaaagcaagaagaatctctcctactaagtcttaaaaaaataggacagcctgtcaaatggcnagggccatgagtggaaaaagaaacaactattgacactgggggccctgatttctcccacgcacatgtgcgctgctgaaaccttccctggagccattccctcacagcttccagaggttgtgggggcatagcaggtgagcctgacacagattccccatgacacaagttacaaacagtgtgaggaacaccagaaaataattatcctcccaaaaaaggaattatgagtgagaaaccaaaataaacatcttcaaatgttcaaaacgattaaaaaaaaa

SEQ ID NO: 607607 - DNA, 237 bp, Homo sapiens
cagcactaacacacacagcctacacaccagacacatcaaaacgcgatacgatatcttaaggtgtaaacctcagcttggaagaaaaaacaaatgagacttatggaaaattggaagctgtgcagtataaaactcaagttgttggtggaacaaattactacattaaggtacgagcaggtgataataaatatatgcacctgaaagtattcaaaagtcttcccggacaaaatgaggacttgg

SEQ ID NO: 607608 - DNA, 975 bp, Homo sapiens
gctctacttgaatcctcccctacgggtccgcccccaatgtctgatagatgttgtggatggtctggttgttctgccgggagacaaggtgataacatagatttacgtgaatacgtaaacggtgtctaagaatatgaataattctaacccaatgacatgacattcttagagctgtagacctcagctagacaggggccatatttccagcagcgcattgagagtagctcccatttcggctctaggacattttagtaggcttgagcccatgcgtcttaatcggcagcatgggtggacgacaggatctgcagggctctgcctgaaacacacattagcaagcttcacaggttgtgcctcattgtagatgtctcttgtgtctgaaactagatagctttactcggacgtcatgcatcattggatcgttcagtatctgcgaattatcgaaggggtccttgggactgccctgtggggcttccccagggtgggccatggagagtggggtgcaaagggaaggtaaacaggacacgactgattgtcttgtcgaagagatggtccacgggacctaagacggctcaggggccggagaggagaaatcacctcgcagaagcccatacaaatccaggaaagcagtggagctgccttggagtgctagtccgaacctgaagaagagaagcatgctgcgaggcttgtagtccaatcgaaccagggtgattagcgaccgattgctgcgaggactccaaagccgcaagcgtacgagtagacacacgacaaccgtaccgttgacaacgcgaagcccagggggccaagtgtcaaaatagagcagcatgcaagggctggatggggtcgccgaagaccaacccggggcaagccataggcgagctaggccgaggaccagcgagtggaaaagctaggatcccaagcgccgatacctggccgggggagtaacacccctagaccgactgggcgtcccggcagaaagac

SEQ ID NO: 607609 - DNA, 1188 bp, Homo sapiens
gaggcagatatcggcggtcccgcagggtctgtctcattgcttccaacagtgtaatgagacggaaccagatccaggtggaatctactatccagacctaccgaccgcacctccgatatcactcatccgctatgacaacactaccgggaaccatctatctcggccatctcctgcataatctagggacctgccaagcaaccgtacaaaacgtaggttcagctcctatcttgccaaaccaacacatagaacctcccaagatctcgtccggcacttcattccaccagactgtgaagcgcaagccgtcaacacagcctagctcacacatcaggtaccttgcaaggcccatccctacaccctaccctctactctgcggactaactattcccgcaccgccaatgcatactgacctctcggacacggacgtgacccactacctaccagcacaaattaggccccgcacgcaaacaagccgccagcaggcgaccacacagccggtcccccaggaacgatcgcacaacaacccagccgatgccagacccccagccccaactacccaaggacacatcacagacacccacacctgcacgcacaccacccacacaaaaaaccccccaaaaacggccacatcaacacgctacccagtggcaccccgcacggacacaacagcatgaaaccccaagccccataacggacaccccacaccagcccccagaagaaacagacacagcacgagaacccccaagcctgccgacaaacacccagagcagcacccaccaacaatagctcacccaactcaaccccacactaccgaacatcggcacacccccgagaccaaacatcccccagcccgactgtcgccctgacccacgacaacgcacagccacaccccccaccggacaccgccccccccgccacccacgccccgccccctccccccacgcagcgaccattacaaacgacccacgcccggcagcgccacgccccacaaacaaacactaatactaacacacactcttcccctcacaacaccagcaccacaaaccccccaaacaacacatacaccccccacaccacccaccacaccaccccacacaacctcaacacaccaaagccaacctccacccccccacccccacccctactatacacccaaccaccaccatccacacaccccaccccatcagtcacttc

SEQ ID NO: 607610 - DNA, 458 bp, Homo sapiens
  misc_feature (4)..(4): n is a, c, g, or t
  misc_feature (24)..(24): n is a, c, g, or t
  misc_feature (34)..(34): n is a, c, g, or t
  misc_feature (68)..(68): n is a, c, g, or t
  misc_feature (79)..(79): n is a, c, g, or t
  misc_feature (132)..(132): n is a, c, g, or t
  misc_feature (456)..(457): n is a, c, g, or t
aatnattttttttgaagccaaagntcttggtccntgcccccccaggtggagtaaaaatgcttaggaancatggccccantgtagccctcaaaccttcctgggctcaaaatgatcctcccacttcagccttcntgagtagctgggactgcaggtgcacactaccacacttggctaattttttaatttttttgtggacacgaggtctccctgtgttgcccaggatggtcttgaactcctggactcaagcagtcctcctaccttagcctccgagagtgctgggattataggcgtgagccagtgtgtctagctatatatttattcatttattttgtttgttttaaacataattttttttttttgagatggagtttcactctttttgccactgcacttcagccggggtgacagagcaagattccatcctcccaccacccctgcccgcccccacccaccccnnc

SEQ ID NO: 607611 - DNA, 1268 bp, Homo sapiens
  misc_feature (917)..(917): n is a, c, g, or t
ggagtgcgagaacgacccccggatcgaccaaagcccgtgcgccgtgcatcccgcgtccgagcacactagcgtccctgctgccgtctgcttcagccgacacacagtgcccaagattggaaatggcgtgcaatggcggatgcttgaacggcgagataagaggctagatagggtgaacggacggaacccacagcagaaagatcctgagcaggctctgtctgcttaaaccctgctccttccacagcactagagcccgagatgccttaaaagaggctccccttgcaacagtacaagggacgaagagaggtaacccagaatgggtaacatagacgggaagagaagctgagtgcatggaccacgggaaggggaaagtaacccgtgcggagacaactggaagatgccaagagatcatgaaccatggctaaccacgtaaacgtcgttgataggctgcctggaagaatgccaagctgaaagtgtcgtgcacttgtaagtgagtacacgtgtgtactttcctggatgacttggtacaggttgtgacaactacttagttctctttgtatcaaaaggtgttctagtaccaaatatgccagtaagtgtgtagttaatccaacgttgtatatgttgcattttcgccttgtataccacataggtcccatatcttatgtgtgtgttgatgacaagcgcaccatgacacaacgaactcttctccaactgtcgcgctgtcgcttgccatggtggagcgcgcacaaaaagggcgaggaccaatatgttgtctcccgccataacttccaacacaatgtgtggtcccactcccccaacaaggatggcttgtgccgacgaacatgtgggaaacccggttttgcgagatcgaaaaccgataagccaccccagttttctgcgcccctttactctttcaaggngtctaatcgcggtgaatgcaaagacagagctttttacccgcgcgtaagtgacggtggtgccatacctcccaagaggagattaacgtagaaacagacgggaggcacttcccatccccggtttcgcacacatttgtgggtgcacacatcaccattgcacgattggtgacggctaacaacacccaatgttgttggggaccattctacatatacacacacagcgcactgttctggcgctcgggaacaataatgttgcggcgaaccacatcagcaacgcacgccaccgtgatcgttgaggggatggtaccctagcaaagatggtgtggcaccgcgacaactatgggcagcttcgaa

SEQ ID NO: 607612 - DNA, 337 bp, Homo sapiens
aggagaatccagaaatatggcctcagagctacactgtctagatcttcgacagagctgacaaaacaagcaagtgaggaaggaattccctatcaataaatggtgctgggataactggctatcacatgcaggagaattgcttgaacccgggaggcagaagtggcagtgagctgagatcgcgccactctagtttgggtgacagagtgagattccgtctccgaaaaaaaacgcgaaacaccaagaaagaaaaaacacaatttctacgggtcctcagggtatcatatcagtgggagggctcctaagaatgtgggaagattagcgggggacccctcatagagtc

SEQ ID NO: 607613 - DNA, 482 bp, Homo sapiens
attctcctctggtgcctctgctacttcaccatcccacaccaacttctctctttgctattaaagtctactaataacaatggctcacatttattgagtacttactctgccaggcactgtgcgaggggctctacatatattagcttttgatcctaacaaaatcctgaaaggttgatgttatcctcactttacagatgaggaaactgaggctctgaaaggcttgcaagtgacagagcaggaaccagaacccaggtttctctgaatctcttaccactataccttactgcctcgtggtatatgccacctgttgaaacatggctttgtaatcatcttcaccccgagagaactgtcattttgcagaatgcagagactgagtcaaaatattaataataacaacaactacaactaccaccaccacccaccaccacgacccaccgtcagaatttactgtgcacctactgttgccaagcactctatttttgtgc

SEQ ID NO: 607614 - DNA, 735 bp, Homo sapiens
  misc_feature (19)..(19): n is a, c, g, or t
  misc_feature (227)..(227): n is a, c, g, or t
  misc_feature (233)..(233): n is a, c, g, or t
  misc_feature (264)..(264): n is a, c, g, or t
  misc_feature (270)..(270): n is a, c, g, or t
  misc_feature (274)..(274): n is a, c, g, or t
  misc_feature (291)..(291): n is a, c, g, or t
  misc_feature (354)..(354): n is a, c, g, or t
  misc_feature (382)..(383): n is a, c, g, or t
  misc_feature (385)..(385): n is a, c, g, or t
  misc_feature (393)..(393): n is a, c, g, or t
  misc_feature (422)..(422): n is a, c, g, or t
  misc_feature (431)..(431): n is a, c, g, or t
  misc_feature (444)..(445): n is a, c, g, or t
  misc_feature (466)..(466): n is a, c, g, or t
  misc_feature (470)..(471): n is a, c, g, or t
  misc_feature (499)..(499): n is a, c, g, or t
  misc_feature (511)..(511): n is a, c, g, or t
  misc_feature (515)..(515): n is a, c, g, or t
  misc_feature (526)..(526): n is a, c, g, or t
  misc_feature (529)..(529): n is a, c, g, or t
  misc_feature (538)..(538): n is a, c, g, or t
  misc_feature (542)..(542): n is a, c, g, or t
  misc_feature (551)..(551): n is a, c, g, or t
  misc_feature (553)..(553): n is a, c, g, or t
  misc_feature (556)..(557): n is a, c, g, or t
  misc_feature (576)..(576): n is a, c, g, or t
  misc_feature (578)..(578): n is a, c, g, or t
  misc_feature (598)..(598): n is a, c, g, or t
  misc_feature (604)..(604): n is a, c, g, or t
  misc_feature (611)..(611): n is a, c, g, or t
  misc_feature (625)..(625): n is a, c, g, or t
  misc_feature (628)..(628): n is a, c, g, or t
  misc_feature (653)..(653): n is a, c, g, or t
  misc_feature (703)..(703): n is a, c, g, or t
cgagagtcgggggcgaggnctcccccaccgtccccctgcccccacgccacgtcgcccagcggcatcgtggaaagaggattctcccatgcaaaccccggagccagaggagaaggggaagcgccattttgcgccccctacccccggggcacggacacggccacagcacggggggcggtgaggccccggggacacgagaaaggggggagggagaggggaccccgcccgcngatganccgggggaccggcgaccggacgcggcggggnggagcngagnggcacagggggcgaggnttgtggcagcgagtgccccctcccctcctttcggacgaagaaggaagacttgggctccgcgantgggcaggaaaaaggggagggagcggcnncngcccgcangcggcccgggagggaagccccgccccctncccgcgggngaaggacacccgnntcccaacagagactgatcaanaaannacaaagtagagaaaaggaaagcggacgngtggggcgggantgcntcctccccgcntcntccccctcngagngcagtgcangnggnngggtccaggccccggcccngngcgaggggggcgcgcgcgcncccgcnggtctgngcagatggtccagntcncggcgcgacgcccccgcccgcgcgncccggcgaggccacaaggcgggcaggagagggaacagcccagccgcgggnaagaggcggccgggcgatggagggcaccggga

SEQ ID NO: 607615 - DNA, 284 bp, Homo sapiens
acacagatttccttcagtaatgaagcatatggaagaccgagagaggcttgtaccttgggagtgcaaggaaatacatctattagtgccccttttggcagcaggagctcagacacacccatagagtcttaatgacgatcatctaattacctgcttaccattaactgagaattataaacaagttggcctaaaaatgtgccatgcgatgacaagcaaacatgcacagtgactgcaacacaattcatttctgactgacattcctttctgcaactgcggtgacaccacaa

SEQ ID NO: 607616 - DNA, 895 bp, Homo sapiens
  misc_feature (114)..(114): n is a, c, g, or t
  misc_feature (705)..(705): n is a, c, g, or t
cgttctgccagtgtctctcgatattttgttcttgttcttatgtaccgcattatattacaatttcacgtattcatattggacaccacaccctgctgctttgcctacattgcccgnccactgccccgtgcccacatcaaggagtatttttacaccagtggcaagtgctccaacccagcagttcgcctttgtcacccgaaagaaccgccaagtgtcgctgccaacccagagaagaaatgggtttgggagtacatcaactctttggagatgaggtaggatggagagtccttgaacctgaacttacacacatctgcctgtttcttgcttgctcttgtcctagcttgggaggctctccctaactattctaccccacccgctccttgatgggtccattttactaccacacagtagaagttacataaaccttccgtaggcatggacgtgttgtatcatatcttgtattaccagcactttcgttaggccatagccgccgcatcactcttatgtccctgacttttttactaggcatttcattcctgagtgaatcctattccttactaatactcccttacatacctatgttcaagatctctctcttctgtatattccctcttctttttataccctgctgtaacgttattgtaaataacaccctatatacataaatctttctattaatttatttacttcctactaatatctaaatcnggagtagatttatattaattttctctctcaaaaattctaatttggatttattaagttttcttcaacctattctctcttctcgtatcctatatttatctttttctaccacatcattcctgttttttctcgacatgtccgccatggcatttttagatgttccagttattgttactatttctttgcgctgact

SEQ ID NO: 607617 - DNA, 126 bp, Homo sapiens
atctatgtgcagaagatactcacgtgagataggtgctgatgtattgtggtgagacacacaaacatggcgcggtaccatgggatacccagtgatgaccatatgagagggcttctattggcaaatgta

SEQ ID NO: 607618 - DNA, 931 bp, Homo sapiens
  misc_feature (50)..(50): n is a, c, g, or t
  misc_feature (60)..(60): n is a, c, g, or t
  misc_feature (99)..(99): n is a, c, g, or t
  misc_feature (111)..(111): n is a, c, g, or t
  misc_feature (150)..(150): n is a, c, g, or t
  misc_feature (741)..(741): n is a, c, g, or t
tggacctcgcacagcctctcccacaggtaccatgaaggtttccgcggcancctcgctgtnatcctcattgctactgccctctgcgctcctgcatctgcntccccatattcntgggacaccacaccctgctgctttgcctacattgcccgnccactgccccgtgcccacatcaaggagtatttttacaccagtggcaagtgctccaacccagcagttcgcctttgtcacccgaaagaaccgccaagtgtcgctgccaacccagagaagaaatgggtttgggagtacatcaactctttggagatgaggtaggatggagagtccttgaacctgaacttacacacatctgcctgtttcttgcttgctcttgtcctagcttgggaggctctccctaactattctaccccacccgctccttgatgggtccattttactaccacacagtagaagttacataaaccttccgtaggcatggacgtgttgtatcatatcttgtattaccagcactttcgttaggccatagccgccgcatcactcttatgtccctgacttttttactaggcatttcattcctgagtgaatcctattccttactaatactcccttacatacctatgttcaagatctctctcttctgtatattccctcttctttttataccctgctgtaacgttattgtaaataacaccctatatacataaatctttctattaatttatttacttcctactaatatctaaatcnggagtagatttatattaattttctctctcaaaaattctaatttggatttattaagttttcttcaacctattctctcttctcgtatcctatatttatctttttctaccacatcattcctgttttttctcgacatgtccgccatggcatttttagatgttccagttattgttactatttctttgcgctgact

SEQ ID NO: 607619 - DNA, 93 bp, Homo sapiens
gattagaagtctctatttaatttttttgtggaaagatgtgtgcaggatgcatgcatgatatacagaccaacttttggggaatgcctgtgttct

SEQ ID NO: 607620 - DNA, 288 bp, Homo sapiens
tgcatgactgcaggagtctgaatattctctgaatccgcatttaatatatggtgtgatttctcccatagccaggattcacaggtccaggaatcaaggaggtaaaaatgcaaatggctcccagctactcaggaggctgaggcaggagagtcactcgaacccaggtggaggaggttgcagtgagccgagatcgcgccattgcactccaacctgggcaacaagagcgaaactccgtctcaaaaaaaaaaaagttatatatttatatatagtcgtaatttatgcagctggtca

SEQ ID NO: 607621 - DNA, 779 bp, Homo sapiens
cgggcggacactcttgtggatccggagagtggtcgggccggcagagcagtggggccgaggacaccagtgtctgtatctcagagccgatgggccgcggagactgatctagccgccatggattggatgtgcttattcatctataatcacaaggtgggcaggtgctcatctacccgagtactaccgagatgacatcgtggagtgaactgcagtggatgcctttcggcgtcaatgttatccatgcccggtcagcagtgtagacgcagaacaccgatcagccaacatatgactacgccaccacgcttcttaccaacgttaacgtcgtgtccaacactttggctaggcagacaagctcactcaagacagaatgtcaaaccgactgaccattggatactaacgaactacctactatacagcactgctgctcaccgcttagatgcgcctgcccgtaacataacgcgacatcagcactcacgaccgcacggtcaactcttaccatccaacggcaaacacactcactcagactgcctcccattactactgcagctcgtgccttgggcaatcgcaaccactttacctaacgcaacctcactgggcgcctacacgccaaacagcaacttaccccgcaggaacacaagcggcgccgtcctggcaccaagcgctacccagtctacgcaccaacccaacggcggcattcacacgaggtacagagcagatcagcaaccaaacaagacaggaagccagcaccacagcaatacaccaagagcccagggtaacccggg

SEQ ID NO: 607622 - DNA, 916 bp, Homo sapiens
  misc_feature (385)..(385): n is a, c, g, or t
  misc_feature (421)..(421): n is a, c, g, or t
ggcgatagtgcggccagaggatgacgtggcgttcggaacctctgctcgtggtgtcgctggtattgcaagaggagtcagtgagtcgatcgttcgcaccgtataggaaagggaggcttctatccctcgagaaaactatgttccatgagcattctggtgctgcaacagccagtggggccaatcctgctagacgttggagtctcctcacgagaagacgcatctagtcagagacgggcgcgcgacaactgaccatggataggagatagtggcaagctatgtgatatgcatagctcgtgcagagagtctacatagtgcggccgcgagtcgcaccgagtagtgtcttgagtgtgtgatcttagttgatcggagaggttgaacagaacactgncgccgtgtatactaattgagcaggaacgtcgggagnctaagcatgaagcccgtggctatgttcctgtgtgttactcgctccgtgcgtgaaggtacgggagatgactcgagaggggggccgagatgcgagagaacatttcgtgggcgactcgttgcggaatggagggcatcaagcgaaaagacggatggtgctgcgtaccccaatacgtacgagcttcgttggggcgccacccatgcaagaggaactcacgacatgcaatagggggtgactatgcggatgcgctgtgccctccccaaacggtactcggcgagctctaagggcgaagcatcgagtaggcccatgttagcgcagcatacccaataaggaggtgtggcaggacgggccaggcggctcgggaggttagccgaaggggtggtagaggggcaaaggggaaccacaggggcgtaaaactggacgacccgagagaagaaaagcaagagaaagtatgggctagatatggagaacgagagaaacgccaagaggatctcgcga

SEQ ID NO: 607623 - DNA, 514 bp, Homo sapiens
atattggaaaacttaaagtgcttttcccccaattttaaaaatctgaaagaacttccatctatcaacggcactggccatatttcttgcccaaacgtcacgagagtttaactcaaactctgctaatacttcctcctccactcgccacacctccacaccctaccttgtataaccactttgtgtctttattattacccccagcacgcgataatattttacaagatcttactgccacgcacatgaaccttaggattcacacccatgtcacattctccatacgctacccttaaaatcaatgagtacacaagcttttctgctacggcttctaaaactgaaggcaccttttttcgttttttttcttgcaatgtatccttatacacaccctgctggcactctacaactttgttagtccgtgttcataattgaggaggtaactataccactattgatgaaaaagattaacagaccattgtctattatgaatcattccactttatcaacaatgaaaaaaactaca

SEQ ID NO: 607624 - DNA, 647 bp, Homo sapiens
gtctagatttcttttcttaatagtgtcatgtcgccttgctctgggttgtattgtctttacaagggaaagtaagtccagaggctttcttaggtctagattaaacgtttcggggaccagaactacttcgtaggttatttctatgtcatattgtactgtcagaaaacattctagagtacgggtcctgtgcaggttagtgaaacctaagggatgatcatgtgggtaagcgtgtaaccgccgtaagtccattgtagagatttgagttgtacgtgggtacagtacactctagtggatgagacgttgtcatctctgagaagagttatagtcacgtgtacttaagccctggattgaataccaagatgaataattgacaatagactattgagaaaatgaactgccattagaaggcgtcaatcattaagttgctaaaattaagacttatgtaaccactcacgagggaattaaccaggtagaacaatgaaccttaaggaaactaaccatttccagcaccttttaaacaattaatcttcaagcagtacttgacggtattacacacagaggtagcaaccgtgtatagaacaatgtcccctggtattatgacagtttggaaaacagttacggttttggaagcagcaatttattcggaaaaa

SEQ ID NO: 607625 - DNA, 420 bp, Homo sapiens
agtacgagtagagagctagtgtcgagacagttgttttcttcattacacgggcagaaagcggtatgtaagcgaaggacatggaggtcgtgttataccagagagctactgtgatataagaactcttgcagtcttagatgtgatataagtgtatatctggattgtgagaggtgttagcacaaggttttatgatcagtcttttaagcacttggttagggtacaaggtattactgacattttatcctacatttaaggggaatttttaacgggaacggatgaactttcaactcaggtgttcgaggagtcaatgacttgcagagaatggtcctcttgttaagtggaatcttctaatgagctacctttagttagtgacatggttattatatcaagattccggtttgcattgatgcatgactgtgcatc

SEQ ID NO: 607626 - DNA, 334 bp, Homo sapiens
ggttggtatagtccacctcaactgcctgctatgatggataatgattgagagagtgaggagaaggcttactgtttagttgagggagagatttggtatatgatttgagatgtggggctagttttctgtcatgttgagaatgaagcaggcctggatgtcagatgtgtgtgtgcctatggttaacattcttgggactcatgaagtgaaatgtgtgggctattcctatgttttatttgctatatcccattatagattattaattgattgatgtatatgatttgttatgtatttggttattgtgttcatatgtcctgtgagatgtatatttgtttgaatg

SEQ ID NO: 607627 - DNA, 289 bp, Homo sapiens
tggtggatcgcttcaggccaggagttaggatcagtctgggcaacatgacgccatctctgaaaaaaatttaggtaggtttagtgttacgtgcctgtagtcctagctattcagggagctgaataggaatatcacttgagtccaggaggtcaagactgcaacgagctataatcacagctcactgcagctgcagcctcctgggctcaagcaatcctctgcctcagcctcctgagtagccgggattacaggtgcgagccactacgcctgtctgatttttttaattttttgtaga

SEQ ID NO: 607628 - DNA, 452 bp, Homo sapiens
ctgcgtcaacgctagtgccgtcaggcgctgcgcgctacctgttgccaggctgccagctccaggaaatgctagtgagtcggaggaagaccgagcgccggagtgtggagagcccgtccgtctccagcaggcaccggggtgtctgatcccaagttccaccccctccattcaagagatatctcatcatcaagaaagggcgtgctaaagacagccagtgctacaaagttgacttacgagtctcagagcacagatacccagaattctcctccgagtccaagcgggagacagaatatggtccctgccgaagagaaattggaagacacattgaatcacctgaagttccttcaatgtgctgagtcccagtgggttgtacacattcccaatttgtgacaagaagggattttcataagacaaagcagtgtcgcccttccaaaggcaggaagcggggcttctgc

SEQ ID NO: 607629 - DNA, 157 bp, Homo sapiens
ggggtcaccaccctgggaggggaaccagagtggaagagaaaaccccaaaattagcaaaagtccacggtgactagccgaagagaccgagctgagggggagaagaattgtcggagacaaaaacgcgccgagagcccaaccatacaaaattagaggcgga

SEQ ID NO: 607630 - DNA, 664 bp, Homo sapiens
tgtgggggtggggggggagggggggggaaggggggggggtgggggaaattttattaaaaaggggggggggtgggtgtgggaggaaatgtttcacaaaatgcaggggtgtgtgttattggattggtggctcgagaggcgaccatggtggttgtagttgcttgtgccacttacataaaaaaacgatggtgggtgtcaaacatagtggtcgtctttggtcggcaccacaacacttgtgtggtggagtactctctgtggtgagatttgcgcgtccatctttgttcgtcctccttcaagaaatcattgtcgtggcgtggcgtggtcgtgcacaccatccaacgaccgagggcgtggtgtgtattcacgccgcgatacaaacaaacacacaaggcgggaaagatggggctgcttggaccggcgtctcactaccactcgcgcttcaacccgccctcagcacgacactcaaccatgcgtgccgccccctctctcgacaacccgcggtacacacgtggacgaccttccgacgtggcccccatcgtcgccgccgtcggcggggcagcccccccccaacctcccccgcgaccgaacgggcgtcgactacgcggcggcagcgcaataaccacccaccgcggggggcgtcaaccaggacgtaagacaaccagctctg

SEQ ID NO: 607631 - DNA, 165 bp, Homo sapiens
gcgttctctagcgggcgtctttccagaatccgccgtgcaatagtccctggcctattgttttacagggaaacgaagtgggaaggctaaaacagtcaggaggttggcttagaagcagccaccctttaaagaaagctaatagctcactgatcgagtcgtccgagcgga

SEQ ID NO: 607632 - DNA, 212 bp, Homo sapiens
gggcccccccccccccccccgttcctgggggggtccccccccccccccaatgttggggcccccccgggggttttaagggaaaaggggggccgggcccccccccctttttttttttttttagaaaacccgggggggaatttggcccttgggggtttttttttcccctttttttttgatttttttgggaaaaaaattttttcccgggggtttga

SEQ ID NO: 607633 - DNA, 222 bp, Homo sapiens
  misc_feature (131)..(131): n is a, c, g, or t
tatgtggcagatgatcagacatcgtgttataacatctccttcttgtaagtgcgtgctttctctacagtatgctttcaacaattgacgtcaatccagttgtgcttctgtgctcaatgctcgtgtatgacctntttgcatcattttgatttattggatactttgtcttggtctccccatggatgcttttccaaaaccaacattaccaaattaaaacccaaattt

SEQ ID NO: 607634 - DNA, 575 bp, Homo sapiens
ttgagtggacatccatggatgagaaatgcggatatgggactgcgggcgcgtgccaccacgcccggcttattttttgtatttttagtagagacggggtttcaccttgttagccaggatggtctcgatctcctgacctcgtgatccgcccacttcggcctcccaaggtgctgggattacaggcatgagccaccgcgcctggctctgctaataagtattcctatacgattgattcggaaacgtttactgtgagagatgaaatatactaacctcttcccccaccattactttataccagtagaacctcacattctacttcagataacttatccttccaactcctcgtctccttctgagtacttagccgtctatacccgaataagaattcgaccactctggctatctagaacaagtgacatgtaattaacactttcccgtcagaatctatcttatcctcaagatgcatcggtgacaacacactacctatgtactatgcaaggcttactacatctactcgtcacctagcaacagcataggaaacctccacaaagtgtcctattagctaccacgaacagggc

SEQ ID NO: 607635 - DNA, 651 bp, Homo sapiens
gatcatgcccattgtccagagagccttgcaggtaccgttccagcggacacgtccggaagatggcaggcccaatattattggctacgatgtactccctgacagtacctagaaggacttggctccgtacctgcccagcgtgacgcctggcctgaaacgacatcgtttgatggaccctgtgccgtagtagagtgcagcgtacccgatatctgtctagaaggctcctttgtggtcatggtgaagggcatgggggagtccgctgcgtttgaggcacttgttgccggatggacgtgatagtggagacgaactgacctatgagactagagcgtcgtgtgagagtcgcatcaggagcgtgcaaacagggagttggctgaggtcatgaccggtattggggggtggaagcaaaggtaggaagagaagttgggactgtccacgcaatggtcgtggcggttcactgtctcagttgaacaggtgtccctgttgcttggcccaatgtccgaagcaggtgctacttctcccgcatgattggatttaggctgggccatcaccgttctcgggactaaggggtcctggtcgatcatgttggggggctcctctgagcggctgcttctccctgccctggtcgtacgagtgcctccgtgccttgcggggcca

SEQ ID NO: 607636 - DNA, 317 bp, Homo sapiens
  misc_feature (1)..(1): n is a, c, g, or t
nctaggggctactggatgccttgttcaggggccagcaggagctagggataaacagatctctagggggactgctttgacctgcgctgactctgtctgagccacccaactggagtccaaggcctgaggcacagacgtacagatgccccttagcagggtcctcctgatcaacacctgctcccctgtactcattagcaacctcacccaccctactctcaaagcacacttggctctcgtatccaggagctctgcatctgtagattcagcaacagcagatggaaaatattcagaaaataaattggacggttatgtttctattg

SEQ ID NO: 607637 - DNA, 159 bp, Homo sapiens
gcagacacagcacgtgagctgatgatccatctcaatcctgtcaaattgcatataagctctgaacatgccctccagcctatcgaagctgcagataaactgtcatacgtcgatttcatgtgttgtctgcgtccgcatggtttcatgtcatagagctggttg

SEQ ID NO: 607638 - DNA, 662 bp, Homo sapiens
  misc_feature (82)..(82): n is a, c, g, or t
  misc_feature (96)..(96): n is a, c, g, or t
  misc_feature (190)..(190): n is a, c, g, or t
  misc_feature (458)..(458): n is a, c, g, or t
ttgaacccggagcaagagtttcagtagctaagtcaggccattccctcaagctgggcaccaagagtgagtctccgtcaaaaanaaaaaaaaaaaagnctgctgatagcctcagcaatgaaggtttgtgtcaccccaccagggagggacccatgaccagctgaagtgcttgcagcctggcaaaggaaaaaanacaggctgaggcacatgatagaagacaggcagggatgccacaatcataaccatggcaaagaccaggatcagaaaggcccaccatctctgaccccaaatccctgggcagatggttccagaactcagaattttcccagttgtagaaagatggggccaggtgcagtggctcacgcctgtaatcccagcattttgggagtacagggtgggcggatcacctgaggtcaggagttcgagaccagcctggccaacatggtgaaaccctgtctctnctaaaaaaaaaaaaaaaaaaaaaaaaaaaaaaaaaaaaaattagccgggcgtggcgatgcatgcctgtaatcccagctactcgggaggctgagccaggagaattgcttgaacccgggaggcggaggttgcagtgagccaagatcgcgccactacactccagtccgggcgacagagcaagagtccattcccccaccaccaaaaaa

SEQ ID NO: 607639 - DNA, 214 bp, Homo sapiens
agaattgcttggacccagcaggcggaggtgagtgagctgagatcacgctattgcactccagcctgggcgaagaaatgggactccatctaaaaaaaaaaaaaaaaggagggagagagaataggtgcttcaagatagtttcatcccatgggggtcctgtttccaatgggggcccaaaacgggtgtaaaaatatagacttggaagctccatagaccg

SEQ ID NO: 607640 - DNA, 142 bp, Homo sapiens
ccgtagatgggatatgcgtgacttaagaagtgtatggattctcggcgtgtgcagtgtggagattcggcgtgtgcagtctggacgttcggcgtgggcgacaacggtctgacctgtccttaagtatgggtactcggcgtgtgca

SEQ ID NO: 607641 - DNA, 266 bp, Homo sapiens
tcctgatgccagttggcactgcagagttcacacaaaccctgcacattttgatactacaacgccctccacgcacatgcacacctacacacgcatgccacacacatgtgcctgccatgtgtacacacacacaggccgatttgttgcatttgcagcagctatgcctttcaagcccaatgcactaagccagcgcacagtcttagccacctcttggcagcattttgtttttgcagaaataagcctccctcttcctaaaatgccccaccagc

SEQ ID NO: 607642 - DNA, 603 bp, Homo sapiens
gaacaggttggctaaactttttcattatctcaccggagccgagtcagtttggggccgctgctcatgatttttaggtgcccatttgagatagacctccaacctctatttgttagaaccagttgattagaactagtccggtagccatggtcgctgaaaagctcatggcaggtgtaagattgtgaacatgactcgatgcatgacatggagttggggcctcagtgttcaccaatgcagtagaagaactagaggaatacactcatgggtgaactggggaaagcctacatcaaacgagggtttttgctcaagatgcaaagcatcatgcgaactttgtggtatcccatctgtgaaacagtctctcctttccaggttaaaatgcaggaagatgacacaatcaaattgctccaactgaagacacagaggagtctactggtatgggaacctgcttctatatcacaaaagcactgtgttttagagaccaatgttgcggcttcactgagaaatctgttggttcaacagagaccgactactcccgaatagccgccagtatacttaagttgcccgtaacaactccttattttacaattagacactgtgtatgccctt

SEQ ID NO: 607643 - DNA, 293 bp, Homo sapiens
atggccgcaaacacccatgtcccatgagtagctctgttgggtagtgtagggagaagcggctggagtacatactctcaactcctcgttatgttggtgtctggcgtgtgctaatagtactactgagctctgtgttggggtcatggatgagcggctctcttggatcttaagggcaggccactctcttcttgccttgaaagaatcctccttcctcacacctgggctcctctggcttcagcttctcagcagcaagcaccaggcttccacaacaacactatattttcatgctactttcc

SEQ ID NO: 607644 - DNA, 723 bp, Homo sapiens
  misc_feature (68)..(68): n is a, c, g, or t
  misc_feature (79)..(80): n is a, c, g, or t
  misc_feature (107)..(107): n is a, c, g, or t
atcaaccagtcagatttaagattccagagaaaagtgtttgcttttttttttaaatcttccctctatancttagcaattnngaactactttcaagaaggacttcatancaggaaagagccagtgattcccaaaattacaaatgccacaaaattctcacggtgcccctggtgctatacaccagcctctctcagccccatgcccaggaagggcctgaccattatggatgcagcatgctcaccctcctccggagccggtcccgctcttcccggatggcattcatggtggccttagtccggttcagttcttcctctttgctgcacagcatggcagtcaggctctcattctcttccctcagcccagccagctccttctcccaccgagacctctcttcagccaggttgggatacaggtcccggccaagcaccccctcaatctcctcgactgtcttaatagccaggtcacagtgctcgctggctgtggtgagctgctcaatgtgcctgtccacctcggccacggagaggctgcagctgctcttcttcctgccgcagacaacattctccagccctgtcagcaccctctgcagttctgcggggatagagacagaggtctggtcttggtccatgcttcgagagtcctcgttgacctcgtgttggctctggctgagttctgatcgcagttctgagtactcatcttcctccctgatggtggtgccttgcagacggt

SEQ ID NO: 607645 - DNA, 101 bp, Homo sapiens
acacagatgctaacttctcacgctggagatccactcggagaccattcacccacacaccctggttgggagtcaacgtcaccatcccatccgggaccacagtg

SEQ ID NO: 607646 - DNA, 777 bp, Homo sapiens
  misc_feature (68)..(68): n is a, c, g, or t
  misc_feature (79)..(80): n is a, c, g, or t
  misc_feature (107)..(107): n is a, c, g, or t
atcaaccagtcagatttaagattccagagaaaagtgtttgcttttttttttaaatcttccctctatancttagcaattnngaactactttcaagaaggacttcatancaggaaagagccagtgattcccaaaattacaaatgccacaaaattctcacggtgcccctggtgctatacaccagcctctctcagccccatgcccaggaagggcctgaccattatggatgcagcatgctcaccctcctccggagccggtcccgctcttcccggatggcattcatggtggccttagtccggttcagttcttcctctttgctgcacagcatggcagtcaggctctcattctcttccctcagcccagccagctccttctcccaccgagacctctcttcagccaggttgggatacaggtcccggccaagcaccccctcaatctcctcgactgtcttaatagccaggtcacagtgctcgctggctgtggtgagctgctcaatgtgcctgtccacctcggccacggagaggctgcagctgctcttcttcctgccgcagacaacattctccagccctgtcagcaccctctgcagttctgagttcaggtcactgcagttgtccatgtcagcagtaaccatggtagactggttttcggggatagagacagaggtctggtcttggtccatgcttcgagagtcctcgttgacctcgtgttggctctggctgagttctgatcgcagttctgagtactcatcttcctccctgatggtggtgccttgcagacggt

SEQ ID NO: 607647 - DNA, 119 bp, Homo sapiens
gtgggtggcttttttaaactttatttggaaataattgtgaatctgaaagtggcaaatagtggataaagtctatataccctttattctgatgactgctaatgtttaaccccactagcctt

SEQ ID NO: 607648 - DNA, 930 bp, Homo sapiens
  misc_feature (51)..(51): n is a, c, g, or t
  misc_feature (58)..(60): n is a, c, g, or t
  misc_feature (68)..(68): n is a, c, g, or t
  misc_feature (86)..(86): n is a, c, g, or t
  misc_feature (106)..(106): n is a, c, g, or t
  misc_feature (109)..(109): n is a, c, g, or t
  misc_feature (135)..(135): n is a, c, g, or t
  misc_feature (149)..(151): n is a, c, g, or t
  misc_feature (155)..(155): n is a, c, g, or t
  misc_feature (163)..(163): n is a, c, g, or t
  misc_feature (170)..(170): n is a, c, g, or t
  misc_feature (892)..(892): n is a, c, g, or t
aacagtggaaagaggttcacatagcatggtaggttgagagtgcttatgagntgatcannntcaaaggntacacatcctgggctatnggactctctgtagcagattnggnagagagtataatgaagaatcttaggngggtgcacccagtnnncacnatgattangggtctntacggaataaaggatgatttcttccttaggtgtccttgcatttgggacagaaatgggatctcagaccttgtgaaggtgactctgactttctgaggaagagcccgtttgaagaagagggccagatacactttgggggatccaaaaggagctgcaattttaaagtcttctgatgtcatatcatttcactgtctaggctacaacaggattctaggtggaggttgtgcatgttgtcccttttatctgatctgtgattaaagcagtaatattttaagatggactgggaaaaacatcaactcctgaagttagaaataagaatggtttgtaaaatccacagctatatcctgatgctggatggtattaatcttgtgtagtcttcaactggttagtgtgaaatagttctgccacctctgacgcaccactgccaatgctgtacgtactgcatttgccccttgagccaggtggatgtttaccgtgtgttatataacttcctggctccttcactgaacatgcctagtccaacattttttcccagtgagtcacatcctgggatccagtgtataaatccaatatcatgtcttgtgcataattcttccaaaggatcttattttgtgaactatatcagtagtgtacattaccatataatgtaaaaagatctacataccaacaatgcaacccactatcccagtgttatacccacttaaaccccccattaaccttggacngtggacaacaacaaaacaaaaaaaacacaacaacaaaa

SEQ ID NO: 607649 - DNA, 272 bp, Homo sapiens
acctgaggacccggctatacattatctcatcaactaacataggaaacgaaacaaatactgcatgttctcacttattagtgggagctaaataatgagaccacatgaccccccagaaggggaccaacacacacctggggccttattggagggatggaggggtgggtgactaatgtgcatagccggttatcacctttatcggcttgatgggggagctttgaagaaacacgaaagagggatgactgagaaaatcagaatagtggagggcgggaaga

SEQ ID NO: 607650 - DNA, 710 bp, Homo sapiens
  misc_feature (51)..(51): n is a, c, g, or t
  misc_feature (58)..(60): n is a, c, g, or t
  misc_feature (68)..(68): n is a, c, g, or t
  misc_feature (86)..(86): n is a, c, g, or t
  misc_feature (106)..(106): n is a, c, g, or t
  misc_feature (109)..(109): n is a, c, g, or t
  misc_feature (135)..(135): n is a, c, g, or t
  misc_feature (149)..(151): n is a, c, g, or t
  misc_feature (155)..(155): n is a, c, g, or t
  misc_feature (163)..(163): n is a, c, g, or t
  misc_feature (170)..(170): n is a, c, g, or t
aacagtggaaagaggttcacatagcatggtaggttgagagtgcttatgagntgatcannntcaaaggntacacatcctgggctatnggactctctgtagcagattnggnagagagtataatgaagaatcttaggngggtgcacccagtnnncacnatgattangggtctntacggaataaaggatgatttcttccttaggtgtccttgcatttgggacagaaatgggatctcagaccttgtgaaggtgactctgactttctgaggaagagcccgtttgaagaagagggccagatacactttgggggatccaaaaggagctgcaattttaaagtcttctgatgtcatatcatttcactgtctaggctacaacaggattctaggtggaggttgtgcatgttgtcccttttatctgatctgtgattaaagcagtaatattttaagatggactgggaaaaacatcaactcctgaagttagaaataagaatggtttgtaaaatccacagctatatcctgatgctggatggtattaatcttgtgtagtcttcaactggttagtgtgaaatagttctgccacctctgacgcaccactgccaatgctgtacgtactgcatttgccccttgagccaggtggatgtttaccgtgtgttatataacttcctggctccttcactgatatgccattcttgctggggatcctgctagagtcacc

SEQ ID NO: 607651 - DNA, 136 bp, Homo sapiens
ctccgccatgtctttatacaacattgatatctgtatatactcatgaatatacccggggttataatccaatgctactttatttatggctcagatgttctagctttgtcgttgggagctatttcagttggttcctgtg

SEQ ID NO: 607652 - DNA, 186 bp, Homo sapiens
  misc_feature (173)..(173): n is a, c, g, or t
cagagatccaaacagtgccagagtccaaacagtgcccagagtccaaacagtgcccagagtctaaacagtgcccactaggcgctgtggttaagggctgtacctcgcattatgatgctgttgtgaactctgcttcctccggagtactttcagctggcttaaattcaggggtactnggcgctatgccga

SEQ ID NO: 607653 - DNA, 312 bp, Homo sapiens
agggtctcactctgtcacccaggctggagggcaatggtgtgatctcagatcactgtggcctggacctcctcaggctcaagtgatcctctcatctcagcctcctgagtagctgagactacaggcatgctccaccatgcccagttaacttttttgtattttgtagagatgaggtgtttcccagacaggtattgaactcctgggctcaagcaatcctctcgccccagcctcccaaagtgttacttaggattacaggtgtgagcctggcccagtgccttcttatctgtaggcgaactctggccaaatgtcgacgcg

SEQ ID NO: 607654 - DNA, 436 bp, Homo sapiens
tggcattagacctggcacgatgacaccacggagactagaactcacacatccagacttcgtatgtgttttctttgtgtaactagtccgtatgaaggtggtgggtgtaagggagaccactgccggattcataagatcctctatgaactccaagattcgtacagcagagtgatgtccttcatactcatgaatgttggactggttgaataccactgtagtaggataagcctgaatgttatacatgtgagcagagtccctcatgaactgtacactctagtgtaccaaacttaagctgaccataaagaagattagatgctcttcgtaactctggtcgtcaagctcgacatggtggacaccagggggcaacgaaatcaacaagcacaaatggttcttagacattggcaggaaaattatgaggtcccctgaagatgttggctgg

SEQ ID NO: 607655 - DNA, 564 bp, Homo sapiens
gtacgatcgagctcggtaccagacgtcattctgcatcaggattttttttttcttcttccaacttttaggttcagggggtacatgtgcgggtttattatatgggtaaattatgtgtcacagggggtgggtgtaccaattatttcatcacctaggtagtaagcatagtacccaagggtagttttggatctcaccctcctcccaccctccaccctcaagtcggtcccgggggtctgtggttcccttcttggtgtccaggtgttctcagggtttagctcccagttataagtgagagcgatattgggtttttccgtgccggtattaattcacttaggagggcctctagctccatcggtatggctgtaagggacatggtctcattcttttttaatggcggtgtagtatggcattcggccaagattggtaatggggggacttttttctaatagattggggtgaaagtggattgtctattctggacttttactaggctctgggaccccaggtaacctaggaattagagtactatctgtgagatcatggatttgaaatcttgctttgggaggt

SEQ ID NO: 607656 - DNA, 299 bp, Homo sapiens
  misc_feature (15)..(15): n is a, c, g, or t
cccccccccccgggnaaagggggttttccccttttaacccccgagccccccccccccccaaaaaaaaagaggggggggttggggggggggccccccccccaaaaggggggcccccgggggggggccccccccccccccccttgggggggggggggggttttttttttttttttttttttgggggggggggggggggggggggtttttttttttcttttcttttttttttgggggggggggggcccccccccttttccccggggggtgtttttttttttttttaaaaaaattttttttta

SEQ ID NO: 607657 - DNA, 417 bp, Homo sapiens
ttcggaaagtatcgccccgacgaccgcgtaggtgatgccgatgcgcaatgcggtgaagaaccgagggagggcagacggtaggcgtacgtaccgaaactgttgccagcgtgaggctcccatgctcacgaggagagacctcgcatcgcgatcggctgccgcgaagccctcgatgagcccgatggccatcgggaagaacgtggccagagcaatcaccagaaccttgggcagcaatccgaagccgaaccagatgatcagcaacggtgcgatggcaatgatcggcagcgtctgcgacacgacgaagagtggtacgaatgcgcgccgcagccacggtgagaaatccaccgctaccgccagtagccaggccaggacgagggagacggcgaaaccgacgagggtcacctgcagcgttgcggccgc

SEQ ID NO: 607658 - DNA, 368 bp, Homo sapiens
  misc_feature (9)..(9): n is a, c, g, or t
aaacctcanaccaatcattccattccatataaaaagcataacaatacataatatatggttattaatgcacctcgatattatttgtttataaataaattcatgatagcttcttttttctatttaacgatggggagggttgctgcggcaacgagtattccctttgcaactacgggcatatgggttagcttctccaccaggagggttgttgttggttggacaacctgggtctttggctccaggtacctagcatggatcaagcaccccagggacgatattagtagcccccaacacatctgccagcactgccatgcttattagaacaaagcacaagaaccatggcttcatcttcttcctcccaaggtcgacgc

SEQ ID NO: 607659 - DNA, 502 bp, Homo sapiens
cttctcccctgacaacaaatgctgatgaggatgtggagaaaagaaaactttcactgttggtgaaagtataattagaacaactactgtggaaaacagtatgtagatttctcaaaaacctaaaaatagaaccaccacatgatccagcaaaccaagtataaccacaggaaaagaaatcagtatatcaaagagatacttgcacttgcatatttatcacagcactattcatgataacaaagatatggaattaacctaagcatccatcagcggacacagggataaagaaaatgtttatgtacacagtggaatactatttggccataaaaaagagtaaaatgttattgctaacaacatggatggaacttgaggtcattatggtaagtgaaataagccaggcacagaaagacaaataccacatgttctcacttatatgtgggaggtgaaaaacttgacctcatggagatagggaatagaataagttatccggggctgtcaggggagaaga

SEQ ID NO: 607660 - DNA, 1347 bp, Homo sapiens
gcatagtacctcatccgccaccttgctcgaccgcagaccgcatccgtgcgggtcgcctcctccgccgtcgtgggtactcctggcagctttatcgccagagtccctgaactctcgctttcttcgggaatgcccctgacgtcggatcaccggcgtggcccgaccatgtcagatgccgccgttgacaccagctccgaatatcaccaccaaggtacttttgaggagaagaaggaagttgtggaagaggcagtaacaatggcaaagccacgtcccggtgcactaaagggcgtagactgccaggatgtagcgacaaatgacgtcgttgtccctagtgtacgcggtgaactccatggaagtggcacgatagtaagacacaatggcagtcaacggcaggccacggtgcacaaggaccacacgaacggagagacatatgtcaggccaggtcacatgcatcgacaaacagcgggaacccacggacacgaggccacttggacagcacggccgctacaaggtgggctaaagaggagggaactacccgcattgacccatatgacgcgaggacctccgctggcgcgcacagacaactgcgacggtcacttagtactcagctacacgccaacgcgtcaccccaaacgacagcaacgacagagacatatcctacagcaagctaaactagattggacataccaacgaccaccggttgggaggtcggcaaacgccgcgatggagcgtggcacggcccgccgcgacgtcacatacgcagacgggacgcaacaggggacaaaggacgcacccacaccggagcagggcaggggaggagaaggggacagtaatgtaacgacatttgagccccgtatggcacatggggacgccaacaccaacgcgagacgaaaagtcgaaagcgcaagttgtagcccaagacagacaaggtacacacggaggggaggtccaccacaacagggggcgcgacgagagaaggagggcaaacaccgcaggaacaggacgtcaaggacacgcaggcacgcgcacacgagagaagaaacgagagcggactcggaaaggaaagaccagtgcatgtgggaccggtacccgatcagacgcaacagagcgcgcaacagacagggaaggcccagacagcaaacaccaacgaccacgacaggcgaaagatagccgtgacaggtatcggatgagccgtcacgacaattcctgacaagcgacaaatatcacggaaggcaggcggcccgtgagagagcgcaacagaaggaacgcctgagaacaaggaaggacccaacgcggcaggtcaactgggaggcggaaacagcagcaaggacgaaaaagagaccgagaaga

SEQ ID NO: 607661 - DNA, 151 bp, Homo sapiens
gacggggccgaggaagcacaaactctgggggggcgacccaggcttctcatacttgatgatatagccggaaatcctggcaagtggcggctgccatgataccagacaggaattgggtgtggagtccaggacacgcagagtgactggtgcatca

SEQ ID NO: 607662 - DNA, 253 bp, Homo sapiens
ggagtaattgcttgaacccaggaagtggaggtttcagtgaactgagatcgcaccactgcactccagcctgccaaactgcatctcaaaaaaaaaaaaccaaaaccaaaccttggggcctgggcctaaggccccctttcaatcccaatttcgggggcccaaacctgctttgcttaagaaggggcttaaaaagatttaaccccttgccagaacccccttgccaaaacaattaatttgcccaaaagccccttaatgc

SEQ ID NO: 607663 - DNA, 316 bp, Homo sapiens
gcagccatcgccacagagctggcacaggcccacatctgccaggcatctgaaaacgtaagagcacttgggagatgcgggagtggagaggaggagcctcccctgcccggccgtcagccatcgtaatgacatgtctgtgggttgccctgtgccgccaggctgggctgtcggaagcacccagcgacgtgtctgtgggtccgccccgtgccgccaggccgggccatcggaaacacctgcagtaaccggagtgccctcgctgatagcccttgttccggggcctcgtcctgggctgtgcagagctccagccccagccccagcc

SEQ ID NO: 607664 - DNA, 728 bp, Homo sapiens
gtgtggaggctgagaggatgttttcatttggtccatttagcatgagagtaaatagctttagaacatgggcatgaggtccgaatttgaatttcattcttattactgcttttagaggaattagtttctatcatgtggcatatagcaaatcgcgaagttgcatttaaagattaggaattcggtaaattttgagctttaccagtacgttgattcacttgtttggaattatggatcgtcagctggagtagtctgagatcacatcatctcttttctgatgatgggttgcgtgtaaaactacaatttttttcctgtattaccttaatttattgagacagaagtttcactcttgttgcccaggctggagttgcaatgtgcgcagatcatccggtcacatgcacacctccatctcctgtggtgcaaagtgattctcactgcctcatcctcccgaagtagctggcatctgcaaggcaccctcgccaccatgcccggtaattttagtatttgctctttagtagaggtggggtttcactatatgttagtcaggctggttttgaacttctgacctcaggtgatccacccatctcagcctcccaaagtggtgggattacaggtgtgagccactgtgcccgcatgacttaagtgagatgaaccatgaaaagtgaaccatgaaaattcagtttatgttctaatttttattattatttttgagatgaagtctctctgtgtcgcca

SEQ ID NO: 607665 - DNA, 179 bp, Homo sapiens
aattttaaaaaccgtaattaattccttatcaccattataaaaaccttgatctttttatttgatctaaaaaagcctccttccacagactttcttcacgtagaaatgggagttcgttataccagtgttgtttttaactaataaggctcttctagaattcagccctgcctgtaacgtctctc

SEQ ID NO: 607666 - DNA, 251 bp, Homo sapiens
  misc_feature (15)..(15): n is a, c, g, or t
  misc_feature (20)..(20): n is a, c, g, or t
  misc_feature (22)..(22): n is a, c, g, or t
  misc_feature (29)..(29): n is a, c, g, or t
  misc_feature (115)..(115): n is a, c, g, or t
  misc_feature (123)..(123): n is a, c, g, or t
  misc_feature (181)..(181): n is a, c, g, or t
ggaggcggccggcgncgcgngngggccgngctgcttgggcctgagtgcgtccggcgagtgcacctgtgcccagtgtgcggagagtcgttcgccagcaaggccgtcaggaaccgcntgcccgtnctgcacgccgcccaggtgttcccctgcaagtactgcccggccaccttctacagctcgncccgccttacgcggcacatcaacaagtgccacccatccgaaaacagacaggtgatcctcctgcaggtgcc

SEQ ID NO: 607667 - DNA, 601 bp, Homo sapiens
ttagaccacgggttggcagcctggagcggctgggaggatgggcctctccgctgcggccccgttgtggggtcccccggggctgctcctggccatcgccctgcacccagcgctgtcggtgcccccgcgcctgtggactactgctgtgctggtgcgctgggcccgctgggcctgcagatgtgcctcacttcctagcagctgctgctggactgcgactacgcatgtgttctgatgctggtgcccctgctggccctggcatgcttcttcacactgctaccctgcggcacctgcaatgctcatcagcatcaacaagcgtgtacactggtgcaatgtgctaactgcctgagttcaacctccgccacgactggaactctctgctcagccactgacccctggctgctcttcagacactactctgcgtgcctacttccccgactgccctgcgacatggtgctgctacctgggtgacttctgctggacacgctgtgggctccgtgtccagtacaacaccaccatctgcccactgtcactctggacaaggacctgacaggcctggaatggccactacttcatcctaactgaccagaagggccggtgcatcagt

SEQ ID NO: 607668 - DNA, 116 bp, Homo sapiens
gatggataggtacttaattactgtacccctccaccacctttctccttgcacgatctatgcagaagacaggtaagggacacagaagtagtgtccgtcttcgtcagaataccacagac

SEQ ID NO: 607669 - DNA, 279 bp, Homo sapiens
aggttgcccccacttacagtcatctttccaccatgcacgttgggcttgtggttgcctcagacgccgcctcaaggctgagtcagaaccagcttcctcttgcagggagtgtatggggcttacactgaatggtgtccctgagcccttagatcagagaatgatagaatgcatattatcatctccactttatagatggggaaactgaagcggggcgcccgggaagtgctcaaagtcatacctcttggaattgggaaggcaggacaggcactcaggctgtctgag

SEQ ID NO: 607670 - DNA, 117 bp, Homo sapiens
acaacgagtctactagactcccctacaacctgcaaatcgaaccacagcatccagagggctgaggaccgaggagcgcgagcagctcaacaccctcaacaataagtgtgcctccttggc

SEQ ID NO: 607671 - DNA, 867 bp, Homo sapiens
ggccggtaccccaactcctctcggtggcaggggggggggtcccagtcccccccgtggggcaatggggctgcccattctcgcctccgcgtgtgccccccctccttggtaggagcctggccacaggcgagtggcgtcctgcggcccccgtggcacgacgtggcaagacgtttgtcgcccctgtgcgtcaagcctctctcccccgttcacgccccagaggttcattgtcccccccaggggctcattgctccgaacactcattcccatcgggctggcccctaccagcgggtccccccgcggctcatggcacctctcttagttgcctcccgtcacctgctccagcccgggggacctgaatggtgtcttgtcccgccgcccccacgccgggttgaattttgcccctgtggggttcacgccgccaaccaagggggtagaagcccctcgtggggaattctcaccatcgccccgctccccgctcgcacgcgctgggagtcagcccgccttcgttcggcactccgggtcacacgaactccgccatttgtcgtccgccctcttttgctcaacacagctccctcgcactccagcattttctgcgtctcaaagcattgcccgtgttcagccgcaaactccctgtaatagcagtgatcgtgtacaccctacccttccctcgccttttcttttcggcaccacggaacgcacttcaccgcctcctcatattttcacccactgcgcgaatactttaaatcgcgctccccccgagcccccaaaacaccccagaatgtcccccccccacgcagccaaagactccaccacgcctccatcaacaaacagggtgcaaaaataaaacaactttaaaaagcgaacataaca

SEQ ID NO: 607672 - DNA, 1055 bp, Homo sapiens
agattgctgtcaataaaatggtaggttttgacccgtgttccgtactaaaggcacgaatgtcgctccctgactgtctgccatgaaagtctcgctccatgttatatggtcctatgtcctggcccttgtgaactatgatctgcagatgacttgtctcgggcttggactagtgttgtacgtatataatcccttcgacttcaactcgcggatggtagaatatctagattaggatgtttcatccgtgtcgagaccctgcgcaagatgtcgggtacgtgataaagcgtgtattggagtcaattgggtctttggaagtacggctcatgatcaggtttcctgggcctataatgccgtgaaatgtgtctgctatgttaatggaagggaccttgacggtctgaagcttccatatgggacagattgcgccaggtttaggataacataaatcctgggccgtatcgtaagtaccacccaccatatgccgaagatatctcataatacgtatgcctattctaactgttcaatgaggggtatcgtcatgtgatcctattcgcgtttacgcgatagggcgatcttatccctcaataatgagctgcggggtttatctagagggagtacacagcgcactttggagaataaattcagggtttccctgggcttggccgccatgtcgacttgaatgttttatacgtgtatgtgccaggtctctacttagtatcgaacctgtgggacggaggacattgagcgtcgcatgatcacggagtcttgtgggactaccaggagggtgatggagctggctaaaattaacatcgcggttaggagagaacgtcttcgaagagatatttcctaggctgccaattggatccactgtttgtggggcctggacaatgccagttcacccaagtgtttcaactctctataatcaggttctgtggtttgggaacccttaaaaatccgggaggaattgcgtgtgaatagccagcacagcacacacgatggatccgaaacacgccatgggtagaagggggggcacaattatagggcagatccactcttagaaaaag

SEQ ID NO: 607673 - DNA, 983 bp, Homo sapiens
gacagattgttagagctgagctgccctactacagctgctgccggcccctaggacatagcaggtacctcatctacgctgatcaccagtgcccatcgtgatccagacccggcaccagcctgcccaatgacaccgcagatgagccatggacgcccatgcctggatggcgtgcggtctaacgacacgcatcaaggggctccacttgtgacagacgtgggacttgttgtgcaactccatgcaaactgaatggagatggcccagtctatcttcatggcaggtatactgattggagggctcgtgcttgggagacctgtctgacaggttggccgaggcccatcctgacctgcatctatctgctgctgtcagccagcgggatccggtgcagcacattgcagtgcccactcgttccgccatctacatggtcttacgcttcctgtgttggactttgcatctcagagcattaccctgagcaccgtcatctttgacgtgtcggtaatgggtgctacccggatgcgggcaatcatgtcgacaggcactcgggtactgctacaccttgggccagttcattctgccggctggctagccatcccccagtggcgttggctgcagttaacagtggtccattccctttcttcgtcttcttcctatatccttgttggaccccctggttgcataccgcggggttggcctgtggcttgggaaggtcctcgaaggccctgaagatatccgccgggtggctgctcactggcaacaggggcgaaggcaaagcctatttgaggacgccactctaccctcatgggattcctttacgtccagtaccgcgtggccgttcgtatctcagcgtagagtctatttcctcgacgctagccagctcgcaaacggcttgtggcaactcgcacctcaccactctatggttcggcaccagctcctctcacacgagaatcgagtcgcacaactctaggatctgtcctcttcactcgtcgtcg

SEQ ID NO: 607674 - DNA, 643 bp, Homo sapiens
  misc_feature (12)..(12): n is a, c, g, or t
  misc_feature (162)..(162): n is a, c, g, or t
  misc_feature (230)..(230): n is a, c, g, or t
  misc_feature (241)..(241): n is a, c, g, or t
  misc_feature (258)..(259): n is a, c, g, or t
  misc_feature (296)..(296): n is a, c, g, or t
  misc_feature (306)..(306): n is a, c, g, or t
  misc_feature (343)..(343): n is a, c, g, or t
  misc_feature (380)..(380): n is a, c, g, or t
  misc_feature (395)..(395): n is a, c, g, or t
  misc_feature (419)..(419): n is a, c, g, or t
  misc_feature (426)..(427): n is a, c, g, or t
  misc_feature (435)..(435): n is a, c, g, or t
  misc_feature (440)..(440): n is a, c, g, or t
  misc_feature (446)..(446): n is a, c, g, or t
  misc_feature (454)..(454): n is a, c, g, or t
  misc_feature (460)..(460): n is a, c, g, or t
  misc_feature (462)..(462): n is a, c, g, or t
  misc_feature (608)..(608): n is a, c, g, or t
aacaaaaggttnatcattttggatttaataactagtgaaaacttttaatcaagcggatacctagtagactagataaatactggaagaaaaatggtggatcaaatacttttctacactggtaatgaaggggacattatctggttttgtaataacacggggttnatgtgggatgtggctgaggaactgaaagctatgttggtgtttgctgaacatcgatactatggagagtntctcccctttngtgacaactcattcaannattccagaaacttaaatttcctgaaatcagaacaagntctggctgantttgcagagttaatcaaacacttgaaaagaacaatcncaggagctgaaaatcaacacatagtcattgccataanaggctcctatggtancatacttgccgcctggtttagaangaaatannctcatatngtaantggaantcttgcancttctncncctatctggcagtttgaggatttagtaccttgtggtgtatttatgaagatcgtaactacagattttaggaaaagcggtccacattgttcagagagcatccacaggtcctggggatgccattaatcgactctcaaatactggcagtngtttgcagtggcttactggagcccttcacttatgc

SEQ ID NO: 607675 - DNA, 371 bp, Homo sapiens
  misc_feature (304)..(304): n is a, c, g, or t
  misc_feature (318)..(318): n is a, c, g, or t
  misc_feature (337)..(337): n is a, c, g, or t
tacaacctaaatttgccaacaaaaaaattacctatgagcctttatttgggttcaaaatacaaacaaaatgacaaagaacaaaaacactgccttcatcccctccacacacaaaatatgtaatatcagatgtgacagtaagatattagaacttgaggattctaacccttagttggttgaaaaccacgttgggacacttatgtttcaaacttttaactaaacctgcccaatagtaatcctaggaaaaatcaggaacctacgtattctggacatggttcagatggcaccccttcaggagtaggctctnttacccaacaactncactggatttcttacccgnatttttttgggccttttggttggctggccttcct

SEQ ID NO: 607676 - DNA, 222 bp, Homo sapiens
gctgctgtctactttttatacgtaatcccgtttccaaagaaatcctccaagctatccaaatatccacttgcagtttctacaaaaagagtgtttcaacactgctctataaagaggaaagttccactctgtgagttgaatgtacacatcacaaagtagtttctgagattgcttctgtctaggttttaggtgaagttgtttccttttctactgtgggcttcaatg

SEQ ID NO: 607677 - DNA, 138 bp, Homo sapiens
ctccgtagctgctgggggttgttgtgttgtgcaagggtggcagcaggttaacaggcagccacttattagtaatgttgatagtagaatgatggctagggtgacttcatatgagattgtttgggctactgctcgcttact

SEQ ID NO: 607678 - DNA, 230 bp, Homo sapiens
  misc_feature (74)..(74): n is a, c, g, or t
gcctgcgctcctcctggaagcggatgagggcagctctctggttgaccagatcgaccagcttgctcaggacctgngcctcagcctgccgatcagcagctgtctttaggcttccctcccggatcatgtagcctgcgagctactggaccagctgccactgagactgctccagattcaattcctgcaccgtgatcatgagctcggcctcctcagccaccaggctgtttttcttg

SEQ ID NO: 607679 - DNA, 490 bp, Homo sapiens
tttttttttttaattaaaacagcaaccaggtaactgccccaacccatcagggaaaggacccgggatgggcagtcgttttttcaaaaaaattatattttctttttttaaaaacaacaccaaagcaaacccatagccccgtgtcaagccagtcctcagggagagtgagctggaaggttccccctgtgcactttcttctgtgagcagagattctttgggccccttcccactgtggaccccagccgtgagcagagggcaaggcttcgtgccgtgcttggttacccatagggggttgggggacaaagcgattcagcttccaaaaccgagtgcaagaaaaaacaagccaaacccataaagagcaaagagaaaaaatatcaacgagagaggtataatattgaagaaaaaacagcgaagaggtgcaatgaccaccgtataacggtggcgggcaggacgtgggtgagccaggtgtgctccgtaaaggcccgtgtttgcc

SEQ ID NO: 607680 - DNA, 155 bp, Homo sapiens
aaaaggaggggttttcccccccccatatgtcccgttaaacagtttgtgggcttggaaccgtcccagccccataataccccagtagtttaatcccggggattgggttgaatgtgattttccttcctttattcccccccccaaaaccggctgggtga

SEQ ID NO: 607681 - DNA, 159 bp, Homo sapiens
ttttggggaaaaaaaaatattgtgttaaatgggggctgcccaaattcccggcccttttgcaggggcttttaagggccccttagtagtaatagttttttgggccggaaccataatgggaaagaatgtttaataataaaattttcccttttcccaatgcca

SEQ ID NO: 607682 - DNA, 404 bp, Homo sapiens
aagggacgggatctttcagagagcatctcgctgttataaaggaggctgctctgaaccgtcatctgaagtctgtagtgaggcctcttgttagggaaactggattgttagggttcaaaaatccattttgcgtgtgtgcaggacacaggtggtattaaacagaagagaaaatcagatgactgtgaaatgttcaatactaaataagatgatctttagtttttccaggggcattgttatttgtgaccacaatgaaaaatgtagacagtgatgatctggtaactggcacacttcccaagctcaagagctcaaaagaatggttggagcccaagcccctttgttttatggaggtatatatcaaatagtgtgggatttggagatttttttacttggaaaagctgctgtagttg

SEQ ID NO: 607683 - DNA, 1745 bp, Homo sapiens
aaaaaaaaaaaaaaaacacacacaaacaccaaaacacaccacacacccaccacaaacaacccacacaagaaacaccaatcacatccccagcacatcacaactatccaccgcccctcccacacgcttctccctacactaccgcccacctctaccacaccactcccacctacctatcctactctttactacaccacgcagcaccatactctcacgctcccacactcatcaccacccccccctacaccaccctccccctcttttccacccccccaccacccaccgcacctcaccacccacccaccacaccccccccgcacacactcaccccacacctccctcaccccaccacctaccaaaccaccaccactccaacaacaccacacacaccctctacaccacacaccatcatctcatcccccataaatcctctaaccccactcctctcatccccaactcatcccccccacccaccccacccccctccctctcctcccaccaaccatccacccaccacaccctcccccactccactacccacatcaactcccccttcccaactcctacaccccacccccacccctcctaactactctccctcccccccgtctcacacaccacctccccctcactcatacccctactcctccatctcccctcccacctctcacacctcccccccgaacgcgcgcgagcgacccgccccctggaccacgcaccgcccgcaccgccgcgcgcgcccgcacactgacccgcctgaccacggcccacaccagcacacctcagaacccgtccgcaccacgcgagcaatccacacacaccagccatcacacaacagcgcaacctcagcgccgccccccgcgcgccaccgcgcccccgcaccccacccccgccaccaccgcctgccacgcccctgctcctgcggcgctcccgcccaccccaccgccatgaccagaccccataagccaccccacgcgcctctccccgctacactcccacaccgcgcccccacaccccaaccgccaccacccccaagcggcgaaccacccccacgccacctactcccctcccaccaccaccacccccccacgcacccaccgtccccccgcaacaccaccgcaccaccgaccaccgcacgacccctccctcctccccccaccccccacccccacacgccccccctctccccacaacccccacccactccctccccgccccctcccatacacaccaccccacccacaacccctccctccccttaccctctcctcctacctcgccgcccacaccccccaccacacccacctcccctaaccacactacatcactctcccctcaccctcacctcacccccacacgctccactaccccactccctctccccacaccaccacaccacccacgacgcaccaccagacacactctgcaccccatccacaccattcaccacacaccgacagcccacccacccccacaagcccgcacacagaccacccaaccaggagcctgcccaaccaccaccacacccccaccacacccccgccacgcccaattcaccgcagcaccacccactccaccgacactcacctccactcgccgcgcgcacgcccccctactcactcgagccacccaccagacccccagacaacgcccgccctcacacgccgcaccacactcatcagtacagaccacacctctccaccactcacgtgcccgaacaaccgcgcgctctccgccaacccgccgcc

SEQ ID NO: 607684 - DNA, 120 bp, Homo sapiens
ggttgagccgcccaccaaaatgcagattttcgtgaaacccttacgggaagaccatcacctcgaggctgaaccctcggatacgatagaaaatgtaaaggccaggatccaggataggaggat

SEQ ID NO: 607685 - DNA, 182 bp, Homo sapiens
tataacatcccttaggagagagactgctggtggtgaactgcttttcttgtacggttgagggctgaaaaagccaatcttaatagacatgaggctcatgtctgcacagctgcgctctgcgcgcgactgcggggctgtcccctgctcaccagccctgcacgatgacatgtccccgctgctgagca

SEQ ID NO: 607686 - DNA, 174 bp, Homo sapiens
  misc_feature (94)..(94): n is a, c, g, or t
gtcccccaggtgttgctcaggctgaactcctgggctcaagccatcctcccatctcagtctcccaaagtctgggattacagggatgagacaccantgccagaccattgtcttcttaactgttgtttactatgtcattccccaacttcctctccttttccccagaatgtgagcttt

SEQ ID NO: 607687 - DNA, 375 bp, Homo sapiens
tccccctcctacccacgctggcttcaacatgcccaatagactcttccctgatcgctttgaaaatagatctgtgtctgggacaccatcccttaactgaattgacaggcactactgagacagtggtattcctaacaaaacgttgtcgaaagagaatcaccgcatactacaatactaccgaacagctatgagattttctatgtgtcccgcgttaaggcacagcagccggagtaacgagacgagtccagtgtggaattttagtgggtgacgagtggtataaagatgtgctgttagtcagtcatgcttcacgaggtcctaagacccagagaattctggaatttgtaggtaatactacacattcaataatgtatctattta

SEQ ID NO: 607688 - DNA, 770 bp, Homo sapiens
aaactctgtttgaggctctcagctctgaaggctgttagccccccaataccactttgcactctaaaaaaaaaaaaaaaaaaaaaaaaaaaaaaaaaaaaaaaaaaaaaaaaaaaaaaaaaaaaaaaaaaaaaaaaaaaaaaaaaaaaaaaaacaaaaaaaaaaaaacaaaaaagacagaaaaaggaagaacacaaacgaagtacatacgatagaaaagcgcaggggcgcatccatacacaccacacacacaagacaagtagccaacgacccacacaaggagcaaaaagaaaagacataagaacagcacgacgcaccagcaaagaacagagcaggagaagagaaggagagacacgacatgctgagcatacatagaaaagaagagcagatgaggaagagagcataccagcaacagtagtagtcaaagtaattaggtagaagaagaaagaacacgagatgaagtcagactcaaagagagagtaaccaaacaacacgtgaccacaacgatagaacagtacacagtcaggtacagcgacgacgcgtcagcagcgagcagtagcgagcatgagaagcaggtgtagcagaacaggaggtacagggcaagctgagagcgaggagtgataaaaaagcgaagagttcgagcagcggagcgaagggagactagagacggggggagagtagagaacgagggaacacaatacgaaaacataaaaacaacaaagagaaaagaacgagagcagagggaatatacaaaaacaaaagacaaagggcga

SEQ ID NO: 607689 - DNA, 146 bp, Homo sapiens
  misc_feature (27)..(27): n is a, c, g, or t
  misc_feature (32)..(35): n is a, c, g, or t
  misc_feature (41)..(41): n is a, c, g, or t
  misc_feature (44)..(45): n is a, c, g, or t
  misc_feature (47)..(47): n is a, c, g, or t
  misc_feature (56)..(56): n is a, c, g, or t
  misc_feature (58)..(58): n is a, c, g, or t
  misc_feature (60)..(61): n is a, c, g, or t
  misc_feature (64)..(64): n is a, c, g, or t
  misc_feature (71)..(71): n is a, c, g, or t
  misc_feature (78)..(78): n is a, c, g, or t
cacgaagcaactagatatcaagcagangctgnnnntgctgnatnntnaacacaccntngnnctnccaccanaaccgancaccatcccggagcttcctgaactgggtaccgatgatgcaggcgaggagtgggcccacgcggcctttg

SEQ ID NO: 607690 - DNA, 465 bp, Homo sapiens
atctgccagtgatttagctatgccaactggttgaccctccattctctgccaagaggcatactctttctcattgtgtgcgctggcagcagtgcacttccacggagggagattaggatgccgtcagctgatacaaatgggtaaccttttctaatttaaaattccttttagggggtagttagacaatttatatatatatataataaaactattattatatatatagtatatatacattttcaaatttgattttattctggttgaggtgaatgtaagaggaatatataatttaatacaatgtgaacagggcttctgagtctatctcatccctacctaatatgttagggttttgccccttcatttcccttacaaaagaatgttagtaggtttatattaatcattgtgtccaaaagcaagcaaagcaaatcacagtgttcacagctctgcttcataacaaatacataaacc

SEQ ID NO: 607691 - DNA, 252 bp, Homo sapiens
ttatcgccggccctgtttagagatatgagatgatggtattgacgttttctaggaaccaacttctgggaaagatttcttaaagaacgaataaatatctgagagaaaaatacaaactagtaactgaaacaatgatgctacttccttttaatacttacaagcctagttttaaagtttctttagcttactaccattgttggggcacggatagagggtacctgcagctcgaagttcgtccatgcctggctctttgct

SEQ ID NO: 607692 - DNA, 806 bp, Homo sapiens
ggggagaactggagggggacacctatgaccgggtgctggctggatgtgccctgtaccacagaccgccactcccttcatgaggaggagaacaacatgctttaagcggtcaaggaagaaggagcgacagatacttgcctgtcgctgcaagatgcagctctcttggcggactggactcctgggccaccaaaccaggaggccactgttggtctacttctaccgtgcgtcacgtctgcacaacgttacaggaacgaggtactgatggctgacaaggctgaccacttgagctgcctggccaactcaactacagcacttcagggtacagggttggaagactcgtgacgtcacgttccggaagcggtatttcagtggacacattctatgtttgcattcatcgactcctgtcaggcttgagggagcctggtagataccaaacctcaatggccaatgtttggccccatgtacttctgcaaaatgcgtaggctagacatagtatcacccaatccctgaaagcaagaatacaaaagggtatactctagttggatgcgaccagaaactaggaaactgggaccaagtggcagagatgcacgtctcaggtccctgtctccatgccttgttctgtgtcagttactgcagtgttctcggcacataagaagtagaagatttgctgtcttgctgtccaattgtggagcatcagcaggtttccaactcactcacttaacccataccccatctccaggcctgtactaaagttgactgcccgcattagggggttagaaggagaatacagtcggagagctcacactaat

SEQ ID NO: 607693 - DNA, 100 bp, Homo sapiens
agagtatcccccggcgcacatatctaatctaacattgtgtgtgaggaatgtaggtttaaggccacattgtctttttcacctttccccagatgctgactga

SEQ ID NO: 607694 - DNA, 467 bp, Homo sapiens
ttttgtttttttttaaaggccccccccgggcttttagtcaccccaaaaaaattgtttccctaaaacccttttttttttttaaaaaaatttagggggtttaccttttttaacggggcccccccccctaatttaaacaatttccccctgggttaaaagggggcttttatatgtaaaaatttaaaggttgtttttttttcttaatgggaatttgacctttatccccttaaagggttttttttaaaaaaggtaaggaaaccccttttgggggaaattgggtttttttctaaaaaaagggggcccaaccaaaaagatttttttggggggttaaaggaaatttttaaaggtcccctaaccgttttttaaggggggggcccttataaccccttaaaaaccagcaaggggaaaaaaaagttttttatttctttggaaaaaaaagggaaagggccaaaaaaaaattttttttttta

SEQ ID NO: 607695 - DNA, 106 bp, Homo sapiens
gaatcgagcgctgacctgcttactgggcgtatggtagcagtggtaggagctccatatactctgcttcttctggaggagaaacagacactctactcccaaacacaca

SEQ ID NO: 607696 - DNA, 196 bp, Homo sapiens
  misc_feature (41)..(41): n is a, c, g, or t
ctgtacctaagttctcactctaaatatccctcaattgaccntgatgaaatgtgctgggggatgcatgtggatgcaatgcatgatggaatgaatcttgaaaatgttcatgttcctgtctagtgagctgtaatctgtgtgtgatcctctatgagtctgaccttgcagtgcattgcaatgcttgtgcacttgtgcctgt

SEQ ID NO: 607697 - DNA, 990 bp, Homo sapiens
gcctttaatccgtgcagtgaccgtgtgtcagaacaactcttgaatcactgaagctactaaccatgagccggcctctttctcgagatttctacttccctcacaagttgcccccgaaagttaaagccacagctgcgcctgcaggagcacctgacacaacctcagtgaccttgcagttaacccacgttaccaaaatggcttgcgtcgacttcgctatcttactggaaacactactactccttgtatcaagcaactcggcctcgcttcattacacacgcagagcaagatagactatgacggcacttccagcacatctcagcgaacccaccacatttgcctgcgttctaacaattcccagcttctgaccgaccacacacagtgcacgccttcactcgtcttccaagactaaaccccggtgcacaattcgacagccagctcgccgtggccccacttcacacggtgctgaccggcataccacaaacggggaacacaccattggccctttattaacaagatggcacatttgccttggaccagcggctcgcatacgtccgattatctcctaaactggtgaagctcccatcgcctccaactgtccaccaacaacgcacacctatgtacattattgcggatcccgatcagagggaacgggttcaggccattgaaccattgtcaagaccattcccaggctttcgctacgactttcggacctcaacagccttgatggcgcccttatatcagcaaattcccgggcacgcaccttacattggtcacttgcggagacagaagtcttagaatttggcacggccatcggctttaccccccgcgcaacttgggcccctgttgggactaaataataccacccttgtgggcaattcgggtccctgttcagtgtgaccttacggggacctttgggcgacaaaatcagttcgaccacgttccatgcgaagcggaaggtttaaccaatataaaccatacacagcgagaccagag

SEQ ID NO: 607698 - DNA, 289 bp, Homo sapiens
  misc_feature (8)..(8): n is a, c, g, or t
  misc_feature (16)..(16): n is a, c, g, or t
  misc_feature (25)..(26): n is a, c, g, or t
  misc_feature (68)..(68): n is a, c, g, or t
  misc_feature (207)..(207): n is a, c, g, or t
tgcatggncgattctngaggtaccnnaagcgctggcagtaacggatctgaacaaccatgagcagtgtncggctgtcgggccgtgacaaataagaggatgccaacgctgatgccgcagcgttcttcttagtgtcagttcttcgccatccatgagtgccagtggaactcctgtccgggcatctaacagataaaaatcgcatgtacgatngtgccgctgtgttttccggcctgacggtcaccagtttgacgccggctttactctaccttcttgccagactgggcattaatag

SEQ ID NO: 607699 - DNA, 383 bp, Homo sapiens
tacatatacaaagctcatcttttgatggggtaagtaaagtattattcttgtaaatataagtatcctggcagatagctggatatgagacctatagtcagatggctaggtagcaaataattttctccctttctgtagagctgtacactctgtagataagttatctttagccgtaaagaagctctattagtttaattaggtcccatttgccaatatatagttattcttgcaattactataaaggaatctattagtacatgaagatcatttccaggtcctacgtccgcaatggtatttcctaggttatcgtccaaggttttaatatgttttcattttagatttaagtttttaatcctgcctttgcctcccaaagtgctgggattaca

SEQ ID NO: 607700 - DNA, 324 bp, Homo sapiens
gttctagaggtccctgtcgggtgggtgcatccgcagcacgttggtaggcaaagcaggtgatcacttgagatcaggagttcacgaccagccgtgaccaacatggtgaaacccgtgtctctactaaaagtacagtaattgggcagacatggtggcacatgcctgtaatcccagctactcaggagactgaggtactagaatcgattggacctgggaggtggaggttgcagtgagccgagatcgcaccactgcactctagcctgggcaacagagcgagacccatctcaaaaataaaaaaaatgaaaaacttccaacagtactttccgt

SEQ ID NO: 607701 - DNA, 370 bp, Homo sapiens
  misc_feature (47)..(47): n is a, c, g, or t
  misc_feature (105)..(105): n is a, c, g, or t
  misc_feature (115)..(115): n is a, c, g, or t
  misc_feature (120)..(120): n is a, c, g, or t
  misc_feature (135)..(135): n is a, c, g, or t
  misc_feature (265)..(265): n is a, c, g, or t
  misc_feature (268)..(268): n is a, c, g, or t
  misc_feature (317)..(317): n is a, c, g, or t
  misc_feature (327)..(327): n is a, c, g, or t
  misc_feature (363)..(364): n is a, c, g, or t
tcccggtgacaccgcagtgggtgtgtgaggggaggacggaaagaccnagacgtgggcggatcaggaggagggtgaggaggcaccatgcgtgagatcgtgcaaatncaggggggcnagtgnggcaaccagatgggngccaagttttgggaggtcatcagtgatgagcatgggattgaccccattggaagttaccatggagaaagtgatttgaagttggagagaattaatgtttattacaatgaagttactggtaacaaatatgttnctngggccatcctcgtggatttggagccaggcacgatggatttggttaggtntggactattnggccagatttttagaccagacaattttgtgtttggnnagagtg

SEQ ID NO: 607702 - DNA, 1046 bp, Homo sapiens
  misc_feature (133)..(133): n is a, c, g, or t
  misc_feature (357)..(357): n is a, c, g, or t
  misc_feature (412)..(412): n is a, c, g, or t
  misc_feature (428)..(428): n is a, c, g, or t
  misc_feature (433)..(433): n is a, c, g, or t
  misc_feature (470)..(470): n is a, c, g, or t
gctctggcggacaagctctgccttgaggtccggcctcgggctcctcccatgccggcgttccgcaatcgaggttcagagattcaatctctctatccgatctcaattccctctgttcccctcaaattccacgtgntctcgcaacaacccacatcgtgatcgagccctagcgtcttggtgcgacgtgagcgctgggcccgagcgcggtaggtaccagacgctgctaggcatgatcgtgcgaggctcgcatcgcctcacagtgcatacaagacgcgtggcggcgcatagacgtaggcgcgcgccactaagcgtagcgtccactcaccatggatcgtcgcatcgccatggaatgtatgcgtnacgcgagatcgtatatggcactgagcgttgtactggctgtggggtagcattgtcncctcgggatcgcaatngcgancccggtatcgaccgtagagcgcgggctagccagcganggcctcgtgcgcaagaggcgcgatgcgagcgcaaacgaggggatgcatcgcaagcgccggttgcgagcatccgacgggtgtatgcggtccatcgccgttcaggcgctctcggtccactggcccttgtcccatggcccatggattcaaggcccatgctgacggcgcccctgcaatgcgtggaccctcaacagctcgcaggagaagctgctccgtggacgcgtgaacccgggctggggggacccggtttgtggtgggccagagttgtggttgggcttgacccttggtgggctagtcgctcgggcctcgagtgctccttgtagcgtcttctttgatctcttgtggtactcgaactgggttgcgccgaagtgtgtgatggaggcttcccatggccaggtccacctttggcaagagtatcgtgaggaagcaggggaggttaggaagcttgaagacttacttggtggaaccccgcgtggggggaaactgctcgtgggcctagctctcctgggcgccctggccgttaagcaggcccttgttcctgaactggtgcttgcgaaggcgccagatcttgtgcgccag

SEQ ID NO: 607703 - DNA, 638 bp, Homo sapiens
ggagccatttgagccatggggaacgctcacggactgtgtggtaatgagagatccacaacacaagcgctccagggcttgggttgtcacatatgccactgtggaggaggtggatgcagctatgaatgcaaggccaacaaggtggatgtaagagtgtggaaccaaagagagctgtctccagagaagattctccaagaccaggtgcccactcaactgtgaaacagatcttctgtgtggtggcattaccagcagacactgaagaacatcacctaagagatcatttctgacaacagtctggacacatcccaagtgattgaaatcactgactgaccgacgcagtggccacaacaaggggctttgcctttgtaaccttcgacgaccatgactccgtggatacgattgtcattcagaactaccatactgtgcatggcacaactgtgaagctcagaaaagccctgtacaaagcaagagatggctacgcgcttcatccagccaaagaggtcgaagtggtctctggccactctggtggtggtcgccggaggtggacaccgctgggaaccgaccaaccacggcgccggcacaggaaacacaccgcggacgtcggacggcccacggggccgccccgccccggcgcaggacca

SEQ ID NO: 607704 - DNA, 271 bp, Homo sapiens
catactgggatgccatgtaacgcatatggatagataacctataaggaaatgatcttctagaatcattaagcaggaaagaaagcatgaatgtagcgctatataaaaccacccttatctcccatgcaagagtttatcatactgcgcattgggcacaggatgcagacggttacttgcagattttctctcgaggagtctgcccagcaaaagcattcctggccattaactcaaaagtggctctgtaagttgcatagcactgcacaggaggttcacc

SEQ ID NO: 607705 - DNA, 275 bp, Homo sapiens
tcgtgccgctttattcatgccctctcagtcattgaatccatcattgtgctggccatggcctttgagcgttatgtggccatatgccacccactgtgccatgctgaagtgctcaacagtacagtaacagcccatattggcatcgtagctggggtacggggatccctctttttttccccactggctctgctgataaagacgctgggcttatgccactcctatgtgctctcgcactcctattcgctccaccaggatgtagcgaacttgtcctatgcgga

SEQ ID NO: 607706 - DNA, 100 bp, Homo sapiens
gcactgacggggtggaacctgtttttgttggcctcatctgcaagctcttgtccccatactcactgtagcccatgccttgcagtgaatgtacttgaatgtg

SEQ ID NO: 607707 - DNA, 312 bp, Homo sapiens
ctcgttactcccagattcggtacacacgaaggtgtacgcggcgaggttcagactggaggagctcagtgatggccggcattcacaagaaggtggcccggaacatcggcatttctagtgagatccgaggaggcggaacaagtccacggtagtctctgcatggctcaacgtgcacgtcggctgatacatgagtaccgcgtccataactcatcctcattccccaggtaagccctcgtgcccccaatcaagggagacagattctgctgagatgaacttgaatactggcccacccagctgaccggcaccggtcatgcc

SEQ ID NO: 607708 - DNA, 211 bp, Homo sapiens
aatagcgtgatgatcctctgacttctccttggtggatgctaactcgcgactcctgtgttaagcttgtgatccggtaactgctacgactacggcttcgagatcgagatcttccataacttggacttctgggcccatcaactttaacccggatgtaggcagtttctccctcatgagatctaaacttagtgttatccagttttcgaactgcata

SEQ ID NO: 607709 - DNA, 109 bp, Homo sapiens
tacgcatcgtgtgatgagcatgggtacacacacacccacatgcacacacagtgcaggtacacacacacccacatgcatgtgtgtgcatgtgggtgtctgtatgtgtgta

SEQ ID NO: 607710 - DNA, 948 bp, Homo sapiens
  misc_feature (663)..(663): n is a, c, g, or t
taaaaagggggcacccatgggggcccccccgggggaaaaaaactcccctcccaaaaaaaaaaaacagaagaagtcaagaagattctaacagaaaatgatagacgtgtgtggggaggcaccgtggcgccgtggtaaccccccggggtaacagagggggcgagtaggtcaaggaggggtaatcatgggccccacaacgagctaagcggatcgtgccgggtacaacactggacgccacaacggtgcttccccaagagcgtggtgagacagacgacagcaccccgtggttgcaagacaaaacgtgacacgaacagatttcgcggcacacaatgtgtggtggcccacaccccaggaggtaaaaacagcgaggagagaatatcccgcgggggaagaacaacacaacgagagtgaataaacaagcaacagagagcgcccagccgtccagaaaaaggaggtaagccgagaatccaggggcgaagaaagcagacactttctcacaaaataggagggagagacgccccaccattatgtagggtatataacccgaggagggaagcattcttatcacagaaagaacgaatcaagcaaaatggaaaagaaagtggacggaggcatctgacgcagagaaaatgctatgacacacgcatatgaagcgcgcggccacancggagtaaatgagaaaggcaataaaggtgatcataaaagcacagatgaatcaaaaagaggtgtagacacacgaaaaaaaagcgcggcgaccagggtgctcgaacaccacaagagagtgagcaagcgtgacaccaggaaggacgaagcgatcaatatacaccgacggaggtatacaggagaacgaacgacgaacggtcagacgcatgacatcagcagagccacaatgatgggtatagaaaacacgaatggatcagacggaacagatcgatctacggaagccaatca

SEQ ID NO: 607711 - DNA, 223 bp, Homo sapiens
  misc_feature (55)..(55): n is a, c, g, or t
  misc_feature (109)..(109): n is a, c, g, or t
  misc_feature (135)..(135): n is a, c, g, or t
  misc_feature (154)..(154): n is a, c, g, or t
  misc_feature (211)..(211): n is a, c, g, or t
gggcaacatagtgagaccccatctataaaaaaaaatcttaaaaattagccggccncggtggtgcgtgtctgtagtcccaactacttaggaggctgaaatgggaggatcncttgagcctggaagtttgaggctgcnccaagccatgattctgccnctgtactccatcctggtgacagagcaagaccttgtctcaaaaaaataataataaaancaaagtttgcca

SEQ ID NO: 607712 - DNA, 946 bp, Homo sapiens
  misc_feature (160)..(160): n is a, c, g, or t
  misc_feature (169)..(170): n is a, c, g, or t
  misc_feature (173)..(173): n is a, c, g, or t
  misc_feature (179)..(179): n is a, c, g, or t
  misc_feature (182)..(182): n is a, c, g, or t
  misc_feature (185)..(185): n is a, c, g, or t
  misc_feature (211)..(211): n is a, c, g, or t
  misc_feature (215)..(216): n is a, c, g, or t
  misc_feature (245)..(245): n is a, c, g, or t
  misc_feature (265)..(266): n is a, c, g, or t
  misc_feature (283)..(283): n is a, c, g, or t
  misc_feature (285)..(285): n is a, c, g, or t
  misc_feature (291)..(291): n is a, c, g, or t
  misc_feature (293)..(293): n is a, c, g, or t
  misc_feature (309)..(309): n is a, c, g, or t
  misc_feature (311)..(311): n is a, c, g, or t
  misc_feature (313)..(313): n is a, c, g, or t
  misc_feature (319)..(319): n is a, c, g, or t
  misc_feature (331)..(331): n is a, c, g, or t
  misc_feature (339)..(340): n is a, c, g, or t
  misc_feature (344)..(344): n is a, c, g, or t
  misc_feature (346)..(346): n is a, c, g, or t
  misc_feature (349)..(349): n is a, c, g, or t
  misc_feature (358)..(359): n is a, c, g, or t
  misc_feature (372)..(373): n is a, c, g, or t
  misc_feature (376)..(376): n is a, c, g, or t
  misc_feature (508)..(508): n is a, c, g, or t
  misc_feature (534)..(534): n is a, c, g, or t
  misc_feature (548)..(549): n is a, c, g, or t
  misc_feature (572)..(572): n is a, c, g, or t
  misc_feature (599)..(599): n is a, c, g, or t
  misc_feature (601)..(601): n is a, c, g, or t
  misc_feature (611)..(611): n is a, c, g, or t
  misc_feature (617)..(617): n is a, c, g, or t
  misc_feature (619)..(620): n is a, c, g, or t
  misc_feature (636)..(636): n is a, c, g, or t
gctgcggcgggagatgctgtcgggccgcggcggcgcttggcagccaggagctctgcattgaaggcactggggtgaggcttactgccggcaggctggatggcgtacaagtgaatgccgaagacagaagatttggatgatacaccactgactttctttgttnggaatacanngtnatgaanccnttnctggagcatgtctacaagctctgtangcannacgatctgaaggtgaagagaagacattancaggggacgtgaaaaccagnnctccacgaactgcaccnangaaacngntgccttctattcccananantgcttngcccataagctnagcctacnntctncntgncccagcagnnacagtcaacaaannggnacgcatgcgtcctatggacccttctacctggaatactctcttcttgcagaatttaccttggttgtgaagcagaagctaccaggcgtctatgtgcagccatcttatcgctctgcattaatgtggttggagtantattcatacggcatggactttaccangatggcgtatttanngttacagttaacatccctgatanctatccagatggtgactgtccacgctngntgtcgatatncctgtntnnacccgtagttgatccnacctcaggtgagctggatgtgagagagcattcacaattagaggcggcaccataatcatatgggcggtataagtgttgcaggagagtgtacagatgatcggcacggccgtagccagagctggagtatgattgaaagattaggtgtaaggaagtgtgaagggtaagtgggggctggtgtgcacttaaaacgaagataaattgcatgagcatgcgaaggaaaagtgtaaagaaaggaagagatgggcacggacgagcgtaacaaggtataatgtacaaagaatggatagtaattgggttttttttttcagaat

SEQ ID NO: 607713 - DNA, 914 bp, Homo sapiens
  misc_feature (128)..(128): n is a, c, g, or t
  misc_feature (137)..(138): n is a, c, g, or t
  misc_feature (141)..(141): n is a, c, g, or t
  misc_feature (147)..(147): n is a, c, g, or t
  misc_feature (150)..(150): n is a, c, g, or t
  misc_feature (153)..(153): n is a, c, g, or t
  misc_feature (179)..(179): n is a, c, g, or t
  misc_feature (183)..(184): n is a, c, g, or t
  misc_feature (213)..(213): n is a, c, g, or t
  misc_feature (233)..(234): n is a, c, g, or t
  misc_feature (251)..(251): n is a, c, g, or t
  misc_feature (253)..(253): n is a, c, g, or t
  misc_feature (259)..(259): n is a, c, g, or t
  misc_feature (261)..(261): n is a, c, g, or t
  misc_feature (277)..(277): n is a, c, g, or t
  misc_feature (279)..(279): n is a, c, g, or t
  misc_feature (281)..(281): n is a, c, g, or t
  misc_feature (287)..(287): n is a, c, g, or t
  misc_feature (299)..(299): n is a, c, g, or t
  misc_feature (307)..(308): n is a, c, g, or t
  misc_feature (312)..(312): n is a, c, g, or t
  misc_feature (314)..(314): n is a, c, g, or t
  misc_feature (317)..(317): n is a, c, g, or t
  misc_feature (326)..(327): n is a, c, g, or t
  misc_feature (340)..(341): n is a, c, g, or t
  misc_feature (344)..(344): n is a, c, g, or t
  misc_feature (476)..(476): n is a, c, g, or t
  misc_feature (502)..(502): n is a, c, g, or t
  misc_feature (516)..(517): n is a, c, g, or t
  misc_feature (540)..(540): n is a, c, g, or t
  misc_feature (567)..(567): n is a, c, g, or t
  misc_feature (569)..(569): n is a, c, g, or t
  misc_feature (579)..(579): n is a, c, g, or t
  misc_feature (585)..(585): n is a, c, g, or t
  misc_feature (587)..(588): n is a, c, g, or t
  misc_feature (604)..(604): n is a, c, g, or t
gctgcggcgggagatgctgtcgggccgcggcggcgcttggcagccaggagctctgcattgaaggcactggggtaagtgaatgccgaagacagaagatttggatgatacaccactgactttctttgttnggaatacanngtnatgaanccnttnctggagcatgtctacaagctctgtangcannacgatctgaaggtgaagagaagacattancaggggacgtgaaaaccagnnctccacgaactgcaccnangaaacngntgccttctattcccananantgcttngcccataagctnagcctacnntctncntgncccagcagnnacagtcaacaaannggnacgcatgcgtcctatggacccttctacctggaatactctcttcttgcagaatttaccttggttgtgaagcagaagctaccaggcgtctatgtgcagccatcttatcgctctgcattaatgtggttggagtantattcatacggcatggactttaccangatggcgtatttanngttacagttaacatccctgatanctatccagatggtgactgtccacgctngntgtcgatatncctgtntnnacccgtagttgatccnacctcaggtgagctggatgtgagagagcattcacaattagaggcggcaccataatcatatgggcggtataagtgttgcaggagagtgtacagatgatcggcacggccgtagccagagctggagtatgattgaaagattaggtgtaaggaagtgtgaagggtaagtgggggctggtgtgcacttaaaacgaagataaattgcatgagcatgcgaaggaaaagtgtaaagaaaggaagagatgggcacggacgagcgtaacaaggtataatgtacaaagaatggatagtaattgggttttttttttcagaat

SEQ ID NO: 607714 - DNA, 738 bp, Homo sapiens
agcgggattttttaccttataaaagagataactgttgctgcaaaggtagagatattggatatggattgagggggaacaaaactaaaaatgggaagtagcaggtgttgaaataatcttgacaagaaatgacaagagcatgaactaagcacctgggaagggtttcatgcttctttttatcagactctgaagtacctgtactttggtcagatccctcgaagcctaatgagcctgtggaggagctgagatactgggtcgagataaatggaaatattttcagactacgagttccagtcagagtaaatgctgaaaacgaacaagagtcttcaaattgacaatcttcagggtgagaaagaatatacttgaagggtgagatttcatttctactactccttagatttgcttcattttctctgacattttctcacagtctacagtgacatctggttgctgcagtggtaacaatggttcctgaactgatcagttaaattgagcaagccaggcattgctttcattcactttcaagtaacccagctggagtccggcggacctcatgagatcgctgctattacaattattattactgttactttatgttaaaagtcctatctttcaaatgctatgctatagaaaacacaaactgagtgtcatctggaccagaataacgtagaaggctttatttaattgattcatttattacatctaaacagtggctaagcatttacattttctggcatacag

SEQ ID NO: 607715 - DNA, 315 bp, Homo sapiens
tgaagtcttcaagtcatgtacagctgcggaggatctgggttctgctaccgaggtcgcccctaccgaaattttcacatgcaggttaggtagtgaaggacctgtgggtatgttcgatactgtatgcgtatatagtaaggctgcatagggtcgtcgcgtcgtgcgtcgtctgtcacgcgagaaactacgggcaggtcaatatcaatggttaaaagtaagagacagctgaaccctcgtggagccattcatacaggtccctaattgaggaacaagtgattatgctaccttagcacggttagggtaccgcggacgttaaac

SEQ ID NO: 607716 - DNA, 1166 bp, Homo sapiens
  misc_feature (856)..(856): n is a, c, g, or t
  misc_feature (922)..(922): n is a, c, g, or t
ctccgtctctcttctcagtagagcgacgaagctgcatcgacgggggacacgaagcggagcaggaggcgtacatcagtgtcgcgctgtcgtgcacttcatctcgacagggtccggagacccgtcggtgcatgcccccagagtgtcgcggatcccgatggaggacccactctgtttgtgaatccccgccccctaggcagtgataaaatgtgtgtaaacgcaatgtggtaaacccttatcgccgggttctccgctccagattgtcgccatggggaacgctggttaatgtgaggagccatgggctgcccccccccgggaaatccggcccagtgggaaccaagggacaggctgcccaccagccgcacacattgttgggaacgtaaaattttcgggagaagaaggaaagatctttacccgcaggactgttagacgccccgtgggaaatgtgtcacccgccagagagtgttggatggtacccgggctgcctggctgtaaagtgtgccccactgggaaaaggggtaaagccctttcaaacggtcacgggacccgcagccccgatgtaccgctgttaactttctttaagaatggtgcctaaagaccaccacgggtggttcccccggggtgaccttctgtgccccgcgttaaggagtgttttaaacttttacaagggggcccagggcactatactgggggaaagtaagttttccccaaccggcctctaatcacacttgggtggaacaaaagtggctccctctgttaagcctcttttgggttcttgagtgatattgacacgcacttccttcttccaccgcctcacgagaatgtttctggtgttggggaccacagcgcacttggtggncttcaccgccctcgtagtgccccacacacttaagggaggctcgaggcgggcggattcaccctcgangatcacggagtttcacagaaccacaccctcggcccaacactggcgaatttcccctgtgttctactaaaaataccacaaaaatgtgtggggtgttggttggcacggaagcctcgttattcctagctactccggaggctgagggccggagaaattccttgagccccggaggcggagattcccatgacaccgagatcgtggtccctgcactcccccctgggggaaccagagtgagactccctttccc

SEQ ID NO: 607717 - DNA, 157 bp, Homo sapiens
tagaggatcccgggcgacattctctcctcctttcattacagattcgtctaaagtatgcaatacattgatagcatgctaccacagcagaatttctcgcaaaataggattcagttctctcaaaccttactgctgctttatcactaagtttatgtaatac

SEQ ID NO: 607718 - DNA, 600 bp, Homo sapiens
gttgccagctctgaatccatgaacaaaatctggccgactaggaatcactaactgatcgccattttccagtttaagtgcaggcaatttatcaaaattctcatcatttgccgccaaaccgaacgaaatacgacccgtcgctttcaactcacgcatttttgccagcacgtgagcacttgcttcctgttccgccttcagttttaacgcaattacctgtgcatctactgcaccggattgattggctgcggctttagcattttctgtacgactttgcgattccagtctgcgtactgctttctccaggttgagctgctgcttctggcgggccttctcacgataaaactcagtaccaaacaaataagcattcgaagttgtgccgcccgctttcgcgattagagactgtatcgtttctcctggccccatctgatacacaccgggaacattcacctctcactcaacgcgcgcaaaaaccttacgtttcgcaactggcacctgaatatcgttttgagaaaaaaccgtcacggcatcacctgcctgcaaacgcagattatcttcgctttcgggattatccattgcccgaccaagattaagcggcaacggggt

SEQ ID NO: 607719 - DNA, 389 bp, Homo sapiens
ccctaataaacccgtccccggggatgtggggataaaatgccggagcctggctcgctagggcatccaggttcttccttcctttttgccctgctgtttccaggccccaagaatttcccacagttccccaaaaatgaaccccccattatttcaggtccctttgtttcccccgatctttaccaaattcctgactcagagttcctcccctttgcttttgactctccttttatttttacctctccttttatttttatgatgtttacccttttttttttccccagggtccccctttgagtggtaaaagtatgttaataaaccagttcttagaccggagccccaggcaactgctcaatgttggtcattgtccctgttttttaatgtaacttaaggga

SEQ ID NO: 607720 - DNA, 291 bp, Homo sapiens
ggtatcccgtggtcgatcactgtactccagcctggggatcgagcaagacttgtctacaaaacaaaaaagaaaagaacaacagaagaaaacacaagattaatagtaatttaatatattttttttttctatattaaaatgatccagccatggtagggcacaaaaaccaatttagagaccctccagagaatggaagtaaaaaccaaaaacatgccaccattcagagcgacagttaacactttctttggtatttccagggtggtgagacggaaaccagtccagtgatcgaccaag

SEQ ID NO: 607721 - DNA, 573 bp, Homo sapiens
  misc_feature (35)..(35): n is a, c, g, or t
  misc_feature (46)..(46): n is a, c, g, or t
  misc_feature (60)..(61): n is a, c, g, or t
  misc_feature (69)..(69): n is a, c, g, or t
  misc_feature (74)..(74): n is a, c, g, or t
  misc_feature (88)..(88): n is a, c, g, or t
  misc_feature (101)..(101): n is a, c, g, or t
  misc_feature (112)..(113): n is a, c, g, or t
  misc_feature (115)..(115): n is a, c, g, or t
  misc_feature (143)..(143): n is a, c, g, or t
  misc_feature (146)..(146): n is a, c, g, or t
  misc_feature (148)..(148): n is a, c, g, or t
  misc_feature (162)..(162): n is a, c, g, or t
  misc_feature (207)..(207): n is a, c, g, or t
  misc_feature (216)..(216): n is a, c, g, or t
aaagcagcctaggatgagcattctttgaaagcaantaggttattcncctggtattatttnnctgttaanaaatntgtgacttcatgangttgatttttaanggcagcatcannanctgaaaaggaagggaaaaaataggcagnttntntgcacttgtttggngctccccaaaacaggagccatggagaagtggcatcaagaccgggntgccctttngagaacaccctgtggcagttcaaagacacgttttttttacattggatgcagccccttttttcagcattggaaaaaagtggttttgagcccagttgaaaagcacttcccactccttttttttgttttgaaaggggtttgggtcagtttgcagctgggtatggtattatgttttataatccggcatcccttttatcctatccagtcatatttaatgtagaaaattagtttccagtgaaagtaatatgtaggggttttatgaaatttgggggcaaaatccccttttccattgaggatatttgatgtaaaggaaaaaaaaaactcagttccccaataaaatacaaaagtggcgaaagttta

SEQ ID NO: 607722 - DNA, 318 bp, Homo sapiens
ggtcagaggcgcccgtcttctcgtcctcgatgctgatgccttgggctgctccaggtcactcaggatctgctccaccagctctgtacacgtggtccgacaagtgacgatgggagatgccctgccacctcgtcttaattggggtgctgtgtcgtgcggcggtacagaacggtccatgtgaggtggtccgcggcatcctgcttgttctctctggtcttggtgacgatctcggcattgaagtgctcatgcatacggtggtcccggtgtgattctactggcaatgggtcatataagtacttcttgaagaactccttcttggcg

SEQ ID NO: 607723 - DNA, 342 bp, Homo sapiens
  misc_feature (246)..(246): n is a, c, g, or t
aggtttttttggccctttggggatttcccccccccccacccaaaaacatttcagcctggggtccccagtttttgcctttttcccgatgccccgaccaagccctttggcctgtccctttttccccggccccccctttccaagggcaggaaggggccgtttccttaagcccctcttttttggggctgttttaagggatggggagcccccccccccttttccctcaacaaccccccccccctgttctgntggatggtccggggtttggggccccctttttttttttttttttttgcccctgtttaaaaaaaataaaattttcccccccctttttggtttggtcca

SEQ ID NO: 607724 - DNA, 141 bp, Homo sapiens
gcacagtcatcatcccacccaaaaaaccacgcgtgagagcttcgttttctatttatttacattattggctttcttttgtgagcggcctttgtagcctcgtcaggaagttggaaagccacgttaaggggacttaaggcctct

SEQ ID NO: 607725 - DNA, 353 bp, Homo sapiens
atgtgctcgcagtcaggctttatatctcccttatcaccattttcgtgttatagttgggagtctaagagctcttgccatgcatagataatgtcctcagacctctaaaccaccagcaccagctctgtgcctgttatatggcaggctttcgatgaacgcttgctgaactggatctgggggtttgatcgagagaagagcttaaagatgctctcccctccccgttgacattatttgcctgacattctttgcccacacagtgtggccttatgacaacacttggcaggagagtgatggcttgggatgaaggaggagtaagctgtcttgtccggtgttgtctctgcccattccacctggct

SEQ ID NO: 607726 - DNA, 203 bp, Homo sapiens
  misc_feature (26)..(26): n is a, c, g, or t
  misc_feature (53)..(53): n is a, c, g, or t
  misc_feature (59)..(59): n is a, c, g, or t
  misc_feature (75)..(75): n is a, c, g, or t
  misc_feature (87)..(88): n is a, c, g, or t
ggttgccttacatctcttatatagangacctagcagccccgacaggatatgcntataanctttgagctcttgaancctgagaagcannagagatagcgtctctggtacagatggcaggctatgtggtctaccattgcgtcatagatcgacatactcaatctcgtacaagtcgctctgcgtgtactatgttaaggttcattttg

SEQ ID NO: 607727 - DNA, 867 bp, Homo sapiens
  misc_feature (67)..(67): n is a, c, g, or t
ggcgccaggcgcacgctgtgggccgcgcagacccgtcgtctgggttgcgccagcctactaagccagngcggccacgtcgcgggcctgcacgggcggtaagaacaccgctcaacggtggccgcccaacggtcggggggttccaagcgcgcgcggtgggttctccggccaggccggaaagttgggcaggagcgaagccgccgccgggggcgggccccccgggggacccttccttcggtgccccaagggctctccttcggggcaaggaaattcccgggattggcacccaaagggaagtgtggacgggcaagggttcccctacggggcggcggagcaccggagggggaagaaccccggggaccaaccgcagggggctcccgggcactcccgagaagggtcaggagggataccatcccgagggggggagatattaccccaccagaaagaaccaaaaatcaccgggaaagtacaccccccgggggggtggggggcggtgacaccatcgggcaggattccggagggcccccccgagaaaagggggaaccccccaagggggtaacaaaggggctccccataccacgtacatttgccgaggacaggaaggggaacccggcaaagaaacgaccgccctcgggaaaaactccacggggcgagctgcgagagggacaccaggcatgatccccccgcgcagcgggagacaaaccaccaaaccacggaggacaccttcacgcagggaagagagcccatctccaccagaggcagaggggaggagggccccacttaccacacggcgaccgcaggagacgaagagacacccgcctggtgatggagaacacaccgggacccttaattgggggcaccaccaacaag

SEQ ID NO: 607728 - DNA, 126 bp, Homo sapiens
ctgtcccttaggatgtcgcgggctgcacgctgcgctaccacatgacgtggactcagcagtggtgccattcgcctatcgactgcgcccgagtgacgcgataaaccttgcttaaatcccctagttgcg

SEQ ID NO: 607729 - DNA, 134 bp, Homo sapiens
tcagataatgtagttggtcagattacatgagtctggagccaggaggtgatgatgaggggaggatgcatggggctgtgggaaggagagagaagagtggggtcgaggtaggagctgtggagtagtcggggggtgta

SEQ ID NO: 607730 - DNA, 232 bp, Homo sapiens
tgtcgcccaggctggagtgcagtggtgtgatctcggctcactgcaagctctacctcccaggtcacaccattctcctgcctcagccttctgagtagctgggaccacaggcgcctgccaaccacgcacgggctaaatcttctttaataagtttttatttagtagagcgggtttcatcgtgttagccaggagatctagaccatcctggctaacacgatgaaaccccgtctctact

SEQ ID NO: 607731 - DNA, 384 bp, Homo sapiens
tcaatattggggcggcatgggcttcatgtgggacacccggtggcccgcgcctatcgcgacgtgcgcctggtgtcgattggcggcggtgccgatgaaatcatgctgggcatcatctgcaaactgatgggcaccctgcccggtaaaaagccatgaacaccttgctgctagaagcccacaacggcgtgctgcatatcaccctcaaccggcccgaatgccgcaatgcaatgagccttgaaatggtcaatgagctgcgtgcggtactggcgcagttggacagccaggtgcgcgccgtggtgatcagcggcgcgggcgggcatttttgcgcgggggccgatgtgaaggatctggtcggcgcgggggatcaactgcaagcgttgaaccgcg

SEQ ID NO: 607732 - DNA, 1144 bp, Homo sapiens
cttctcattaatcaatatcgacatcggaaccactgattaccgtacttcatttgcgagtgccttcgagcatggaagctcctacggcagcatgattcttatatcccgtccattataccagatgcctaagtgtgcggctcatgctcacggtcaaactcgtgtactacgatagaaccgagcctagcaattctaaacattagtgtgtactgtctagtagccacattgcgattgcgttcatcaaatctttctgtacaattaagtcaactaatgcacagtctatcatgtacagtagtgcttcgggccaatctgtacttacattccactctatataattcgagttgctcctccaagatgatgagacgattatccctggtagatataacaattagtaagacttcatgcactgctgtacctaccctcgtgctcctatacctggcgtcgcgatgcttctagtaggtgcgagcgaccgtgacacacggaacagggttgtgatgatttcataccactacccctatgaactatggatgctttagtttcgcccacgcctgggaaagcgcatcgcagttcaggatcctttatgccttgtcttgttcgtaccttctgacgggcctaggcggagttggtctcctcctcatgccttgatgcggtgtcgcgagtgccaacttatcaattcatccgatcacagtctagtcataattgatgaaatccccccctgaccaataccccgcgggtttcactgaaccggtcgcccgtcgtatcgatctggatcaggtgccttatttcgcgtgccgtgcctatcttactcctgtctcgtacccagtcctcatctgctggtatctatctatgcatagtatactagacctgctccctcaagatcatgcttcttcggagcaccgcgctggagtcggaggacccctctttgatagctaatgctgtcctctgatgttcacggtcacctgagttgtattctagatacttccgggtctgatgttcctcctgtgtgttcttgttgtcccggaaagtatggccgttggaatcccggttgtccgggggggctccggggtgccagggggggcgtggggccccgttttcgggagagagggggcaggttttgccccgaagggtccccacggggtatttacaccct

SEQ ID NO: 607733 - DNA, 143 bp, Homo sapiens
gttatgcaccattccgatgtgcctcctgagtagatagtgggggagtaagagcagcagcagagaactcattctcaaacatctactatctatcaggcgctcgatggcccggctctggcctttgttggctattctaccttctagga

SEQ ID NO: 607734 - DNA, 134 bp, Homo sapiens
tgagtgaacatcagacgagagcagagctctcacttggatattctgattcagtaggtgtgagttggagccaggaatctctatgaactcattccaagtgatcctttggtttatgttcccctcaggcaatcaagctt

SEQ ID NO: 607735 - DNA, 113 bp, Homo sapiens
atataaaaaagatccgcataataaaccaaatcagaaaataataccttgtaatacctctgtaagaagcagaatacaccatatgttattcacatgtataggagtgataagaaaat

SEQ ID NO: 607736 - DNA, 398 bp, Homo sapiens
  misc_feature (22)..(22): n is a, c, g, or t
attcccttcgggggactggtanagcatctatgaatgctttggccaccttcctcacgcatcgcggtcaaattaatccgcaaacacttcacctgaagaaggagcagcgatcagctcgtcgatgtaccagagaagatgttgtgatgctgtgctaaggcgtttgttgcgggtattaggactaacggcaagttttgcgactttattgctggtgggctgtggccggctcagttcttcaatcagactggtcaagtcagcctcagtaaattgtttcccagagcgaatacggtcgtaaatattcatacggcgcttgcgcgcccatcggtgaatgaccagcacttcgccgctattgcgcatcagagtttgaagtgcaaggtgacgacgacgaaggaaccagtcgacgc

SEQ ID NO: 607737 - DNA, 404 bp, Homo sapiens
ttagtagagacgaggtttcaccgtgttagccaggatggtctcgatctcctgacctcgtgatctgcccgcctcagcctcccaaagtgctgggattacaggcgtgacaccgtgcctggcctctagtttttattttttagacagagtctcactctattgcccaggctggagtgcagaggcatggtcacggctcatgcagcctggacctttggaatccagcgacgctcctacctcagagaccctcagcctctcaagtacctgggattacaggcgtgagacacagtgcctggccgaaccttagtttttaaaatataaatttaattcaaaatacaggctgggcgtggtggcttacgcctgtaatcccagcactttgggaggccgaggcaggcggaccacttgaggtcagg

SEQ ID NO: 607738 - DNA, 400 bp, Homo sapiens
cacgagggcgaagtagttggtgcgatcgtgcgcggtggtgccgttgaactgcatcccccggctggccatctgccggccgatggcgccatcgggaacgctcggcgttcccttgaacagcagatgctcgagcaggtgcgccatgccggtctcgccatagctttcgtgccggctaccgaccaggtaggtgatattgatcgtggtggtcggctgcgccgcatccggggcgagcagcacgcgcagtccgttgggcagccggtattccgtgatgccctcggcgctggcaaccggtgtgggcaagcccggcaccgcctcgccggccgatgtggccgcagtggtcgatggcgcaggagtttccatcgacgagcgcgcggcatggaccggaccagcgctgcacaacgcg

SEQ ID NO: 607739 - DNA, 275 bp, Homo sapiens
aaaaaaattcccccttaatttttgaatttttttttcccaatttttttaaagaaaaccagaacttttcttttttttaaaaataactttaatttttttccccccttttttttttttaaatttaaaatgggttttttgaattttaatttttccggaaaaggttttttgggttttaattttttttaaacccctccaatggttttccccttaaatttacaccccctttggggttgggttggtttaccccccccctaaagggaaaaagggaagggggggga

SEQ ID NO: 607740 - DNA, 947 bp, Homo sapiens
  misc_feature (298)..(298): n is a, c, g, or t
  misc_feature (301)..(301): n is a, c, g, or t
  misc_feature (316)..(316): n is a, c, g, or t
  misc_feature (322)..(322): n is a, c, g, or t
  misc_feature (338)..(338): n is a, c, g, or t
  misc_feature (358)..(358): n is a, c, g, or t
  misc_feature (392)..(392): n is a, c, g, or t
  misc_feature (404)..(404): n is a, c, g, or t
  misc_feature (421)..(421): n is a, c, g, or t
  misc_feature (436)..(436): n is a, c, g, or t
ggcgcctccagtcccgttccggagtctcgggcccgctgcggtgccgtcgctggatagctgggagtcaagtgactgcagacgctttgaatggcacgcgattggcaatgaatctactctttggcaagatgtatatcctgcgggatgcagaggccccatactgggttgagtgattgcctattgaagatccctgctgctgccattgaggcatgctgcaggacgtgtggagaagcccgatctgagtctgtgtacttgcgaggactttgtcgttacagacgggaccaggcagctggctagtgangcntgtttcactgctcgnagtgangaaactcactggtganaagccctttgctgccaaggnggaccagctgctctgtacagactgctattccaangagtactcatcnaagtgccaggaatgcangaagaccatcatgcnaggtacccgcaagatggagtacaagggcagcagctggcatgagacctgcttcatctgccagcgatgccagcagaccaattggaaccaagagtttcatccctcgaaagacaatcagaatttctgtgtgccctgctatgagaaacaacatgccatgcagtgcagttcagtgcaataaagcccatcacctcggggagcgggtcacttaccgggagcaagccctggacacaaaggagtgcttcgtgttgcacacgctgacaggaacgccagctgtctgggcaagcgcttcacagactcgcgatgactttagcctacgtgactgaattgttatctgtgaacttgtattgccaagcaagttgtgctgagtgcaccaaccccatcagcggacttgctggccccaacaattacattcttccttgaagaacgcgccgttgccatttaaggactgccttaactgttcagaagtgctccctctcatgatgaagcgtgacatcctccacacagatgtaccact

SEQ ID NO: 607741 - DNA, 418 bp, Homo sapiens
tgtagtagctccctaaaataataccctatcatctgctcctaatccctccaatctctctccactgagtggctggaatgcttttttttttttctttcacttatataagggataatttttcttttttttttttttttgagacggagtctcactcttccgcccaggtggaggttgcagtgagccgagatcgcaccactgcactccagcctgggcaacagagtgaggctctgtctcaaaaaacaaaacaaaacaaaacaaaacaaattagctgggcatggtggcacccagctatagtcccagctacttggggagctgtggcagaaggatcgcttgaatctgggagggtgaggctgcaatgagctaaggttgtccccctgtactccagcctgggtgacaaagtgagaccctgtctcaaaaaaaa

SEQ ID NO: 607742 - DNA, 187 bp, Homo sapiens
tgcatcctaccgcgggtgccctggtgatgacgtaatgcttcccatctgtgtacatgccactttgaatcttgatcgtgacaagaaataccttaggccttcagtcaattccgaagctccttcaggtgttgttataatgggcgttgtaccgtgcacatatgtgaatgacgagtatactacccatacagac

SEQ ID NO: 607743 - DNA, 291 bp, Homo sapiens
tattacttctgcacaacgagcccattcacttgtgcggccagagaggggcaggtgctgtgcgacggctgacggccgcaccaccctaggccctgtgtctggcaccagccccgcctccggcgccggccccgcagccagctctggccgtgcgacaatagagtccggaagtccaggcaaagcggctcccgggagcgccgcgcggtcctgctgcgggatcagcgaggcccgcgccccggcgggcgggcggcatgggtgcagtgctggctgaaaaaataatcgcggggttggcggccg

SEQ ID NO: 607744 - DNA, 336 bp, Homo sapiens
tagctgggattgcagtcgtcaacaccacgcccggctggatttgtaatttttttgtggagacggggtttcatcacgttagccaggctggtctcgaactcctgacctcaggtaatccacccacctcggcctcccaaagtgctgggattacaggcatgagccactgcacctggcctctctacggtaaatattgaaagttgctgcgacacagggtatgcacatttaaatttttgttttctttttaaagggacagagtcttgctctgttgcccaggctggagtacagtgacgcaatcttggctcaatgcaacctccgcctgccggattctggctcaatgca

SEQ ID NO: 607745 - DNA, 345 bp, Homo sapiens
gtcgactggaccgtctccccggagaacgcgcctgacaagccgcagtacctggaactgacctaccgcaacggcgatatcgtcgcgctggacggcgtcgaaatgaccccggccaccgtgctggcgaccctgaaccgtatcggtggcgaacacggtatcggtcgtctggacatcgtcgagaaccgttatgtgggcatgaagtcccgcggctgctacgaaaccccgggcggcaccatcatgctgcgcgcgcaccgggcaatcgagtcgatcaccctggaccgcgaagtcgctcacctgaaagacgagctgatgcccaagtacgccagcctgatctacaccgggtcgacg

SEQ ID NO: 607746 - DNA, 652 bp, Homo sapiens
  misc_feature (89)..(89): n is a, c, g, or t
  misc_feature (92)..(92): n is a, c, g, or t
  misc_feature (95)..(95): n is a, c, g, or t
  misc_feature (110)..(110): n is a, c, g, or t
  misc_feature (119)..(119): n is a, c, g, or t
  misc_feature (132)..(132): n is a, c, g, or t
  misc_feature (620)..(620): n is a, c, g, or t
tgtgtacagcaaaataaaattgcatactctggttagacaaataaaaaaattccacagtaataattttagtgttcatataattgcataanatnttntagtttcaaaacatnccatgtttntaatgtaaatgantaaaatgacagcatttactatttcaagcatatgggaattaaatttgtagcataaaccaagggctgacaaactatggtctcttggtcaaatctggtcagccacttgtttatttaaagaataattgatataggaattttacaccacaaaattatacaattaaaccatttaatgtgcattattcattggcgtttagcacatttgccagtaccactactatctagatccaaagtaattttttcacttcaaaagggagctttatacccattagacagtcatgtcacattctcccattctccatgccttgcaacctggcattatgtgttggcatcgttctatagcctattgggtaatgcttttaaaaaaatccaaataggtatataacttcaacaaagtgttttattttttcttacttctaacatgtcctatttgtttctaaatagtaattctatgatgtataaaattaaacttttgtttctaattgctctgtnattaaacatattcagaggtgttgtgatttaaa

SEQ ID NO: 607747 - DNA, 587 bp, Homo sapiens
agcggaggcagctggggtaaggagttcaatggcagcgcccacacccgggggctctccgcaaccgaccgctgtccgctcccccacttcacgaccaggtcatagcaaagcaattgagtgagtacacagtggagacaaaaagggatcggctggaggtgaagaaaaagagagatcagagagccgagagaccgcgagatatagtaggcatgcaaaaaacccaaaccagaatagttgcaacaggagaagcaagcaaatgcgtagcagaaaggaaacaccatacaacaaggtacacaaacataaaaccaacaagtgaaaagtacgcaaccaagcaaatgcagatggaaccaatgaagcaagtcgaggaactagaaagaataaagggacagcccagaaccatacacaaacagagcaaggagggcaaggcataggagaaagcaatacaaagcgaaacaaaacagaagaagtggtgaaccacagcaaaggagcgcgacacggaaaagcgcgaacaagaaaagaaagagcatagctcaagaagtcgaagagacacaagacaaagggacacaaaacaaacatagaggagacaacaaaag

SEQ ID NO: 607748 - DNA, 221 bp, Homo sapiens
cgtaatcgaggaaacacacagctcacctagatttcatggctaacgtaatgaagagtttgaataagaaaaaggacagatccattaatgaggtaacaacttattgcctttctgctgggacagaacagggccaggtcgcatacaatgaacgagaaagacagacagagacagagacagagacagagaccgagagaaagtgacctagtgaattggcccttatcgag

SEQ ID NO: 607749 - DNA, 478 bp, Homo sapiens
  misc_feature (41)..(41): n is a, c, g, or t
  misc_feature (91)..(91): n is a, c, g, or t
  misc_feature (207)..(207): n is a, c, g, or t
  misc_feature (240)..(240): n is a, c, g, or t
  misc_feature (252)..(252): n is a, c, g, or t
  misc_feature (270)..(270): n is a, c, g, or t
  misc_feature (295)..(295): n is a, c, g, or t
  misc_feature (337)..(337): n is a, c, g, or t
  misc_feature (371)..(372): n is a, c, g, or t
  misc_feature (379)..(379): n is a, c, g, or t
ccacccaaaaaaaaagaccaatttattataatacccccccnccacaaaccctgggggtgttcccccatgaagtgaagcgcgaacaagggangccgccaatagggagcccaggcccccaagcgccggtccgtccttcagccacaacggaagccgcagcgggcaccgaaaatgttctgcaactacctttttcacatctgcctttgtagntgctgaacaaaattcgttcccatttgtttccgnttggcaagttcntaggcttcggcggaagtntaaagtcaagggcaagtggcggagnctgcggccaccccggtctctgagcggcgcaccggacaggtgntcagtcccgggacgcggtgacccgacgcccgagnnccaaggntcggcccacgccgggttcgccccagtcccgctggtccctcagcagacgccgccgggctttgcaccgcccgccgaccccggacccccacccacgcggccg

SEQ ID NO: 607750 - DNA, 110 bp, Homo sapiens
gagaagcctaggactgctacgggagaagcacacctaggcttctctccctgtgccctgtgtcgacctggatcctccagtaaagtgaaattcagcactgtaaaaaaaaaaaa

SEQ ID NO: 607751 - DNA, 909 bp, Homo sapiens
ggtcatcggtcggttcccgtgaaaacaaaaacaatcggccgtgccgtcgcaggcaccctgaacgtcgctgatgcggggcctggggacgcggtggcctgagtgcagcgagcgaacgggagcagcggctgacttcgccagtggtgtgctagtgtgctgctcatgtgtgtgcatggtgctgtgtgctcctgtgcttgctgctggtggctccccctggctgcctgctggctagtgctgccctgcctgcctcggcctgcctcagcctcccgctgcctgccctgcttggggaacgaggagcatggacgcggcctctggctgtgtggccctgggccgaacggctgctggacacctgtggctgccgaggagccgatgcgcctgcactgcctcctggcatggatcagtgcgtgacggtggagcggcgatgcttggaggaacggtgctgcacaagttctcagggctacgggcagctgtgcgagcgcggcctggaggagctcatcgactacaccggctggtctcaatgcacgagatcctgcagagccacgggcaagatgctgaattatcagggacactttcacttgttttgacacagtgctgtaaacagaataaaggatactgttcacacaattggcctccgaccacaaaagacattcacagcagtgtttctcgggttggaaaagccattgaataggattcactttaagagattggaaactcttcccttggaattgctcttcccatcagagattcaatatatcactgtcgtggaacagcctgcctcagactgggcaagaagctgtctgtcatctgaattggacgtcaggatctatccaagcaggcctggaaggacacttaacccaaagggaaggtcttctgcactcaggtgctctccatcagatgttccttccagaaaca

SEQ ID NO: 607752 - DNA, 1606 bp, Homo sapiens
  misc_feature (215)..(215): n is a, c, g, or t
aatgtatgtctacaaggacggcatacattcaccgcttatcgataaacagagctttattcgaccatttacgatgatacgatggccgctcataaatacatttcactccttatactagctttcactaagctacctagatatagcacacttatacgcgtaacacactaccacaacaaacagagctaaacttaaactattagagaacattcttcgagacnacgtgctgcaagcgctacaatatgagctataaacgcgatctctgccaaccgtcatatccttgactcacggtcgcactaccatacacgtgagtatactctatcattagcggcacgctacgcacaaatgcgccctaacagggccagatacagcatttgtaaccaaggtaacacccgaggcaaccttgcactgatgctacgcaaaaacgtaggtcaccgcgttacccaccttgattaccgtcgagatacatagaggacttcgcaacctaggtaagagagccaccaccctcacagagaatgggggataaagccgtttgataggcacccccaatgctaccgatggaaacaatacaacccaaaaccccaggagcatacgtaaagacgcgagggccaaggtggccgacactactagcatttccgtagttcctacaacaatctttccctgcgcgtgagacccacaattatacaccttattaccacttccgactagcctgtatgggtacaatctgcactacggttcaacagcataaactccgcaggagcggctctcaagacgccttgtgggctgccgtctaacgcactgattcacaccatttttctgcccgattccttggatctacgtggtaaatccaagtatggctattcgcggcacagcgcagtttactgagctgattaagtgcccattcatactcccgtccaacggctcactgcttaacaccacggtcgaccccgcgcgccgtaacaagcaatatgcggccgctaacagacggttactgacaacgttcataacacctcgtattacacgcaaaaatatccacaaccccccgcacacaccgggccaccttcgtgcgcacccttactaggcatgcacaccgcacatctcacaagacttgaccacaccagcggcagccaaggacgagcgacacccactccaaccaggacgcacgggacgacactcaatcaacggacaggcacacccgcgcgtcatcaagaaagagacacaacagcactgcacagcaagaacacatctgacctacaacgccaacacagatgcaccccacaactatggcgagtcagagacgacggacacatcagcctacagacacacagcaggccaacacaacagtggaccgcaccgccacgcagacaaagacgtcgtcagtcagacagacaccggcgctccaggcacacactaaagtacgcaatgcaagcccgacagagtactacatgccagcaagtgaggaggaagaccgtagctgatacatcacataatatacggcgacattacaaacagccagcggccggccgtctcacactacacgacaacatgaacaggctacgtcaacatccagacggacccacaagacactccgtgcaccatcatggagggacag

SEQ ID NO: 607753 - DNA, 289 bp, Homo sapiens
aacatgtgaacggtacttgggagagatgagtgcagagaggaggcgcaggtgacgaacccaaatgacaggcggtagaagtcagcaaaaaccaggaaacgtatcagctggacgtaagtcgaggccaatccaccgctgcttacaccatgatccatctaggacatatccctcagcgatgatatatcccagaaaggagatcgtagagcggtggcacttacacttctcggctaccacgacagttagtactcgcggaggtgctgaagggactgtctgacatgacgaacgtgtcctt

SEQ ID NO: 607754 - DNA, 233 bp, Homo sapiens
cttgggttgaccaggctgaggcccgcaggtctaagaccaaggaagcatgcaagcgcggtgaagagcgcctccaggccaggaaggaggagatcatcaagaactttatccaagtgaggaagagaccaagaaaataaaacctcccactttgtgtctgtacatacggtgcctcggttgataacatagattcagcctttaaaattaaaacaaggcctaatctggcgggggtaccggag

SEQ ID NO: 607755 - DNA, 81 bp, Homo sapiens
accgcggacacggctgtatattactgtgcgagaggccgcgtgggtccctattattattacataaatgtctggggcacaggg

SEQ ID NO: 607756 - DNA, 1421 bp, Homo sapiens
tatttaacaaaaaaggtgttttggggctctcccctcccaccgggggggggggagggcccccccatctcggggggggggtggtgaaaccctcttctctcctcatgggggggagaataaaaaaaaaaaagggtgggtgtcttcttttaaaaaaaaacacctcgcggcagcgggggaggggtgtctggggaccacagagagagaaagcgcctatagcgcgcgcgggagaaacaacaacacccgcgcgcgcgggtaacacaagagagagaaacacacccccaccctaatttataaaattataaaaaagaaagaaaaaaaaaaggcgggggggggggtggtgctccacccgcggtgacaccaccacacaacacatgatgtgggaagagcgccgagagggagggtggggagaggccggccgagccccccgagagagatgtggaggacacaccgcacagcgcggtggcgacacacacagcgagcgtggagaaaacacgcgcgtgagtcttccacctatataccaacacaaacaaaaaatatctcgcgcgcgcgcggggtgggcgagacgcgcgtgagagacaacgtgtggagtagaccccaccgcataaccgccggaggcgaggcgagtggagcgcggcacacaacaacagaggggggaagcgacaccgcgcgcgagagagaggagtaacgagcggagtgtgtacacacaacacatagcagacgcagcacaacaagagagacgcactctcccacaacgagcgcggcgggtgagcggcaacaaccacgacgacacccaaacagcgaggtgttgtcgtctcctaccaacaaacaaaacaaacaccagacaaaacaaaaacaacaacaaacacacacacaaacaaagacagaacaaacacaaaacaaaagacaaaaacaccccccctctcctccacacacaaaccaagcagctgcggagccaaaccaacaacactctcaccgacagccgtacacacgtcatcgacacaaccccacacacacaccagccgtcggggggcgggtacaccgagagaaggagcgaccccacaaccccccctcgtcgacgtacagcacacaaccaaaagcaccacttagatcaggtgtgagacatacaaagcataagtaggaaagtcacagaaagggaagcgaacaacaatcacagccacgaagggaggcgcccaggcaacgcatataaaacaatgacaaacaccaaccgctggtcgggcagacccacaccacgagtgaggtaggacaaccaccccacggcgctacatcacaaaaacacaaacgagagagacgacgtcaccccgcacgtattaaatttccccacacgcccacaacctaccaaatggggagacagaattgagcccccccacacgaaaaacacaaactgatataaaacccccccggat

SEQ ID NO: 607757 - DNA, 980 bp, Homo sapiens
  misc_feature (110)..(110): n is a, c, g, or t
  misc_feature (135)..(135): n is a, c, g, or t
  misc_feature (138)..(138): n is a, c, g, or t
  misc_feature (155)..(155): n is a, c, g, or t
  misc_feature (167)..(167): n is a, c, g, or t
  misc_feature (196)..(196): n is a, c, g, or t
  misc_feature (223)..(223): n is a, c, g, or t
  misc_feature (235)..(235): n is a, c, g, or t
  misc_feature (237)..(237): n is a, c, g, or t
  misc_feature (244)..(244): n is a, c, g, or t
  misc_feature (252)..(252): n is a, c, g, or t
  misc_feature (393)..(393): n is a, c, g, or t
  misc_feature (441)..(441): n is a, c, g, or t
  misc_feature (492)..(492): n is a, c, g, or t
  misc_feature (498)..(498): n is a, c, g, or t
  misc_feature (527)..(527): n is a, c, g, or t
  misc_feature (547)..(547): n is a, c, g, or t
  misc_feature (571)..(571): n is a, c, g, or t
  misc_feature (573)..(573): n is a, c, g, or t
  misc_feature (654)..(654): n is a, c, g, or t
  misc_feature (689)..(689): n is a, c, g, or t
  misc_feature (697)..(697): n is a, c, g, or t
aagaattgagaacttgtggctgggcgtcgtggctcacgcctgtgatcccagcactttatgaggccaaggtgggcggaccacctgaggtcaggagttttagaccagcctgnccagcatggagaaacccagtctctnctnaaaatacaaaaaaattngccgggcatggnggtgcatgcctgtggtctcagctactcangaggctgaggcgggagaaacacttgancctgggaggcanangttgcantggggcangatgtgcgattgcactccagtctgggcaacaagagcaaaactctgtctcaaaaaaaaaaaagtttgttagattatttgtgaacttaattttattttatttttaccatggtaagactaccgtgcgtttaatgaaccattatngtgccactaactgtatcccactttactcaagggtgtaggtacaatatngtaggaatatactatttcatacattgtaaaataacatctttagtaatcacngtcagnggctttaaactgcaaatgagttaaatatngttcccatagattaaatttngactctttattatttaaattttantngtatcggggtatataatatgtgtatatatttatgccttatatggcatctttgactcaggcctacaatatgtagtaattacnttatggtaaataaggtatccatcacctctagcatntatctttngtattaccaatagtgtaattatatgctttattcattttaaaatgtacaattaaattgttattgactacagaattatgtctatgatcatattatttatcagagtgtaaataaatacggccaggccacgtgaaaaaaaaaaaaaaaaaaggggggggtaaagatcctggggggcaagttgggttacacgttttgaagggccaaggggggataaaggaggaggcgggatacagcggggaaggctggatggaggattttggggaatggaacccggtatagaggaaag

SEQ ID NO: 607758 - DNA, 626 bp, Homo sapiens
  misc_feature (21)..(21): n is a, c, g, or t
  misc_feature (508)..(508): n is a, c, g, or t
  misc_feature (586)..(586): n is a, c, g, or t
ggcggagccaggccggcctanagtcacttctccccgcccctgactgggccgggagcccggggctggtctctaagagtgggtaccgagaacagcctgaccgtggagaagggctgcgggaagcagaacaccgcccccagcgcccagcgtgctccagaaacatgagcacaaacgcctcagcctccttccccggcggcaccggcaccggcaccagtacccgcaccagtaccggcaccggcaccagtacccgcaccagtaccggcaccggcaccagtacccgcaccagtaccggcaccggcaccagtacccgcaccagtaccggcaccggcaccgagcgcaaggcggagggcccgcccgaagccgggggcacaactgcccaggtcccgaacccggactccagcttggacgacacctcctacagcctgtccgaatggagcgtccgttctgagtggcggtccgtctcggatccgctagccagttcccagtggagcacgtcctcaactgccgaggncgcctcctggagctccagcatacactccccaatcagcactaccggtcttagcgagagtactgacttccgacttcaaanagtgggcttccggggttttaagcggctttacaaaccccga

SEQ ID NO: 607759 - DNA, 963 bp, Homo sapiens
tggaaggcagaggagggagtttcggcttagtcttttctggcaagaacctgctgatcccacaactgtgcctggcccaccctgggggaacccaagaggctccaggccctgttgctgaggccagtataggggtggggtggaggctggcctggtcagacgtgcaaacaggatttcccccaaacagggaggctctcttgagccttgaaaccatccccgtttcctgaacagtattattcgtggtttttgtcttaaacattcatctcctttgccaggcctgtccattttccacacctgagtctgaacaggctaatgatgaggccccagctttcactgtgcagtcttctgcagggattgtgtgtgtgtctcagatagagctctccactttgggatttttttttttggtagagtctcatccagtaacaaagagaaaaatggagctacacccggggtgtcctgagatgggtgggccccacggggggttccattctctgagacgtgtgatggacgccctgtggtccctcactctctttatctcctctggccttccacggcagattagctcacgccactaatgtgggaacaccagttcccgcaccagttccgtatagaagatcattatactagctattgactcgacctgcacctggagaaacagccccctagaaacctcgcatccaatagcccacggggcacatgtaggcgaggggccgcgagaatgccgcaacccccacgagggacaaggggagtgcaggcaggtccccgtggaggaccccatacgggaacctgccccgaagggggggagggcaggcaaacgccaggggagcagataactaccggacgcaagtggccgaagcaagagtgacgaaaggacaaagggccccagcgaccgggcgacagaaggacacacaggcagggagaggacagacggaagaaaaaaggagtagaagaagagaacgacggtcaaac

SEQ ID NO: 607760 - DNA, 115 bp, Homo sapiens
ttggcctgaggacatagaaatgcttctctggctcctctgctggttgttataatccctgggaaacattggaaccaagaggacactcgagaaatactggattggggaaaagatctgg

SEQ ID NO: 607761 - DNA, 112 bp, Homo sapiens
ctcgtagttcccaacgcctaggttatcccctgccagtgtttgcttaactgcggtctccccaattcatctaagcccctgattattatgcatccggaaggatggctatacccaa

SEQ ID NO: 607762 - DNA, 1006 bp, Homo sapiens
gaagaaacagcccactggaagcctccaccttggaatgatgtggaccctccaaaggacacaacttgtgaagaacattaccctgaactttgggccccaacacccagcagcgcatggtgtcctgcgactagtgatggaattgagtggggagatggtgcggaagtgtgatcctcacatcgggcatccatgcacctgaggcacatgagaagctcattgaatacaaagacctatcttcaggaccttccataactttagaccggaatagacatatgtgatccatagatgtgtaacgaacaggacctattcatctagactgtggcagaaattgctacaacatccaggacatcactcctcagggcacagatggatccgagatgctgatatggagcaaatcacacagtaagtagaaccaagatcatggactgtgacacacacatgccctgagaccttggggaccatgaacccttacttctggcatgtatagaagaaagggagaagatgtttgagttctacgagacgagtgtctgagagaccagaatgcaatgctgattatatcacgagacaggaggagatgaaacaggaacataccacttggagattatggatgaaatatatcaaaatataagaatttatatctacgagatgaatgacattggaccgaagtggcagaccaaacaatacgaatctggccgaaaccgcaccagtgacataggagatgcaccagcagaaaaaccactaaaatctggatacacacccaatgaaacacacaggacacacgaaaccagagagaaacagaggaaagacacaacctaaaaccacacaacaaaaaaatagaagaccagaagaaaaacaagagaacagaataaaaaaccatcaagacgaaaataccacccgaaatttacaaattacacaaaacaataaacaaaataaaaaacaaataacaacaaaaaaacacacaaacaacccatttactcaaactacaaacatatataaaaaaaatactaaaaac

SEQ ID NO: 607763 - DNA, 273 bp, Homo sapiens
ggccggctgaggcaagatcagctctcaaatcaaacacttagcaggctgtggatgccaaggaaaagttcttgaaggaaattaaaagtgccactctataaacagatgaatggtaagaaagtgaaacaaccgtattgctgatatgaagaaagttttagtggcctggacagaagatcaaactagccacagtgacagatccttaagccaaagcctaacccagagcaaggccctaactctcttcaattctatgaaggctgacagaggcaagaaagctgc

SEQ ID NO: 607764 - DNA, 956 bp, Homo sapiens
  misc_feature (619)..(619): n is a, c, g, or t
gcaaacatttggaatattattctcaagctcacgtcttaataatacatcttattattctgcattagtagagaaactactcaatcatcctcttcaacattgatatacatgtttaataaggcctcttgcgaagatcacctgttctcgtcacctgaggtatttgtttgtcctcgcccaccattgcccctgttgcgctcccttccttcttcgtccctttgccagaggaaatatgaatacagtatttagggtccaactctcaataatgtaataattaatacattaagagcatttagcttcctttctagaaaaatgcactaggctaaggctgtagacgaaacaaagagaaattgctagagtaaatctggcactgggatgacacgcaatctgcaacagtaaatatttgccagaagttcttcgaatgtcatatagtgtcaggatttgaacgagctatttgtgtttaaatgttgcaactagcaagtcatcttcggacagacacagccaggagagatgaagtaacagtgaaaggtttataagtccatttgtacagcatttatcccatatattttagaccttcaaggaaatacttgtgtcgcatctttacagtctcggtatgccctacttntaatgtactattgtcgagtcatgctatctggcataaaattaggcaagccaaagtatgtactcctgtagacctgcgagtcacaccatatcatattacatatgttatctatgttcaccaaagactgggattgggccgaagtaatctcctcgaattggggtccgcgcctctaggcccgagaaaaaggtctttctgaaccccaggcgatggcccgcggggccccttgtgttagttaccacgggggccctagcggtgaggccctagcaacacacgccgatatgggcacttgcttggttttccaacaatacatggcccgggggaaaccagggtttggccacaa

SEQ ID NO: 607765 - DNA, 202 bp, Homo sapiens
gtcggtccaccacgtcatcggagaaggcctagaaaaggcaaagagattaaacaacaactacaaaaacaaagaaaagcagatgatgtctctaggtcctgttgcctggccctgatattcatttagaagatcaagaaaagtggccagaaaatggctctctaaattataacaccatcttgcaattggatccttctccggtggcgtg

SEQ ID NO: 607766 - DNA, 277 bp, Homo sapiens
  misc_feature (37)..(38): n is a, c, g, or t
gtacatttaacatggtgactatagttagtaatactgnnttgtttacttgaaatttgatgagagcagattttaagtgtcctcaccaccctcacacatatacacacacacacagtaactatgggtagtgacggttgtgttaattatttcgactttggaattcagtacacaatgtctatttataacaaatgatcatatataccttgaatatatataatttgtatttgtcaactaaatattctaaaatttaaaaatatgccttttctatttacccacattt

SEQ ID NO: 607767 - DNA, 311 bp, Homo sapiens
aagtggttcgtagttacatggaggatggacttatcccttgggagaagagtgaagttggtttgttcgccatgtgatgaagaccactgtgagttggtaaaaaagtagatgagtactgtaaaatggcgtaagtaattctgcacttgaagtggtactgttaacagcacatttggaagattttaaaactttttattgtcttataaatagcattcacttattattttggatatttaagggttccattaagttaacactgtatttggacaaagtgtgaccaaattagccagtctgttttcttccatgtttaattagaa

SEQ ID NO: 607768 - DNA, 145 bp, Homo sapiens
  misc_feature (45)..(45): n is a, c, g, or t
gcttgttcctatgatgtgacccctcgataactccggtcggatggntgggcatagggtacggcggaatgcatcaacactcgtaaagtcttggcctcccagtgcgcctttggtttcccagagatcttctaactaattctcaatatgt

SEQ ID NO: 607769 - DNA, 284 bp, Homo sapiens
ggaaaacctaacaaacagaaaggaatagcacatccacgtcaaagaccccatccgaagtcaccaacatcaaatacagaaggtagacacatccacaaagatggggagaaaccagcgcaaaaaggcctgaaaattccaaaagccagaatgcctgttgtcctccaaaggatcacagctccttgccagcaagggaacaaacctggatggagaatgagtttgacgaattgacagaagtaggcttcagaaggtgggtaataacaaactcctccaaactaaaggagcatggt

SEQ ID NO: 607770 - DNA, 195 bp, Homo sapiens
caaaaaaaaaaaaaaaaaaaaaaaattttttatgcctttcatgttcctggtgcccctctatccaaccatgtaaccatttccatcctcctaaaagcttttgcaattttcgcattgggtgggaggggttttcaaaaagtagtcatatctttaaaggggtttacccagcccaaagtaagggctttggggccaaattca

SEQ ID NO: 607771 - DNA, 776 bp, Homo sapiens
gtgcagacggcaggttcaaacctaagcaggcgggaaggaaccatggccaagtgtgagcgtaccttcatgcgatcaaatcagatggggtccagcggggtctagtgggaggagattatcaagcgtatggagcagaaaggattccgcctggtcggtctgagaattcatgtgaagcttccgcagagatcttctcaaggaatcactacgttgaccctgataggaccgtccattcttgtgcgcggcgctggttgaaatacatgcgactcagggtccaggtaggttcgccaatggtctggggacgcggtggctgaatcgtgtgtagaaggacggcgccgacgtcagtgctcgagtggagatcacaacctctgcaagactcctagaggcttggtgaccagtccgtggtagacgttctgcaatacatagcttcggcaaggtaaccattaatagcatgggcagatgattgctgtggcgagagtgctgagcacacgcgagatcgggcgtatgtaggtgtgcgacccatgacgcgacacaggtggcatctcactgctgagctgtgcctcgagcaacgggcatctatgaatgaccagcggagggcagaccagatagctttacacatccatgtccgctccttcccaggggcagaggaccaggctgtcaggacagtctagttatttagcaggaacttcatgcataattcggagggaagctcttggagctgtgaggttctccctgtacagtgttaccatccccgaaccatctgatttgagatgctttccttc

SEQ ID NO: 607772 - DNA, 432 bp, Homo sapiens
  misc_feature (221)..(221): n is a, c, g, or t
gacctggctgcctgagaatccctgttcggcgagtccagtgtcgctgcgctggacgcctggccgacctgctgcaagcggtggccgatgaaagtgggcaagtctcggatcgcctggccttgcgccattttgcccatgtggacgatgtcagccagcaaacggtgtctgtgtgatgagtgcccgctaccagattttccacgatacccattatcactacgacagcncggtgtccctggcccagacgtggcgcacctgtggccgcggccttcgcctggcagcgtgcagctcgcagcaactggagatcagccccgagccgacctcgcgccgggatgaactggatgtgttcggcaacccgatcacccggctggcattcgagcggccccatgatgaactgctggtgaacgccgggctgacagtggaggtgttgcgcggccc

SEQ ID NO: 607773 - DNA, 139 bp, Homo sapiens
gtgactgatagcaggtcatggccgggctcagtcgtcctgctgggccagcacagactcggctcctgctccaggctgccccagtcttcgtcgtcccatctgtcagcagtgctgctgtcctctgctgtgtccttgtcctcct

SEQ ID NO: 607774 - DNA, 440 bp, Homo sapiens
tcaactcatcatctctgcttgtcaacattcccatatattctttaagcccccgtttgcatgctacctcctccttgaaatttcttctactaaagagcagctagctctttttttctctagcttctgcttgttacttatagatcttacgcattgtgaaggaaatagtcactactaaatgaaattgagattggtgaagcagtgccatctaaaaaactttccttgtcagtccccaaggggtcaggtcataagagagtggctcacacctttgcgccagaatgacaaaatcagtttattaggctgaaccatttgatatcatcatcgactcaccaaaagtggcaatttcatatggtttgacataatgcaattgtaactgtcacaaggacaagatgatcagtgcattatctattcaggtcgacgcggccgcgaatttagtagtagtaggc

SEQ ID NO: 607775 - DNA, 161 bp, Homo sapiens
tgccgttgcgccgccctttactcgggtcagcgctgggctcggggcggctgtggttctctggtggtctggactttgaggcggcggtcgggctcgcctggggatctcctccgccccgtacccgccacgttccggcgtccatgtgcctctggaggccgggggcc

SEQ ID NO: 607776 - DNA, 3276 bp, Homo sapiens
ctggacttccccacatctcccctgcccctcccacgtttccatagtccaagggccagagtaaatgaaaatacagcagccgcccaagcaatggggcccatgctggggcttcagtcatcagcatcttcactggagtctgagttagctggcatcataggatcatcaatgagtgagaagtccctttctgagctatcatagaaatgagataagtcatcatcatcttcttcatcctcatcgtcatcctcctcaggttgcagtggtggcaaccgcaaggtagtaccagaggcggtagtcactggtgaagaggggtagccaggggctctcaagcctggatggtgatggtggtgatggtgggggtgggggtggtggtggtggtgatgaagcatggtgctggagtctacatgaggggatgatcggtgcaccacccatcacaaatgcataaaaggcaaagatgcagaagtggcactgctgtgacccaaagatgacacagactgtaggccactactgctgtgttggaacgtgttatgcagagatagagacccagtgcttccaccctgcatgaggccatcatcttagaaggtctggtcgcatctacgggcccgcttcttgctgctctctggcgcaataggccctggcaaaacccggttgaacaccgtttcagtgtgatgaccctttttcccgtttctagagttagctgtctgtactggttccattcccaaacagttcaattctgccttattattttttttttacatctttgccacttctgttttatgcgatcctccatatacgctagaaatcggggatcaacagaaactgtggatgaccctgtaagcacatctccagttcagcccggcgaggggcatcctcacccaccagcaaagtaccatccaccttattgatgacagggatccgggtctccaggtccacatcaaggtgattaggctcttccatgcactccacctccagctctactagcttctttctgttccccttcttcttatgaaacagtggatgtccatctcccattactccattcgccatcaacttgtgcttctggaatgttaacttcaatccttcctcatctttgatttgaactgtaaactccttttcatccatgcctcggcgaagtttggtgaactgggctgccgctgtgctgactgcagatgcttcctcctctgccatggaagctggactccttcgtggcgtggggactggagagtccccatcttctcctggggtcaaagagggactgtctaataaatggttgcctggggccaaaattcctcctgttaccatttcctggctcctacggctagaaggccacttccctgagagtacagcctggcagacgaggtcaatacggtttatcaggacacgatccttggccctgcagaacgtggggaccggcgaaggcgcgttgtgaagcagccttcaagctgaaagaaattgcacggcgggagaaacaacaacgatggacaaggcgtgaacaaactgatttttatcgagtggtgtctacgtttggtgtggaatatgaccctgacaccatgcagttccattgggatcgcttccgcacttttgctcgactagacaaaaagacagatgaaagccttaccaagtacttccatggctttgtggccatgtgccgccaagtatgccgccttcccccagcagctggagatgaaccccccgaccctaacctgttcattgagcccatcactgaggagagagcctcacggactctctaccgtatagaattgcttcggcgcttacgggaacaagttttatgccacccccttttggaagatcggctggcattgtgtcagcctcctggtcctgaattgcccaaatggtgggagcctgttcggcatgatggggagcttctaagaggggcagcccgccatggggcagcccgccatggggtgagccaaacagactgcaacatcatgcaggacccagacttctctttttctggctgcccgtatgaattatatgcagaaccatcaagcaggagcaccagctccatccttgtcacgctgctctactccactgctgcaccagcagtatacctcacgcactgcctcaccactgcccctgcgcccagatgctcctgttgaaaagtcacccgaggagacagctacccaggtccccagtctggagagtctgactttaaagctagagcacgaggtggtggccaggagccgaccaaccccacaagactatgagatgcgagtatccccctctgatactacccctctggtttcccggagtgttccaccagtcaaactggaggatcaggatgattccggactctgagctggacttgagcaagctgtcaccatcttcttcttcttcctcatcctcatccagctccagctccagcactgatgagagtgaggatgagaaggaagagaagctaactgaccagtcccgctcaaagctctatgatgaagagagtctcctgtccctcactatgtcccaagatggattcccaaatgaagatggagaacaaatgacccctgagcttctgctactgcagctgcagcctctatcttcatttgttctctcttgtagctgcgctgatacgctgttactagacgccgaagcctagctgttagggcagagcgaggccagaataaatggcctggctgttgggtcacctgggcttcatctccatcaatcactgagatctcctcatccatcatcatcaagggatcaccctcatcatcttggtcctttgggggaccttggagtggtttatatcaggatcttcacaatctttatcaagtcaacccttctactatgtcagagaagttatccaacactcgatgttctgctgcaattgctttgtcatctggtcggccagccttttctaggaaacataaggctgggtctgccctcatggtattatatttctcatagccatgtttaaagactccaatgagcagcgacttgtcagcctcatctgtcccaccaagttgttggaacctccagttgatccactactgggaaccatatgtcaatctcactggcaatcgcaccccctaacaccttttctgcttggtctccataacctcctgcctcaggtagatagcattcgtacccgcaacagtacctggttacactgatgtttcaagtgcttcttataactttcatcttggaacaaagtgtcagggttatatttccggatccaatctgccttatggatatcaaaagtgctttatgactttactttttttcctttgcgtccacgaggcacagggatagatagacctgaat

SEQ ID NO: 607777 - DNA, 181 bp, Homo sapiens
cccccccccccccccagtttttcaacaaacaaaaaggggcctgatttttttgggatttttttttttcaaaaaccacccttaggcaaagggccccggcagtctttgcccccgccttcaggggtattgtgaaagggggactttggggtcctttcaaaaaaaaaaaccccccccttttttttga

SEQ ID NO: 607778 - DNA, 1260 bp, Homo sapiens
  misc_feature (1106)..(1106): n is a, c, g, or t
tggactttggcagagctagctgaggttttatttgggaccaaaaaaaaaaaccaatgtgtgattgtgttttgtgttacctgtggaggcttgtggccagggggggcccccgaggttagttaaactctccccgaggtgtggccttgaggccttagggctgtgaccctctcgagggtgggttcctcctgtgttccccgaggtggtcttcaccctggtatattagcgcggccctctctcttctccacgaggcctctcgtggggcccaggcgccgaggaagaggtgttagggcgtgtggagagagggggtctgtgcgcgcacaggctgtgtctcacattttgggggcccgagagaaggttcagagaggaccctacaaaacacacagttttctccacattcagcgtgtgtctcttgcaactctttttttctcaaaacacacagcggcccgctgtggagggacggcgtggtggcgcgggtgtgaagagagagctgtgagacgccccggcgcgcaaaagccccaaaaacgctgtgagacgccccaaagcgctttgttacgctttaaaggcgcccggggcgctgtgtgtatagaggcggcccccaatatatatgcgccgagagcgctctaaaagacaccaactctgtggctaatataaccccgcgcgtgggtgtggtctccttcgcgatatgtgaaaatataccctcgatgtgttcccgtgacaatctcccccaagaatctctcccagcgcgcggacatttcttcccttcgcccccttcacgagagagttttctcccggttaagggggtggcgacaattcctctcgacagtttcttcccagggggccccccacgcttttggagggcgtttttccatctacaggctttccctgtgggtatccctctccagccgacatgtctttgccacgggtggccacagttgtctccctgtggctttgtgggcccccgctttgtacagggggcgacgaccccatccacaggctctcgggacacaaatctttggaggcttatggaggcactcccccctttaaaagggtggacccaagctactcctccccaacgttatggcaccacaggaaactctgtgcaaaggtgngcggaagcccacaggagggaaaaggccccgtgtggggccctgtagtaagcgcccctctaaaactcctaaggcctagggaaagccacggcgtgtaaaatgttcccgcacggatcacatcatcaaggaagagttttctacaggcttatatgtagcg

SEQ ID NO: 607779 - DNA, 112 bp, Homo sapiens
gcatttatgtgtgggttacttctctccaacaggcatcaattccttggtctacactttacttcaccttacgcatgcatagtgtggactacctctctgggcacacattatggag

SEQ ID NO: 607780 - DNA, 333 bp, Homo sapiens
tgagctggcctgggggcgctcaccatgtagatgagtatactggagaccctgttccaggctcagagatttgccagagcccagtgggcagagtggagatggtggggacaaactggatgggtccctcaggcagattcaggcagctcaacgaggaactggagaaaggcatgggaatctaggtcggttttctccagagcgcatctggccggagggtaggctcctggttgaacagcgcaggcagtggcaggcagggcagcggtggagcagtcgctcacgtggtcccactaggagactgccagtcaccacaggtgtcctgggctcccagggtaccgagct

SEQ ID NO: 607781 - DNA, 102 bp, Homo sapiens
gtctcatatgatatggtgacacccagaagcagctgctctccgggagcttgaagaagaaactggctacaagtgggacattgccgaatgttctccagcggtctg

SEQ ID NO: 607782 - DNA, 257 bp, Homo sapiens
cgcctccctcctgggttttgggagcctcaggtgttccttgggttttaaatgcatcattccagtcctccattttcacatggcattccctctgtgtgtttccccagtgttttccctctgtgcagatctatttttgtgtccaagtttcctctttttataaggaaaccagtcataatgggcccccctgaatgacctccttttaacttgattacctctgtaaaaaatgtatttcccaataaagtggccttatgaggttttga

SEQ ID NO: 607783 - DNA, 107 bp, Homo sapiens
  misc_feature (8)..(8): n is a, c, g, or t
  misc_feature (40)..(40): n is a, c, g, or t
ccaacccnaacatccactgggtttcggaaacccgcccccngatactgggcattttgtagatgtggtttgactatttctgtatgtctccatctattgatgagggtctt

SEQ ID NO: 607784 - DNA, 171 bp, Homo sapiens
ggtacaaatactattctataacagttccagaaaaatcctacaggtgttactgataagtggcaaaagtttcttttgatatatcttgtggttcctcttccaacaatgctctacactggtgtcacatgcaagtggcttcttcgcagcatgatactcctacaaaactcccctgcc

SEQ ID NO: 607785 - DNA, 258 bp, Homo sapiens
  misc_feature (189)..(189): n is a, c, g, or t
tggaaacaaaagttggtatcttctggccagttctggctatttgggtattcctggtaggccattttctcttcaaggaattcagttggagaccctgtagtatcgctcccttctactccatgaccaccattggctaggagtgttggtttagaagatggagtatcttcaatctggctagtttctgagcaccgnttcttctttgactctgagttcccggttttctcatcaaccatccagagaggaatatagtctgtttttcca

SEQ ID NO: 607786 - DNA, 237 bp, Homo sapiens
tctgggtcatggtaccgtacagcgtttatgggcacagcttgaaaggggggttttgtgtccccctggtcgggcagtgttttcaagaccaccttttttccggggccacttgggtatttaattatttatttattgtgggccagtgatggtgggtggggggtgggccttcccggccacctccacccctgttgtgacctgtccttccgtacttaataaagtgcgcgtgggagtgttcaaaaa

SEQ ID NO: 607787 - DNA, 716 bp, Homo sapiens
ttttaaggttaaaattaaatacccactttggattgggtacttaatcgaaaatttcaggtggttagaacgagcaaacttgaacaccgatggggtggcctcagggctttcccttaagagacaagttaactggcggctgggttcatttagggtgtaggctttggtctagaacccttgttggtcgctccaccttgcttaacggcagtgtttttcttgcagtcccacatgtgcgtggagccccatcttctctcccaagttacgaggtgttatgacctccaaattgaaaacagtctagttagcccccgaaaatctcttaaagcgcaaagggttgtgcctcccaatacaaagtcgaaaggtaagctgtggctctgtccaatagttccatgcatcgctttcgccttcaacttggcatatcccagttgaggggtgggtccagtcatcatataatttctgaccttttttaccaaagaataatcagttagaaaatatttgaacaccagggccgttaccctgctgttcgggcatgggaataaacgcttttcatgtattttgggatgttcttttttttctaccatgtcttttttaaggaccttggcctgtatgatgaaataacccgtggagactgtaaattttctgatcaacaatggccatgtccccaccgctcatgttgcagttcaccctatggcaagcgtttcccagcccaccaaaaaaaagcgatt

SEQ ID NO: 607788 - DNA, 245 bp, Homo sapiens
gggtaatgggctttgtaatgtgcggtgatgaggggtacactacagaaacaaactctgcagtctgttcttgaagaacatgctactcagatgtgagacatgctgagtctcagtgcctcgtttcccaacagatgtgactttggttccttctcagaatcaaatcctgcccatgcctataatggagactcctcagcagagctcacagctctgcattgcttgtacgggctagtctggggttgatgatcttt

SEQ ID NO: 607789 - DNA, 479 bp, Homo sapiens
atagatggataggttactaaattagtattctaggccatgttagattgatgagactagggaggaggaatttaaaatgaagagaggtgggcaaataagaaatagattggggataggtatggtgtaattcctgtaatcccagtgatttgggagactaaggaggatcagtggaggccaagagtttaagaccagcctgaaactgggcacagtggctcacgattgtaatcccagcactttgggaggccaaggcgttggatcacctgaggtcaggagttcgagaccagcgtgaacatggtgaaaccccctcccttctaaaaatacaaaatcagctgggcatggtggcgggtacctgtagtccaagctgctcaggaggctgaggcaggagaattgcttgaacccaggaggcggaggttgcagtgagccaagattgcaccactgcactctagcctgagtgacagagtgagactccatctcaaaaaaaa

SEQ ID NO: 607790 - DNA, 107 bp, Homo sapiens
gaagtggctgtcctgagtgctgtacagacacttattttatatgcccctgaaccaccatagggatgctagtctttgtgaccgattgctaatctttctgcactttaatt

SEQ ID NO: 607791 - DNA, 99 bp, Homo sapiens
cgtgtgttgggtcgagagatgtcaggccactgccggcaccataccactctgccacgaaggccaaccagcacagacaaccacacacacaccccagcaaca

SEQ ID NO: 607792 - DNA, 182 bp, Homo sapiens
atcatacctaccgatctctgactctcggtgctatgtgtcctggagctcttggggttctgattgacacgtgggatgaatgcctgatcgaaggaagggtcaggtgatttcaggccggtaggttgagataaagaaaggtcacacagaggttcctcttggccccctgataggtatgatgaaggacg

SEQ ID NO: 607793 - DNA, 127 bp, Homo sapiens
atcactactggaaacatccccatctccacctcactctccaccaggcttttttgcagggtcagagccaagtttagtggaacctatacattaccccagtgaaggactcaatcttaaaggaaaaatcctc

SEQ ID NO: 607794 - DNA, 788 bp, Homo sapiens
  misc_feature (559)..(559): n is a, c, g, or t
ttaactttcagtatgcatccttggccaggacttatacacacaaatgaccaggccaggactctacccaaagaatgggtttgtatttaagggcccaagcagatagaacatcctcagaaaagaagtgtttgaaagatgtatggtgatcttgttaacctccagacgcgggaccacatctagcaaattcaggggaagtttgtctacactcaggctgcagtattttcagcaaacttgattggacaaacgggcctgtgccttatcttttggtggagtgaaaaaattttagtgattgaagccaaatcgtaacttacagcaagcagcatggagcgcgcccccctctttgctgattgcaaataggcaaataagaagtgaatttggaatcagatgtctccattacttccagttaaagtggcatcataggtgtttcctaagttttaagtcttggataaaaactccaccagtgtctaccatctgcaccatgaactctggtagggaagctccacttttgtatattcccgctcttttctggttatatccctgtctgatgcataatgatgccttnttgctaagtaattcatgcattaagattttgccttaatgagacccgatgacgacgaaatagaagtagaggcgatatcttccccgcctattcggcctgtgatgagttgttatcatgaaggacaggtaactttcgggaccctgtgggtagtcggttgttgtatttggcgccgttgtacaccatacaaaactggagcggcgagctcgttgtatgcggggggatactcaagcga

SEQ ID NO: 607795 - DNA, 919 bp, Homo sapiens
gcatactattggtccagagggtatctctgttccctcatacggggttttggtaaccaccccggggttccaaaatatagggctaattgtgtccacagatgtttctcttgctgcgctcccagtgtccctgtcgccgtcggggggtccccacctggcgggtgacaataggcattttttgtcccgcccccccaactcaatttgagggctctgatttatccaccccaaggggttgcccaccaactgtgagtaagccccctgtgggcgccccccacatttgtggttccccctgtgacaggaggtatcacccctttttatcctgcgcttctgcaagaagaatctgcccggcgccccctgacccccgcaaacgatcctccccggtttcctctccactggattacatcccccggcggtagcgtagttgaactaacttttaattagactgggccgccaacctctacttggtacagcattgctgtcattcaatactccgtgacatctattgttcctccccccccttttatgagggagcttcatattctctgacgcggagcagtaacgctacacatatacatgcgatttcttactattttaatccccaggagggtgtgtggaatacatgggccccatggcatagtccccccatcatgagactcctgaacaaaacagcccacggacctcaacttttatggcgtaatttcgggcgcccactatttactccacacacccccgatgtccttgtgcgggaataagaccaaagacaatttccctccaacagtcaacaatccatagaatgtcttttcaccaacaaaggattctccttttctttggcagtaattacaccaagctactacaggattctacaaaacttcttcccctctcttctcacaacaaaaaagctcaccttttcccccccaacataaca

SEQ ID NO: 607796 - DNA, 94 bp, Homo sapiens
tctcttgtcgtggcgaatgtgtgtggagttccgatatcttgcgtatgtaggggttctgcatcgcatgaactagcgtgaacggctagattaactt

SEQ ID NO: 607797 - DNA, 115 bp, Homo sapiens
tcaagcttctaacgatgtacggggacatggagaaacctctgaatccaaagtggggcaagtggatcaaaccctcataccagccgggaaactggtagagtcaaggaaaaaaaaaaaa

SEQ ID NO: 607798 - DNA, 345 bp, Homo sapiens
ctttgtgatgcaagtgcgcatccatctgtaagaggttcatgatgggcgcgtcagtcagccagcatcaccatagggttcatgtagagagtcaaggttgcatggtgtgtcagctctgagggccaatacagatagttcatcctcaatagcagcacgatctactaatgcacacttatgaagattgtaagctcagtctatccacaacatgcccatgccatgttcaatctcactactcggataacagatgagcaacttcactggtgtgtgcatctctgggtgacgcgcccctgcaataagccgaggtacagagtaaaagaaggcctagaaaggataccctctccattgtgt

SEQ ID NO: 607799 - DNA, 521 bp, Homo sapiens
tggtttcgctacatttggctgggcacagtagctgacactgtaatcccagcattttgggaggccaaggtgggtggatcactttagctcaggagtttgggattagcctggcaacacggaaaaatcctattgacacacacacacactagccgagtgtggtggcacatgcctgtagtcacacacacacacacacacaaacacacacactctagccgagtgtggtggcacatgcctgtagtcccagccactcgggaagctgatgtgggaagaccgctggagcccaggagattgaggctgcaatgagccatgatcactcacgccactgcactcccaacctggccaacagaacaagactccatctcaagaaaagaagaaaaaaaaaaagctactactatcatgactttctcatataactctatatggcatatactctctgcgcggcattcagattcatgcatttaaataatactgtctcttaatctagagataaggggtctcatacagtcgctcaggtttatagtaca

SEQ ID NO: 607800 - DNA, 324 bp, Homo sapiens
  misc_feature (65)..(65): n is a, c, g, or t
ttagtagctttcttgcagtatttcttaggttaaatgtagctggccgggtgcggtggctcacaccntgtaatcccggcactttgggaaactgaggtggtcggatcacctgagcgcaggagtttgagaccagcgtggccagcatggtgaaacacattctctactaaaaatacaaaaattagttggccgtgatggcgagtgcctgtaatcccagctactcgggaggctgaggcaagagaattgcttgaacccaggaggtggaggttggagtgagccgagatcgcgccactgcactccagcttggcaacagagtgagaatttgtctca

SEQ ID NO: 607801 - DNA, 662 bp, Homo sapiens
ttctattagactcttagtaagattacacatgcaagcatccccggttccagtgagttcaccctctaaatcaccacgatcaaaacgggacaggcgtcatgctcgcagctaatgcctggctcaaaacagcttagactagacaaaccccacgggaaacccaggtagtgattaaccctttaggcaatcaaacgacaaagtttaagcttaacgcttattacttaaccccccaggggtttggtccaatttcgtgccaagcccaccgcggggtcacaccccggaattcaaccccaaggtcaatttaccgaccgccggggcggtacacaccgaggtcgctctctaggacttcaaccccagtcttttcccaccaatttagaagggcctacaaaagctccacccctgagttgggtacacaaacagccttccagtctgacaccacacggatcaggacgtacgcaaatggtggtttttacaccagtaattcttgaaccagagcaaacagtcttaatgaaccccaaaatcgtgggcaattagatacccccgatctattgcattagcccctaaaaagcttccaaaccggtctaaacattcgctcataaaatcttggctccgcgcagcacccacctcacggagccacaggtttaaaactcctaaggacctggagggga

SEQ ID NO: 607802 - DNA, 1577 bp, Homo sapiens
aatagatgtaaaaaaagtaacgttgagagtagacacatgcgaagacagatattggattctatgtgctgactgagacgtatgtcttccgttactcgtcgtatgtatagtttgcttgatgaggacctactgatgatggtctagtactagtgctgtagctgtgtactatgattgtcggacttctgtaggtgctataatactagtcttgcgggccctgtgttaggtggatgtcgcctcgcctgcgttgttggtggggtgggggccggccctccgcccccggccgcgtgttgtctgcggggggggtggttttctctggctaggccggcgccgcgccattgttggtgtgttggtcgcgcgcgcgttgtggttgagggtggtgggcggtgcgtcgcctttgtgttgtgttgtgggtgtcgtccgcccgcgcgcgtccgctctcgtatgttatgttgtaagtactgccgtcggtgctgctcactgcttgtatgtggtggatgcggtcgtcttgccggtcctgtctcgaacggatgggatgcgctcgcgctgctgggtttgtattgaggggcttcgcgtcttcgtgctcgctctcgatagggtatggtcgggaggggggagtctgacgcacgtatttcccgccgctgtcgtcgggtgagggtgttttgtctttgttcgccgccccccggccgtagttgttgggtagcgtcgccactctgtgttggggggggggttgtttttcggtgtaccgcttgggttggtttcgtcgtggcgttcttcttagttgcagcgtgttaggggggttgttgcgcagtcgcgtttggtggttgttgtccccgctctcgcgtgtgggggggagtgatttctgtcccgtgcctgtgtcgtcccggactggtggcgcagcggtgttgtgtcctggtgttatcgttctgtttgcgcacgtcggtggtgtctcccccgttggtgtggctgcggtcgctgccgcgccccgccgattttgtcttcttgtgtgagaaaggtcgtggtcgtcgagcggactccacttcgtgcttccgatctgtcttttctctcgtggagacgcgcggattttcttctctctctcgctggcgtctccacactctcgctccctcaggggggcgcacacaactctctgggggcgcgcctcacgtctctgggagcccgctcccttctgtgtatgagacgctcctcgcgtgcagcacactccctcgagtgggttgcctctgcgtcccacacaggatggtgccccccccgctggttttcacacatcgcgtggatattttcttgtgttctaattatacgcgctctctagtaattccccccccatgttgtaggcccaccactctcttttaaaagagcttctgttaataccgcccctcccaccctctcactttatacaaatcttttaagaatatatctttttccctctattcttataaatgttccattgtttccatgtgtttctcattgggatttcgcgcccatattcaccacggtgtgtctttggggtatccacaatgaatcaagagtaagatttcccccacccacgaaaacaataaacagaaaag

SEQ ID NO: 607803 - DNA, 151 bp, Homo sapiens
ccaagaacagggcccagcctccagggccccaaattccgccagcctctccccgctttgggtcctgccctttaacactcgactttgctggtcatgggaaaaacaaaattggtcccgcaagccactaattccataaaactgttttgtgagctga

SEQ ID NO: 607804 - DNA, 400 bp, Homo sapiens
tactactactactaaattcgcggccgcgtcgacataaatagtcaaggcaagtgtagatgcattatggtattcataaaatattctgctctgggccaggtgcagtggctcacgcctgtaatcccagcaccttgggaggccgaggcaggtggatcacgaggtcaggagattgagaccagcctggctaacatggtgaaatcccatctgtactaaaaaatacaaaaaattagccaggcatggtggcaggcgcctgtagtccagctacttgggaggctgaggcaggcgaatggcatgaacccaggaggtggagcttgcagtgagccaagatcatgccactgcactccagcctgggtgacagagtgagactctgtctcaaaaaagaaaaaaagtcgacgcggccgcg

SEQ ID NO: 607805 - DNA, 108 bp, Homo sapiens
cacgaggggacaggttcttcgttgtgcctttcttctgaacgctgcgcaggctggacgcctgcgccttgctacaggcttcggccagtggttctgcataaattggggaag

SEQ ID NO: 607806 - DNA, 1130 bp, Homo sapiens
gagtcgctgacgcgccgcggtgccgcgggctactcctctcctcacgaccgacgagcagtcattatggcgaacctttggctgctggatgctggtactctatggtggccaacatgggcagtgaccttgggcctctggcaagcaagcgcccgaagcctgcgcggactggaacactggggggcagccggataccccgggcgcaggcgaagccctggcacggcacaccgctaacccaacctcaggccgcgcgcatggcatgggcggccaacgcctcaactgggagcggcgggacagggagcgacaatgcactcaactggagtggcacaggaccatggcagagcacaagcccaccaatagggaagggctgcgcatgggcaaacaaaggcccatccacagggcaggatggaacacgcgagcgtccaacgggccaacgctgcgcacccccgacccactgccccagtggcgaacacaccacgcccggacgcataaacacccagcaaacacccccaaccacatggcaccgcaccatggcgcgaaccggcgtggccctggcaccgacacgcccgcggcgaccagaatgggtacgggaagcgagcccactactggccggacggaataccacgtccctgcggacgaaaacgtgttgcccactggacgcccacaggcccccaactccataacacactacacgcgcgacggcacgaacctcctgaacgaaacaccggcttacccacataggcaacgaacacacccacatggccacccgggcacaacccccccacaccccaaacggcggctaccacacaagggcgcgcccccaagccgcaaatgaaagatcaaaaggcaaacacccacacaacaacaactatcctgcgcgccaacgcagacggccccgtcacaccatcatcacacagacacacgccgccgacagccagcggaccacccacacaccgccaaccaaacgcgggcgacgccacctaccacacgtgacaccacgacaccaccgcctcatgcacggacacccccacgcggactcgcacccccccacgtggtacgacccccccacacccacactcagcgccacctcccacggcgcacaattaaccacgaacgacaacactcaccacggcccc

SEQ ID NO: 607807 - DNA, 115 bp, Homo sapiens
  misc_feature (44)..(44): n is a, c, g, or t
cactcgagccggtaccctcagtctgctcaagacgaccgataaancgttatttgagggagctgctgttcagtgcctatcatatcaaagacatcggtcgtctcatcaatgatcgcct

SEQ ID NO: 607808 - DNA, 194 bp, Homo sapiens
accgggcaggccggctacctgcgagccgatcagcgattcggcggatgtggacagacgagcaccgatctgacggcatgaggaatggacgagagggacagatgaatgggatgagacatcagatatgtgctaggcgacgagacgatcgagatgaagagtcgagaagagcgagacgagcgagaacatgaggcagagac

SEQ ID NO: 607809 - DNA, 965 bp, Homo sapiens
ctatatagcaccatacgttatggtgtcagcttgtctgcaaaccaggtgtatgtagaataatgatcatcctcgaaacgcaaggagtactcttggtctgtgcacataatttgctgggtaatctcatgcagtaacaaaatctgcggggtgatgcgatcatctggggccaactctggcttggtggtcactgctagtgctacactagaattaagtctaggcagtgtgtccaaaagaagagttaccgatatcaatctaaaaggcgtttgattgttgctttgggttggaattgagaggtgcagatagtcgtgcagtttggacagcacataagtccccaatgaggcatcccagagttgttggccagttgttctcgggcacaaagtgtccaacattacctcagtatctcaagcagaatatgctttctgattccttaacatcgtttttcaccactgagaactatgttttctacctgaaattaccaaacccattttcatttaaccctgcttatacggaatctggtctcgctaactggtgcttaaacttctccccaacgaggggttcctcacccttttactttggacacggctggtcggtacaccgttaacatttggcaattgtttctatgcacttactgacaacggctaacactcttgtgctttgaaagtggtacccactttcaacaacacacttagttcttgttactttctgcattgaaaatttcaaggttttgcatacctttacaaatacttgtactggttacggatcttgatcttcatttgcttcgcaatagcctctactgatttctgacactctttgctataaagattgttgttccactggtaattgtgccttcccgtttggcccattacgtttactatttatcacttcactgatgtgccgcattggtttgaccaaccttgccccaggtcacccgctttatgacctgttggccctattgtcaaatcccgagt

SEQ ID NO: 607810 - DNA, 718 bp, Homo sapiens
  misc_feature (650)..(650): n is a, c, g, or t
aattacatttgtggactactgtgagacagtatcgtctcccactgcatgcactacttgtgttctccacgaatgttcttccgccttgccagttctggctctcacagctccacttcccagaggtgaatctgactcagaagatgacgctagtgttgctgctcgcagaatgcagaatgttcttcttggttgaacaggagtgcacagatgttgtgaaatacttgaaaagagacttgagcaacaagtggttaggacaacgacaagatacgcagctctgaatgttcactataatatcttatcgttcatcttaagtgttcatcacaaggatgtctgggagtgactataaaacagtttgtgtgttgtcatcgtatcccatttcagtcgcatgaattgaggtccagtcgccatgttgtaggagttattgttgagacgagtaattttggtgacatgcatagttccacgagtttgcgctgagtggttatgcagtgtttcactccaagctttggcatgcaatcgacacaagctagcaatgtgtacccttctttgcaacgagcaagttctgctaataacgtcatgagttagtataagcttttgtgaccattgagatggagaaagtgagaacattatcggaagctataattgccgagagattgccncttgggtttaggtagaacactgtataccatatatactatatagcatatatagtatatagtagcatata

SEQ ID NO: 607811 - DNA, 182 bp, Homo sapiens
gttagcatacgtcaccagtcacagccacgatagcaccctgtctttggcagccttccacaatgatgagcttctgcttgaggggaggtcctgtgcaacacactacacccacgtgtggtactatcaagtggtacctgatgctctgaattactgtaatacattgtgtcatatgcttgtttaccttg

SEQ ID NO: 607812 - DNA, 353 bp, Homo sapiens
tagacattgagtttggataggcggagactgcgtggtcctgcaagcctggtaaccagtctggcaagcattgggacctaggctgctgaagactgacggggcccaggctccgctgcccccaccgccatcaccacctcggaacccagggtaacgctgtcagtctttcggtaagcccatgctcttccttttagatcgggggactagttactcagttttatcagaatattcttgaccctcctcagttcttctatctctattgtgagagtcaatggaatcccctctaggcacatactggtcccctattatgcaacctattcaatacccccttcatccactccttcttagttatcccttag

SEQ ID NO: 607813 - DNA, 175 bp, Homo sapiens
tcgagctggtacccttctcgcgaggatgtgcacgtgcagtggttgcgcacatcagcagcgtcatctcgagctcgatgcgcatgtgggcatgtcgctgaggatcacggcggtgatcgggggcgcgattttcaaagccgcgcgcgcatgtcaccgagaagtcatcggcaatgtcgga

SEQ ID NO: 607814 - DNA, 907 bp, Homo sapiens
cgcaagaggcctcagcggtggccgtccgagagccgagaggtgagggtgcccccgtcctcacctgcagagcgggccgttccgggctcgaacccggcaccttccggaaaatggcggctgccaggcccagcctgggccgagtcctcccaggatcctctgtcctgttcctgtgatgacatgcagtgagaagttccgcctacaaacatctgcctacttcccacagatggtctcagtggctgcccgctatgctcaaggtggcccggcgtgcttgaggtgccagatctatgctgtacggagtcagataccctacaaggtcctgggccccacggtgccccgagctgagtgactgagggccttcggccgcatggccaagacctgcttcagcatggtgcctgccctgtcaagcacggagctggatcggtcggcccctagctgcgctctgtgtctgctctgtggctattgaggactctaggcctggcatcttgaatcacgagcctggactctccttagaccgggggctgtcggtccatgtgtggtggtggacgcctgttcctcatcgcagccaaggtgtggaccggctggtggctctggcccggtgagacagagtggtgccttcctctacccacgagcgaagggctcattctgcagtctcgtgggcgatagccgtgcaacccccagtgtcaacgtaagatccagaaactcatcgatgtagcctggcccaagcacagcgggactgctggggctcttccaaaggcagaactcccttctcattgagatgccaacctgcttgagggaagacaccctccctgtaccggaacccatggaagccgttcccccatccttgtccctattgtggaacacccgatgcgccccttgtgggggggaggtttcctcccatggcatggtccga

SEQ ID NO: 607815 - DNA, 130 bp, Homo sapiens
tgtgcattttagagtacttaatgttggtacttttatgccttcactttacaattcagccttagataaagaaccgagccatttctgctaaaaagtccttgatttagcactatttacataacaggcactcaat

SEQ ID NO: 607816 - DNA, 256 bp, Homo sapiens
gggaccaatgaaattttatttatggaccctgaaatttgaatttcacctaattttcacgtggcacaaaaaaatttttttggtttttttccaaccatttaaaaaatgtaaagaacattcttagctcttagggtacacaaaaatatggttttactttgaaaaccatccctagaccctgaacagcctttttgaattagtaacccttagggtgtcctaaaaaacaggtttgggatagctgtgagttaaggagtccctaaaa

SEQ ID NO: 607817 - DNA, 514 bp, Homo sapiens
tggctttgctggactacattatcaccttaataatttgactttgccctcggctctctgacagctttgaagccactatcagatttaccgaggagaggacaagtactgactgtttgacccacttatccagaaataggtattcacattttgagagggcgtaacaaaacttgtctgattgcagatgacatgattgtatatttagatgacccaatggtgtcagcccaaaatcttctaacactgatcaatacttcaacgaagtctcaggcgacaaaatcaatgcgccaaaatcacaagcattcctatacaccaatagacacacagagggccaaatcatgagtgaactcctattcacaattgctacaaagagaataaaatacctaggaatacaacttacatgggatgtgaaggaccttttcaaggataactacaaaccactgctcaaggaaataagagaggacacaaatggaaaaacattgcatgctcacggataggaagaatcgatatcgtgaaaatggcc

SEQ ID NO: 607818 - DNA, 301 bp, Homo sapiens
aaaggagaagccagctgaatcgctgtaatcatattcatagctagctgtccatatgttacaacgacaggtacagagtacccggtgccatggtcttaactatcaccaagatataaacggcaggcgcttgaatcccatccactgagcacgtccccaggagctgctgatacagcttgcctcaatatcttatcagtaagtgcattcctggatgtgcttagagtcagctatgcactaagttatacccttaaagggagggggataaggagactgcaaataaagagggctaaaatgaagtctgtccgac

SEQ ID NO: 607819 - DNA, 715 bp, Homo sapiens
  misc_feature (308)..(308): n is a, c, g, or t
  misc_feature (438)..(438): n is a, c, g, or t
gggagtactggatgtgattaaatcctagtgtctaggagtgcagtctgggtagcagtacttttaaaaacttcaggtgatgctaacatgcagccaggattgagaaccattgcacctgctattctgctgtgctgaggcaggaagaaggaattgacaaggaagcggcatcgcataactagttgctcttgtggtctgctctctgctggctttcatccctttgaccatgctgaactgacctcaaaatcctctggcttctttgtagggtaccctgtgaactcttcagaggctcttagttctgctatgagagccantcccgctgaccctctcagttctcatgaccagtatttcatacctcttactattagattcccacaaccagaggtcctctcttgtgggtagagcaatagcctgaagactctagccagatgacacagtgatatnccttggcacagaggaaattcaagacaaacagtggatacatgggtttctccatttcaccttctctcttttccctgctatccctttctcatcctcttttgtcctgtcacgcaaaggacggataaaccaacaagtcctctgcctaagcccaatatccagctgggctctccctaaaacattctgatttctacactcatattaaaatcctgactacccacttagcttggcaaaatttgggtaggaaacaccaacaatgtccaccttttggttgggcagtggg

SEQ ID NO: 607820 - DNA, 986 bp, Homo sapiens
aagttcctcagcacgcagggctctctttgggagagactggcctatggcatcacgccagagaacgagcaccacctggtggctcagagggacatcagacagttccagatgaaaacgagacaagggagaaggagagctaccaactcttgccagatatcctgctgaacagaaatccctgaagctgccttaattctcaaaaggagttaccgctcagctgggagccagttcctgctatatgatctgttttctagcctcgctaatgtgagactgaagcattcttaccaaagaaatcatttcctagtaaagaagcccattgaactcactttatttgtttatttccttcgaaagccaccgaagagagaaaaacagagaaggtgtgtaagtgtggcggaaaaagcacagcatatagttttacagacttgggtctgcagctgactagctgggtggcctggggatagtggcttcatcttttggggcttcaagattctttgtctttaaaatcaggggttatatcaagatcatcaaagttcccattccattaaagaaaaccctgcatgtatccataatgatgcttcttcctgttaaatttacaatgaagggaaacccatcacttaactgtaggaatttcccaaaatgaactgatgaccagtgatctctctatcagaaaatggcagatttctagccttccagaactttgattttcttggacattcaatggttcctttttcccaaatatttttcaactgatgccaaaccttggatttggtttaatccacctttggtttaggtttggggacccttttcctggaccgtcccagttttgggttaaaccgatttggatgaccctgtgagtcgccactggataccgacagtctgctgtggtgcttagaagccactgaaacattggtgaatgtgaagtcacttttggggtgcctgccctcatccctctgtctctctgcttccgtgtaaaaaagactgtttcaattgtg

SEQ ID NO: 607821 - DNA, 1815 bp, Homo sapiens
  misc_feature (275)..(275): n is a, c, g, or t
  misc_feature (614)..(614): n is a, c, g, or t
  misc_feature (1396)..(1396): n is a, c, g, or t
ggcgtggtctgtctctcgtctcgaacagatggtgcgcgactgcgataccaggatcccgaggcggactgctctctaccgagctctaccggaccgctcctaccgtagtttccctacgtcgctggcgttgcgagccttccggggacctctgcgtgtcgtcgtggcatctcgctgctctctgggtacctgcccacgctgccgctattattagtaggtttcaggcttccattcgttggcgcaacgcgcaacgcctagtgtatgcctcgccagaagtacgnatcgagcaaagttgactatgcgcatctcgtgagcggtggtgaggggccagtgccggtgccaacgaggcgctggggtccaactattgcattaccgtggcagaggcgcctcacgtacctaactataacgcatctttcctcctgcggcgtatcttccatctgtcggcaccgcagccggcaatggcactagatatggcgtcactcggcacaaaggcctgtaggaacacgacactcttatcggtatccccgggcaattagactattggcagccggtagggcaccataaggcgggcagttagagagcagtcacccgtagggcagctcctcacatggcaacacacntcagctacaacacacccaaaggcaggtggtggcagggctccgggcttgccatacgattcgataatgcccgcaggaggcaccagtcgccaagcgaaacaaggctcgcaggcggtaggccacaagacgaaggagcaagattggcgagggggtacaaaataaccggcgcagagatcaacgagccccgagtggcgaagaccggcttggcatcggacttggggccgccacaatgggggacacgggaagcacagacaccgccttgggggacaaagccccaagggggctcccctttgaatatgggggcactagcgtgttccacactagggcccccactggcggagatatcccttcggtcggcgcagaacaatccggggaaaccgcccccccccagagtccattacatttgtgtggaaacgttttaccccctgggggaaaggaaatccttcacaggcttttgttcctttgaaggcaaacatgcacagccagaaaaggtttgggaccactgaccgattagacattcggacacgtacacaacgccagtgggggtgggtctgccacccccgaggcaccgcgtggaagacgccaaaaagtcgtgttccccaatcccaggaggacattggagggatggaaggcacccgggtgaacgcgggcagatagggagagccaaggggggccacggaccgagtgagtcacatgcagctaccaggcaacaaagagaagtgtcgagcctaccctcacccagagtgaacacggaacgtgaacacggaaaagataccgagtaccantgggaaagacagcccccagagagggacagctatcacagtggacacggtgtggccacccccacaatggggaccagtaaggacaaggacaaggcgaagagcgtaaagcgtggtccatagaaggaagcggtatgatccaccgatcccagattgcaacaagtacaggcgcaatggctagtgcctgattaatagcgaaatactcgacgtaaacagaaagaccgcttgatgaaccgaaccacatggtgtgcaccgcacaaggccgcgtcgtattggacaaacccgagcacgacgtacacaaacaccaagaaacaagacacgggggccactcaacacgataggaggcacagcggaagcaacaagcggcaatcaaaggacgacgacatgcagcccgcagaaggtgtgacatcatacgacgcaacaac

SEQ ID NO: 607822 - DNA, 229 bp, Homo sapiens
  misc_feature (66)..(66): n is a, c, g, or t
aggggcccagcccccaacccacaggcagggaggggcatccctccctcccggcctcagggagcgaangtggattaaacccacagggattccggatgccagcccccattttaaacttcccttttttctccagggttgttttggtggtggtggtttttattttttaaactttggccaacccccaaaggtaaattgcccaggtttggggtgaataaaccaaggtttttttcca

SEQ ID NO: 607823 - DNA, 301 bp, Homo sapiens
cccctcaccaagaccctcgcctcaccaagacctgacgaagcgatccgagcagtcctctgcccgcctcccgggcagaagcaggaagcaccactgcactccagcctgggcgacagagtgagactccatctcaaaaaaaaaaaaaaaaaactgggggctggcacaaagtgattgtggagtgcttctttgtggtttccacacaatttctcatctgaaacaaagtcttaagtttacagcagctctggtctctgggctataagggagttttttggcaaaaagaggattgggtggcagaagcaggaag

SEQ ID NO: 607824 - DNA, 148 bp, Homo sapiens
gatggtggcccggagatcgggtgtacggggcgtccacgggtgcgctatgaagtgtactgtgttcttcgctgatcgggtgccgtgaacggactggagcgaatggcgcaagtctgcggctgtagtcctgatggcgagagacgcgggcgtt

SEQ ID NO: 607825 - DNA, 378 bp, Homo sapiens
gctcgacaaacaattactaatgaggtacgctgatgcctgggagtctcttgactccactacttaattccgtttaagtgagaacccttccaatttcctttaatagaagggccagcttaatgttggtggcaaaattggcaacattagtttattggaaatttggcaaatttaaccccatttcctgtggtttgggctccaaattgcaatgttcaatgcaacgtgctgctgaaaccgaccggagtactagccagcacaaaaggcagggtagcctgaattgctttctgccctttacatttcttttaaaataagcatttagtgctcagtccctactgagtactcattctctcgcctcctctgaattcccccccccccccccccccc

SEQ ID NO: 607826 - DNA, 154 bp, Homo sapiens
gagcagaggtatcaaagcccttcaatttgtgagcggatagtccactactccgcctctcgggccaccttgaagtggaggtcgcagttataggtgtcactagcaacaagggtatcatcaaagtcatcttcatcctttctcgtacatagtcgagggg

SEQ ID NO: 607827 - DNA, 277 bp, Homo sapiens
cctacgtataataattccatcacaagacgtctagacactcatgagctgtcaccacattaggcttaccaaccgatgcaattcccggcacgtctaaaccaaaccacttacaccgatacacgaccgggggtatcctacggtctatgctctgcaatctagtggcagcaccacctactgtttcatgccaatcgtcctagaattatttcccctaacaatctttgaaatcagggcccgtatttacccctatagcacccccatctcacgcgtatgatgacggtga

SEQ ID NO: 607828 - DNA, 525 bp, Homo sapiens
  misc_feature (30)..(30): n is a, c, g, or t
  misc_feature (148)..(148): n is a, c, g, or t
  misc_feature (157)..(157): n is a, c, g, or t
  misc_feature (193)..(193): n is a, c, g, or t
  misc_feature (203)..(203): n is a, c, g, or t
  misc_feature (205)..(205): n is a, c, g, or t
  misc_feature (260)..(260): n is a, c, g, or t
  misc_feature (282)..(282): n is a, c, g, or t
  misc_feature (332)..(332): n is a, c, g, or t
  misc_feature (345)..(345): n is a, c, g, or t
  misc_feature (353)..(353): n is a, c, g, or t
  misc_feature (402)..(402): n is a, c, g, or t
  misc_feature (410)..(410): n is a, c, g, or t
  misc_feature (412)..(412): n is a, c, g, or t
  misc_feature (441)..(441): n is a, c, g, or t
  misc_feature (444)..(444): n is a, c, g, or t
  misc_feature (456)..(456): n is a, c, g, or t
  misc_feature (459)..(460): n is a, c, g, or t
  misc_feature (505)..(505): n is a, c, g, or t
tctctcaggaatatgtatcatttgattttnagcatgtggggttaaggtattagattactaccacaaaccgtagacccctgcatggcccacattttttttcaggagtagatgttacatggcaggtatcaaaatgtgatgatcaattctntgttttctnttgattaaacctcctcatttggttaaatagccagtntataccaaananttctacacaggtcaaaattatatcacttttaaagcagcaaaacgtgatccaaggntttcttgaaggaagtgcaaaanatgcagtccaaaatgttctcccgattcaagaacccttatgctgtgcctcncctgaggaaaganctgtaaancaaatggctttccaccccccaccaaaaaacccaaaaaaaaactggaatntgcaaaangnacattcccacccaggaaaccatgaaaaancanaaaacaatttanttnntaggggaacttttcggcttgcatggccacacaccccaagaaatanccctccccattccccccacg

SEQ ID NO: 607829 - DNA, 817 bp, Homo sapiens
  misc_feature (556)..(556): n is a, c, g, or t
acctctcggatgggccccccgcactcccgtctcgagcactctgcggtgcgcaacgacccacactggcgcggcgcccatcccccactatgggctctgcctgtggaccccccacgcccctttttggtgcaagccgcacgaccccccccccgggtgtgtggtcccccccacactgctcttgtgccataatcgccccacctcctctctcaccagaggagagagtggcgcgcccctcccttggcttataggtggtggaccccccccagccgcccagcatgcggtcttacctccttgatgatgtgccccgggggacgtcctctcattgtgctgagtggagagtaaccctctctcctcctccattaggtgccaaagatacacacactaaattctgctctcattctttaccccgctctataaatatactgtcgccaactcataccaatgctccctaaggactcttcgctctctgattgtcctcactcccacgcggtgaccacagtgcagtacccacccacttcccatcccacccccttacataaaaaatgtcactttttccacnctctccttccaccatgtccacgacaccactcactggtgggagatatttctaatcactgccagtgagacgacgacaccacacactgcatgtgtgccttgagtctatagaagacctcacacactctgtctctatttgtgtctgtcgccacgacgactgagagagagagtctgggctcctcctggttgctcattttagagaggaggagcctggtcggcagtaatagaagttgtccgggccctctaaaacgggcccacataacaa

SEQ ID NO: 607830 - DNA, 594 bp, Homo sapiens
gcggccgctatgaagcgatcgaccagcgtctgctcgaccggtgcgtcgacgaggaaatcagcctcggcgatttcgtgctgtcgggcggcgagctgccggcgatggcgatgatggatgcggtcgtgcggttactgcccggcgtgctgaacgattcgctgtcggccgtgcaggacagtttcgccgatggcctgctcgattgtccgcactacacgcgcccggaggagtatgacggcgtgcgtgtgccggacgtgctgctcggcgggcatcatgccgagatcgagcggtggcggcggcaggaagcactgaggaatacgttgcggaagcggccggacctgatcgtccgggcgcgccgcgagaagttgctgagccgggccgacgaggcgtggcttgcgaacctcgcacgcgaagcgaagaacgcctcctgaggcggctgcgcgagcgggaattggcggtgtcgtgcatgcgtgcgcggcgcctgatgtgaatccatcctctatcggggccaggcctggaagcaggcgggtgccaacgccgacaagatggcaaaaggagtcagtaatgaatctgatcgcaaaacttgagcaggaagaaatc

SEQ ID NO: 607831 - DNA, 1024 bp, Homo sapiens
  misc_feature (327)..(327): n is a, c, g, or t
  misc_feature (393)..(393): n is a, c, g, or t
  misc_feature (414)..(414): n is a, c, g, or t
  misc_feature (429)..(430): n is a, c, g, or t
  misc_feature (434)..(434): n is a, c, g, or t
  misc_feature (437)..(437): n is a, c, g, or t
  misc_feature (480)..(480): n is a, c, g, or t
agaggaatacggcacgagcgcgctactacgccaacactagaggaccccgagagctcctattaggaacctagcacagcccggcgacctagttgccacctagcaccgcaccggctaggaccatagcacgcctactgcctacctagcgatagctagtaccacagacctaggacctgaagggtaccccagcgtagactcgactagcgacgtggtacaccctataacagaccgacccgagcacagagaacggctagaagtgctacacctatggcactagaactagtaggaactatagtagcctactactacctagtccacccgatagagggnaacatagtgcatgctccagtatgcccaacggtctaggcgtacgcggcacggttagacccccaaggncaacctattactagcggcaancgacctatactacgnnccgnggnctagcgtgaaacaataaagatagcaagcccatagtactactangcataacaaccaaaacaaataacgaaagaagaagaagaaaagacaaaacaacaacaacacgaataaataagtcgaaagagctgtggatcctgtgatacccctaaatacgagccctttctcgctcagtcatcctcatgatcgcgctctcacttctgtggacgtcaccgttatttacactgtcgttcctgttgatctttgttgttatactcgcgctgggcgtgtatcctccctatagatttatatttgctgcactctattggccagtatgagtcgcaccccttatggttgcagcttggtcggttattagtcgacgcaacgttcttgtatacgacacggcgcttctcgagatcctatttgagcgctccacgacatgtacctattgtccttactctttactgcgttaccgtatgttctgttctatttttgttgtgtcattcttcggtgactatcagactacctattttacctcatttttgctcgtttctgtgtactttttttttttcttctcccacactcgtgcggcgttctgtttttcactctttgg

SEQ ID NO: 607832 - DNA, 735 bp, Homo sapiens
agtaagaccggcccttgggtttgtgtgggagctgggtgaggcctgtgactgccagctttcccccacttccctgacaacctgcatgactcagcagaggcagccataactctcctaggtacacgactccagtgacctgggaatctcacccacattccctacagcagccgcagcaagacccgcccaaggagagtctgagctcagacacgcctagctccacccccacctgatggtccttccctatgcaccctggcaggaagacaaagggcaaataaatcttgggagttctagggccccgcccactgctggttcctccccatattaccacagctgatgctttctggaaaggaccacctcctggcaggaggccaaccagcaaaaaaaaatagaccattaacccaccaaagctccattgtaccctctgccacctccaccgaacaggcactggtagccatggctgagagacccatagatggttcacatcacaggactctgcagataacctccagtaccagcctggaactgggaagattcgctgggtggctagacccagaagagagacaacaatcactgcaagttgtggctcataggaagccacatccataggaaaagggggcagagtactacatgaagagaacaccccatgggaccaaaagaatctgaacagccttcagccctagacctttccctctgacagagctacccaatgaacaaaccctggtaatatgacaaaacaga

SEQ ID NO: 607833 - DNA, 534 bp, Homo sapiens
  misc_feature (230)..(230): n is a, c, g, or t
  misc_feature (297)..(297): n is a, c, g, or t
aatgatccccaccctctctttcttctattttaacaaaaaatctatacacacaaatcttttaattccaaattgatacagataagtttattttattattattttttgagacggagtctcgctctgtcgcccagggaatgcagtggtgcaattttggctcactgcagcctttgcctcccaggttcaagcaattctcctgcctcagcctcccaagtagctgggattacaggcgngtaccaccaagcccagctaattttttgtatttttagtagagagatggtttcatcatgttggctaggntggtctcaaactcctgacctcaggtgatccacccgccttggcctctcaaaatgctgggatcacaggcatgagccaccgtgcctggccattttctgcatattttctatgtaatcattttggccaacactgtggctcactcctgtaatcttagcactttgggaggtggaggtgggagaattgcttgagcacaggagtttgataccagtgtgggcaacatagcaagaccctgtctcccgg

SEQ ID NO: 607834 - DNA, 227 bp, Homo sapiens
ggaacgcggcggggcagcacagtcgcaggagatgatggaggttgacagacggttcgagtctcagagtccgccgatgaagaggggagaacacagcagtcgcatcgtggcgacctcagtgacagagcctcaggatggcgaggagcgcgggaggaggcccccacgaggacataagctgcctctggacatgaaaccatcacctggacagagatgcagcaggatgttgattt

SEQ ID NO: 607835 - DNA, 113 bp, Homo sapiens
gctcggtaccccacttctgcttcccaggctcgcctgggtcctgctggttgctactggaatcttgagaggctccttgggcatcctgctcagacttgggcactgtttggactctg

SEQ ID NO: 607836 - DNA, 778 bp, Homo sapiens
ggacgggcgcctcctccgcgggcataaccaggttagcctacgacggcaaggattacatcgccctgaacgaggacctgagctcctggaccgcggcggacaccgcggctcagatcacccagctcaagtgggaggcggcccgtgtggcggagcagctgagagcctacctggagggcgagtgcgtggcagtgggctccgccagatacctggagaaccgggacagcgagacgctgcagccgcgcggaacccccccaaatgaccacactgtgaacccaacaaccccaatctcttgaaccatggaaggccaaccctgaaggttgctgggccccctggggcctttcttacccctgccgggagaattcacaacttgaccctggggcacgcgggggattcgcggacgggaaccccaaaacttccagggaccacttgaggctttgtggaggacccagtacccagcaagggagataagaaacctttccaagaagtgttgggggcaaggcctgtggcgctggggtggccctttccttggcaggaaatgaacggccatgactaacttaatcggtcaattgccccaatggttaacaggggcacagcaacgggggttcttggccggagatgcccccttacatccccattgaacgatttgcggacgcccaatctttccccacggtacacaaacggtccacacaagtacgctggaggccacttgggttcgctgggtccttggcactgttcccttagccaagctggtggctacatccgaacgcaccggggggtccga

SEQ ID NO: 607837 - DNA, 1737 bp, Homo sapiens
  misc_feature (512)..(512): n is a, c, g, or t
gtgctcctcgatggccttgcaggagcatcgacttggctatgggttggatgcgcagtccgaatcaccacgatggtctcggaattctttgctattgacctacaatacctcacgtgttccttagcgcatgttgatctcacgaagtcgacagcaactgagtgagatatccttggtatctacgctatcctacccgctgttcatcgagtgtattgctcgttgatgtactaaactaggttctgcgaagagagcgcagagagggacatacgctattgcatacctggcagtacctcgtctggagtcatcgtttcgtcaaggatgcatttgtctagccagtagaagaggatggatcgtcggactagcgggcattcaagggcgcgagtactagtgcatagccgcggagatcgatgcgcaatgctaacaataggtgtgcggaagaaccaaattccgaatcgcgtctgggcgcgagcaatctgtgcccgttagagaggatcggagcgaggattgctattcgtganttgcgaccgcagccttctatagaggcggtcccttaaactatgattgaacactggtgcccatccacgataggaggagctggtccacgagcatcttagatttagcccactaattccgcgccgagagatacttgttcgaaggctggggccgggaagcgtactttagaagcgagccgcagtagtggcgaaacactgcgagacgttgaaccgtagcaacttaggggggacttggcgagagaatccgagccaaagcaaactcccgtccttggcaagtatttttcccccagagtccccagcaaggggccattatcataaagccatttcagaaaagccctggatccccagatctccccggcaagggcaatgtggccacaagagggagcaagtccttacaacggaggtcagttgctttgggccttgggcagcaaccccgccttacaactgatggccacgtgcctataggcacccctccgaggaccccggtgaagggcaaacgcggatacttaacatcgaagtcgaaaaggagtccacgcttcaaacgacctccttgtctcgaacgccgattgtgccacgcacaggagctgttcctttcgggaacaccccgtggatctttcgaaggtgggtgggaacaaacgtacgccggcaaagcttggatcggccctgaagaagctacggagggaagaacgcataagggagcacacgcgttccaaccgtggtcaacacgagctgacaacaccccatgataggcccccatgggggacacaccccggcggaaatgcaacggcagcggacaaaatgggccattatacttgggagacagcaccagagacaacaaaaccagaaaagagacgtcgaaacaaacagatatacgggtgagaaaataggcagctgaacccactaaagatgttgccaggcggctgatctcggccaccgggagccactcagccaccactgtgctagaaatccgaccccaactaatcccatatacctgatccatacacaccaataattaaaacccaatcagaaagtcacagagatcttaaaactaaccgagttaggtatcacacccccaaacaaactatacctaggaacatatagcacaaccaaaccagacatactaacatctcaaacacagaaacaggctgatcacacacttctaatacatattacacttataatagctaactatacgatatgtcctaattatacatactagaacacgcaaaag

SEQ ID NO: 607838 - DNA, 720 bp, Homo sapiens
tgaggatgagttgtggaaaaataaaatgttttagccttggtaaaacctttcaaaggggaccccccccaacccaaaatttcttccaggcgttttttttccaggcactttacctatgcccttttttttaaatattttttgtacccttttttgtatttttcccttttaacacgggtgtgggggaattggcccgaaataaatccccgttttaaacggcctgtagctttgtaatccaaataagggggttttttgtcctggtaaccgccattccaccggcagctggagctggaatcccattgtttttttacctcccatccttttttttccctgtcacaaaaaagaagggtgaaattcagtgaatgctgttactaatcctgttacgagatgaatctcctttcaccaaaattaaaatatgtgtttccgctcaaatgatggccacagttgaagccccaccccttttaatttgcaagccccccccccttaaggctccccagcgccttccacccttttactctagggtaccacccttctccttgtcccccccttggggggtgccgttttcttaaaaggtttgcaaattgcccctccccccaccggttaatgtctcttttttgggaaggtctcacaaaggtgtgcatatttctgcatgtaaggggcgtgtctatccataaaacttttgggacgtctctttccctctgcctcgtgccgaattcctgcagcccg

SEQ ID NO: 607839 - DNA, 972 bp, Homo sapiens
aatcccaattttggttccttactattgtagtattgatttcctatcagttcatgcagtataccagagtaagccatttggtcccaaaatgttcggtgtctcagaactttagttttcgaggattggaattttcggtaaggctaataattggccagtattattatcgatctatgcaacaagtcattggtagttgacgtggcttattaaacttgtgtacctcctgaactttagagagttcttgcattggtaatctggcaccgcttttctgaccatcgctgctgttgctctgtgagtcctagatttttgtaccctagcagagttgtagaggctgtgatttaatagagacaagaaattcggcactgtatattacagctgtccttgaacaagctatcaatgtcgcttcatgaaaggaagatctaaatcagacaggagttggtctacatagtagtaatccattgttggaatggaacccgttgctatagtagtgacaaagctgaaaggaaatttaggaggcactaggccactattcaggcagcactaagctaagtcatcgcatgtcgctttggtcagaagcatcctttagacttgggagtagacttcacagaatgaaagtaattctagataattacggatgaatgactttaactgttaatgagagcctgagaacacggattatccccaaacccttgtcactcttccacgccagtgagctctgatttttacgatctgctggtgaaaaatgctgtatgtcaattcctgctaatcttagtatcttagggtaccctgatctttggctgttcttattatggagcccattctcagtcaagtatagcccggatgtctttcggttaccatacgcccatcagtgttgtccttacaaagcgcgcacacaactgctaagagagtgtataaaaataatgttacttggttaatgtgttatttacttgagtaattgtttgtgctaagcattgtgtt

SEQ ID NO: 607840 - DNA, 856 bp, Homo sapiens
ctctctccccggctcacacgatccccaagaccgcctagccgtattgctactgaagtccgttgcgagagcctgtgcttaggtaaaagtccggcctcattgggaatattcaatccaaggtgggacaactatttttccggaccagaatggaaactcgttgcatcgagaaaatcggtcgaacgtaagtacacccgtgtaccgagaaagaactcatggactgctagcgaagagtagcagacactcgtgaatcagcaatacgaacaggtgtaagggatttctgtgggagcctacaataagacttaccagcagcacctgcgttatgtaggcatctgtcgtttgacagacttaccacagactagagaaagattgagaaccctgatacgaagactcgacctgcttacaagaaacatatgcgtatgaccgaacctatttacagagatgatcgacacatgaagtatccatgagatatatcaggaaatatcatattcatgcagaatgaaccccgggtgagccaaagcaggactccttggactaatgcaccgatagtagaagtcctgatgtgatgaactttcgattgaaagattgccatagagctgcttgtattgtgaaaagtgaggactcgaatctggatagaatcccctgaaagcagtagccaccatgttcaatcatctgtcagtgactgtttggcaaatggaaaccgtggagaaacaaaatgtgtatttaccaggaataatcacaatagaaggtcttgtgtcagtgaaataataagatgcagatttgttgaggcttatgattcagcagctggtccttggatttgaaaataaacccttgtttcttcaaacaaagagtaaacacgggg

SEQ ID NO: 607841 - DNA, 571 bp, Homo sapiens
ggtggggagggaagctggcagagctcggtgtcaggatccggcgcccctgtggaaagaccgcagagggaagccgtgtcaccgagcctctcgcccttctggggtctcgggaaacacgcggccagtaagaactacaaatcgcgccaggcaggcagccgcgacgtccaggctctctcattcgcccccatcgtgtagtgggcctgagcggcttgaccagaggctgctgcaactgcagcaagaggaggacagtacaggagatgagtcctggtgagggacccgaggagcaggacagaagaagacggaccactgaatcacctattctggccacctttgcatggtctaggaggtgtgtgaatagagcacgtcggtgtgcatggcagtcttcggggacctggttttgggaataagggtgtcactagttccaggcgtctgctgaaagatttggaacagaagatgatggtcactccgaaccagatcggctgtaatgcagagtcaccagtggccctggaggaggccaagacctctggtgccccggggagcccccaaacacccctgagcgtcatgactctggtgg

SEQ ID NO: 607842 - DNA, 901 bp, Homo sapiens
agcggaggggagagcacgcggaggagcgtgcgcgggggccccgggagacggcggcggtggcggcgcgggcagagcaaggactgcgggtgatcccactctgcacagcagctgcacttcgtgtgcccgcgcagtggtcgctggattgctgcccggtttggcactgctcctgcttgtgttgtctggacggttctgtggctgcttggagggtaccccactgatggtaatggcttggccttgcttgggcttgaaaccccagatttgccattgtttctgtggcacgagcttgaacattgcatcactgtaattgtccaacgaaatgggggacacgttggggacttcacgattccattcagtgtaacctatatgattctgacagttggataccaaggcatagggctttccttggccagtctctttgtgccaaaggaaacggttgttaccccttgaatcttggacaggattcagccacacagtggttgtgttacgcaaaaggcctaacttcaagccaatgtggaatccaattcccactgaacaccttgtgctggcacaggcggggtgccctgcacaagccgacggtggctcatgaactccccaattcctcgccacgttttgggtgtccatctcccgcattagacccggcttggtcttaagttttgggtttggagtgtttctgtgtaaaatgtttgactttggtctccttttcctcgggttttaccctgggatcaaaaggttttggcagtaatttttctttaacaaatagaagcgatgatgaaggtgatttgtgattgtgtttttgggtggtatacgtttcaaattctattactatcgtctggtggataatctgcgtctgtttcagactcacaatacttgatgacatttggcagtgatggagtgacatgac

SEQ ID NO: 607843 - DNA, 224 bp, Homo sapiens
tggaacatagtgaaaacctgtctccaccaaaaaatacaaaatttagccaggcgtggtagtgtgtgcctgtagttccagctacctgggaggctgaggtggaaggatagttatgagcctggacagggttgaggctgacactgagaccaaagatcatagccactgacactccacgcctacggtgacacgagtgacgacccctgctacagacaaaaaaaaaacaaaca

SEQ ID NO: 607844 - DNA, 390 bp, Homo sapiens
atatttttatctccctgtatcccctctatgtttaacacagagggcatacatacccacccgaggcaggagaatcgcttgaatgcgggaggcagaggttgcattgagctgagatcacgccactgcactccaacctgggtgacagagccagaatatgtgctctcaaagagaagaaaaaaaagggtataaaaggcagaatttactcttggactttgggaataagagtggatgaagtcaaagatctcttggccctctgggttaagccactgagtgaagggtaatacctttactgagttaaacagtattggaggaaaatttggggtgatggtgctaggtaagaaggtgaagatataatgaaataaattttagtcatgctcagtttgagatttctat

SEQ ID NO: 607845 - DNA, 382 bp, Homo sapiens
tgaatgaaagggagctggggctgggcagagtccgatgattgagggccctgtcttggctgagcccgggctcacatcgacatggctccggccctgtggacatccttcctgtaccagctctcctgtggccatcagcgctctctgcattccgttggcatgtgtgactcttttctccctgagcttgtgtcatagcactgggggacttgcttccccagatgccaggcacttccaagtacaccctcgccaggttcagagagatccctaaatcatcaaggtccaggtgtttgaagccttgaacgaacagaaagtagaaacatggtggggaaaagggctcaggcaagcacttcctgggtaaaaggcacagtaagaacttgggggtgacaga

SEQ ID NO: 607846 - DNA, 348 bp, Homo sapiens
tcgacttttaagactactcaagtgcaatagtgacaagggcgaaaagagtagaataggggaataagggccaggcacgatggctcacacctataatcccagcattttgggaggccaatgagggcagaccacctgaggtcaggagttagagaccagcctggccaacatggtgaaaccccatctctactgaaaatacaaaaattagccaggcatggtggcatgtgcctgtagtcccagctacttgggaggctaaggcaggagaattgcttgaaaccaggaggtgaaggttacagtgagccgagatcgcgccactgtactgcagcctgggtgacagagtgagactctgtctca

SEQ ID NO: 607847 - DNA, 164 bp, Homo sapiens
atggcaagaggttcagtgtgtggtcaggggtcacagcacccacgtctcaatgggaagagggtcagtgtgggtacaggggtagagcacccacctctcaatgggaagcgggtcagtgtggggtaaggggtagagaccccacctctcgatgggcagagggtcactgt

SEQ ID NO: 607848 - DNA, 131 bp, Homo sapiens
gcccacgcgtccggatcatggcttactgctgcctccacctgtcactcaagagatcttccaacctcagcctcccgagtagctcggactacaggcacatgccaccatgcttggcagaatgagacgctgtctca

SEQ ID NO: 607849 - DNA, 110 bp, Homo sapiens
cttccatagacatatgcctatagatgtggctgcagtgattgtccacatttgtgatggctgagtgggaagacataccctagtgacagcatctagtctctctgacttctcta

SEQ ID NO: 607850 - DNA, 122 bp, Homo sapiens
ggctgtctagaggatcccgtgatgtatcgcccaacaactggagaataaaggagatggaatctgcttatagtgtatccagggcgattatgaaggtggttatgagttatgctatgtcaccgtta

SEQ ID NO: 607851 - DNA, 255 bp, Homo sapiens
ttcgattggcgggcacttagtgaaaccaatccctactaaaaatacaaaaattagccaggcttggtggtgtgcactgtagtcccagctactcaggagcttgaggcaggaggatcacttgaacctgggaggcggagggttgcagtgagccaagatcgtgccactgaattccagcctgggtgacagagtgggactctgtttcaagaacaaaacaaaacaaaaatcaagtccctgttaagttgcccgccacaatcgaag

SEQ ID NO: 607852 - DNA, 748 bp, Homo sapiens
  misc_feature (83)..(83): n is a, c, g, or t
  misc_feature (88)..(88): n is a, c, g, or t
  misc_feature (110)..(110): n is a, c, g, or t
  misc_feature (137)..(137): n is a, c, g, or t
  misc_feature (140)..(140): n is a, c, g, or t
  misc_feature (156)..(156): n is a, c, g, or t
  misc_feature (158)..(159): n is a, c, g, or t
  misc_feature (167)..(167): n is a, c, g, or t
  misc_feature (170)..(170): n is a, c, g, or t
ggcagtaagatcgagcgaggagcccaagagcgagcgcgcagcagaagctcgagccgcctccgccgcgcgacccacctcggcgncgcgnctgcgccggagatccgcccggnctccccgagagcgagccccggcgccgngancaccagccgcgctaancnncgaccaancgncacgaggcgcctgagcgagagcagaggaggaggaggcatgagtgaggcgggcgaggccacgacaacagcaaacaaaacctcccgcaggctccgacggaggcggccgccgcgtgtccaccaggaccccggcgcccaacgaagccccgggtgggcaaggcgggtgcgcccccgagggcccgcggccccctgggggaccggccgtccaacggtcggaaggggaaaacccacgaggtgggcgaccagcgggcccccggatatgcgaggggggcaccgcacggaccggcacacgacgttcacgtgtgtagcccctggcctggcccggccgcgcagcgcgccacggagactgctggggagcacattacatatggttctcttcgggtgcaacaccaaactaagttcccttgtgaggacacagtggttaaagagtgggggtttcaacgcggttccagaaaagttggggaaatattggggacggttgtattatgaattccggaaagagtgagcaacccaaaaggaaacggatgtaattttgtagaagcatttcaggatgtttggccaagtagaatgaaagtgaattc

SEQ ID NO: 607853 - DNA, 328 bp, Homo sapiens
gtagtggtcctcggtaaatggactactaaaaagcaacccacgaagttttaaacgtaattgtccctaaagatgcctctgaccagtctggccgtccttgacttgctaactgtgtttcatacaagtattttgtcagtttgtgaatgtcccttcctttcgcttccttccactagacttcgggttgtcagaccccggacccccgttagaggtcattcggcccacggccacgacccacgtatttaccatttgccagcccgtgggaatcttgtaagctttcaataaagcgaaccgtgctagacctaaaggaccgcctctgtccgacagacttctg

SEQ ID NO: 607854 - DNA, 112 bp, Homo sapiens
aagagaacctcagacaaatgaccccatccatgggggtataagagcagtagcagcagcatctctgaacatttctctggatttgcaaccccgatcatcctcaggcctctctaca

SEQ ID NO: 607855 - DNA, 122 bp, Homo sapiens
gtaccgaaaatgcgtagcgcccggaaatacttcggtgcacggcagcagcgcgcacatgtcgggcgtggtggccaggttcgcaggcagttccgcctcgtatgcacctgcgtgcgcccgcggca

SEQ ID NO: 607856 - DNA, 242 bp, Homo sapiens
ggataagcatatggcggccagattggcatcagtattgcatatataacacgtgtcactgattttccttcaacttgtggatgcaggcaagtgtggatgatgccagagctctcctacagagatgtggtgcaatggctgaacaaaccccgattttgttgtcgttcctccttaggaattctaggaaacgaggaaaggcatcaactgtgaaatctgtgttagaattgattcctgaatcagctccaacg

SEQ ID NO: 607857 - DNA, 406 bp, Homo sapiens
gtggtgggcgagagacgacctctctgctcttttccacactaatcgctctggacagcttctcactactcaccctgtatactttcccagatacagaactcaggcaaagagagatgcagcccattaatcactctactgtacccaatcatattacggaaagtcagacccaggagacaggactcaacagccacgtttttagggcagattccgtttgctgcctccagcccatcattcccgccttaactgtagggctctgcattatagccgcataattcatgcctccctaattatggctgtcaacagccccattgtaacgctgtaaaatgtacagcacctgctctccaggaaccctgtgccatggatcggtagaggggagtgccaggtgtggctgggggctacgccaaagggt

SEQ ID NO: 607858 - DNA, 345 bp, Homo sapiens
ttcttatgtgaacgccacccgcgcacaatatatctataccacaccagataatctatctagtggtggcgcgcacgcaagttgctgcacgccccccgcacgccacgtgtggtcgtccccgagcagtgtgagtgctacccctgtgggcgccaccacgccgagctgcggcaactcaacacccgctctctctcaacactctcttattctcttcttcaccaccaccctcgctcaactaccaccacctgtcttcagaacacgctttaacaactaattctttctcgtgcccgcaacaacaatcaccaacaagctgctttctaaaccaccggctcaacaaataacaaacaaaat

SEQ ID NO: 607859 - DNA, 255 bp, Homo sapiens
tatttcggtcacgagtgataatattacaaatagtttaggcgttgggtaggtgcggtgccttgttaggttccaagccttattcccgggagcttgtagggtgagaggattttgtgaggtcccaggaagtcaaggcttgcagtgagccagtgagaccctctctcaaaaaaaataagaagaaagaaatagtaaatagtattgttactattcagtgagggaagggattgattagtattaatttcctcctgtgctacaggt

SEQ ID NO: 607860 - DNA, 288 bp, Homo sapiens
tcgaattcaagcttctaacgatgtacggggacatggctcactgcagcctcaacttccgggctcaagcaatcctcccacctcagcctctcaagtagctgggactacaggcacacatcaccaggcccagataattttttgtagagatggggtctccctacattgcccaggctggtctcaaactcgcgggctcaagcaatcctcctcccacctcagcctcccaaactgctgggattacaggagtgagccaccatggaaataaagcacccagcgctgccctgggcccctgca

SEQ ID NO: 607861 - DNA, 1346 bp, Homo sapiens
gctgaccatcagttaacttatcgatctcgctccacacttttccaataactacctgttgtccttctggtgctctgtctgagtgtgcccaggtactcgcgtcccggtgcgagttcctcagtggtcgagacagctgctatatagcgattgcgtctaggcgagtgcttcttgcgtttccgctgcgaatcatcctttgttcaccgcttcacaactctagccgtatcacgaggcgtctggctagtgagggtgttccagagagggagtcgcttggagcgaccctgcggaattaagacctcgtagcgatctgtgtccgtgcaaattgtggaagggcgatctcgagaatctgatggccagtaggatacaatgtcagagagtccgtgaaccgtactggttcgttggaatcgtccgtataactcttggaccacgcattgtacattgagcctcttggacgtctctgcagtgaatccggggagggtcttcggtgagcttaaactccgggtcgaagactatgtgtggggatcataggcataagaggtcctttccaaaggctccattccatgattcttggtgaagctcgggtaaactttcccttgaactctaatctggtaaggcatcgtgaaggagggtcttgcgagaaatcttttagcaaaacatacttgttgcgtacctatggggcacggtaattccgtttcatagcaaagcatttagagctacataggctcccgctctgtaaggttgcattgaatggaacatcttccgcatatccgctgctagcttgacgcaccgttgagtccatagtggccatggacgccctagggtctggttggaaggacacccggaacagctccacaattggggggtcgttccccgaccaaaaaggggtacatcttttggcacttggtaacgtacccagaattagttcataggagaccgtgaatcttggtcgcagtcttggggcaggaactaggaagacttccggcagggtgcgtcttccaacggggcagcggatggccgtggcttcctttcccaattgcaacagaacagaaaaacccaccgaaaacattgaggggacacgcttcagcaggagtgctctcaccaacaggcgccccgctgactttggcgcaaggtctttcttgaggggttctgaccctggtgcgaagtgttaagattggccccccggcaacttgttccagggaccttcggtcgagaggatcctttggcctagaccattccgtggggcaattatgcatcggaggtcgcttctggaatgaaagccgaggaaggaggttagaccatggtatctgggtctcatcaagcattgaaggagtagtagccacaatggttcaccc

SEQ ID NO: 607862 - DNA, 590 bp, Homo sapiens
  misc_feature (578)..(578): n is a, c, g, or t
ggagctcggtaccagggttgcttggttgttggaaagaactctatattgcatcagaggacgtgggtttcgtatacacattaacatggacagatgtgaaaaactttatgttgaacagaaaaagtcagacacaaagagtgtgcatactatagtgattcaagatataggtaaatttaatatgtgtgggatagaaatcagaacattggttgcctataaaatggtggagattgactggaaggggaactggatggagggaactttggagggttataaaaatattctatttctttttcctttttatgagatggagtttcgctcttgttgcccaggctggaatgcagtggcgcgatctcggctcactgcaacctccggctcccgggttcaagcgatactcccgtctcagcttccccagtagcggggattacaggcgtgcgccaccatgctcggctaatttttgtattttcagtagagatggggtttcaccacgttagccaggctggtctcgaactcctgacctcgtgatcagcccaactcggcctcccgaattgctaggattataggcgtgagccaccacacccaancaagcaacccct

SEQ ID NO: 607863 - DNA, 1327 bp, Homo sapiens
  misc_feature (551)..(551): n is a, c, g, or t
taatttacaaaaggtaggctccgtttattagagtcacacacaacgtgactattcttcaggggtgacctcaagaccacaaaaaacccattttcctcctttcactttcgtgagtctccgtggggtttaatacctagaaccagcaaggtgtacgtgctgggggctccattcacaggttttacaagttttttcattgtgagtgtgcaacttgtggtgacgtggtgtgtgaggttgtggccaggtataggtctcaccatctcaaaaggctcatgtgagtgttgtgcgtgttgtgagcatgtgggtctctcaagaggctcatctcgtggagaactatatatttctcgggatactgtgtggtataaccacgggcgctcatctcagagagaaggcgggcgccaccagatatgtgtgctcaggctgtgacaccacctttctccagaagaaagaggtacatctctctctcgtggcatatatgtgtgacacaacacgcgtgtgtacctctcaggggagacatctctctgtgcagatgtcgcagaaagtctgtgaatgtcgcncccctctctctataactgtgtggcgtagacaaaggtctcacctgtgtgagaaaaggttcccaatctcagccttccgtgtgtggggggcccatatagagaccacgaggttcttctacagtgagatctccaggggctcacacctctcgcgagatatggcgtttatcaaggtgtgcttcgcatagaataacagcgcgtatatttttctcacacgtggtgctcagaaaggggccgtttgaaaccatttcaaactctcccgccaaggggtctctctttccccaagggggagatctctcccccatatataaaacagtgtgctgtaggaacgtaatagagacaatttgtggaagtcgcctctcaaattgacgcaggacacgggattcggtggggacaacacctttgtgttggttccccccaggtgttgaaaggtgtgggaacttggggggggatttggggcgggggacccatcccctcggaggctgtggataaagattaccattccagttgggcactctcacaaccacacaaggaagcattgcactccaggagtaggaaaatggctccagtgtgtccccccgtgatgagcaggataatccccaggccccccaaggatagtgagccccaaccttggggaacaaaaaactttctgcttattggcaagtctccaatccattatttcttgaaggagaaaatttcttgttgttaaaaaggagccacatatccatcattcgtggaccccatgtgttcggtcacacttgaaagccgacttggtgtgcacc

SEQ ID NO: 607864 - DNA, 340 bp, Homo sapiens
attcgcggccgcgtcaacagcctctcaaagtgctggaattacaaacatgcaccaccacgcccagcctatgtgggtttttaaaatccattcaagggcgggtgcagtggctcacacctgtaatcccagcattttgggaagccaaggtgggaggatcacttgagcccacgagttcgagaccagcctgggcaacatagtgagaccacatctctacataaaatctaaaaatgagccatgcatggtggtgcacacctgtagtctctgctattcatgacgctgaggcgggatcattgcttgagcccacgagacagattgctgtgagctatgatggcaccactgcatg

SEQ ID NO: 607865 - DNA, 175 bp, Homo sapiens
  misc_feature (15)..(15): n is a, c, g, or t
agcagtggagccttngcccaacagggctgctgctatcatgcgaagaggagatgtgtggcgaagagccaaatttgtgtgagtggtttgtggctgtgtgtgtgaactgtgagtgtgaagtgacacagataacataagttatcattggtaattttatatatatattaacaataaagta

SEQ ID NO: 607866 - DNA, 752 bp, Homo sapiens
catgccaagcaggaggaggaggagccgggactggtctagggttgacccggggcgacggcgccattgcacgtgtcccggacgctggaagtcgtatctaaagctcgagtcacgcgtcagatggcacgtgcaagaagctgtagaacgctaaaggagctacagaacgaggtagagaagcagatgaatatgagtccaccttccaggcgaatgctggcccggtgatcatgtccattggaggagaagactgtgaggcctgattgcccgttccatcgtatgttggcaattgtggactactggtgcagacagcagaatgagctggaatgctcactttcactggctgtgtgttcagtcaaccgttgttacccgtactgtgtgacaaactttagtggccatcccaaagggtatgcgtagtatagagttctcagacaaagaagtcagtgaggacttccttggccttagattgaatccccttatttaccaggaagcgcaatttcaacggtgatcccaataacgaaccaacagaccaggcatcagcacaacagaccggggttttccacgagcccgctacctggcccggagcaccaactacaacagctcccgctctcgattctacagtggtttcaacagcaggccccgggggtcgcgtctacaggggcccgggctagagcgacatcatggtattccccttactaaataaaagtgtgtataggaggagacagaggaacaaacgaggaacgcaggcaacacgacgaatt

SEQ ID NO: 607867 - DNA, 197 bp, Homo sapiens
ggggttttccttttttttaaaatgggggctttccagattaaaaaaaagattgtcccccctaatttgggcccccacttcaaaaggttcccggtttccatggggacttttcccaaaaaactgggcccggggcatttttcctttgggggattaacctttaaattttggggacttttaaaaacccggttggggttttttta

SEQ ID NO: 607868 - DNA, 444 bp, Homo sapiens
ctgtaagcagtccgtggagactccgtgaggcctgatcagggctttaggtggtttttactcactgcagtgtcaacacttctttccccttagccactgcggggtgggcatccggttttgttgcctttagaaaatgctgctctcttcaacatggagaatgactttcttcagtggcctttctagcatcatgtgcaggcttcttccccttttccttaatccttcatcatgatgaaacatgcatataatcactgggtctggctcaacatgatgctgtccgttctgtccatcttctacgggtatcgtaattccattctttttctgacaagatgaaatctccttgtgtatcctttccgcatccttatccatgcatgtgttgatggacgtgtgggctgctcccataatgtacctgttctgagtagtgtttcaataaacatcagtttgcagaca

SEQ ID NO: 607869 - DNA, 445 bp, Homo sapiens
  misc_feature (328)..(328): n is a, c, g, or t
  misc_feature (370)..(370): n is a, c, g, or t
  misc_feature (418)..(418): n is a, c, g, or t
  misc_feature (423)..(423): n is a, c, g, or t
aaaatgctaagaaaaagacaagaatgagctgagagaaggcatgtagccttggtcacctcaactaggaatctgtgtgttgggtgactcaaattttttgccactttgtacacactcatgtcagcgaaataaccatgaaagtgccacgagtgtccattttggggttacaaataaattttagcaagtaggactggactcggtggctcacacctgtaatcccagcactctgggaggccaaggcaggaggatcacttgagcgtggggagttgggagaccagcctgggcagtatgggctttaaccccatctctgttttattttaggaaatacatnttattatgtttaaaaataattttaggcaggtcgggcaagttntgccaaatataggaacccggggggttaattgagggttccagctgttanttttntcccggggtagttaaagggccg

SEQ ID NO: 607870 - DNA, 256 bp, Homo sapiens
aacctggagaggctagaacaccaggaattgaattgaatttgtaggtcaaatgaacctctttcaatgacaagagtaatactcatgaatttgtacaaccctagtgaacgaactagccttacctggcagaactgactcagagcagaagttatgatttggaatttactgcaacgtttgacacagccattatgacatcttacatcgggtgccaaatgtccgcttgaggtatttctcttaaacgtgacactagtgacgaagg

SEQ ID NO: 607871 - DNA, 154 bp, Homo sapiens
  misc_feature (13)..(13): n is a, c, g, or t
ccgtcgcccggancgtggctgactgcgccgcgccgacgccgtgatggctgggctgaagagcccgcgccgctcgacgccctcccggtcgcgggcctgcggatcggcgtgccccggggcctgctgttcaccgagaccgagccgattgtggccgagg

SEQ ID NO: 607872 - DNA, 90 bp, Homo sapiens
tctctagtggaatttttggggaagagcatggcccaggcaagataaatgatgtaagtggagaaacctgtcagcagtgaaggttttaaagga

SEQ ID NO: 607873 - DNA, 297 bp, Homo sapiens
ggaatgtgtttctgtatttgtagacaaccatgtacccatgcaagtaggtgaacattccacagtggctgggtgaccacagcagctgcatgcagacaggactgcccgtgctttgtggggaatcagagaatttccaaacttgtttgtcagacttcggcagatctcatcactgtgatttgtaatccatgctggatgggtgattttgtttatcggtcctgtaccctgttcagcatgcctgagtattttcggctttatgttaataattagggccatccctgtccattgattggattggggaac

SEQ ID NO: 607874 - DNA, 251 bp, Homo sapiens
  misc_feature (1)..(1): n is a, c, g, or t
nagatgccccatacaccttacgcgggctcttgctttgtgggcgagactgaccatgcactgggcggtgtaggctcactgcagcctgcgcctggagggttcggggaattttcctgcctaagcctcccaggtccgctgggataaccagagtgcacaaccacacccccagcattacggcgttgtacatggacacaggatagcaccttgcttttctggctgtggccgaggtggacggggctgaaggaaccctgcca

SEQ ID NO: 607875 - DNA, 102 bp, Homo sapiens
ctgcctgccggcccctcgctctaccccaggcacctgtgcgctcgttttcctgctcggcctgtgctccccctagggctctgatcctgccattgggccagcggg

SEQ ID NO: 607876 - DNA, 906 bp, Homo sapiens
gcctcagtagacactaagtccacaaagagctcaagtgagcctctttgtagatattactcctttgtcatgcactcttgcaggctgtgagtataccacgtcttatagggatgccagaggtatgatttgaatcctgaagatgttgctggcgtatttattctggggctgtagtcgtcgtaatgtgtatttaaacgggctactaggggtgattgaggcatgcgtagtttactagccgtttgaagctgagatacatctggggatagagattcaaggaaaaggtgctgtgggtactaagattttcaatgaggtcttctggaattgtttagcgtggaaatattggtggaatttgcactagatggtggtagccatttatgtggacactggatggcagggtaggaaggaagggggaaggttggataggaagattaaccggatacctgtattctaggaaggaagtgcagtctcaattttctagatggattgaagaattcggggccccaatactcgaaatgcagttttgggcccagtaggttgggaagacattttggggacagtattcttacaaggtcatatatggggcgggtgatacaacgcagtgtaaaatctggagacactatctgggaggtaccagagggagatggtaggccacagagatcggagaagatcgaggaccattcctggagtacctgtggtgaaagggctggctctacttaaaaatgcacataattacagcagagggttgtgggagcgctgtggaccatggaacttagggggtggcacgcgggagcattggtacaccctggaccccacgttcactcgctcaatggaactggtcaactggagaaggcagacacctccagaaaaacgaaaacaaaataggttgcgcccaaaagcagacctcttggccaa

SEQ ID NO: 607877 - DNA, 215 bp, Homo sapiens
cagtgtacacttgctgcgctccctggcttctgtgtgggcccctcaccttacttaccctaggtggtgtcccggtctctgtgggtgatggggaggggcatttgcgtgactgtgtatattggataattgatcataagcagttctaggatggtgtgccttcccggatcctctctggtggtctgtgataccgcatgcagcaaggtttgcctgcctggttt

SEQ ID NO: 607878 - DNA, 138 bp, Homo sapiens
tttattcgagaggagggagcatcagtgccctccaggatatgacttttccctagcctacttttggcattgacttcttcccaagattcaagtcccagtaaaacaacgtttcagcctttagtgtcagtacaggtgctcatt

SEQ ID NO: 607879 - DNA, 1278 bp, Homo sapiens
  misc_feature (421)..(421): n is a, c, g, or t
gttcagcattcgtggtccactacggcgtttgtgctgcattcccgctcgttctttaacatgtaagctttcataatgtacgtgagcccttgatgtcactgacactactgaaggaagatgatgtccttaatattccttgctggcacgtgacctctacttaagatggcaccaagtctttgacgttccagaatgtggataacagctatattcctagtaaggcaggatagatggtgactggcgatcgtatatctactaacatctcatcaacggacctggagacgaaatgcgtacttgcttgggctagcactgttgcacacattgttgccagtttggcaaatgcgcacgtatgcgtgtatgtcgaggagttaattatcgcttctcgagagaatagtacttggcgcatcagggtctggtgcttgaatgnttggcatgctttgcccacgttgggagcccacgtcaccaatagtctggcacgcgttcacctcctggaacgcttcacgtaatcgcatgatcgcaccgcgcatgcctttcctgtggaacgccagctggcttgctgtggttcgtgttgactagatccccgagagggtctagaacaccgaagcctgctcaacagtgaagagcagtcttatttgttaatcgctaaccctacgcatttgcagctgagtgtaacgacagatttctaccttctagcgcttagtagtaggacattgcctagtccccatgtcgtagcaacagaagggatgctcgacgtccaggtggcgtattacatagttggtcgggctgctgggcgttcggggaaaggttctgcgacatgctttggtaacccattttcccgttggaacactccatgggggagggtccatgcccttagaattcctgctaactttcctatcgggaaagatgtcgcttgaaccgaccgactttgtgcccagacacggacacactatgtccaggggcttcgccttggcttggaggtcacatcgcgccagcgtggaccccagacgggagggcgccatattttcaaggcgggttgcacacatttgtgagcgtggtcgttcgcccggacattcccttgaagtttacacgtttccttaactcaagtgcgtagaagacggtttgccagaccttgggttccttgagaggcgctgtttaccgagggtggcccttcttggtgcgctaatttttcagcacaatttcccctaactcgcacagaacttgggagcggctccaggaccttggtcgaccaggaacacacttggggctatggagctccccccaatg

SEQ ID NO: 607880 - DNA, 440 bp, Homo sapiens
acatgccagtcggacccaacaggcatctatacaacactacaaaccaatcagagccaacaggcatctatacaacactacaaaccaacctctgacccaacaggcatctatacaacactacaaaccaatcagacccaacaggcatctatacaacactacaaaccaacctctgacccaacaggtgtctatacaacactacaaaccaatcagacccaacaggcatctatacaacactccacccaacaagagcaggatagatattcttcaacactctgagacagaaaatacggcatgccaataaaataactctcaatacatataaaagacgagaaatcatacaatctatgttttttagccataatggagtgaaataagatatcagtaacaggccaggtatggtagctcatgcttgtaatcccagcactgtgggaggcaaaagtggc

SEQ ID NO: 607881 - DNA, 715 bp, Homo sapiens
gctctaattaaaaaaaaaaaaaaaaaaaattcaagttcagctgatttgttggtaacccgcactaaaaaggtatccatagtatgtttattttttactactgaagtcctaaatttttttgaaaaatgtaaataatcgggggtaaacatttttggaacgatttattcttttgggtgtggctgggggtgtatacattttactgtcttggctgaaactacacggggtggtgtccttcttacaaaacttttgaaattaaaaaaaaaaactcaaattcttcacgtgtcgtggtgaaatcccctttcagtctttctcagatgggctttgacgtggtcctctgtgatttttcatatttacttgtcaaatttactttgggctatcataaataagctccaaagttcccccatttaattttttttaaatttgggtgtatgaggggttccagaatcgtggctttggtcaccactttgggggctttttaatctttccaatcgggcgtattggctgttggcacctttggccaggtcacttaatggcgcctttggtcaatacgggtatgcgactcctgtgtccagaccttgatggtcgggggtttcaacagagcattggtgtcctggttttcacaatcctgtatgattccagagaagggcccatttttgcactgtcttacccatggcatttcccttgtcaccgaattcgggtccttatgggtccccctatc

SEQ ID NO: 607882 - DNA, 896 bp, Homo sapiens
agcggggggcgttcttcgccgccgccagggtagcggtgtagctgcgcagcgtcgcggcgcgctaccgcacccaggttcggcccgctaggcgtctggcagcccggcgccatcttcatcgcagcgccatggccgcagccctgcgcggccgggcagcggcccgggtactgcttgctcctcggccttgccatttgtcccatgctgaccgcgggcccctgccctgggcctggaacgaccctgacagaatgttgctgcgcggatgtaaaagctcttaccctccactatgaccgctatacccactcccgcaggctggatcccatcccacagcttgaaactgtgctcggcagcgcaccagatgcgctctgtgcattcttataccccaaaagctccatcaccagctgtcagcaacaacaaggcccgcgcatgcggtatgcatgctacaagccgggcaatgctaagcacggcaccttaaccactactcgccatacaacacttcggcgaacacacctgtggtgacgcctgtgaaacggctactgagctccctctgacagaccagtactgtactaacgaaggtctcttgctggcctctggagtactaatttacgacttaataccagaacctttgggccctgcacgacaacctgacacgggaggtcctgggaaaaggcagccaccggcctttggccctcttttccctctgacttcatcacttactacacgctggagatccatccgcgccgggcaattccctacgctacccaatgcacgttggcgacctctgacttaacccactcgctgagcaccctccctatgggacaactccgccctcactgcacgcccctactacaacgccacgcccccctgaactggaccacggccacccacattcctcacccccc

SEQ ID NO: 607883 - DNA, 199 bp, Homo sapiens
  misc_feature (83)..(83): n is a, c, g, or t
  misc_feature (196)..(196): n is a, c, g, or t
gggggggggggtaccctcggacagggcgggcggacggagaagaaccacggctacgccggccctaaccttcttcttcttttttntcttgtccctcgtctagttcttcaataccgcttttgcttgaaagtgttccccctttgactctataaccctttcgatttcttttgactagccagtcttctacttgtttaacggngaa

SEQ ID NO: 607884 - DNA, 468 bp, Homo sapiens
gaggatcccctctaacacattaccttactattgatgcttgacgacaggaatcttgctctgtcacccaggctggagatacagtgagcaccatcatgtgcctcacgtagcatccttgacctcctgggattcgatgatcttcctcctcagcctccctgagtgctgggattacaggtgttgaagaactttatttttgtgttctattctgggcatcaatattttaagaaatacgatgctaaccagctagggtgtactcagaggaaggcaccaagtggatctcgagactgaaaactgctcctgcgaggatgaatcagaataactgggcaaagacataagtaaaagtatagctcttgcttctgggagaagaaagcctgagagattatttgatctgaaatcctgactttcaagttgaggaagcaggctcagagagatgtgtcttgggtcacatgaagagagaggagcagactacag

SEQ ID NO: 607885 - DNA, 179 bp, Homo sapiens
gcaacatagtgagccgcctatctaacaaacaaatttttcctacttagacgagtgtgatggtgtgcagctccttgggaggctgaggtgggaggatcaatttagctagggagatcaaggctgcagtgagccataatcatgccactgcactccagcctgggtgacaaagagagaccctgtct

SEQ ID NO: 607886 - DNA, 911 bp, Homo sapiens
tttgggaggctgaggcgggcggatcacgaggtcaggagttcgagaccagcctgaccaacacggtgaaaccccgtctctactaaaaatacaaaaattatccgggcatggtggcacatgcctgtaatctcagctactcaggaggctgaggcaagagaatcgcttgaacctgggaggtagaagttgcagtgagccaaaatcacgccactgcactccagcctgggcaacagagtgagactccgtctcaaaaaaaaaaaaaaaaaaacgcggatgtctaggccaaggaacaataattctggaggcaggggggaatgagtcctttgggtaaaccccacggtctgggggaaagtgagtcccagcggggaaaattggagctttctggccgtgaaacatgtgggagccctttcccgggcattttaaccggggtccctatggaacagaatttgggaaccatttgagaacaacaccgacaaacagctcacccgttgacacaacttgtgacacccagcgccgcgctgcgaacgggggccaccacaccataacatcgaacgcggggacacaaaaggcgcacacaagccgcatagagtgagagaagatcacactccccacaacgagctcaaaaagagagagccgcctcgaccaagaaccgcagtacaccactccgcctacaacccaccaccctaacaccgggccgcgcaccacgccaccacgctaacaatcgcgtcccccaaaacagcgaacaagggcaccacagagacagacgacgccacgagtggctccccccacaacgaccgccccaaccaccacacaaacccgtgacaaacacccacagcgaccaccaccccacaacccagcaacaccatcggggcacaaccccaagcgccccaacttagcgggccaccccaacaacaccg

SEQ ID NO: 607887 - DNA, 337 bp, Homo sapiens
actgatatctctcaaattacaaagactcatcatttccagaagaccctacctcttatattagagtttcagtacctcacccagtgttatgaactaacttggcatgacctctacattatcctctctgccaccctctccccagtaagacgaggaccgtatctagaccccagctcaggtgcatgccaatacaattcatcaccaggctcctgcccagcctactggtgcacaggcagttcccaaccaggaccccactagaaggtccaggtatgccggcatacctggaccttctacccgtcacaaccaccactgcaggcttctgatgctctgttttcctcctctg

SEQ ID NO: 607888 - DNA, 154 bp, Homo sapiens
ccgaggtccccactgctctcaatcgcgctagcgctctgataatttacctgagtaggcctagaaataaacatgctagctatatattccagtactaaccaaaaaaataacccctcgtacaccacagaagctgacatcaagtctttcctcacgcacg

SEQ ID NO: 607889 - DNA, 110 bp, Homo sapiens
tctgcactcatacatcctctctcacggacgttcaaactctactcccactaatagctttttagatgactatctagcaaaccatcgctaaaccggggtatcctctacgagtc

SEQ ID NO: 607890 - DNA, 214 bp, Homo sapiens
ccaggccgaacagatggccgtcgaaggacgcgtcggtgacgttgccgacctgttgctggtcgtggcggatgtcggtgtaggcgctgcgctggatcaggccgctggccggttgccaggtgtagttctcggcgtcgcggtagtcgcggtcgctgccgatgtaatagacgcggctgcgcaccagcgtggccgggttcggcgaccattccgccttcag

SEQ ID NO: 607891 - DNA, 271 bp, Homo sapiens
agatcgtactggagatggggttcaccgggatgccgactgataagttcattgcgagcaccgtctggaagaatgacgccctctgcaaaccccaacatcacccaacccgtgaccagcacgacaccttattcaatcgagaaccaacggaggccctgcagctcccaatggccactgtccagcgggtcaagcggacccactctcagggcggggacgggtcacaggggtacaagtataagtggaagttagacgaggaccggaaaaacgtatgcggccg

SEQ ID NO: 607892 - DNA, 193 bp, Homo sapiens
ggcacgagtacgtggccatccaggagtgctatccctgtatgcttctggccgtaccacaggcattgttctggactctggggatgtgtgtaactcacaatgtgcccatctatgagggctacgtttgccccatgccatcatgcgtctggatctggctggtagggacatcactgactacatcatgaagatcctcact

SEQ ID NO: 607893 - DNA, 292 bp, Homo sapiens
ccgtgtcatgcacacccacagtacgtacacactgcacacaccacatcatgtgcacatgcaccccccacatgcagaagcacacacacggcacacacactatgtacacatgcacacacaccacacaccatgcacgtgcacacaacacacccctcagaacaccacactgcacacacgaccaagacaccacacgcactgcacacaccccacacacactgcacacacaccatgtggcacacgtacacacacaccacacactgcatcacaccatgtccacacgtacacacacaccagg

SEQ ID NO: 607894 - DNA, 459 bp, Homo sapiens
agcacaaggatcaggagagacctagccacctagttgtggccatgtgggggtgaggggcttctaggaaaaccggtgtctggtactctggtctgtgttgattggtgtcatctgtgcggtgcatgctgggcctccatctcccaacctcctccgggacagatacaggcttcgcggggacaaggtcgtgagctgggcatgctggatgagaccgggatccctgtggttttgtgggcaggtgctggttgcatgccggacagacagaaagcagtcccagctcaaggcagaaggccagagggtgtggagtgaaagggacaggcgaagccaggttcggagagatggagggaacaggccaccaagctcagaagcgagaaaggtctgaggaagcacaagacacacacacacacacacacacacacacacacacacacagagagagagagagagagagagagagagaggagg

SEQ ID NO: 607895 - DNA, 818 bp, Homo sapiens
  misc_feature (99)..(99): n is a, c, g, or t
agagagatggggtttcaccatgttggtcaggctggtttgaactcctgaccttgtgatctgctggtcttggcctcccaaagtgctggtgtgtctggaatnggttacttctggtgcgttcttcgtctcactgacttcaagaatgaagccacggaccctcgcgatgcctgggcagatttctgaagtggagcaagagaaatcttctcttcttcacctgcttcagggaggcatcaaagtgccaaaaaggattctcagacggctgatggaaaacgccccggaccctccgtagtgccgcggggaagtccccggaaagggtgtgaaaaagtatcgaatttgggtgatgcctcctcctcgtccagcgcctgacagggcccagctcctggcccaggtgcccaggaggcaccgatccccgcagcggctcctcccgcgcgggctccaatcccatttcggcctcgcccccagagcccatagtctttcatccgtgagtcctgcaggcaggacgggtcggaggtctgcaaacaggaacctctctgggaagccgcgacagcggctgagctcggggtacgggggcgcaggtcgggctagaagcaaaccccttctctccgcgtccgggcatcgtcccagcggcccctcctctgtgcccaggatgctcgggcggcggctgcagtgggacctccaccttctcctgcaagcagaagcggaggaacctgtccgacctcccatccaagcggcgcactgagcggctcttttggctctaaacgaatttccataccgctgcctgaggcaaggctaccgtgggggccaaaccccaactgggagaa

SEQ ID NO: 607896 - DNA, 1238 bp, Homo sapiens
tggggggtactgtggtagatgattaactgactgttttaatattttgtaaataaactcggattccttgtgatccattgtgctagttgttaacccgggtactggaatgtaaagtgaagttcggagctctgaggcacgggctcttcccgccgggatcctccctcctccaggacgcccagaaggggagacggcacgcaaacagcggaccacgactgcagtagtcccgtgcccgggcgacacggagcaagtaccatggagcaggtggagccaaggggaagcactatggcagaaccatcactgcgtgggctgcataatcgtaactgtgagaatcagtgcaacacggtattgacgttgactgcgtgaacactggcaacgtacgtggtagtcacatactcgtgatctcacatggctgtacgacatgctgcctgcatggcaagactctcgcccaagggaccgctcgtcaaaagtcacatccaacatacaagtggcagcttgttgaacgtggacgacgcacgagcagcgagaaggacccccaagggcgtaccgggcgcaactacgcaggcacaggacggaggaccgaggtgcactggcagcgcgacgacaacgcatggacaccacctgggatacagccgggacaccgatggtagccaaccgtggtgtacaaccgagacccttgggctacacacgcgggggcaacgcaccgggctcatcgcccagagcaagggtgaacacgcaaagcgctatcaggccacacccaaatggaccgtcgcccagtgcgaccaaccacaagttacaagacctgcccgggattacaaacggacgcgtaaagctcacaacccgaccaacagacagcccgaccaacggccatcagaggagaaccacacaaacgaattggaccgcacgggagcaatgcgcgcaccaaggaataccaacagtctgtcgagcgctagatccaaaggacacgcagaagaacgttaatgtagggatacccccgataccacagtatggacgccgtggatgggcttagtggctagtacagggaatcgcacaccacaggtaaacttcactccgccaacaagactcctctttaaactcggcggcgcgccaagcaaggcgtttgtcgttgtcttccccgcttcatattcagcttggcactttgcggcatatgatctggtcatcgtacatagcatcggaagtcgcacatattcgggaggatcccctggcaatattctcaccctacc

SEQ ID NO: 607897 - DNA, 858 bp, Homo sapiens
gtgcaccaaaatctcagaaatcaccactgaagaacttttccatgcaaccaaacactacttgttccccaaacactactgaaataaaagtttaaaaaaaatacgtaagaacagacatagggaaaaagaaaaaaaaattcaatgttgaaaaaggtctggagtagtgaatactacagaaactccatagctaactttgactatgaaaaaaaaaaaagggctttcttacccagggtgacctcattttcaaagaattctggctgagtatattcctagggtgggttctctcaggcccagggttctgggatcccttccatgcctccataggagatatacacagccgaattcaccagggtgtcacttagctcctgaggaaacaacacccctttctcaaaacacattggcctcagaaacaaaagtgcctctctaattgcctgagttcagggcaaggtgacacaacagaagaaattgaaacaggtgattatttgggcttttaaattgcaatcaagcgggcagggaggagacagaaaaggaaacaagctggactttatgcactggagccaaaaggcttctcaagatttggcccagagttacacaggcaaggtccaggggtatgggctggggaatttcaactcaagggctgtgggactctgaagctttggggtttgggttttttttcctccattacacagtactgcatgccatgtgagcaagatcccgacacagaattgaagtacccagtatctttaaggcaaacaagcagatcagtagaatctgatgattccaggcccaaagacaagaataatttaatggcaatccctcattaccacagcattggccactggcctcatatgggtaaggaca

SEQ ID NO: 607898 - DNA, 603 bp, Homo sapiens
  misc_feature (476)..(476): n is a, c, g, or t
gtgcgtccaatacgtggatctgcctggtgatttttcgaggaatgaatcatggtcatgttcaatacgaggcttccagtagccgaaattttcggcacgatgggttcaaggacctggcagataaagtcgacaaattcactcgccgtggggttgccatacgctcgagaaattctcagggggaatgggggggacgtcaggacgagttcaatcggctcatagagcccggccaatgcgtctggagacgttcccgacaaggccagtccgaggttggtgctgaacccaagcagggtgacgccgggcgagggcgtgttcaggccctttttagccttttcggtaagctgccatacccctctggcaccttcgacccgctcaagcactccaagtgctttgagcgactgctgttgccagcggatcgaccgccgagttgtggagtgcaaatcgccggcggcgccgatcgggctccgagcgttcatcacatngtcaggaatctcggtaaccggccagcaaacacacctttctgaccccaccgccaaaggcgatggtgtccacctatttaagtggacaccacttctagccttttaagagggtctttcatgcagccacaag

SEQ ID NO: 607899 - DNA, 200 bp, Homo sapiens
cgtggtatagctgctggaatgtcggcaggtcaacgagcacagatggaggggcgcagtcaggccccgtgcccaatgtccctgcagaatgcagaggcgggatgctggagcgcctggtcagcgagctgagtccaatgaactacatcgggctggatgactttgtggagatcactaagaagtaggccaagggggtaccgagctcg

SEQ ID NO: 607900 - DNA, 171 bp, Homo sapiens
ccgtggtggacaggggctgggcgctgggggcagacgtggcatccccactcctgtccagttcacgctgttttgtaaccactttctaagcatttttatattcacaacttggaaaccaacaaatgttaattggcgcctcaacaagggcacaacaaagtttcacacaccaaccaa

SEQ ID NO: 607901 - DNA, 257 bp, Homo sapiens
agagagttgaaggtgagacatggcatagatcctactatagtccgctcgccgtacatgagcgcgtgttgagcgagaggcgcgctcgggccgaacagctctagctctctcggatccgctgaggctactggcatgacagagcttagaagacatgaggcaagagagagcccagatgccatgagagtatcgactgcactcaagagatactctatgaggaagaggcgttctcacacatcaccggtgacgcgcatgaagacccg

SEQ ID NO: 607902 - DNA, 533 bp, Homo sapiens
attttctccgcgttccgcaatttttggccccgccctctcgcttacccggtctccaatagcgctccatcccctttcttaagctccatggcgtatgcccgccctgtggatctcaggcccattggccctcccttctgtggccccatctgttctcccccagatttcctcccccgctcagagggagggttgtcaccaagcgcaccacccctgttgcccagataagagaagcctttataggaactgatcccacgaaggagctctcaccctatggcgtctgaaactcgccaggatgctgaaattgcaaagcttgatggaagaccttggacccggcaccaggaccgccggaggtgaacattcccacggagtatgtccacccttccctgggcggcccttggcctttgatcttcaaccaaggaccctcaagggctgtaaattaattgggaaaatggagaaccaccctttgggggtcctttttgagtcacaaacccatggggggtaattgtcaccaaaaaattttttttgggtcagaaatttta

SEQ ID NO: 607903 - DNA, 101 bp, Homo sapiens
cactctttcttcagcttcatccgtcatcccctcttcgtcaatatcttctaatccgttcctcctcttcagtcatcgatcatcatcttcttctccttctcctt

SEQ ID NO: 607904 - DNA, 318 bp, Homo sapiens
gtcccaatggatgacatacagattcgcgtagtcgcagtacccagagattttccatctcgttgttctctggatccttagatcctgatggcctgcggctctgtgttttctgagggatcaccacttattgagcaagaggatagcagtccatcccatgacagaagcagaccggtttcagcctccagtactggggatttgccaaaagcaaaaacccgggcagctgacttgttggtgaatcccctggatccgcggaatgcagataaaattagagtaaaaattgctgacctgggaaatgcttgttgggtgcataaacacttcacg

SEQ ID NO: 607905 - DNA, 228 bp, Homo sapiens
ctgcggaatagctgggtgatcttgacccagtcgatgggcaggtggcgcagatttcaggctggaatagccgcagccgaagtcgtccagcgccacgccgatcccttggcacgcagcgtgttcaggatcttcacgtgccgctcgtagtgcaggatgaagatcgactcggtgatctccagcaccagcttgcgcggcgccagcttggtcgaggccagcacgtcggaaaccagt

SEQ ID NO: 607906 - DNA, 141 bp, Homo sapiens
gccggccgccaaagtggctttccatatccgggtgcgctccaccccttccacgtcatccgcatcacacatgttgtcctgtgcagggctgacagtcaacagcatgcagtgcttgaagccagcactgtgtcagtatgcagtata

SEQ ID NO: 607907 - DNA, 227 bp, Homo sapiens
catcgagccggtaccacagattttgccttattctgtaggttgtctgttcactctgtgattgtttcctttgctgtgcagaagcagctttttcatttgatgccatgtttgtttatttttgcttttgttgcctgagctttgtgggtcatatttttaaaaaaattaagatatagtttacattcagtaagtttcacaccatttatgtatattattttgggaactttgacaga

SEQ ID NO: 607908 - DNA, 100 bp, Homo sapiens
  misc_feature (79)..(79): n is a, c, g, or t
  misc_feature (85)..(85): n is a, c, g, or t
gcaaacccactccaccttactatcagacacccttagacaaaccatatagccagatagtgtataggcgataagagattgnaacctnacacattagatatag

SEQ ID NO: 607909 - DNA, 104 bp, Homo sapiens
tctatgatggtcaggaaatccaaaaaagaagtagaccatatcaaacaacttctttggattcccgcctccttatgctgctctttaggtgaaactataaatatgtg

SEQ ID NO: 607910 - DNA, 335 bp, Homo sapiens
ggattataggtgtgagttatggtgttgggttaaaaatagtattaaaggttatttctatgaataaatgggtagactgtatatgtgtaggtttattaatcttattaactttaatataaggtctaatataagtaacttgacttgaatatagcttctagctctttagaaatagtagcttaagagttttaatagatacttactttgtggctcttgttttaagaaaggacaactaactctgtcaagacagactcaccaacaaagttgaaccaccattactacagagctgtccagggcacacaactctgaaggtgacatgaccctccaaatccaaatttact

SEQ ID NO: 607911 - DNA, 326 bp, Homo sapiens
  misc_feature (315)..(315): n is a, c, g, or t
  misc_feature (323)..(323): n is a, c, g, or t
tgggcttcacgggctttttcttccgccgcacgctgtgagggcagcttaataccgtaagacgccagttcacgacgagttggcacgcggatacgtttcggtcgtggcaactgcggaccaatcccctctttgacctgaggacgcggtccaccgctatttgccagactgaagactggcgcggcaacggttgcggcagccccgtcgccagtgtcgcttttttcacgccagatgccagcggggaaacagcggcagggcttctactggaggtactgctgcaacagaaggtgctttcagcgaagttttgatcggttctggttntttaaccngtt

SEQ ID NO: 607912 - DNA, 240 bp, Homo sapiens
gagggtcagtgtctgagcgaggtctttctaggtcaccactctgtgacgagagggtataacgaggtttggtaacgcctggacttattcttcaaagagccgaagaaaacgggctgagtgtggaaacaaacagggtagcccgctaagaactgcaatgtgtcattattgttcattagtttgtatctgagccattttcagtgtgccgctggcaaaatctcttggaccaaggagggtcgacacatg

SEQ ID NO: 607913 - DNA, 426 bp, Homo sapiens
gacaccgcacgctatccggtcaatttctacatgtcacagatactgacaaccttcataaatcttttaatatgccagtttctaccttaaaaagctccttctgggccaagcgcagtcgctcacgcctgtaatcccagcactttgggaggccaaagtgggcgaatcaccagaggttgggagtttgagaccagcctcaccaacatggagaaaccctgtctctactaaaaatgcaaaattagctgggcgtggtggcgcatgcctgtagtcccagctacttgggaggctgaggcaggagaatcgcctgaacccgggaggcggaggttgcgttgagctgaaattgcaccattgccctccagcctgggcagcaagagtgaaagtctgtctcaaaaaaagaaaaggctaagatagttcattgaaccggatagcttg

SEQ ID NO: 607914 - DNA, 1175 bp, Homo sapiens
  misc_feature (338)..(338): n is a, c, g, or t
gctgtggctgttgaagtaggggttctggatagcagaggttgatctcttgactagaccggggtaggccacgtggaggtaatctgtgacgtttggctcgtcatagaacacggaccatcctggacagctgcggcacgtcatgtgcatgtactgatctatcggtggcctggcctcgaaccgaaaaagcaaatgcggcgctaaggaagaggccgggtgctaagcagtgtgcacagagcgggtggtgggcagctcgtagtgtgagcttcttgggatttacgtgcatatgctcgtaggcagatgcatgtgttctgtgagtacccacagtatgcagtgagtccccntgtttgtcgaggaaatcagggggacacggaccatcaatctactcgtggacttgaggcgagaccatggacgactccttcaatcgaacaagactatgatagagacagttgtgtcactctggcggtagaaccctttactgcatgtactgagtgctgacgctagtatcccaagcggtggaaccaggagatttatcgaagttgtctgacattgaggatggtcgcccgaatatgagggccccattctggttgaatgcaaatgagacgggtcttgtgtcatgtcctttgacattgagggtgatcgatgacaagaatgagatgggatcgcattgtgtcaacgaagacattggaatttcccaacgtggaattcaacgctgtaaagagacctagacacgacgactacttgggaaagaaaaatttgttgacatggaaaagttgcatccacaacttttaacgtgttaaaacgaaaaacaatttggagctaagccacgatcccaagaaacccacggaaaacgacggcgaagaattgatgtgcacaacattttcctgagatttggaccacatgaggtcgaaccaaactcgagttgtggctggagaacgccatacaagtaggactagacccatttgaacctagtggtggtactaaaccggagcatcgcaacaatgatgcagcactcgatacagtgtctcgggatcatagtagcccgcagagggtaatccacacgccaagactgcgtcagaatatggagagatagaaaatacaaaaccacgcaacaggtcgagtcaaagcctgaatagcggccctttgactacaatacgctattaccaatacatgtgtacgag

SEQ ID NO: 607915 - DNA, 168 bp, Homo sapiens
  misc_feature (136)..(136): n is a, c, g, or t
gaggatcctgtaggtctcttcctcaacatcccaagcagctgggaccacaggtgcacaccatcacgcccagtactttttttattttttatttttactatttgtagagacgggcgtctccctatgttacccaggctgntcttgaagtcctgggctcaagcaatgctcctg

SEQ ID NO: 607916 - DNA, 288 bp, Homo sapiens
agattctgggggtcagaggggagaactaaggggactggggtggtcagagcggctgggtttctcctcctgaagccatgtggagactcagatctgggagacctgggcccctaagcgagcggggtgatgtccaacatccttccccaattaccttaagacaggcacacaggtaggggtggggataagtacctgacacttgggacaatgttggcccagagcagagttcccagggggtgggcagcaggtggggagggaaagggctcttgccttgatcccagtttgctcagaggg

SEQ ID NO: 607917 - DNA, 124 bp, Homo sapiens
aaaaagttttgttttttaaaaaaaatgaattacctgtttcctgaaaaattttgagggtaaaatgttagttttcataaaacattgaaaggcccccgcccctttcaataaaaacctggcttggaga

SEQ ID NO: 607918 - DNA, 343 bp, Homo sapiens
tcaggtgtgatgaggcaggatgagaagctcaggtggtgtctccattgaggcagggggctgtgaggggctaggggttgactccgagacccccgcgatccttggagaaagctgcaggctctggacagcatccctcagctgagcctgagttctctccatctcatttaggcggtgctccaggtttttcagactgtgcccttcattgcttgttaggttgtgctctgaatcaaactctgagctcccagcacggagcctggagtccagatcctgcagctggccccgcagctgctcctgctgctccgtcgaggcccggatttgggtgctcagcgactccaacgagggcgat

SEQ ID NO: 607919 - DNA, 232 bp, Homo sapiens
ggaaaccccgggttttatatttttttttcttttagccacacaggacaaaaaaaaaggggccaattcgtgggatttttgtttagggatttatttcctccccgtttgatttattttaattgttgaaacttaagttgtcaaccagtaaccctaacgggttttttttttaaaatatttccgcttaaagttatgtttttaaatggggaagggtaaaaaaaaatttggtgttttccca

SEQ ID NO: 607920 - DNA, 615 bp, Homo sapiens
gctcagagctgactcttgagtatccccggtagttgagcaatacaaggaacaggagttatagatgaggatgtagagaaactgtaaccctcctatactgggaacctagatggacgctggtactaaccactttggaagacagtctgataggacctcaaaaagttaaagatagcaataactgtatgactcagcaatttcattgctaagtatatctgccagggaaatgcacatgtatgtccatgcaaaaacctgtacatggttcacagaggcgtacaagtaatagtcacaaaaagtagaaaggacccaaatgtctacttactgatgaatggaaaaactaaaatgtggtatatctatacaatgaaatatcatttggtaataaaaatgaagtactgatacatgttgcaatatgtatgaaccttgacattatgctaagtgacagaagccagtcacaaaagaccacgttatcatttcctttatatgacctatccaaataggtcaactgtatgcaacagaaagtagatcagtagttacttaggactagggtagttggaggggtgctagcttacaggtaccggtttacttaacgaggtgaccaaacatgtttaaactcaactgtgt

SEQ ID NO: 607921 - DNA, 946 bp, Homo sapiens
  misc_feature (125)..(125): n is a, c, g, or t
ataccagctacttgagaggctgaggcaggagaatcgcttgaacccgagagatggaagttgcggtaagctgagatcacgccactgcactccagcctgggcaaacaagaacgaagactcccatctcnaaaaaaaaaaaaaaaaggaattaatatgggcgtttacacttttaattttttaatggattactacaccttggtgtaattatcaacacctttaaaatatccaaaacccctttttatcttaaacatctggccccttttccttattaaattagagttcatcaagacagatgggttttaatatcatatacctcccacggtgggtccaatttggcaccttaatcttaatcgggaattggaattccagcaaaaaaggtccggcccccaaggatgattgatgggacaaggttcacgcggggcacatactcacccaggaactatttcatggcgggtgcggtaaacccctttatatgggctattataaatccccttaagataaacctcctttggtattttccttaaatcaagtcattccctaaaattatcactctcatatctagcaagtagtggcccagtgccaggcttgtggcccacacgtgcgggttaaaagaatactctcttccacagggggggcaacaggctcagctctccttaaaagtttccacataaaactttgcacacctttaaatagttaaaaggtcccaaagaaatccaagaatcggaacaattgtgtgtctccctccattggcggccactaaaccctgcaaatactttaattttaaaattattcctccgagctaattcacaggtgcgactaaacaaggggattctaaaccagccccggtctggtcccatggttgccgtcactatgaggacggttccacacaggttacgcatgtcgacgcagcacaataccggttgaagatcgagcgttaaagcgaaagcgc

SEQ ID NO: 607922 - DNA, 1248 bp, Homo sapiens
  misc_feature (389)..(389): n is a, c, g, or t
gcaggctggagtgcagtggcacgatctcggctcactgcaagctccgcttcccgggttcacgccattctcctgcttctgcctcccaagtggctgggactgcaggcgcatgccaccacgcccagctaatttttttttttttttggttttttaaggggtgatgaggtttccccgtgtgggccaggatggtcttgactctccgtgacttgtggtgactccgcccgccttcggccttcccaaagtgtgcgtgggatttacagacgttgagcccatgtgcgcacgagccttacttagtctttactttggagttttctaccacgaggcgtgactcatctctgctgagaagtgctagtggatttttaaggacccttaatttcaaataattcctcgtntccactagagctatttactgccagtcacagggagggtctacactagacccccagcgtgctaattacccccaatttttctgactagcacgctacacctcttccataattagcgcgggcatagatttaaaaggctcccctatcttgcgagacattacttccggggggaccccaccacgtggatctttaccatttcattctctaaagcattgcgcaccgcgacgacgcgctttatatttccccaccacgacaggggccccccgatataacgctcgggaaccgcctgtgctccgcctttaaacagcgaacatccacctctgctgtccacacaacagcgtccagttaacaacctattacccgggaaagagcaccccccacttcccattaggacccggatgggaaccacaaaccacctctccgaggccacaaacactgtcggtcaaccaccggggggtggcgacacacttcacgagcggcaacgttgcttccactagacgcagccgcggcgtacccctctgcgtccgccagcctgagtcaacggcgctacacacgcatctgcacacacaatattactccagcaccttcccgcccatatatatcgccccccacagtgtgcatctacccccactcttgtgcccccctacaactgttttacgccacaatacggggcaaccatcgcgacgggacggctcactaatgagcaacattgtgccacctcgttatggaagtcagaccacgaacctccctatctatctcagcaatacaatcatatccaccacagacacctcccccgcagcacggtcccatcagcgaccctgcacccgacgcgcgcatcccgccggtctctcgaccaccacgtgca

SEQ ID NO: 607923 - DNA, 1723 bp, Homo sapiens
  misc_feature (869)..(870): n is a, c, g, or t
tgcggtggcttatgcctgtaatcccagcactttgggaggctgaggtggggtggatcacttgaggtcaggagttcgagaccagcctggccaacatggtgaaaccctgtttccactaaaaatacaaaaaaaaaaaaaaaaacgcgggggtgcgggggggcatggccggtaaccgcagctactggggaggctgaggcgggagaactcccttggacccggggaggggcgggtggcagggatctggagactcacacaatgggcgaccccagccgtggggcagacaggagtggaacctcaaaaaacaaaagggaggcccacgtcaaggggcgattcacggtccttggaccctggtggtgcgcacccgatcaaccaacaaatcaatctccaaaaatttcaatcacacaaaatcttggaaccggggtgcccccctattataaacggtaaacctctccattgttcccctccaccagccctgggtgagcccttatccaatacggggctctattaataccctcagggaaatctcacataagtgaaactcatacagatatgtaatccacgcggggggacgggtaaatacaactaaggaatgattcctcaagtgccctccaaggttgcagcctagtgttcagacttccgtcccgttggaaggcgggacaaaattcacgggtgtgtgtgcacacattttgcgcatacggtcacagaagggcacccgatggtcccctcgggcatggccaacgtggggcagcgggtacacaacacttagccggcccacagtgggttcagacggacaaaaaggagggcgcagcgacgcagcaacacaaacatggggcggaacaagatggcaacatatcaacaatcatgcactcgcnnagccagcgcatgtagtcgatcgtgcaggtgccctggcgtgactgcagtgttctctcgtggacgcaaggcgtatggtagccaggcgcgtcgacgagtgtcctagctcaacgcgcgagagtaaggcgtcggcagtgagaggcagtagagttaagtgcgagcacaggacagaagcagtcgaactcatcagataaggtaccgatgatcaaccagcggaggaggcaagagaacgcgcgagcgatgagcgcgagcgtcactcgtagcgtcgaccaagcggcgtcagtagccgtcacaggcgatgacgccgcgagaccgcgcagcgtgggctgtcggcggcgcagaccacgggcagtcggcagacgcgcacgcccggcggcgagagacgaacgagtaaacagagagaagagagcgtgacgtgagggcgacggcggcacgaggtagcgacgagaacaggtacagtgggcgaacggacaagggagcggacagacgacgcggcgaggcgacggcgggcggcgtggcgactacacaccgctgcagcgcgcaccgatgaagccagccgcagtcgacgtagaatctacggactgcgcggtaacgcgagctggagagcgtgcgcctacagcgcgatgacggacggcagtcgaccggggcaggacgaccgacgaacgcagccgcagcgagcgctgcgacgtgatgagctgtagtcggcggaggtacagcgcagagatagccacctagcacgcaacctaggcaaacagacacgacaaccaaaacacgaacacgtctgccagcactgaaacacacgcgaactagtgagaggagggaaccaggtgcgaccgggaggaggcaggtacgcgct

SEQ ID NO: 607924 - DNA, 257 bp, Homo sapiens
ctgacgtccttacggtggcgtgacccgatctacatgtgtgagatgactgagatggaagcaggcggtgctggaggtgctggtggcctgttgagtgggccaggcctgtagcattccaggcaagcatccttctgcccgggttttacttggaatgccccatgcctgtgggcgggcagccgattaagcagcaggcgaatgagctgaacccagcaggtcatcgtgctccagcctgtactctctttagcctttctcttccagaa

SEQ ID NO: 607925 - DNA, 1750 bp, Homo sapiens
  misc_feature (88)..(88): n is a, c, g, or t
ggtcagaagaaagggatgaccgaattctacttcaccagaatgtaggatcgcagcttatactaattgtcgcacgcgctccgttgctctncgaggtaccaccacgaagaacacagaatgactgacgagcagactcgagacttatactcctaaggacaggtcttcataccatcgcaggtgcccgtacattctcacacgctttaactaatatagctgcatatggcgtctctcccagattatgctttcccgagtatcgtccatgctttcttcgacctagttatacaatcctgtccgttaccctgtgtgttctacgcgtatagtttcttgcgtcggttcttgtctcatacgtgaggagcagggctacaagtagtggtaaagagtcaagagtgtaaggtactcaagtgagagcggccgtgctgcatacacaccaagcacgcgtccttttgtgccaacttaggtactcgtgtggtacctattgcgaaggagaagatctaatcgatagttaggagactagttagtgggggtgtcgacaaataatcgcgttagataaagacaacggggcattcgaccattgggacacggctatgtggtttgatctttaagaagaaccaacaagtctctcttgcaccaaaaggatcttccttcgaaagaacctacattggggaccttgtgcctattgatactatagagaagacacaagataattgcgcaaatggaaatatgagtaaacttgaacctaagcactgcggatttggcattgttgcctctatccattcgctcaggttgagtctccttgtagacccttagttagtgtataagcctgtaccatattgacgaatagcctggggatcattctcctacatatggctccggtcctttagtggaaaagcataatccgtctttgaccaaggggtgccactaattacacttattgggtgttggccattgttaccccagagggattacatcgtgccgataaaaaagattcattggaagccctggggaacggaaataggttccccttaagaaatttgcggggtttacgtacgcaacaaattctttacctgtcgaatgaaatgtccaaggcggacgcagtgtggaaacacagaactccgttcggcatgaatgcctttctggccgaagacattttccccacgtgtgggattggactcacacccggcgtacactcacccattggcatctacttcagttttgtggggagtcggaacaactcttggggggggccggacatgggcgcaaattacagttggggcgcgcagagtgtgtggagaagcgaacaaccgtggacattgtggtggtggggaccaaacacaacactcgggtcaccgcacagattactacgggcgcaagaaagtgggccgctggaaccccagcaaaaactaccgagaatgctcgggggtggaaaccaaggggggaccaaagtgtgggggatcaagccccccgggggtggccacacacgcgggggggtattcccaccagagaaaaatggggaaacatgcaacgatgtagccccactgaggaggaagggggggaggagacaaccccgcgacgggagccataacaccactggccagtcatgaggaggcataaaaaaaccaacgacacacgacacatcgcgatgaaacaacagcgaggaggaccacagcagaccgcaaaggtcaacaacaagcgagcggagaaaatccaccggacgaggatgtgatagatacaacatgaacacgcacaacagaga

SEQ ID NO: 607926 - DNA, 149 bp, Homo sapiens
gtgcagttatcattaaggataacctcctgaacaagagcttagtgacacaatcctacctatatctgaagaatcaagagtgagtgcctggtgtccttagatttgcaaggagtgtttctagaacaccaccctatgctcactccatacaaaga

SEQ ID NO: 607927 - DNA, 162 bp, Homo sapiens
aggcggtctagaggatcccgcgtgatccgtacaaatcgacgggacagatactcagctacaagatgggcaagaaatgcagaatgcttaaaggctgaatgtaggattcttttttaaacagtaaaatgtcattaggatagatcactctctcaccaacattaaatg

SEQ ID NO: 607928 - DNA, 230 bp, Homo sapiens
tctgtgtcgagactattgcctaatatgggcgagtttgcggctcatcagcgcctttacgacctacggggaagctgggacctagacagatgacagagtcttggaggccatcaccaggaccaggcacccagagtgtgccagagtacctactgaagagtaggactttatggacacatgtggagaacggttattacaacaatttactttgtggtgagagtagcgagtagattact

SEQ ID NO: 607929 - DNA, 168 bp, Homo sapiens
tatagtcttacacgctgggaatccatagtactagcaaatattaactcattcctttttttctgagacgggtctcactctttttagcccaggctggaaggcagtggcgcaatcggctcactgcaacctccgcctgctgggttcaagcgattctcctggatgaggccctgg

SEQ ID NO: 607930 - DNA, 712 bp, Homo sapiens
  misc_feature (18)..(19): n is a, c, g, or t
  misc_feature (64)..(64): n is a, c, g, or t
  misc_feature (119)..(119): n is a, c, g, or t
  misc_feature (127)..(127): n is a, c, g, or t
gcgttctagaggatcccnnatatgcgtctcaaaaaccctctatttttactagttcactagcagngtagtgtcggggccactttttctttaattttttttggtgacagttttaggctacngagatccnggaggtcatggtcatcacagtgaagctaagactggttttttttcagacagtatgtattttttagttggtagtttcttgaactcactgggcactgtgtgggttgacttaagattgagtaattcatgccatggctgtttaatttggtgacaagctggctatgatcagagaacaaactgttaggaagtggtccagttttaagtttgcgtgagtatataagtggagtattttgggttcattcatctcttgccagtcttagttgttaagtaatcttcttgcattcatatttacatcatcctcagaatcttgtgtttctgccactctcataaaaactgactctggtttttaaggtagagcttcatgcttggaattaaccaggaaaaacctcatttatatctccagcaagagggacagagggcctgcactgtgtacttgctgccagaagtttttatagtaatactttgtatctaggctctggctcttaccattaaatgtgctttttatagagtaccaagttataaatgtagtgcagctacggcatattaatcttactgcagagatttaatgatacagcatttcaggtccgcc

SEQ ID NO: 607931 - DNA, 494 bp, Homo sapiens
  misc_feature (9)..(9): n is a, c, g, or t
  misc_feature (22)..(22): n is a, c, g, or t
  misc_feature (31)..(31): n is a, c, g, or t
  misc_feature (117)..(117): n is a, c, g, or t
  misc_feature (478)..(478): n is a, c, g, or t
actgacctnccacaatggttgnaattaatgntacacttaccatgcaagagtgtatttgtgttccctttctctgcaacctcaccagcatatgttattttttggcttttaaataatggnccattctgactggtgtgggatggttatctcattgtgggtttgatttgcatttctctaatgatcactgatattgtgcttttttcatatgcttgttggtctgcatgtatgtcttcttttgagaagtgtctgttcatgtcctttgcccactttttgatggggttgtttttctcttgtaaatttaaattctttataggtgctggatattagacctttgtcacatgcatagtttgcaaaaatttactcccattctgtaagttgtcttgtttactctgttgaaagtttcttttcctgtgcagatgctcttaagttaattagatcccacttgtcaattttgctttcggagcgattcttttggtgctgncatgaaatttttgcct

SEQ ID NO: 607932 - DNA, 318 bp, Homo sapiens
  misc_feature (130)..(130): n is a, c, g, or t
  misc_feature (140)..(140): n is a, c, g, or t
gtacccccccccccccgcacggggctggttagggaaaggggcccgataaaattttgggaaaaaaaggaggggtcctccccagggtttttgaaaaaaaacccccgacccaagcccttttttttgccccccnggccccccangggggttatttttgggggggaaaaaagttttttcctggtttttccaaaaacccccttcccccccccagccaagggggggttttaaaattggggggcggccccccccggtcccccaaaaagtcttttttagggggtttttgtgggtggggaaaaaaaccccgggtttctttcctgggga

SEQ ID NO: 607933 - DNA, 254 bp, Homo sapiens
ggatcttctgtcaggaaggtagactaaggggcacgtccacctggaccaggaagtcgtctcgtgtacagtactacattatcgtacaaatacttcaagcataggagtactgtgattagatgggttaaccctgtaaataaaattctatacattccatatttgggttcagtgtctatatttaattagttttagtctgaaccaaagcaagttctactattctcatccgctacgtaccctgaaagtatcacatacggatc

SEQ ID NO: 607934 - DNA, 377 bp, Homo sapiens
cacccgttatgtgctgaaccaccggcgcagtattctgggagattaatgaaaagtttcagtctaccaggacaaaagctctgtatccgccatattactacaataggcatagcgggccctatgtttgctctgtgcgtaacttagccactggcaaggaaagctccaaatccatgacaggcgaagtctctgactggacagtgcccggaattctactagtgcctccaattccattttctcccatggaatcactaagagcaagacccactctgttccagaagccctataagctggaggtggacaactcaatgtaaatttcatgggaaaacccttgtacgtgaagcatgagccactcagaacataagggtgggtcagaacagaag

SEQ ID NO: 607935 - DNA, 377 bp, Homo sapiens
aatcattacgcattgctgatcatagctccacttcgaaattgtacgggttactgtattataaatgttggatacgtgtaattccagcatactgggaggctgaggtgggaggaagcagcactaaaagcactctgaatcaagatgagtgagaaaccatctcaataaacacattttggattacaaaaaaaattaaaacaattagccgggcatggtggcatgcacctgtcgtcccagctactctggaggctaaggtgggaggatcgcttgaacctcggagctcaaggttccagtgcgctatgatcacttcactgcattccagcctgggtgcccatagccctatcctgtcggtcgtcacttttctctgcattttacaaatgaac

SEQ ID NO: 607936 - DNA, 172 bp, Homo sapiens
ctttgggcaaggtggacttttaatgtttattatttttttttcccccccaagttaagggcctaattttgggtattctgggggctgctttcctggggtggttaaattttaaccaaaacttttgtcaccgttggaagggtttactttgctggaaaactttttagggcccttggga

SEQ ID NO: 607937 - DNA, 319 bp, Homo sapiens
gaacaaatacagcgcagcacagactgacgatgaactgcggaaatgcgcggtagtacaacagagcgagggcgggtctcacatcatccagaggatgtatggctgcgacctggggcccgacgggcgcctcctccgcgggcatgaccagttagcctacgacggcaaggattacatcgccctgaacgaggacctgcgctcctggaccgccgcggacacggcggctcagatcacccagcgcaagtgggaggcggcccgtgaggcggagcagctgagagcctacctggagggcacgtgcgtggagtggctccgcagatacctggag

SEQ ID NO: 607938 - DNA, 161 bp, Homo sapiens
gcctcagaccacaccagacgtgtttctagctgtactagagaagatctgggctgtttataaatatagcatctcacatagcccagttcatcaccatttctccttaccttcagtcagttttttcacattgggctgtggtccaactttgggacacggacttcagt

SEQ ID NO: 607939 - DNA, 824 bp, Homo sapiens
  misc_feature (208)..(208): n is a, c, g, or t
  misc_feature (217)..(217): n is a, c, g, or t
  misc_feature (219)..(219): n is a, c, g, or t
  misc_feature (223)..(223): n is a, c, g, or t
  misc_feature (225)..(225): n is a, c, g, or t
  misc_feature (229)..(229): n is a, c, g, or t
  misc_feature (232)..(232): n is a, c, g, or t
  misc_feature (234)..(234): n is a, c, g, or t
  misc_feature (284)..(284): n is a, c, g, or t
  misc_feature (287)..(287): n is a, c, g, or t
  misc_feature (289)..(289): n is a, c, g, or t
  misc_feature (291)..(291): n is a, c, g, or t
  misc_feature (294)..(294): n is a, c, g, or t
  misc_feature (300)..(300): n is a, c, g, or t
  misc_feature (307)..(309): n is a, c, g, or t
  misc_feature (311)..(311): n is a, c, g, or t
  misc_feature (317)..(317): n is a, c, g, or t
  misc_feature (319)..(319): n is a, c, g, or t
  misc_feature (324)..(324): n is a, c, g, or t
  misc_feature (326)..(328): n is a, c, g, or t
  misc_feature (334)..(334): n is a, c, g, or t
  misc_feature (340)..(340): n is a, c, g, or t
  misc_feature (345)..(345): n is a, c, g, or t
  misc_feature (347)..(347): n is a, c, g, or t
  misc_feature (350)..(350): n is a, c, g, or t
  misc_feature (355)..(355): n is a, c, g, or t
  misc_feature (361)..(361): n is a, c, g, or t
  misc_feature (372)..(372): n is a, c, g, or t
  misc_feature (384)..(384): n is a, c, g, or t
  misc_feature (386)..(386): n is a, c, g, or t
  misc_feature (391)..(392): n is a, c, g, or t
  misc_feature (401)..(401): n is a, c, g, or t
  misc_feature (403)..(403): n is a, c, g, or t
  misc_feature (407)..(407): n is a, c, g, or t
  misc_feature (418)..(418): n is a, c, g, or t
  misc_feature (429)..(430): n is a, c, g, or t
  misc_feature (432)..(432): n is a, c, g, or t
  misc_feature (442)..(442): n is a, c, g, or t
  misc_feature (450)..(450): n is a, c, g, or t
  misc_feature (456)..(456): n is a, c, g, or t
  misc_feature (471)..(471): n is a, c, g, or t
  misc_feature (475)..(475): n is a, c, g, or t
  misc_feature (490)..(490): n is a, c, g, or t
  misc_feature (493)..(493): n is a, c, g, or t
  misc_feature (751)..(751): n is a, c, g, or t
  misc_feature (757)..(757): n is a, c, g, or t
  misc_feature (767)..(767): n is a, c, g, or t
caaaaattagaaggcgagtgctgagaagacttgtcacaggtttctcaaatcagaatatactcagtcatagtggttccctgggaagccccagaccctttgacttgtgacattactggtttgcagacataataactacactcagaggaccatggaggcagagggatcatggtttcagggcactgaaaactctacgatccaagaggactantgcatggantnaaantnaggnatncnctcaaataggctgtattttctttccaggaacgtaacctttcccctttttnttntnanctnagccangattggnnntnagaaantntcctntnnntggagntgaagntgggntnctnttttncgaatnttttccatttnataggcgccacntnctttnncggggtttntnttgntaagacacccnaattttcattnntnagaaaggcanctgaattntttttngtgaaatttttttanattntttttaagttatttnttntttttgtattaagttttcagttgtttctctcttttctccctcatttcatggaggtgttaatgatcatggctggccgtgatgtacacatgggctgattttcattttttcagtttcatagctgagaaattcagctttgttttagttgaatcatcatattggaaagcagacattgaaagttttcttttctatctttgttatgaatgtgctatggccccttttggagacttctattgggtaatattctatgtgagagaaggnaacttngtattaaatnttgtggaaaataataatgatgataataataaagtatatgctgcaatggtgtactgcc

SEQ ID NO: 607940 - DNA, 444 bp, Homo sapiens
aatgagtttgctggatgtttaaagaactaagagaatgaattgaaaacatgcacagagagtaagaaatctaaaattttgaaacttaaagtttaaaagttcagcctaaagatttctctgtatacagtgaactgtaacctaactggatgtgtaaacaggccataatgtactcttatgccaatcactgagtttcaaccatcaaaggtggccaactgttaaaagccatattcaaataaggcaaatgctaaactataaccaataggctgtttctgtacctcacttccattttctatatgtcaattctctttttctgtctgccacttctctttttctgtccgtaaatcttctttgagcatgcagcaggattggagcctctctgaacctattctggtttgggggctgcccaattcatgaattgttttctgctcaattaaactctgttaaaat

SEQ ID NO: 607941 - DNA, 622 bp, Homo sapiens
  misc_feature (115)..(115): n is a, c, g, or t
  misc_feature (171)..(171): n is a, c, g, or t
  misc_feature (208)..(208): n is a, c, g, or t
  misc_feature (235)..(235): n is a, c, g, or t
atctaggatccttcaatctactcaagttgacacctatatttaacacacaaagcccaccgcttgtcaacttggcattcacacacatctcctgaaatcatacttaatctacaaatanatacataagggtcataattacgcctaacataatgcaactatccttcgtacagccgnaagcgcacccgtctttaacctaaatattattacatanagtagcaacacttaaatgctgatatanagtccttagtaaaggtgtgtacatgcacaaacatattcttaacaaaataaggaggaaatattcatgacaattacagtcattttttctgcaaccagtcacgtgatcatagttggtcttgataactaccttcttctaatatccattctgtattccctttgccttcaacaagcccctcggctggtcatgttttttcgcctggtggacccaaaccttcattcctgacgggtcagccatttgtagtcctgcctggattgggttgttgtactttcccgttgaccttaatcacagggcatggtaatactaagagacaccctaagggatctcctgtattccacgcatactcttccttacctccattgtggggtagtagtctgatttcatcctgat

SEQ ID NO: 607942 - DNA, 736 bp, Homo sapiens
ggctcgcatgatggctgcggtgccgccgggctggagccgtggaaccgtgtgagaatccctaaggcgggaaccgcagcgcagtgacagtgcagaaccccggcgcggccttggttgagcaatgtttaaagcgttgaaaaacatgaattgggagggctcaattcaagacctgttgtgagttgttttcttccaagttatggaaattcggccttatactatacacaagtgtgtgtgttgtccagagtcagaccagtgggtggaggtggtgatgatgacaggtgtgtggggagccctgcaaagttgtttgctccgcctttgtgggactggtggctgcaaagacttttcgtttgtgacgtgtgaaaccatctacggttgtgcaaagagcttcattacttttaaacccttgttgatggttggggctggtgagcagggttatgggttctctataaaggtgtcttaacaaaggttgatttggttatatgagcctttgttgtggattgcttcaagaggtcgctaggattcaacaatgccttacttcaaagattttacctttccttctgatatcactgaattttaggacagcatattgtgaagctttaagaaaaaaaatgctataggtttggaagtaagggattactaatggctaaataacagtgtgtttataaatggcagtcaccagagcagtgagaaacctggtggaattcaaaaaagtaacaatggcggtccatgtcagatatgg

SEQ ID NO: 607943 - DNA, 294 bp, Homo sapiens
caagtggctcccagagcatggagtagcacggtcgcgctctagacgagcgccctctggccttgcaccacagagacgcaggcgtgggtcaaggctgcgtgctgccgaggcccttctcatccctgctcaagcatagcccactactggcctcgacggtccccactgtctcaaatcggcgtgaccgggatacccatttcatcaaaggtccaggacagacaagcaggttttgaaggcaaagttcactcagcccacctgcacccctgcctaatgcagatcaggtggtgcggtaccgagctc

SEQ ID NO: 607944 - DNA, 692 bp, Homo sapiens
ttggcaagaacaagcgccttacgaaaggcggcaaatcgggagcctagaagaatagtggttgatccattcttctatgacagattggtatgatgtgaaagtcacctgctatgttcaactattaagaaatattgtgcaatagtacgctcggtcgcactcagcaacccaaggaacctcatccattgcatcttgatggtctctgagggtcggtgctgtcttcgaacgctgagtctttggactgcatctctgcgagcatatgatgaagtgggcgattctatgaaacattctaaatgcttgcatctaccctagaagatgtgacaagtggctccaagagatcgtggcgcgtgtatcttaactctctcaatggacgagtgggatcgttcagcccgtgaccaacacatggtgttccctactggagtcatacataacagtggcagtaccagaatgagttgaacgcctcacgtgtggactgtcaaagagctagccgattggttaccttgccttcgttctgtcctggtgttgagttttacctgataacccgcgcgagcgagtcacgatacggatgacctcttatcgctcagctaccaatcagtgtccgccaagatctcgtgactggaagattgatggcaaatcatcgatcccgagaggttgcctgacgagatgacttgaactgaagtcggtcaataaagttcgat

SEQ ID NO: 607945 - DNA, 469 bp, Homo sapiens
  misc_feature (24)..(24): n is a, c, g, or t
  misc_feature (76)..(76): n is a, c, g, or t
  misc_feature (445)..(445): n is a, c, g, or t
  misc_feature (465)..(465): n is a, c, g, or t
gtcctagaatgatatcaacccccnacttactgtcccctttcctagcaggcagaccttaaataacctatcctcaggnaactgattccctcccatccctgaaaacacccttaaacaaccgggaaaatagcccaagacccagacaaagtctgctgtggggacaattagataaaaggaggctgcacagtggctcacacctgtaaaccccagtgctctgggaggccaaggtggaaggactgcttgagccccaggagtttgagaccagccctgggtaacacagcaagaccccatctctacaaaacatttttaaaaattagttgggcatggtggtatgtgcctatagtcctggctactcaagaatctgaggcaggaggatcactggagcccaggagtttgaagttgcagtgaactataatcatgccactgtactttagcctggacgacaaangggagactctgtctctttanagaa

SEQ ID NO: 607946 - DNA, 678 bp, Homo sapiens
gaaaggacattgactgacttgacgggatgcaacgtctgtgttattccacctgaccagtggttaggaggacgtggtgagtagcattatggcgctctggtcaggactccccacccgtgagcctctgaaagctgactttagtctgtaatcagggaggtctggctcagcttctcaattgagctgtgtctttggatgagatgagtatcttctgttcagagaacacgatgttcatgacctcattgtctaaggcccctcatctgagaaagtcttgtctgaccctctagcccagcaggaccaaggtgtggtgcctggtcccagctgtcctctgctcccctgggctgcagttggccagttgcctgcctccattagatacggagttgctctggggctgagatgcccatctcaagtgcattctgtcggaagggttctcatgctggaaggcctttggtttagttgggattccatgagctttagcccaaaggtggcctcccatactagcatatttgtttctcagcaaatggacctgatccaccatttgatgtttgtcgcagtgaaggtcgtcttgggcagtcactgccctgagtttgtcctactggctgaccactgtcctcttgacttttagctgtgagatccaaggtggcccagccaaagaagtctatcaggcagcagcaggtatggtcg

SEQ ID NO: 607947 - DNA, 905 bp, Homo sapiens
  misc_feature (225)..(227): n is a, c, g, or t
  misc_feature (618)..(618): n is a, c, g, or t
cgcccgacgccaacgcaggcgcacgctccgattcggcgcggctcatggtccggttcgggctcgcgagtctccgtctggggtagggcaggttcttagactctgtgagtaaagacagcttcatcttcccagttcatcatggcttcaacatccagagatgtcattgctgggagaggtatccactcaaaggtgaagtctgcaaagctgcttgaggttctgaatgctatnnnggaggaagagtccaacaacaacagggaagagattttcattgcacctcccgacaatgctgcgggggaattcactgatgaggactcaggggatgaagacagccagcgaggtgctcacctacctggcagtgtgctgcatgcttcagtcctgtgtgaggactctggcaccggggaggataatcacgacctggagctgcagccagccaagaagaggcagaaagcagttgtgaaacctcagcgcatttggaccaaaagagatattcgtccagactttggcagttggactgcatcagatcctcatattgaggatctgaaaagccaagagctgagtcccgtgggcctttttgagttgttttttgatgaaggaacaattaatttcattgttaatgaaacnaatcgttatgcttggcagaaaaatgtcaatttgagtcttacggctcaggaattgaagtgtgttttgggcattttgattttaagtgggtacatctcttatccaaggagaaggatgttctgggaaacctctcccgattcacatcatcatcttgtggctgatgcaattagaagggacagatttgaactaatcttctcatacttacattttgcagataacaacgaacttgatgcaagtgataggtttgcaaggtcagacctctcatcatccggatgaactgcaatttccag

SEQ ID NO: 607948 - DNA, 115 bp, Homo sapiens
gtagatctctacacggatccccttcgtcgaaaaacaacggcattcatatatacataagaccctctaatttcataatacactaattacataaattagctcgtcatacaaaatatta

SEQ ID NO: 607949 - DNA, 606 bp, Homo sapiens
tgctgggcaaagggaacattatcatcagcagcttcaggtctgtgctggtctcgcctgtcaggagtaccacctgtcttgttgatgaccagcatagacctgaagctgcgtgggcagaagggaacattatcatcgaggcaccccatggagaagtgggatcatacttgcccggcgcatggaaaggcagcgtcgaataacgtgcaagaatagtcgaacctcctatcgctggtgggactgagagtcgcaccgtctattcgcggggtcgcagagatgcggccggcattgtcctgtaccaagtggatcgtggctcgccgaagtgcgccttatcatcattcctacccagtagtatgtaccaggtgccagtgtctgcacgttgtgccgtagcgtcaagctgttcttacgtcctacgtgcgcaaatgacacaaggtgagtgtagcgagcacatccatgaggcctgggccgtggcacgctgaccgaggctcccacgctgtcaaatacgtctactcgaatcaccctaatgatggcgatctctcgtccacccttagggaccgtgtgccacagttccatggggtgttcagaacattcagacgcaataacacaaaacctcgg

SEQ ID NO: 607950 - DNA, 261 bp, Homo sapiens
  misc_feature (3)..(3): n is a, c, g, or t
atnaggtgtgtgtgctgtgctcgtgtgtgtgctgtgtacatgcgtgtgctgtgtgtgtgtgtgtgtgtctattttatttccagctacagggatatctgtcgtactttgttcaggacagaagacattcttgtcttacctcgtttactacatgtatccactgcacctagaacaatgccagcatgtcatgaatgaagcctggctacttaccaaagcattcattcatatatgccccagttttgcttttctacaaacttactcgta

SEQ ID NO: 607951 - DNA, 285 bp, Homo sapiens
  misc_feature (76)..(79): n is a, c, g, or t
ggcctatatccaagatgtggaaaaggaaaatattgggctaaggaatgtctttctaaattataatgaaattggacannnnattgtcgggaaatgggaagaggggccagcccaggccccgcaacaaagtggggcattcccgattcagccatttgttcctcagggttttcagggacaacaacccccacagtaaataccaccatttcaggaatcagccaattacaacattacaacaactatcccctgccacagcagcagcgtgcagtagatttatgttctgctcaaatg

SEQ ID NO: 607952 - DNA, 354 bp, Homo sapiens
tctgaaacagaatctggcttgtggtcacccaagctagagtgcaggggcgccatctcggctcactcccgggttcaagcgattctccggcctcagctggggagatagagatggcagtgagccaagatggtgccacggcactccagccggactaattttggtatttttagtacggcacagggtttcaccatggtgggccaggcgggtcgggaactccggacttcgagtgatccaggtgcctcggcctcccaaaaggcggggataaaagacgtgagccaccatgctgggccccacggttacttttattactacctagactacactggtcgaatgggtcgccaatcgggggtaccgagc

SEQ ID NO: 607953 - DNA, 220 bp, Homo sapiens
attcgcggccgcgtcgactttattttgttttatttttttgacctaacaccaaaattataactttttaaaaacaaaagattttcctcactggtgatggaatgatacacacatccggtgtacattcattcccaaactgtggtcttgatccaaagatacctcctactgtatgagaccgctttgggttcctttgaatccaccggtggcttttgtgatgagggtt

SEQ ID NO: 607954 - DNA, 619 bp, Homo sapiens
catggggacctgaggcagtatgacatgctctgacccacagagaccccgcctcacacggacagctcttcactcggacggcagcactagataaagggaggcctggagcaagatgctggaggacgaggaactaagacgtcccagccagagcccaatagtggtcaagggaaaacgggtggctggaggccctcaagatgatccagctcagcctggatgggaagcgcctcgtacatcaccacgtcgctgtacagtgcatgggacaagcagttttaccctgatctcatcagggaaggctctgtgatgctgcaggttgatgtagacacagtaaaaggagggctgaagcttgaaccccaacttcctggtggacttcgggataggagcccacttggcccagcccttgcaccatgagctccgctaacctgggggcggactagtagcatttgacatctggattcgaactccaccgctcagtcacccacacgtccctatttttgggccctcacttccatggggacctggcttcattctgctctctacttggcaccacgaccattggcagcaccgaccacacagccaaagctagactgtggcaaatgtgttgagtataacatttactgacaac

SEQ ID NO: 607955 - DNA, 387 bp, Homo sapiens
gggcacgaggttcatgtaccctcattggagggcattgccccggaaaatcaattggtgtttttggcaggggggcccttggaggatgaggccattttgggccagtggggggtggaggccctgattcccttgaaagtaccagcccgcatgtttggaggtaaagtccatggttccttggcccgtgttggaaaagtaaaaggtcaaattcttaaggtggccaaccaggaaaaaaaaaaaaaaaagccaggtggggttaagcgggggatgcagtacaaccggggttttgtcaacgttgtgcccccctttggaaaaaaaaagggccccaaggccaatttttaagttttttgtaatttgggctttttttaaaaaaaaagccctttagttcggtca

SEQ ID NO: 607956 - DNA, 107 bp, Homo sapiens
cagtgattagaggatccggaggagatgtcggagagggagaggactgtggaggggaggaggatgcggagagggaggatgtggagagggagaggatgttggagagggag

SEQ ID NO: 607957 - DNA, 268 bp, Homo sapiens
caagggctgttgttcagattcttttgtaccacgttggtggtcccttgatgtgatgcactccccgttagtgatggggcttccagcaagccacactgcagtgattgttattgctctactgggcctaaccaccccgtggggttaccacgactctgatgctggtactttgcaaagtgtcttgcatagatgtccgtgtgatacacatcttgtcttcagggtctcccgagcttgtggatacccagcaccgtgttcttggttggacgatggtacg

SEQ ID NO: 607958 - DNA, 605 bp, Homo sapiens
  misc_feature (47)..(47): n is a, c, g, or t
atatcgtcgacccacgcgtccgaaaaagttggcttttctgaaacttntgataggtaatctcaaataagtcttttagacttttaaagacctctcaaggctgtgaagcccaacccagggctcaccattaaacgtcacctatagtacttatagattatggtgattcctctctgaggtccaaaatatcctgagttcctgggcctgcaggaagtgcatttttcacccgctatagaccaccggctgggctgttgtatcaaggtacaaggcagtttttccatggtgcagttggggagagggtgacagagtgtttatggcgcccacaaagtcaacttaaattccttgaagttgtctggtcatatctgaaaatacgagattccagtcaaagcttggtactagtgtttccaactgtgtccttttacaaggagaacagattcttaagaaactttcataaatgattatattgccataaaattaagaatactcactaatagtttccaaaatctggagggatcagatgggatgaaaaagtaaaggcttcaaattttgctcacaaaagtgaactttaccacactgccataagctatagattaaaaacaaaaaaaaagggc

SEQ ID NO: 607959 - DNA, 474 bp, Homo sapiens
tctagagaatccccggtcgatctagaggaatccgagaaagtaaagcttgtgagtcacaaaattagcaatagaagcggggtcccgccatatagaattctgctcattaatacaatattgaggagcaggtcggacgggccatccgaagcaggattgcagatggcagtgtgaagagaggagacatatcctacacttcaaagcttgggtccactttccatcgaccagagttggtccgaccagccttgaaaaactcactgaaaaaagctcatttgggcctatgttgacctctatcttattcattctccattgtctctaaagccaggtgaggaactttcaccaccagatgaaattggcccctgtattatttgccttatgtggatctctgtaccacctggaaggccatggagaagtgtactggttgcaggattggccaattccattgggtttgtcaaatttcaaccgcaggcagctgaagat

SEQ ID NO: 607960 - DNA, 441 bp, Homo sapiens
  misc_feature (404)..(404): n is a, c, g, or t
acatcaagcacatgggtccatacttgtaaatactttcggcaaaatacttattgtaactcgcagatgataattaagatccaagatgtggcccaaagtaaatagaagtgggtcataccacacattacctgttaacatcagcttccatttacaagtcatgagcccagacactgacatcaaactaagcccacttagactcctcaccaacagtctgtcctgtcatcagacaggaggctgtcaccttgaccaaattctcaccagtcaatcatctatccaaaaaccattacctgttacagctaaaacaaaatcagcacatctctgtctgtattagaaacgacaaaaccttacaaagcagtcacctccataccagtctgacaatcactagttcatttggcagatggacaacnaaagtttaaacttgccattccaatcaactttctttac

SEQ ID NO: 607961 - DNA, 151 bp, Homo sapiens
tgagccaaaaaattttttttaacctccttaattttttgggaggggcccctaatatttaaaccccttttaaaatcaattttttcaaaaatttttttgggttaaaggctctttttttggtttcaaaaaaaaaattcccccttttggatatttt

SEQ ID NO: 607962 - DNA, 111 bp, Homo sapiens
ttgctctgtcttccaccttactaaatcgatttaccttacggacgtgacaggaaaagaggacattcatgtatttgtccttccgtttcaattcattagcaccagggacaaagt

SEQ ID NO: 607963 - DNA, 493 bp, Homo sapiens
gactctagagtataccaccatgctcgtatcttcagcgactggaatataaaatcccaagacgtctccttgtccatttcctaacagtagagtatggcaagtggactggtggaacttggttccctttctgctccgccaacaatagctaattttatcataatctataggagctcgaaggtgtcctatagggctgggaccaacccagtctggcagcggtatctggtggcatctcatccacagtgatttcaaaataccaggcgcccttccgtactccatgagaggacctcaccatatagtataccttctctcccaacacagtcaggcggtcatctgagatctctaactgtggagcgcgatcctgtatgggttacaaaaaccgttcatacaagcaggctctgtagaggtctccccgaataggtttttctgtccagcagtcaagattcaccttctcggggtcaagggcgtgcggagtaagctcagctagaatatatcgata

SEQ ID NO: 607964 - DNA, 586 bp, Homo sapiens
  misc_feature (53)..(53): n is a, c, g, or t
  misc_feature (56)..(56): n is a, c, g, or t
  misc_feature (58)..(58): n is a, c, g, or t
  misc_feature (72)..(72): n is a, c, g, or t
  misc_feature (358)..(358): n is a, c, g, or t
  misc_feature (360)..(360): n is a, c, g, or t
atgtactcaataggtgaatggttaaacatactatggcacattcatacaatggnatncnacacggaaatgaanaggaacaagctattgatacatgagaaaacttacatggatctcaaggacattctgtttagtggaggcaaaagagtcaatctcaaaagttacatattgagtattaagtgcatactatatgattgcacttaataacaccctcaaaatgacaaaactatatagatggagaaaagattagtggattccaggaagataggggatatgaatacaaatggagagtacaaggaagtcctttgtggtgatggaactacacacaaccacacacacacacacacacacacacacacananacacatacacaaatgcatgtaaaaactggtaaaacatagaccagtggaacagaaaagagaactcagaaataagacggcacttctacaaccatctgatctttgacaaatctgacaaaaacaagcagtggggaaagaattccttatttaaggccgggcacggtgtctcatacctgtaatcctgagataaatactggcaatatagtggggtgtagggcgataacattca

SEQ ID NO: 607965 - DNA, 507 bp, Homo sapiens
  misc_feature (53)..(53): n is a, c, g, or t
  misc_feature (56)..(56): n is a, c, g, or t
  misc_feature (58)..(58): n is a, c, g, or t
  misc_feature (72)..(72): n is a, c, g, or t
  misc_feature (358)..(358): n is a, c, g, or t
  misc_feature (360)..(360): n is a, c, g, or t
atgtactcaataggtgaatggttaaacatactatggcacattcatacaatggnatncnacacggaaatgaanaggaacaagctattgatacatgagaaaacttacatggatctcaaggacattctgtttagtggaggcaaaagagtcaatctcaaaagttacatattgagtattaagtgcatactatatgattgcacttaataacaccctcaaaatgacaaaactatatagatggagaaaagattagtggattccaggaagataggggatatgaatacaaatggagagtacaaggaagtcctttgtggtgatggaactacacacaaccacacacacacacacacacacacacacacananacacacaaaaattctgaaaccataatactgtcaaatccccagtgagtctcacttctcaatgacaactatggataaccgtgctcatatatagcgagagtagggggaaaaaacgctttaatagagtggcagcagactaaagtgattatc

SEQ ID NO: 607966 - DNA, 879 bp, Homo sapiens
ttctgtaggtgaatcaagctctgtgaaaacaagggcgccacgtctgtatcgtaacatctcatgctagtattccgagcatgctaaataacaataggctcagcacatagagaaggcattcgcgtgaggcatgtagtgtgggtcgaactagaactggatgaccatatactctaggatacgcccatggatcaaggaagcgtgaatagaatactatgatgatttgtcatacgacagtctatatggggaacctactggctagaagttagaaatattgtagtatgaagtattgtgttgtgtgtgattgttagtggttaatttattatcctatgattgtgagaaaaagtcgttgatgcaatcggaagaatgattagcaagaatgtgaagtcactggagttatgttctctagagggatcgtgagatggagtgtgagtgagtgaacgggagagagtcaagttcactatgacgaactgcagttcgactacttactggagggtggatgatgaactttatgaatacactgaagtatataatgggaatcaattactatatggaggattggattaatgtaatttactgtatacttattccaagatggagtttaaggaaatacttgtatggacttaaatactagttcgagttggcaaaagaaaccggtaattgactgtactggtcgatatcaattcttgtgacaaacattctcattagtaacgtgattttcatcggtgatgaaagcttgcttcattcgcagattcaagtcggtttaggacaaagtgtcgcctaggatgttcagggactttagattatctttgaagaggaaaagagtgttttcagacaaggtggggggaacgtaacaggtgtgaggggaatgtggaaattgggacc

SEQ ID NO: 607967 - DNA, 167 bp, Homo sapiens
gacgagagaacggaaaggaaaggaagagaaggtctgaacttagcaaggtaaacttaaggtccacggttcctgaggtgactgaacgcacagagccgagaacgtcccggcttatggggtaccacgatcgggtgtattctcactgcacaaccgtcagcgtcggaatttca

SEQ ID NO: 607968 - DNA, 1058 bp, Homo sapiens
ggcttttagataggggattttgttaaaaactatcggggtcaatatattttttcgaaggctctacattcccctaaaatgggccatttttatataagggtaaccaatgcaaattgggacataattggggtgaggtttgatatacacacatattttgataatatcacaagaaaatgtgaggaataaaaaagggatagctctggttttgaaaaaagtttttggataaccgtgttgtgaaattaacgtttggggttttttgtgccttaacttctggtaaatggagttttttcccaccgcaattacactgatgtaaaattgtttttttgaattcagataagttctgttaaagccacggttgagataatccccctgtactctatttctgctgtggctcttaatatagaatggaatagtgtttacaggccctctaaaatagattataattgttgaaaaacacctttctcgagagataaccatacccaaagttttttccccaagaagatatttataaatcccaatttaataaatagtaaggtttaataccagatttcttataaataagtatatagtttattaaaggccaattttaatagtttagagacttaatttgtgaatagtagtggaatggtacccttaataagagaaaagtgagctgcccaaaaaatttttaatagcgtgagtctttataaattcttaaatgttgaagtttttaaatgagttaattttaaaatgttataaataagtttagtaaaattgtgcattctcccaagttatcactttttataattatgggacgcttttccagattgggctaataatttgcacttgtaaattttgtaagccacgtttattctaaaattccaaaaatactgtccagtaccaccagcggtgttaacaatctataattcccaatatttggaaaccagttttaaaattgtgactgccaaaactattgtgtgcgttttaccaccagtatggcgatcctaattgttgtctgtgaaattaaaggacatttgatagtttactgaatgtaaaatataatgcttggtatatgaatgata

SEQ ID NO: 607969 - DNA, 268 bp, Homo sapiens
  misc_feature (231)..(231): n is a, c, g, or t
cccccccctgctaaatctggctcaaaaattaaaagattattaaaatttgatgaattagtggtgatggttgcccccccttgtaaatataataaatgtccctgaattgtcccctttaaggtggttaaaatggcaaattttacatgtcttactgaaaccactgtactatttaatacaaaggacatagtataaaatttttaaagtgataggaaaatgcttagattaatattcccncttttccagtatatttttaataaaaacagttttggta

SEQ ID NO: 607970 - DNA, 697 bp, Homo sapiens
  misc_feature (269)..(269): n is a, c, g, or t
gcagttcggcggctcccgggggtctgtctcttgcttcaacagtgtgaggacgggaacacgatcctggggcactctctttccagccttccgactcggccttcctgatattcgctctgctcgtcttgctaagactactcggagaccaatcatgtcgtcggtccgatctactctgctttcatggaatcctggccaagaccacacagtgtatcgtaggttatctaccttcatatgtccaagctaaacagtgacgactccacagcattgcgtcnaggatagttgattgccaccggatcggtggaaggctagcccggatcgaaaccagccgtaggttgcccatgttgtaccatgcaagtgtctcacttcagacgctaccttcatcctcatgggacttcgtgattgtcgtaggcagcagatggactcgtgtgctctgagaagagctgtgcagccaatcgttcgttccagcagaatattgtgggctgaaggggaggaagcagcgaagggtctacgaagctgtctgcctttgaggtattgcacatctatgccgtcggcgggactgcgctctgcttccaaggtatcaatccatatgcacatcgcagcttgataatatcgacgtcgggtgtaagaaaacccgagacgagccatttgcaaaacgactgccaatgtggccctttgtgatgagaagcatgcttgaaaccag

SEQ ID NO: 607971 - DNA, 412 bp, Homo sapiens
ggtcgggggacacatccgcctgtccgtcgtccgtccgtctgtctgccctgcccgcctctggctgcgctcagtccttccagtccttcttgatggtgagattccactcccgggacaggttcgtcttgtcttgttgtcctctgtgatagcgtgacttgttgctttagttcccccgggccagcatacccttgtgtgcctcctccacagtggttcacgaactcgtactccttcgggcccgggcccatagcttcctaccatgtactccgtcttgtcaatcttcacgccttttctgtacctatgctggatgtacttcatgccgcacactatctctcggttaaaccgcaaagagattttatccggtactccataacctccttcaacacatacaactgcttcttcaagctctccacgtcgc

SEQ ID NO: 607972 - DNA, 313 bp, Homo sapiens
cgtcgaactaggcctcaaaaacatacgtaacgaaaaggcctagcgaggcaaattctgattgatttgaatctatatttttctttaaaaagtccagggttttatattgtgagtaaattaaatttacctttgagttgtttgttgctaaaaggtagtaaatgtaaaagaggactggttccttcagtagtgagtatttttcatagggcagctttatttatctccaggatgtttttgtggctggatttgattgaaatgggctttttttgatttttggtaatttccccccatattgaattaatgtggtccaaacaaggga

SEQ ID NO: 607973 - DNA, 417 bp, Homo sapiens
  misc_feature (93)..(93): n is a, c, g, or t
  misc_feature (97)..(97): n is a, c, g, or t
  misc_feature (99)..(100): n is a, c, g, or t
  misc_feature (300)..(300): n is a, c, g, or t
  misc_feature (400)..(400): n is a, c, g, or t
  misc_feature (417)..(417): n is a, c, g, or t
cttttaggtggtttttctgtgagtggcctctctccaagacagggaaggatatgggaggtgctctttggggagtgtgcctgacacacaggtttnttgntnnaaataaagataaatctgcatctggggctcccggaaatttttgaggataggtttagaatttccatggaggaagaagaacaggaactacaaattactgatttattgttactttatttctatctgcaagtcagtgagaccttggtgacatttgaactactcattcactaacaaactattagaaattcatgagttgtgactttngattgctctctttttttttttttttctcccgatagtcttttgactaaggactattctgtacctttggtatgggctgttagccaatgtgctgctcatattncaggcaggtattcggcn

SEQ ID NO: 607974 - DNA, 139 bp, Homo sapiens
taatagggtaagggatacatcgcataatctgtgtaagtgtttttcctgattaagctccttccgaactaacaactgcatggatcttccctgactttgataggccatctactactgcagctactatgaaacttcacagtga

SEQ ID NO: 607975 - DNA, 153 bp, Homo sapiens
gaccataataacgctttcacgatcatacgtcacgtgcatggctaaaggcatcgttgtcacataagatgggtcaatcccaacagcgactcccaatgggtcgtgtaaggcagcgcttttttgtcgatgtcacgattgtataggcatcattttaga

SEQ ID NO: 607976 - DNA, 220 bp, Homo sapiens
  misc_feature (177)..(177): n is a, c, g, or t
ttttattctaacattatgcaggggtgcgagatatgcctcccatgctgtaacacagatatttattacgatttatagggtcggtaagacagagttgtgggagggaggacccgggtggtaggactcccagcttggggattagtctggggggggtgtaataagattaggggtaacactccngtcttccagcacttcaactctgtagtcctgttgtaaggctttt

SEQ ID NO: 607977 - DNA, 519 bp, Homo sapiens
ccactccgttcgctgcgcgcacatgggcccggcgagaggctcggagtttgatcacacacagcgttccggcttccatgtccccagcgcctccatcgctcgactctgatattctatgaggttgtacccaactacgacgcacgctgtacaaacgacagacaagtgccataagactgatactaacgacaacaccaagtagaggacacaattaagctacaccacatagccgagagctacagacagctaacgacataggagaccacccattcagcaaggaaacaaacccatagcagaggaccgacaccacagtaagacaaaaacaacaacacacacatccaacacaagaccaacgaatccacgcgcacgaagcaagagaacaactgaaaacacacgggaaagagcaatacacacctgaccaacaaccacacacagacgacagcacgaccaagaaagatcaacagagaacaccaaacacacaagcaaccacaaaacagcgcacagcagaaaacagaaaacaaaaaa

SEQ ID NO: 607978 - DNA, 179 bp, Homo sapiens
tacccattcccagcgtccataggggtagcatcgcatggcatcagcatggcacacagcagcgctcaagggccatgggcatgcagcagggggcagggcattcatttatccaacacagcaggtcaacagtcagattcccaacacacatcacatggtagtcaccatccaacatcacatttcca

SEQ ID NO: 607979 - DNA, 1493 bp, Homo sapiens
  misc_feature (272)..(272): n is a, c, g, or t
  misc_feature (614)..(614): n is a, c, g, or t
ggtgctagtccgggagatagtcatcgtgtcagactactattccaccatgacgtcggtgtctattgtcaaagtatcttgaccaatgcactatgggcctggatggagtccttacagttgaaagcggtttgcagcggttggatagctgcatgcatggagaagaagcatgaaggtacccagtatcgaacacacgggggtacaaggatcactgggacctgtggtcgtgttaactcggacgtacgagtgctcaaacaacgacaacgcgtcccagtggnggctgtcgggctccggtctgaatgtcactgtacacctgatgagagggaggcgttcgagtatggacggtggttgactcgcagagtaggcacgtcgtacctaggaagcaaaggggtccgtcactccggagatcactttgtgtgttgggcagacctccacaaggactagggcgtagaatcctgctcgagaagcacacaagtgtcccttcgcattcaaccaggggatgcccacgacgtcttagtgttgcttgggataatcgatttagtctgagtcctactgagcaggtcaaacacagatacagaatgcattcgaccagacatgtacatgagccttagacgtacaanttcaggtgacggagatacacgtgaatagggatatatacagttgaaaccatggccggggaacgagggccacttcctggaaagacgctgccgagacgggtgccctgaggtggagggaccatcccacaccggtttcgcttggggtagtctaaagaaagcggaccacgacacttgggggtacagcgccaaggggaatgaaaggattttgggtcgcaatgcggcgttagcaccctagtacctcatcctccgttgagactggagaccaaattccaaaccgcaggtcccatacggcttggggaatgatggggtcccaaagggcctagggaggttcgcaaggacgccaatggggcttgagggaggctttgcagtggacgcccttgaagaaacaccgaaggggtggatgttagccgtaagcttcaaaccggccaatggtcggaaacgcgaaatggttacggcccagaaaaagggctcgctttggggaaggaacccgttcaattccgagggttgacatatccggaagaggggcttgggcaggcgtggggccaaaaaggttggggaggaattggatccgcctggcttgttgggtgggcgaggctttaaactgaaacttgcttttgcccaaaggggtttgaacttgcggtggacgcgcaaattgcttcaaccacttccatttggcttttcagaaaaaccatgttaacagaagggccgtgggacaagtacgtgtaagggggccagcccaaaaggggacactccgggggtccctgtgggaagggcacagccggaaaggaacacagcaatttaccgggcgcagggagaggcatctgccgggatttttactgtgtcccacaagaagacggcacctgggcaaggagcttttaaccc

SEQ ID NO: 607980 - DNA, 138 bp, Homo sapiens
catgtacgccgttttatttaaaccaaagcaagcctggtttatattaatggccagtaacggtaatggttgatttacccatgtccagaccattgatttccaggtcaccaatggatgcattagctgctgaacccaagtgaa

SEQ ID NO: 607981 - DNA, 281 bp, Homo sapiens
  misc_feature (36)..(36): n is a, c, g, or t
  misc_feature (57)..(57): n is a, c, g, or t
  misc_feature (98)..(98): n is a, c, g, or t
  misc_feature (130)..(130): n is a, c, g, or t
  misc_feature (132)..(132): n is a, c, g, or t
  misc_feature (150)..(150): n is a, c, g, or t
actactgtgcatatccagccaggcccttactccaancacctatgagctttggcgtgntgaattttgtgtattggtacagcgagcggactgctcaacancctgggcgcggcgccagcgccttatctcaaangncgtagctgctcacgaatnacgcttgtgtgggcgcgggcttgcccgcgattggcattgttgtctgtcaaacgcctattattgcaacagttagttggggttccgacgtctcgaacttcgtaactcgtcgttcatagcctgtttcctggtgt

SEQ ID NO: 607982 - DNA, 960 bp, Homo sapiens
gggatgcacccggcaggcttggcggcggcgggtgcggggatcgccccggtcctggccctctgaagccggagagatccgcatgctgtcccaaggcctgggacagtggcacgatgcaccgcgaccgagacttttcggatgacactagagttcaggccagagccgggggctatggggcccagcgggctcctggtggcctgaggttatcctgcaggcctgctcccagcggcccgcatggcagctcttcctggtctgtacccggtgtccaacatggccatggcctatggggagcagcctgggccgcgcagggcgaggagctggtggataagaacatcgagccgctttcatcgccgctagtcacgcaagactcgaagtagttactgttgctgtggacaccatgtatgtgggcagaaagctgggacctgcgtgttcttcccctacctacaccaggactgggaagtgcagtaccaacaggacaccccggtggccccccgctttgacgtcaatgccccggacctctacattccagcaatggctttcatcacctacgttttggtggctggtcttgcgctggggacccaggataggttctccccagacctcctggggctgcaagcgagctcagccctggcctggctgaccctggaggtgctggtcatcctgctcagactctatctggtcactgtcaacaacgagctcaccatcatcgagctggtggcttcttgggctacaaatatgtcggggatgattggcggggtcctcatggggctggtcttcgggacagatggtatactggtgctgggccggctgatgcgatggcaaccatggggtcatgaatccggaagctgggttaagaacttgcgaagcgcaactgaaggggtcccaagcgcagggccgaaacagttgcattatcctgacaaagcgggagaggggcactatgccggtcgggacactaacaggcgg

SEQ ID NO: 607983 - DNA, 363 bp, Homo sapiens
gtgaattgacgaggtccgcctgaatcacgggtccgctctaagatccctaacattacgcttaggctaaccattagcaatccgttcgtttttaccatggcatatatctctcatcgctttggccccttcgaagatggccccatcggtcatcatcttcccatatcgtagtcgcttattttcacaactccttcgtgccccattttaccgcctttacatcctactcccatcatctactccggacccgtcaattcttgccgttaacagctgtatcacctactctcaggcggccgcacgtgctagctacatgtgggcccttaacgcccatatgagcgacgataatcttaactcaggccgacgaaaatcttc

SEQ ID NO: 607984 - DNA, 103 bp, Homo sapiens
ccttgtcctcgttttgttgtatattttgaaggggaaggttacgtcatgtcctggagtatatcatgtaacattctacaattgtgccagcgagacaccgtgtaac

SEQ ID NO: 607985 - DNA, 755 bp, Homo sapiens
  misc_feature (76)..(76): n is a, c, g, or t
  misc_feature (85)..(85): n is a, c, g, or t
  misc_feature (130)..(130): n is a, c, g, or t
  misc_feature (138)..(138): n is a, c, g, or t
ataaaaatactaatgaccatcacaactcattaaaagcataaaatgtgcaatgatttaaactacatgttctttctangaatctgcntagaaatgtagacacatttgataaatgctatttaaagtctgagtnctttggtnaatgattcatctataggttgaagggattacttttatctgccttcatagtgagaattagatttctgttctttataaagcagggaatacagattgtgcatggagtaaaagcattcaatccttaataatgatggtagctgtgttgcagaaaagaaagcctgtcagagtaacgtgttcagttttacatcataatcagagtgtgtccatctctgttgaaggcagaattaaaaacgccttcaacatttttaaaataatagatgaaaaacatctcaaagtcacttttaaaatttgaattgacgattccacataacaggaaaaggaccaggaacatcttaaatacttcacgatggaagtgatgttttaagtgtaatttcatcaaggagaagtttttccagaaagtcttttgacttcagtaagaagcttatttactctggtaaatagtttctagtaagatgagaaagacttgattttttaaaaaacaattaaaaatttacattgtttaatctaatgttgtgatttcgaaagtactacctttgcccttatagttacgcatgtgtatttatatgtattttcttggttcattcaaacgccaataaaatactttactatccaggcaaaaa

SEQ ID NO: 607986 - DNA, 1290 bp, Homo sapiens
  misc_feature (1289)..(1289): n is a, c, g, or t
cctagcatgacatatgaacgctgaaacatgcaatcagactgatcgcaggagcataacacctcttttcgaacagttgtgcgcgtcaactgaccaggtggaggcattcgagactcaatgtggaaagcaagtattcttataagctgatctagcattagaatagttcacatggtgcatcagctgcacacaaaaatcctatgctgcaatacattaaacataactaagcaagtatcattcatttctagcaaacagatgtttgtcttcaacaatacttcctttttcattattgcgttttaccacaaagcattcatccttttcatctctacaaataagtcaatcaatctttccagcttcattcaaatgcatcagcataatgcctttttggttttgtgtggtattcaactaatacatggtttaaagtcacagccgtctgaatatattttatcttggtagtacattttctcccttaggaatatacatagtctttgtttaccttagttccaattctctcgggagagtgacccctacatatgtcctaatagctgatgtgtgcaacctttgatgtgttgatgactcactcataaaggtttcagtctactgtcatcgtcctttccacttacttctaagccatttcacgagctaataagaagtcataccttattaaataaaccgcaacccttttaacaagcgcaacacctctctatacacgccacgtcgtcatcgtcccacacctgagcaacacactactactctctcacaaccaactcgaactgcagccaagtaactaacactaacaaatccgtctcagagccgagcggacagacagtcgccgcacacccgctgacacccccttcacccctccccgagaacaaacactgcacgaagcgcaacacgtcacagagaaagacaccacaggcacaggagacacacgcagtacactcgccccaggagtacgaacaccacacccagagacaaactcagacgatcacacccactccccttgcgcacacaacaccaccagacgtcgatgcagccatccacatagctcctactcacactccagaaccaccagacaccaacccatcactaacaacacaaacccagcacccacacatctcttcacccagcctcccccaactactaccccccaaccacccccacccatactacacacctaccacaacacactccacgctcacacatcacccccactgcacaacctcctacccactcgactccagcctgtccctccaacccataccacacttctacgtccttaacttttcaaaaang

SEQ ID NO: 607987 - DNA, 759 bp, Homo sapiens
  misc_feature (76)..(76): n is a, c, g, or t
  misc_feature (85)..(85): n is a, c, g, or t
  misc_feature (130)..(130): n is a, c, g, or t
  misc_feature (138)..(138): n is a, c, g, or t
ataaaaatactaatgaccatcacaactcattaaaagcataaaatgtgcaatgatttaaactacatgttctttctangaatctgcntagaaatgtagacacatttgataaatgctatttaaagtctgagtnctttggtnaatgattcatctataggttgaagggattacttttatctgccttcatagtgagaattagatttctgttctttataaagcagggaatacagattgtgcatggagtaaaagcattcaatccttaataatgatggtagctgtgttgcagaaaagaaagcctgtcagagtaacgtgttcagttttacatcataatcagagtgtgtccatctctgttgaaggcagaattaaaaacgccttcaacatttttaaaataatagatgaaaaacatctcaaagtcacttttaaaatttgaattgacgattccacataacaggaaaaggaccaggaacatcttaaatacttcacgatggaagtgatgttttaagtgtaatttcatcaaggagaagtttttccagaaagtcttttgacttcagtaagaagcttatttactctggtaaatagtttctagtaagatgagaaagacttgattttttaaaaaacaattaaaaatttacattgtttaatctcccttcgccgtccgtcacatgtccctgcccgtggtgctagcgggctcttggtgctcagtggttgggctttggggtggtccgcaggccgggggaccgggcgccactcacaaaaccgctc

SEQ ID NO: 607988 - DNA, 637 bp, Homo sapiens
  misc_feature (137)..(137): n is a, c, g, or t
tggagaacggtttctcgctatattgcccaggcaggtctcgaactcctgggctcaagctatcctcccgcctcttagcctccctgagagctgggattacaggcgtgagccaccgagcccggcccccttctgtcgactantcctaccccttcctttgccccattctttctccacttacctcctctttttcttcctcttcctttctcctctcctacatctactccctcttcacctctgatactctactctctcctctctccctcctcctccccttcctccctctcctctatttctttttatctccctcctccttcttatccccctctcctccctccccttctcctctactctctactcctttctcaatgtatctcctctcccctctctctcttctcccctttatcattcccctcctctcctttcacccctcaccttcttcactcccacttccctcctatccctcctcagctccctctctcctcctctcttctcctctcttctctcattatctatttccacctcctacctctcctcacgatctcactctccttccccttcctctctaccccttcctcttcgccgttccacttcacctcccttccttttcccctccctcagctctcccttacctactcttccg

SEQ ID NO: 607989 - DNA, 202 bp, Homo sapiens
ctctgaggatcccggtttttattattactcaaatcagcctccctgaaaatttggaggctagggttttttaaaggtagtttggcgggcagggggctcgggaagcgggaatgctgattggttgggtcggagatgaaatcataaggagttgaagctatcctcttgcactgagttggttcctgggtgggggccagaagaccagatg

SEQ ID NO: 607990 - DNA, 391 bp, Homo sapiens
ggtctgcctgccaccatgcccttgtggacctggttctcttctaaccccttgcaatagcccccattcctggtgtctatagagatcctgtgggcaagtagtttggaaccagagaacagcctgcctgcttatgacagttatcccagtggagcgtgagaaaatccctgggtctagaatgggcaacttggagaggaccctgagaggagacggtgctgggctgtgctgaccccacagggctctcgagaacagattctcccctccagtctgtgccctgtggttggtgggccccatccctcaggactgcacagaggatgcatggctccgtggtaccgtcgggctccacccttacacactattcctggctctgcatgtgaaccacgctggaaccgagcct

SEQ ID NO: 607991 - DNA, 283 bp, Homo sapiens
ctcatacatgtccatggtactggtacaaaaatagggatatagaccaatggcacagaatagagaacccagaacataaacccaattacttacagccaactgatctttgataaatgcaaacactaaatataaagagtggggaaaggacaccctatatcaacatactagtactggggataattgggcaagcctacatacaggcagaatgaaactaggatcctcaatactctcacctatatacaaccaatcaactcaaatgtagaataaaggacattaaaaccgtaag

SEQ ID NO: 607992 - DNA, 923 bp, Homo sapiens
  misc_feature (3)..(3): n is a, c, g, or t
  misc_feature (150)..(150): n is a, c, g, or t
  misc_feature (187)..(187): n is a, c, g, or t
  misc_feature (216)..(216): n is a, c, g, or t
  misc_feature (232)..(232): n is a, c, g, or t
  misc_feature (242)..(242): n is a, c, g, or t
  misc_feature (258)..(258): n is a, c, g, or t
  misc_feature (271)..(271): n is a, c, g, or t
  misc_feature (273)..(273): n is a, c, g, or t
  misc_feature (276)..(276): n is a, c, g, or t
  misc_feature (280)..(280): n is a, c, g, or t
  misc_feature (344)..(345): n is a, c, g, or t
  misc_feature (484)..(484): n is a, c, g, or t
  misc_feature (554)..(554): n is a, c, g, or t
  misc_feature (805)..(805): n is a, c, g, or t
tgntgcttacacccagtagtcccagctgctggggaggctaaggcacgagaatcgctcgaacccagaaggcagaggttgcagtgagctgagatcgcgccactgcactccagcctgggcaacagtgagagactcggtcttggggggaaaacngaaagtcctgttgtaaatgattttttactgttttaangcatttattttaaaaaggtgggggaaaangtgtgtttccccgcangtcatactangctatttgggtgtaantcgcaaaaccctnangtngctngttgataatcttttcccactctatatttcttatttcatgttcatccaccactcctaccttgtannaatcaacagcaacagtttaaagggcattttttcatacttttcttcttgctcagtggaatgcatgtaaacatacatacgtgtgagtcagtgagtctgctataacagagaaccaaaacacagtagcttgacctacatgctngtttatttctctattgtctaatagttcagaggtagacagttaggagggtagaacatgtttgttgtggctnctatctctgggtccaaggtggatgctatgggctgaattatgtatcccacaaatgcatatgttgaaactctaacccccgatatgattgtatttggagataaagcttttaggaggtaattaaggttaattgaggtcataagagtagagccttattccacacctcttctaataggcatccttattagaagaggaagagaaagagatttctccatccatgtgcatgcactgaggaatggtcatgggaggacactntgaaggcagctgtgtccaagccaggaagagagcccccaccagagaccaaaccctgctggaccttgaacttggactttccagcctccagaactgtgagaaaataaatttctgtgtttta

SEQ ID NO: 607993 - DNA, 251 bp, Homo sapiens
  misc_feature (81)..(81): n is a, c, g, or t
  misc_feature (204)..(204): n is a, c, g, or t
actatagggcgaatggcgagtcgcatgctccggcgcatggggcggggatcgattagctaaatgttatttcattggtcagtncagaactaggattggcattagattgttaatctcttgccacaagataggaaaatggggcagatgaggagaaaaaagctttaatgggagacgacatttggactcaatcactagtgaattcgcggncggctgcaggtcgaccatattggagagctccccacgcgttggatgca

SEQ ID NO: 607994 - DNA, 973 bp, Homo sapiens
  misc_feature (413)..(413): n is a, c, g, or t
aggtcccgttgcaggagtttactgtcctcgtccctgccgattgcgacgtcgcccgataggcgattgccttgcgcgtccggtccgctgtccggcgtccaggttgtggacggtgagtgccgcctgcgacagatcgcgcagcaggtcgtacgaccgctcggtagccagtgctgttatcgctgtcggctctgcttctcggcgcgacctgacggatggcccattattgttccgtcggcgtgatagactgctgactcggtaagggatggtgaaccctaaggcggtaagatgcgcgcgcgagtatattgctggccgacgtcccattgtcactgttctctcccgcgtgctgacaggaggtgcgtcagcgtggaggtgatagacttcgggaagtcagaggcaaagacaccgcgagcagctantggcacgtgtctgccatgagatgattcacgtacacggcatagacgtgggtcaattcgagatcggtcaccgaactctctattcgcgcatagcaagtggcaacgtcgagccagtcgtagaggcatttccacgtgcacgcaagtctcgcacgcactaaggcaacaaatgttctattgaatttgcatgagacctagcatatgagcataatgcttcaagtgatcttcttaggaaacgacaaatgaactctattccgacaggaagtgggactttgactagtactgtctgttactagaaccattacagaggaacctagagccccggagcatgatagagattccggatagtgtcacaagtgaccgttgtttcgcatcctgagtcactctacgttggcgacagaactagagtgtatgaccaggtggatgtcaacgcatctgaatgccactagagactggagatctggcaacctgttcacggttggtcaaatgtggacatccaggacaaccaccgaggaggccaccctgggggcgtacctcatctgtgagctctggcagttgtatcagca

SEQ ID NO: 607995 - DNA, 1156 bp, Homo sapiens
tcactagactggggcgttgtcggctctcctcgacccaccgtccgcccccccgctcgtatgcttttttggttgtggtgtagtggtggttggtggggtgggagggggaacaggcggcggtggtggtgtgctctggcccaacataggttggtggcgcgcgtgtcggtggttggtgtggtggttggctcatgggtcgatggcgccatccgcacggtgtatggtgtgtgttggcggcgccgtgtggctgcttggcgcgcacgcagcacaggcacgcgggcggtgggttgtagtctatcaaggagcgtgggggtgccacgacctctgacgcactccgcgcgcgctggggtcgtcgcttccctctcacatagagtgttagcgagagtggggagagacggtgcggggacgaggacgagtgtctcctcgcgccttgcgttttcttaggtggacgaagattctgctctcgacactatagggtgtatgggtctagatatttgtgagagtgtgtgttgatttggggggccgcgccgccggcccacgcctcgcgttcgtggttactccgcgcggcgagggagcaccctcctcttctttttgtgtcgtctcctctcgtctctataggagggagactcgctctcaccgcgcgcgggcgagagagagagagagtcccgtgcggtgccggctccccctgcgcgcgaaatgagagaagagcgagcggcgctcgcgtgtggtgggggtggttttggctcccctcacgctctcttgttgtgttttcgtggtgttgtactggagaaagaatttgttttctgcgccaccgctggttgttgtgtctgtggtcggcgcccacgccccacagcatttttttttttctccgctgagcaagagagagaggtcgtctggcgggcgcgacgacaatctttttgatctgcgggtagtgaatagaagcaccaacacgtcctctccctagttctattttatgcacgccgcgcgcgcggcattcgtacttatacaacaagagaggggtgctccaccacaagaatatatttattaggacgcgcgtagatagagtcgtagatgtgtttctttctttctttgtgtgccccccccccgcccggccctttttgttcccccccccggggggtttaatatttttttttttttttta

SEQ ID NO: 607996 - DNA, 425 bp, Homo sapiens
  misc_feature (214)..(214): n is a, c, g, or t
cggctcaggcactggtcatttcagtgtcagagagctgctcacccaaccctgcccgtccggggattggctctgcggggctgccccccaattggctccagctgagtttgggggtctgtgatggccgcgggcagagcagcatgagtgtgacttcgtctcgcttccctccagctgccatcgtgccttgggcctctatttccgcgtgtctttagctctnggcgatgccttggatccagcagcgtgacagttctggcgtgcggctagaggaccggggacgtgtgggcatgggagggcctcactgtacgtagggtgccatttggaactcgacaggtgcatagaaactgaggcgacaggcatggggcccatcgccccaggggaagtggacgtccttggtccagcggtaggggcaggggtgggcaggccgtgca

SEQ ID NO: 607997 - DNA, 230 bp, Homo sapiens
caaaaaagtttggggccccccccccaattttttttggtttttatttttgaacctttttttaatggttgggagagaaaactttttcccaaaattccccaaatcgggggtcccattttttggggtcccccattttttttaaaagcagaggggcctgttttaaaaaggccaaatttttttgggtttttttcgggggaacagggaaaaaatataaagttgggggtccaccttta

SEQ ID NO: 607998 - DNA, 127 bp, Homo sapiens
catgaggccgaggtacaaggatgctcgagcccgagaggtcaagccttgaggccaaggatggaagttgcaatgagctgagattgagccactgcactccagcctgagtgacagagcaagtccctatctc

SEQ ID NO: 607999 - DNA, 112 bp, Homo sapiens
gcgatctagcggatccttaaacacgcaatcttcatgatctcacattctttaacagctttctcgcagattaaagtgcataaccggggacagtttttttccccatcacgaatgg

SEQ ID NO: 608000 - DNA, 151 bp, Homo sapiens
aaagaatcatgaagacgacaatgatccagtggtctcatttcagctgataactatcgaagaagggaccctgaagatggaccctgaatcctggaaaccctcctaactgttaccgtacatatgcgaccccggctcgttttctgccagaaagggg

SEQ ID NO: 608001 - DNA, 333 bp, Homo sapiens
ggaagatcaaggtccctgagaggagatctagtctcttctccctgacctattaaggaatcagagatcatagatttcttcctgggggcctctctcaaagatgaggtatggaagattatagtccgagttgacagaagtcagagtcgcgtgccggccagacgcaccgaggttcaaggtcgatttgtttgcatatcgggtgactaacaagataggctcgacagttctggatctgtggttgttaaatgttgcatccaagatggcaggtgggctaccaggccatccgatggtggccatcaatccatggccgaagctcatcacaatcgatctccctgtgcg

SEQ ID NO: 608002 - DNA, 390 bp, Homo sapiens
tactgtgctataatcatgaaggactgtgctcacttacaaggaaggatgtgctccctttctggaggttctttgccagctagagtgcacccacatttcttggctcatggtccccttcttccatctgctaaggcagttatgttgcatctctctgatcattctttcctagtcacatctccatctcactctttctgccatcctctttcacttttaagaacgcttgtgatgacactgggcctgcctggataatccaggctaatcttcctattttaaggtctgctgatcaaagccttaactctatctacaaccttaatttcgcttggccatgtaacaacatattcacaggttctgggaattaggatttggacattttgggtggggggcattattctg

SEQ ID NO: 608003 - DNA, 148 bp, Homo sapiens
gccaccaccacgggcgcctcttccagacaagacacaggagagcctgtggagattcctacctacatttcttctaccaacccagatgcttgcaagcgagggtccaggcacaattcgttaaaccaggctttgccctggatttccaccccat

SEQ ID NO: 608004 - DNA, 297 bp, Homo sapiens
gatgatttgatatatgtatacattctgaaacagtaaccacaatcaagttaactaacacatctgtcacctcacatgtttaccttttctgtgtgtgtggtgagaacaactgatagactcttagtaaattgcaagcacacaatacagtatcattagctacagtcaccatgctatcctttgcaccctcagaatatattcatcttatgaagtgttcgtactctgactaatacctccccagttacctaccccttcgccgccaggcaaccatcatctactctctgcttctatgagttcaacttt

SEQ ID NO: 608005 - DNA, 329 bp, Homo sapiens
  misc_feature (103)..(103): n is a, c, g, or t
  misc_feature (128)..(128): n is a, c, g, or t
cgaaagatgggtactcccggcaaaagtgcaatctttatttttactgtgatttgatttgataattatagtattgaaagtgaatgaccctattcattatgcttgnaattataatcccattataacttatnccgtttctttcctttccccccttggtttcgcttaattttcctgttcttcccttcatccccaacatttttcatttttttatcctgcaccccccttaaatttatacatacacacacatatatatatatcacacaagaggccttatttgttttatgcgggagacatcagaactttttgtttttatttcctttctacgtcttttc

SEQ ID NO: 608006 - DNA, 111 bp, Homo sapiens
  misc_feature (32)..(32): n is a, c, g, or t
ggaccctcacaagacctgcgctgcaaaccagntagcctacaccttatcccatactagttattatcgaaaccatcagcctactcattcaaccaatagccctggccgctgcaa

SEQ ID NO: 608007 - DNA, 999 bp, Homo sapiens
  misc_feature (61)..(61): n is a, c, g, or t
agtgattatgaataaatttctggggggaatgtgttgtaaaattatgtatattgttgatgcncccaccaaagtgtctcgtattgctgccgcgtcatattattaccagcgccgttgccaaggaatgtttgggttgcgcccgccctcgccccacctcattatcggctgctaagtctttataagtgaggggctttccacattagatagggacaacgaaacttcgtgctcaacagggggctaggaagactatggtcgtctgcaccaatataggtcccatgctgactccccaaggttgtttaatgcacccccgataatttttcttgtggggggaaaacaaaatacccaccagatggggcggagcgccaaaccacccggtggtttaaaatcaattggtggccgcagatggcaggacccccccggatgggcgtcacgaaaataccacacaagattttcgcgcgcgcaaatattcacccccccaaagttcgttttccctcgagaggatacatcccttgtgggttatatatatgggagctcttccagatgagcgatgaatgtttgtgtaataacctctctttttttgtcatatctcgctggtacatattatgtcttgagctttcccactctcctctcttatatataacacacaaagagatcgttttttctttttgtgtgtgagcaccacatctgacaagctgttcttactcagcacatgtgctcgttttataaagagcggatgtcttttttaagaaagacattaatttttcaaattatgtgtttgagaagacgcactaagtttttgagagatgtggcgcccccattttgttgcgaatggggccataatacaacaattccccgtaagttctctcccgggcaccaacccccctttttttatttttgtttttttttttaaaaagaagcccaaaaagcagggccgctattttttaaccccggggggtaaatttaaaaaaaaagaaaaatggaaataaaccttaaaccctttta

SEQ ID NO: 608008 - DNA, 159 bp, Homo sapiens
cccaaattttttgggccctttaacccgggcaaggggccgggggccaccctttagcccttcccccccggggttccccttgtttcccttttgggggggggggccccccccccccccccccttttttttttaattttttccctcccgggggtttccccttta

SEQ ID NO: 608009 - DNA, 160 bp, Homo sapiens
acctagtactatcgtgattccgctgacataactcatgacatgaagcagtcccgagattccctttgcaagctgggccgttatattcctccggcctccattcttggagtaggctcctttgccacaccccttttcaccttaagcggatcagcgggtaccgagc

SEQ ID NO: 608010 - DNA, 1406 bp, Homo sapiens
  misc_feature (116)..(116): n is a, c, g, or t
  misc_feature (542)..(542): n is a, c, g, or t
tccggtcgtctaagggtcctgtctggatgaggaggcatcatggtcagacactagcaggcatgtcccgcctgatctcatccttgagtacatcggtctattgaaaagattatagaganttgggtatcagattagtatctctagtgacaatattattaagcttcggactaagggattcagcatagatggattaactaaggcgtctaagggcggatgctgaggatacggtatgacgtgggatgatatttgtggaagatatggcttgtcacacggagtatcgacacgtaagggagacacagctagtgtggaagcaaccctgattaaccgcaacgctgaggaacactctgcacgtaggacactggggaggacattaccgtatcacctagagggcgctatccacctgagacaatcctctagtgtgcaccacgagcatggcgagtcccgcaaagcaacttgggaggagcgcattttgcggtattgccaagtctgggccttgttaatacgaagcacgcttcagcgccacgcacggtaagctcaagtatacnaacagccagcagacgatgagacgcaacttaacttccgcgtcacgaacgtcacgtggacccttgttagcaccacttctcgacacggctccgcctgaaaattaaaagatacggcaacctttggaagaacggcacacgggcgtctccttgtcgagcttaatcttgtagccggcgaaactgcgcgaaccggaacccacccgtcagttctcggacgcccctcgaggggctacgcctgaccaccgcgagctctctgcgcacagcctagagcccttccaccttcggcacagcagcaaagcagcgttcagcatgtggaggacacaaggactcagccggtgggatactagaactcccgcgcatcagatgcaacgcaccccgtctctggcatccaaattgtcttaacttcccgttggactggacaacactttctcacatttaactatcgccccattaaagtcgcttaccgtttgaggtaccaaacagacctcccacagaggttatcgcccacggcagttagtggcgccacagaagccaacatccagacgctttatcacccctctacccgctactcgtacccttcacgcaacaccgcgacctttcccaagcactcacgggacctgaaggctacaacctcccttatggctcatcacctactatcaaccagacgcgcggaacacactctcggcagccccattcccggcactcttcccgccaaacacgtcacaaccctttcttgcaaacagcaacgctctcgtcagcggcaactctctcttgtgggcaacacacaattccacaggagagcgggacaatctaccacaacgacaaagagaaaagaggcacctagggaccacacacccctcttcacatcaa

SEQ ID NO: 608011 - DNA, 660 bp, Homo sapiens
ttccaagattattccgcacgtattaagtttcgctgctgcagaagcctgccagtgcgatcaaggactggcaaccttcaggcgggctggattgtcctgttattgctgcttgtcggtttcttctttctggagccgcagggaatcctggtcagtgcgatagcggccgctggcgcagcagtgctgtttgtagtggcgaaaagaggtcattctatcaacaccggaaaagtcctgcgcggtgcgccatggcagatcgttattttctcactgggcatgtacataccgcaaccggcagcaatacggcgtttacgcgaacctttgatgatttctggcttagcgcgctctttcatcgtcatcgagttgatgatggcttccatacgcaccagcactttatcgtccatctgtgacttgacgttatccgggatctgcaccatgcccggcagcttgcccatcagactagccatgccgcccatatttttcatctggcgcagctgctcaagaaaaaaagaaacccttttgaaaagcattaataattggtgaagctgggtggggaacaaatgcgtattcatatataatctctcaatggttatggatgctttaaagtttacttaatcacattttgtttgggaactattggttgaaataaaagaagcttatatttgagcc

SEQ ID NO: 608012 - DNA, 458 bp, Homo sapiens
  misc_feature (7)..(7): n is a, c, g, or t
  misc_feature (157)..(157): n is a, c, g, or t
  misc_feature (172)..(172): n is a, c, g, or t
  misc_feature (244)..(244): n is a, c, g, or t
  misc_feature (275)..(275): n is a, c, g, or t
  misc_feature (286)..(286): n is a, c, g, or t
  misc_feature (369)..(369): n is a, c, g, or t
  misc_feature (457)..(457): n is a, c, g, or t
tttttangacagtgatggagtctcattttgttgcccaggctggagtgcagtgacgcaatctcagctcactgagacctccatctcccaggttcaagtgatcctcctgcttcagcctcctgagtagctgggattacaggtctgcactatgaggcccagntaatttttgtatttntagtagacacagagttttgctatgaggctggtctcgaactcatgacctcaagccatccgctggccttggctncccaaagcgctgggattgtaggcgtgacacncggtgactggnccaaacatttaacaaagaaaaacagtgtatcatctttggagagactaatggaaaagtcaataaaacaaatctgggtagaagtnttaaattcacagaggcagaattgtatttttacctttcatttaaaaggaaaaaaaaagggttcttagtgtttcagacagtagctggggna

SEQ ID NO: 608013 - DNA, 494 bp, Homo sapiens
gtcatcaggtgaattgcagtggcatgattatatttctataacccaattctttggctcatgtgatgcttctgcctcagcctcccaatgtagctgtgacttagctgggctactgggggacggctgagtgtgagaggatctattctatctaagacatgcaccaccaccatgccgtggcaaatctttttctttaatttttaaaagagatgggggatcttgctatgtaacccaagcttgttcttcaagtggtgggcctctattgattctcttgcctcagcctctcaagtagctgggataacagacacaagccattctgctccctatataaagattgctcggtggaatcccttatggttttcggtctgccatcttaagaaaagatagggtcttccatacctttttttcacggaccaaaaggtatcttgaaatgcttcatggatggataggaaaatatgccgatccaatcttttcaattctcttgaatctaacagtcgcgg

SEQ ID NO: 608014 - DNA, 559 bp, Homo sapiens
  misc_feature (1)..(1): n is a, c, g, or t
  misc_feature (31)..(31): n is a, c, g, or t
  misc_feature (49)..(49): n is a, c, g, or t
  misc_feature (112)..(112): n is a, c, g, or t
ntttgagggaccatccctcaaattattaganccttttatgccaaacccncagcaaccattgaacttgaatggccaaaagctggaaccattacccttgaaaaccggcatgagncaaggatgtcctgtcttaccacttcaattcaacatagtactggaagtccttaccagagcagtcatgcaagagagagaaataaagggcacccatacaggaagagaggaagtcttctctgtttgcagatgacatgattgtatatctagaaaacccaatagtctcagccgggcacggtggctcacgcctgtaatcccagcactttgggaggccgaggtgggcggatcatgaagtcaggagatcaagaccatcctggctaacatggtgaaaccccatctctactaaaaatacaaaaaattagccgggcgtggtggtgggtgcctatagtcccagctacttgggaagctgaggcaggagaatggcatgaatccaggaggcggagcttgcagtgaactgagattgcgccactgcactcaagcctgggtgacagagcgagactccatctcaaag

SEQ ID NO: 608015 - DNA, 139 bp, Homo sapiens
  misc_feature (135)..(135): n is a, c, g, or t
tttcatgagcagcagagtcgagtgtagagtgcaggatccagagcggggataggctgggcgagttggcgcctgcagctgcgcgctggttacttggtgacgtgcagagttctctctgggcgggctgcacgctcatcnttgg

SEQ ID NO: 608016 - DNA, 795 bp, Homo sapiens
gccagcgctttccgagcccggttgcacctcggcgatccccgagtcccttctttatggcgtcgctcctgtgctgtgggccgaagctggccgcctgtcggcatcggtccatcagtgcctggggatatgatcatgttgataatgctcggaatgatttttcaactatccattccgctgatgtatggattgaggtacgttccctatcagcggtagcaaagatttctgatgaatggagcccgcgagaacgatatagcagagccttatagcggagacagagtcaggcgtactgagctgtatatcagtcagtgtgcagcgaccgtattagccgtcgctcctcgggacggcttctctttgtcttgccaaggttcaggctacaagtataagcggcaaggaactacattgggtgtcgctagtgtgccccgggctgcgttgtccccccgctccagctcctctcctgctatgttgacaagactacgcgctgcatcctgtgttacacccaggtcgctgtctcgcatcccctttgcgcggcgtcgccatcttggcgcgggactagggtttgcccagggctgagacgacgtgaatcgccgttctcgccagtactctggcatcacggaccccgtgggacgacgggctgcaggctggggtggcctgttccagtctcgtcacaactctatgcgcgtgtgatcccaggtattctcaataaaaggagaatcatgcatctcgttgacaatcagaacgagcgaaaagaggacaaaaatggcactatcagagagaaacatatcagagagggcaagaaga

SEQ ID NO: 608017 - DNA, 486 bp, Homo sapiens
tgggcttgacgttcgcacacttctaaaagctgtcgtccgaacactggcgccacattcaggaaggccctgcgctctttgcaccggtcgactttatgctcgtatgcggctatgcctgcgtgataagcgttttccgggatatatcaaactatgctattccaggatgcatgccactgacgagtggtgccacgacgtcggcaaggcacaaggcgagcgctgacccatgcctcctggtgcctcgagacggaagatgacacgcaagctggcggctctgcctgaagctctccacatctcggggactccgtacgaggacaacgccgataactcaacgcggacccgagatcagcagccgcatcctggttcccgctctgcccaccggatcgcgcctccagcagacaaggtaagcggcagtccggaagaagctggcacagagcacgcagaaccgcgcttgccacctcccccatcaccgtcggggacactgggcatcgt

SEQ ID NO: 608018 - DNA, 789 bp, Homo sapiens
  misc_feature (3)..(3): n is a, c, g, or t
  misc_feature (430)..(430): n is a, c, g, or t
  misc_feature (505)..(505): n is a, c, g, or t
  misc_feature (667)..(667): n is a, c, g, or t
  misc_feature (699)..(699): n is a, c, g, or t
  misc_feature (757)..(757): n is a, c, g, or t
gcnagagcgaggggagcagagggaagagcgggggcgaggaagccggaacgagggaagccggaaagggcgagggaagccggaacgaggcccggcagggggggcaggagcggccaggaggcgccggcgcgggggggacggcggcccggcgacccaggggcgcgggggggggagggaccaacagagacagaagcggcggcccggggcagcagggcaggggcagaaagacgggagggcacgggggggcgccagcgcggaggaggggggcgggggggaacggggggaaaagacgcccggggcacacagaaacaggaagacacacaaagagagacacaagggggaggagaggggggggggcaccaggggggccaggcggggcgggaacgacggaccgccggggagccaccaggccggggcaagcccggcgccgganccaggcggggggaggcaggggaagcggagggggcaggggggcccgcgggaagggaagacggggggggggggaggnacggaagggggaacaaagaagcgagggcaaaggggcagaaagcagcccggcgagagcggagaggcgccgagggaggaggggcgggcagaaggaaaaggagcggggcagggcagaggaggggcggcggagccgaggaggagagcgcgaggaacgcgggcaggnacagaagcaaaggaaagcgggacaggacaganagggagacgaagcgggcaggacacggaggggaacgggacacaagcaggcaagcggganggggggcgcgcgggggcgaaaggggggaaaac

SEQ ID NO: 608019 - DNA, 1189 bp, Homo sapiens
  misc_feature (437)..(437): n is a, c, g, or t
ttcagtgtttgcccctccttgccgggccactgccccctgtgtcccctatggttcgccgggccaagtcctcttcgggtgttatgcctgcccggggtgggtccatgttcaccacggtgccactcgtcccacttgggcctctttcacgggtcccccttgggtcccgtgttgtcgcctacctaagcccgggttgtgttccccgtcccgcatttgtccccggtttttctgttcgttcctaaaacgtttcggtctccctttggggtgccacttcgttatctcggttattacccccgctttttctcttttatgtccccctgtgtgcccccaccgggtggtgacttttacctggcctcaaagcccaaaatgggggagaaataaatagtgggggtcccccgaattgagggaaattattgggcactctttgtgccacgggtcacagnctttgaaagagaaccctgggaaaagggggaaataaaggaatatctcgagttattttcctggacaccgcttttaagttcccccacgagaggattaggcgctttttttaaaaaaaagggagaaaacccaccgaattttggagagtcccacttgttgggttatatttttggtgggggattggaaggatttctttaaaaataggcctccatttgtggaagaagaatttcacacttgggctcgaagaaagtggtgttaaaattttcctggagaaaataaaatggctctaattgaccataataacccgcggaattttaaatatagatttgggggaagaagaggtttgggatattatccaattcaccctcttgaccaatatactcgtgtataaataccaggaagtgttcttctggaccactccccatatgtataattcttagagaccattaaaaatttgtgttttctgttaataggatatgtgttttggtttgttttctggagtggttttaaatatttgcccaaacaccaaatagttaaatattgtggcttccagtgaccttagatataaattggaaaggttaatgttttagtttttggaaggtaagcctgggagaccacataagccaattcactgctataatttagttgatgttaaatgaccgggaactgactccaatatgtccaggtttaactctgccccaaagccagcagacatgtaagcagatgtgccattaaaaatgattttgatccctttcca

SEQ ID NO: 608020 - DNA, 479 bp, Homo sapiens
gatcttgcgcgggagggggtgtaacactaaaatgcacatgatggtttttccggagcgaaggagcttcggtgaagtaagaacttactaatgttgacctgacgtaccggtgggcattcgaaagatgttcaaaccgtgatgcgaaactactggcggaatacatatcagccagcactttcattgataaacaaacgcaaccttgcaaagcggctgtgccacagttatgtcctgagccatcagtaacagagggcataaccctatcggtgatatggaccttaagaagggattgcattgatatccctattggaagcttgccatcgctggccaagcgattgggtcatgaggagcaaacaggcgcgctccgacaggtgaaatctaatcaagtgctgacctggggtcagttttcgctgcaaaggggtcctggcactacctagtaatgtgtggtggcgtagatatgaccctggggatatatatgcacggct

SEQ ID NO: 608021 - DNA, 390 bp, Homo sapiens
agaatggactttccagcctgaaatattcagcaccttcctggtgccagctgatgagcagccgggccctgaggctctgtgggtcttgggatcctacccaggctgctgctggagcaggagtcctagtggcctcttgggagcagaaatgatgtccccagagagacaggtacatggccaggactccagctgagagctgccttgggcggtgctgacctaggtctcacctccacagctcctagaagtccgaggcacgagcacctggctatcctgccctgtcctcaaggtgtttctatgttcacttattgcattcaaactctgaacggtcctgtgaaatggaggccacagcgccatgcctcctgggtcttccagtggcaccatcctacttcttcatgt

SEQ ID NO: 608022 - DNA, 229 bp, Homo sapiens
cacagctcatcaagatatcacagtcaacattcagagacccagctaaattttgtctctatagctggatgtaaatttttcctaacgctcttctaggaaacagtcagaagatgccaggatgtccctagaaacaaaagcttgaaagcaatttgatctaccagtcctggggtcacctcagctaatagccaattaaaagcagtatatcaaagaatgagccagctgttgtatttgg

SEQ ID NO: 608023 - DNA, 527 bp, Homo sapiens
aagtttccagccccccgggggttgaaaacagcaaccttgctacccccaggatccagcacccatttggttttgtgccctttggttatggggtccggccctgcctgggccgcaggattgcagagctggaaatgcagctactcctcgcaaggttgatccaaaagtacaaggtggtcctggccccgaaaacgggggagttaaaaagtgtggcccgcattgtcctggttcccaataaaaaagtgggcctgcagttcctccaaaaacagtgttaagttgagtttcccccttgttggggcttgtccaaaaggctccagttttggcacagtggttcctggctgctcccatgtttcaaatgaggagggaaaaaaggaggcccccaaactcaaaaggtgggaggaactccttgcacaccccctgagcttttgccacttttatcatttttgagcaactccctttcagttaaaaggccccccctttatggcattgctgtccttgggtaaaaaataaaaaaaagggacttttatttttta

SEQ ID NO: 608024 - DNA, 101 bp, Homo sapiens
gaagaactaaagacgacgagagacctcttaagtgctacccagtggcaatcacttccagatgttcctctggtgaactcacagtcctagttggctgtagcaat

SEQ ID NO: 608025 - DNA, 309 bp, Homo sapiens
gtgatgaagatgacacttttcctctattaccttccccccaaaactcacaaccccaatctaatcatgaggaaaacatcagacaaatttcaataaggaggcatcctgcaacatcgggcccagaactcctcaaaactgtcaaggtcatcaaaatcaaggaaagtctaaaaaactgtcatagccaagagaagcttgaggagatatgacaagtaaatgtaacaggtatcctggatgggatgctggaagagaaaaacgacattaggtaaaaagaaaagatctaaataaactatgaactttgattaataaaaaaaa

SEQ ID NO: 608026 - DNA, 322 bp, Homo sapiens
  misc_feature (6)..(6): n is a, c, g, or t
  misc_feature (28)..(28): n is a, c, g, or t
  misc_feature (80)..(80): n is a, c, g, or t
  misc_feature (94)..(94): n is a, c, g, or t
  misc_feature (142)..(142): n is a, c, g, or t
  misc_feature (157)..(157): n is a, c, g, or t
  misc_feature (275)..(275): n is a, c, g, or t
  misc_feature (286)..(286): n is a, c, g, or t
tgaccngttattttagagtatacctttntccccaattatatccaaaagttaactgtgaaacaaccctcaggcaggtcccntccaggaggtatantcccagaagaaggtattgttatcacaggagatgacccatgtgtgttantgcccctgaaaaccntctagtaagaccagatatagaagtggaagatagtgatattgatgatcctgaccctatgtaggcctaggctaatgtgtatgttcgtgtcttagttttaaaccaaaaagtttaaaaagtnaaaaaaaaganaaaaacagaaaaacacttatagaataaggctgtaaa

SEQ ID NO: 608027 - DNA, 368 bp, Homo sapiens
cagtttgcatcctaggaatgtcattctttttttttctttaatattatacttaagtttgagggtacatgtgcacatgtgcaggttagttacatatgtatacatgtgccacgctggtgcgctgcacccactaactcgtcatctagcattaggtatatttcccaaggctaatccggtcgcagtgtagcgaggagacacacgcgcaaccaagacgctgcagacagatggtagaccgttccaacggtggacaacgatcggagcaacggagagggccccataggtatcgaataaccacaagccctcacaagacgctgaagaaatatgacgagaagcaaagaagagcaacaggcaccatagcagaaaaaggaaaa

SEQ ID NO: 608028 - DNA, 1012 bp, Homo sapiens
ggttggtttcggagcggaggagggagccccgaccgtcacgagcgtcgaagagacaaagccgcgtacagggtggcccggcctggggtggctggggtgagcccggtggcttgttggtagccccagccctgctgcggagtggcccttctggaccctgctgctgcctgcctgctgcctgcctgtcgcctgctctcgcaaccatgtgtcctggtgctggtcctcgtctctcctgctccccttccccctgcatacctgctggaccccctcctggtggtcaccctcagtctcgtgtcctgggtggcctgcaggtctttgtgcctaccctgtcttccagtgcgtgttctggtgtcccaagatcgatgcccgatgtctacttacctgttgtactctcatgtaagcaattgagtcagcactatcacatgagagttccgagttactaccaggaagacaatattgcacgagagcgtggttggcattcttgtgcaaatgaacccggcgagatgtgatttgccagtttggccttgacacgtgttggtgctgcgctcttggtactctacgagcgaaacgctacgtacagttgtactacggaacctgtatggttggcagaccatgcaggctgcgtgacactacgtggtgcatacattggcctgtcactgaactacccttggcttggctaagcctagtactaccaccatacctgggtggaatcgcccaaagatcttcccccaggaagcaatgtatacgaagctttgtgttccacattcgacgttccatagcccccattccaatgactcaggcctaagctaccagactagaaggggcatcaaacttatctatattacagggtagaatggatagcagtatcaaataccattggttaggggcccagggaagttgggtcatcgaaatcatccctttggaccctttcgttgatacacgaccgtagtccttccgagccatccctcatatacgtgctctggcaattatccagtgtatgttaggccaacccagacga

SEQ ID NO: 608029 - DNA, 267 bp, Homo sapiens
ggtgacaggcctgacagctactgagtgagcagctggagccctactcactgcgggtcgtgcgtctgtgcagcactggggtaccaccacccagtgcaggtgagcggcctcacggaccgtagtttccacctgtgtcactgagaggcaggatggagctagggcaggcatgggaattttttgggctgtggtctatttttggttcattgcagcattgattacatgtgaatgtggactgttcttgcgaaagtctagacctgtcgtatttgtaat

SEQ ID NO: 608030 - DNA, 406 bp, Homo sapiens
aatggtcctgttggtctgcaccccatgtgagcttctgtcctgttgttccactgagctgcgtcccttcttaaggtcactctgccctgccaacccacaaccagcatgtcactggtgggcctgacagggctgccccaaggtctgtcctgccctgttccccccagcccctggctcccagctcttcgggtctgaaccttgatactacgtgactatgaacccacacagaaggatatacagtggtcacctccactgaccaggcctcccctcctccctcctgaggcacgcgcttagctagtgaagtgaagctcggccctcaggcggaagacaccacttcgcccatctgctgccttgccggtctcccggctccagccttgccaagggctgtcttctgcacagttgtgcctacatt

SEQ ID NO: 608031 - DNA, 1049 bp, Homo sapiens
gcttctagtgagcctggtgccatgagcccaccagtgttcctgtacgggaaggtgcctggtcatgctcaccgtaggctgctaggccagagccatgccaggtctgctgatccctccgaagcttgggatacagcataggtggaccttggtcggctcatcagacgtttccgctgccactactccacgttcgttgtgtgtcgcgcaaagtgaacttacttgagagtgctgaagtcgtgtctcgtcccgttctcagtgaatgctgggcccccagcctgggccagacaataagattgtcgggggagagggtcgtgagtctgtaaaacgagcagtacagtttggcgttttctactacaatcgatcattatttatattgaagagtaaatccgatcctgtcggttcactggtgtcgttctgactcctgagacttttctgcgtgatggctatgccttcgcacactagagtggtcggtagatggcggcctagttaagacgatgcctgtagaatggtaccatcgttttgctcaactgtccatgtttccctctcctagtcagttgtttgctcaaacgaacgttgataagttgaaaagaacaccagaattcgtcgggggagtccgggaccttataccattgagaatccttacacacgaaatgctggtgggcaagggcatcacaagtcatggtgagtgtctggctttgacttactgtagccgctcctagatagagggttggccacaagcagggtagtagaacgcgcccaggtgtatcttccaacaaaggcgatgagagtagcagcagcttagtcttgatccgtccaggaagtgcatgagcttcaggttaagcatgagcgcaggccgtgttgatcagtgctgtgaaagaagcccgacaagtgagaaataacgttgggcccctcccgcatttactggacagagaagttacaaggtaaagaccgttaaaacaccatgttttgaagggtagcggaaataatttcagaaacaacagtattggtggtacaaagaggaattcttatatacataaaaaggcataagagacaca

SEQ ID NO: 608032 - DNA, 220 bp, Homo sapiens
ccatttgcttttgggggggggggggccccccccccccctaaagatcccttcgggaaaaaaccctccccccccccccccaggggtttccaagttccccgtttggtttgggggagtgttccacgcccccccccccccaccttaacacccaggggcgggaaggtaaaatttttttcccctgccaagaaatttttaaaaaaacaggtacttggccctctttcta

SEQ ID NO: 608033 - DNA, 1259 bp, Homo sapiens
gagtgctacggggtggccggagccttgccctggtgaccgctgacccgttacctggattcggggctggacgcagcaagcggggccgctgtgtacccaagactcaccgatcctcagggccagtgacggtgcacacaactgtgtcaggatgcttgaggctaccctcatgtgaagggagcaggaccgtaccggatctactgaaccctgtgtgtgggcagcgtgccctcacggagaggcatcctgcaagccttttcgaggcgcctaggtgacaggaggaacttcccgcgcttgaagtgaacacagcgaactgccacaggcgactcaacgcactcgttacgggggacgccttctcgagcatacggagattccacaggaacttgtgaacgctgaacccacgagacatcccggtcgcagcgcacagggccacgacggaagccgtaggcctgacaggggcaccaacactgacggccttgaatcccccaacccaagccctgtacttcacacttcacctttagagagactcccacgtttcaggacagccaccacattggggattcgaaggcaatcaaccagtggacaacacggggacgtacacaagacatggttccaaggaggcgaattcgctcaccacaaagaaagacccccattgactatgagaccaccccaacagacaggaacccaacaggatcacaggagcaaccgccagaagcaccaggaacacatgcgacgattcccacagtcaccaaaagagtagacttacacacggcttctcgcagtctctcctgtgggacaggtcccacctgtcgctggtgtgcggccaccgggtctagtaccctggggcaatatagggtaacgcccagcggagacgactactcccgatccctcgggacgcccggtgagttaccgccaggcggaatggtgcattgacagctgctcatacagcaaaggggtgtgttgcgaaaggggcacgaccaacaggacaccgcaccgaggtacttcgacgggtccactagcggacaggagagatacaaacaactctagggacaccaacgacgaccaatactcgggacgaaaagccctgctgtgcgcggatccctacactgcggcggtccccactcaacataagtagcacaatacgcgtagcagagggctagccacacgactgagaaacagacgttgcccgacgaagcaaagacgacccacgcagggttcgattgcgaatccaagggcagacagttgtaacacacaacactgatcaacag

SEQ ID NO: 608034 - DNA, 172 bp, Homo sapiens
acctctatttcactcccacttgtctggggcagccggtactccagcgccgggccgggtgagggcagcagtggcacacagttaaacataaagacattgtggtcctggaaccatctagccaccttggcactcccatgtctgcctcccccaggcagccctccaggaggtagatata

SEQ ID NO: 608035 - DNA, 271 bp, Homo sapiens
gactaagaggcttgtgtatctcttggctgtctagctttttcaactttctgatgagtctttcattatcatcatctggaattgtcacgtgaatgatgttaatgtgtcttcaacacctgatgcagtagtattaacatatgggtgatgaatttatttttcttgggagggctcttagaaggagtgtgctctcacttaatcgccgtactcaaacatttctgggctttttaattgatgaacttaatttgggctttgtttctgagtatcttctccagcc

SEQ ID NO: 608036 - DNA, 352 bp, Homo sapiens
cacctgggcttcccaggtaacttgggattgcaggcgtcaggcatcaatacagcctgaaaaaattacattttcgggctcggtgtgatggctcgcgcctgtggtcccagcactttgggaggctgaggtgggccgttcatggggtcaggagttcaggaacagcctgaccagcgtggtgaagccccatctctgctaaaaatacaaaggttggcctggcgtggtggcgcgtgcctgtggtcccagctactcgggaggctggggcaggggaatcgcttgagcctgggagcgtagactgcggtgggctgagattgcgccactgcactccagcctgggtgacggagcaagactccatctc

SEQ ID NO: 608037 - DNA, 177 bp, Homo sapiens
ggaatgagatgacttttagaaagcaacatggggtataaagcagtaagggatgatgggtgtctaggaaaattttttttcatgattgtgtccggaatgtatgtctcggaattagctgcctactttcacctagatgaaaaaaagagtgggggactaatgtgatacccgggtcccgagctc

SEQ ID NO: 608038 - DNA, 484 bp, Homo sapiens
tttgatgataacatagtcgatagagatagaagtacacagaagcaatatagccatgagtatcgactcactatcttatatacatatcctagtagaaaggtcggatgaatcgtgacaatcctagtcgaaaaggtgaaggatacttctccacggcttagattctagggtggtcctggtgaatagttttcaccaataaaatgtgacaagagtaacactgcaggagttccaagtctcagctttgaggccttagttttcattttcactctcctgtccagagactgtcatgtgaggaggcctaggtctgggtgccttgatagatgagcattcacatggacgaaagaggagcagccaacagccagcaaacaccctcccaacatgtgcatgaggccatccaggacctctccagatctcaggaaagcagctgcctggctgctgacacttgagtgatcccaggcgagataaccagaaggatcacccggctaaagtg

SEQ ID NO: 608039 - DNA, 259 bp, Homo sapiens
  misc_feature (15)..(15): n is a, c, g, or t
  misc_feature (31)..(33): n is a, c, g, or t
  misc_feature (95)..(95): n is a, c, g, or t
ccctttgagaggggntcaggtgatcatattnnngtagggcacgatgcaggacaggcggaaggtcaaagcagctctgcccagccctaccccagcanagccctggaaaggcacagtcacgaagcacagcacctggttccaacaagcatgagaggcacagcacaggccgggcgcagtgagaagcctgtggctgtgctgacattcattagatcatagtcattgttggtctcgtatggtgtcccaacagtatgggcctaggggc

SEQ ID NO: 608040 - DNA, 719 bp, Homo sapiens
gcacatggcttcgatgttagccgggaccgatcagatgcggatgctatagaagagcaaataagggaaggttagagttgcctttatgcatcatggctcaacttatggaggactagaaggaatccgcctatggcgaatactcgaggtcttacagccacgtgcagtatcacaggcagttgcacatgggtgttcaattagccatctacatccttggagcgatctccgtaccatttgatacaacaggcgcaactagcatttggcagcagccgggccgttaagctactagcaagacatccagacaacacatactcagatgtaacccacaaagacctgctgggcctttgcatgccgacaccaatgcgcgcaatgccatgcaaaggcaaggccgtggcagttgtcaccaaacacggaccaagatacttcaaccaaacacattcaggagcaagtgcccacctgtgatactcatggatgttgcacaagaccagcaacgcggtgtatgtatccagggcagaaatcactccgacgtgtccagcacacaccccttgccgttgtgaacaagccaagggcccaagggagtggcgtatggccaacattgcgacctttacggcataggcggcctttaagcgccgtggatacgtacaatccgcatctagtaccaacagatggccaccaaaacgcgattacaacttggtaattgaggtcagtcccgagagaaccccaac

SEQ ID NO: 608041 - DNA, 106 bp, Homo sapiens
cagtaatgtagacacagtccttactaagctcacgaagagcagtagctggggagggactttgatgctcttatttacaatcccaacaattcactgctctcctttcaag

SEQ ID NO: 608042 - DNA, 255 bp, Homo sapiens
  misc_feature (71)..(71): n is a, c, g, or t
tttttggggggccccccccccccccccgggcaaaaaaaaaaccccccttttttttttaagtttgggttgantgacccaaaaattaaaaaaaaggggggccaagccccgggcccagttttttggggccccttgggtttcccccccctttttaggggcccagggggttttgggaaaaccacccaggactgtgggtttggggggggccaaggcccccccccccaaaaaggggaaaaaatgggccctttgtttttgtta

SEQ ID NO: 608043 - DNA, 120 bp, Homo sapiens
gccgtatgaggctctccaactcgggacgttcacaactaagtctcccgcagaaacttctccagtcttcttcctcagagagcagcccacatcccctcagcctggggggtacgagctcgaatt

SEQ ID NO: 608044 - DNA, 450 bp, Homo sapiens
gcacgagtacaccccaagaccaatgatcagctagttcgccgtgcatatttaaggcaaacccatatctgtaaatcaatatggtgccaataaatactattgcagaatggaaaaagccattaataatccatccccagaagatgtaaacagagaaaaattgacccttctgtcctaatttgtacaattgtgggtaccgctcaagtaatctactactaacaaattgatcaaatacaccaatgacaaaagggggccaaacagtgaagaataagttgtagaaactcattgtccatgattccataatggattgacctgaaaaggcattggcaaaaacgtaccaaaactgcgtcatgtataatgcttgtattcttgtaaaaagagtacaaaattgcgacagaaattctttgataagaccaggagccatggacaagtaatagtttttttaaaaatttaaat

SEQ ID NO: 608045 - DNA, 131 bp, Homo sapiens
gtttgagtaaagacctaggatgtggaaatgcctgggctcatatggtacatagttgcattcaactttttaataaaccgtctgacagttttccaaagtggttgtaccgttttgcttttttttttttttgggcc

SEQ ID NO: 608046 - DNA, 321 bp, Homo sapiens
cgtgtgccctttaacctgtctatgggtactggtatcacgatcggatacactcgggccaggcaccagatacagcttcttttcgttggcgattttacaaagactgtgaagatcatgtcgaacttataccctgcagatagaaccatacatggaatactaggcctagattaatgtactttatcaatgagacactccggaacctggtattcctgcttttgtcacctaccatttgtgaggtcttcattatgtctcttcagtatcatattcttctactctcacactacttataggggccaagatgcacattctgatcttggaactctg

SEQ ID NO: 608047 - DNA, 323 bp, Homo sapiens
ggaataatattccaatgtatggatagaccacattttgtttatccattcatctgtagatgaacatttgggctgttttcacttttggctattctgaacaatgctgcgaagaacaagttttttttgtacaagcgtgcaagttttttgtggatgtatgttttcatttctcttaggcaaatagagagacacaattttactttttatttattttattttttatttttagagagacaaggtcttgctctgttgcccacgctgaagtgcagtggcgccatcatagctcactgtagcctgcaactctatggattacatgttcctcctgcctc

SEQ ID NO: 608048 - DNA, 246 bp, Homo sapiens
tgtgcgtccaccagccataccaaaccatgagaattgcaacagtgtgagaaaaaaagaaccaaaacttccaatgccctgctttttttcttaaaagtactttaaaaatgtgaaattttgtttgtattttttatttacattttatattttttgtacatatttgttatggtcagccaatttttaattgatctcgtgatgcaccaaacccagccttcgagagctgttctcttgtacctaacttcttgactt

SEQ ID NO: 608049 - DNA, 900 bp, Homo sapiens
  misc_feature (232)..(232): n is a, c, g, or t
  misc_feature (256)..(256): n is a, c, g, or t
  misc_feature (285)..(285): n is a, c, g, or t
  misc_feature (317)..(317): n is a, c, g, or t
  misc_feature (331)..(331): n is a, c, g, or t
  misc_feature (348)..(348): n is a, c, g, or t
  misc_feature (351)..(351): n is a, c, g, or t
  misc_feature (362)..(363): n is a, c, g, or t
  misc_feature (365)..(365): n is a, c, g, or t
  misc_feature (373)..(373): n is a, c, g, or t
  misc_feature (405)..(405): n is a, c, g, or t
  misc_feature (410)..(411): n is a, c, g, or t
  misc_feature (415)..(415): n is a, c, g, or t
  misc_feature (422)..(422): n is a, c, g, or t
  misc_feature (430)..(430): n is a, c, g, or t
  misc_feature (435)..(435): n is a, c, g, or t
  misc_feature (441)..(441): n is a, c, g, or t
  misc_feature (443)..(443): n is a, c, g, or t
  misc_feature (448)..(448): n is a, c, g, or t
  misc_feature (456)..(457): n is a, c, g, or t
  misc_feature (460)..(460): n is a, c, g, or t
  misc_feature (463)..(463): n is a, c, g, or t
  misc_feature (485)..(485): n is a, c, g, or t
  misc_feature (487)..(487): n is a, c, g, or t
  misc_feature (497)..(498): n is a, c, g, or t
  misc_feature (507)..(507): n is a, c, g, or t
  misc_feature (517)..(517): n is a, c, g, or t
  misc_feature (531)..(531): n is a, c, g, or t
  misc_feature (538)..(538): n is a, c, g, or t
  misc_feature (570)..(570): n is a, c, g, or t
  misc_feature (575)..(575): n is a, c, g, or t
  misc_feature (603)..(603): n is a, c, g, or t
  misc_feature (636)..(636): n is a, c, g, or t
  misc_feature (639)..(640): n is a, c, g, or t
  misc_feature (653)..(653): n is a, c, g, or t
  misc_feature (667)..(667): n is a, c, g, or t
  misc_feature (688)..(688): n is a, c, g, or t
  misc_feature (692)..(692): n is a, c, g, or t
  misc_feature (715)..(715): n is a, c, g, or t
  misc_feature (728)..(728): n is a, c, g, or t
  misc_feature (755)..(755): n is a, c, g, or t
  misc_feature (761)..(761): n is a, c, g, or t
  misc_feature (784)..(784): n is a, c, g, or t
  misc_feature (787)..(787): n is a, c, g, or t
  misc_feature (790)..(790): n is a, c, g, or t
  misc_feature (809)..(809): n is a, c, g, or t
  misc_feature (898)..(898): n is a, c, g, or t
tagtgcggtgttgcgggacggggccgaggcccggtcggttggggcgtgggggcggagaggatggagcctccgaggcgttaggcgactctgtcatctctgggcgtgcagccgtcgtttcctggcgcggcccgtgtgatggtgccgggaggaaggaagcgcagtgacagtgcctaagttggagccggggttccgggggtgaggaggcccgcggacggcggaatcttggcgagcntgccgcgggcctgggcgagcaggnacaaaaggaggcggcggcccagcgaggantcgcgggagcatcccggcaggggagcctcccnctgcagaaatctcncggggccaaatttgcanctntaccttgccanncntacaaggntaatttttaaaggggtagactttagagccatnttccnnttcntccaagnttattagnaacantaccgntntaagnaggatccnnacnttnaaaacctttcttccagtagtgnangatagtccanntcctaagangacagcgccntctctctattcagntctttgnatatatactatcagacatcacacagcgtcccntcacncaccaaatgcgtaccatggggagtatgnacatcaaaatagggcagcccccctctcaggttnganncagagccgaacantcactttcttcagnggggaacagattgcacacacnaccntgccaccgcacacaagaaagaangtccgtccgtgtncagggcgccaagagaaggaaagaatgnggagtngtcgtgtcttcgacactaaattncanttntgtcgaagaatgaaaactnctcaccaattctctccttatcgcacaagcagcaaagcaatatgagggagccttcgatgccttccacccctcccgaatagtttctccccngt

SEQ ID NO: 608050 - DNA, 378 bp, Homo sapiens
  misc_feature (47)..(47): n is a, c, g, or t
  misc_feature (73)..(73): n is a, c, g, or t
  misc_feature (77)..(78): n is a, c, g, or t
  misc_feature (101)..(103): n is a, c, g, or t
  misc_feature (128)..(129): n is a, c, g, or t
  misc_feature (155)..(155): n is a, c, g, or t
  misc_feature (194)..(194): n is a, c, g, or t
  misc_feature (209)..(209): n is a, c, g, or t
  misc_feature (265)..(265): n is a, c, g, or t
  misc_feature (282)..(282): n is a, c, g, or t
  misc_feature (288)..(288): n is a, c, g, or t
  misc_feature (293)..(293): n is a, c, g, or t
  misc_feature (310)..(310): n is a, c, g, or t
  misc_feature (363)..(363): n is a, c, g, or t
atttatcctattcttttttcaaaaagtcaccctcacgtctgcttganagttttagaggaatataatgtatganagannattccaataacataatgtacaannntgttgtcacatacagaggagcaatnntctacgtattggggactattgccgcnggaaggggggcctgatcttcatactcatcttcctcattnagtaccatgcccccntccccttcctccctactacaccatcatctgtgccatgctttgccatgtcccaggtntactgtcccccccagtngtatcngccgnttggctcggctgcatgncctctattataccaccctccaccgccgtcttctttagaccactgttttccggnatctgatgtttcacc

SEQ ID NO: 608051 - DNA, 672 bp, Homo sapiens
agcggcttgttttttttctgttttgatatttttattttttctgcagtcaccggctgccaacataatctgcaccaactggagatcagaaaccaaaaaaaaaaaaaaaaaaaaatttaaccacaacaaaaaaaaagtcaaaaaaaccaaaacagaccttaaaaccagaacagccaaacagctcaggaggcacacagtaaccgtgcgtgcggggttaaccaggggcgcttccaagggccaaaagcgcaagcgttacggggggccactgggcacaaccttcaataccagggaaacacggcacacgggagcgcttacacagccaaaagcaccgaaccaccgccatggcagcacattctgttgaggagggtgacaacatgtggggggacacttacccacttcatacacctttattcccactttccgggatatcttctggaggacagaacttcgggtgacccatttgggatttattcaaaactctggccctttaaaagcaattctttaaaaaattggtaccggaattttgtacccgggaacttgtggtattttttgaccgtgtaaaacccgtgttgattgccagggttcccagggtcatatttttgcgatgggacccccaatctttcagaaaactggtgctaactcatggtttgaaagcgttccaagggttagagaaat

SEQ ID NO: 608052 - DNA, 826 bp, Homo sapiens
gcattcctttctcgtaccccgtgacatcttagcgggtgctgatgtttgccgtagccgactggctcctaagggcaaggatcgattgggttggtcgccaagacacgaactaacatcgctcgctggatgatagagatcatactcttaggctccgaagcgtctgttattgagaatagctgggaagtaccgtcgatggggtacaagcgagacctcgtgacggaatgatccagaccagggctgatagcctaggatctatggtcacattcttcggcttgcttgaacctgacgagcctatgtagggaaacctctgactactacgcagtactactgtctggtgttaggggtaaatactggtgtacactctacttagcaagaggccacaagacactgtttgaatcgtgggtgacacgaggctagtgccggaatagaaataccgtacgagtacgctggtgacaccaccctcgtgaacttattccaggtttgcattgcccaagcgattgaagttcctgtaaccctccaaatttacgtacagcattgctcaagtagccgaggaactgagctgagcaaaaggtatgatcctttggtcaaccgtacggaatatcattcggacgtgccataccttttaatgctctgcctaaaccattatttcccctttgggacttcaacgcttattgctttgatatttcatatattctgacaacaagttaccaacaatcatgcttcagaacattcagtcttctgaaagcggggcaataccgtcccaccagactacgcagttcacctatgggcactcagtattagtaggcccccggtcaacaatttgaagaac

SEQ ID NO: 608053 - DNA, 204 bp, Homo sapiens
tgtagatgaggaagctcaaaataccatggtctgtgatagttctgtctaccatggtcaagatcagatatattaggattttttctcctgcacccaatatttcgcattttgtatttctaacagttgttctgtgtctctctttctctttctcttgccttttttaggattattttttctcattccagttataatttccctttcccaatt

SEQ ID NO: 608054 - DNA, 146 bp, Homo sapiens
  misc_feature (65)..(65): n is a, c, g, or t
  misc_feature (107)..(107): n is a, c, g, or t
  misc_feature (128)..(128): n is a, c, g, or t
aaaaacaaaaaacaaacaaaaaaaaacgggtagaacgttaggttcacaccatccaaagacgtttncgtcttcttgtaggtaaagccttaaggacaacagtgatggtncctgttccctatgagaagatnctgcgagaccagtcggct

SEQ ID NO: 608055 - DNA, 301 bp, Homo sapiens
  misc_feature (188)..(188): n is a, c, g, or t
ttcccttaaggacagatttaaaaaatttcttgctgggcgcataggtcacgcctgtaatcccagtactttgggaggccgaggcggatcataaggtcaggagatcgaaaccatcctggccaagacgatgaaaccccgtctccactaaaaatacaaaaattacaggctggttgtggcagctcatgactgtnatcccagcactttgggaggcccaggtgggaggatcaatttgaggccagagtttgaaaccagcctaggtaacatagtgagaccccctattctctacgaaaaattttaaaccatt

SEQ ID NO: 608056 - DNA, 301 bp, Homo sapiens
  misc_feature (1)..(1): n is a, c, g, or t
  misc_feature (81)..(81): n is a, c, g, or t
  misc_feature (109)..(109): n is a, c, g, or t
nttggggggggggggtttaggggtgaaaggtccaccccaggggacccattttgttttgattgagaagattggtgagaaaantggggggatttgtgcccaaaaatgggantgggggggcccattttggggttttccttccccccttaaggggagaaaaagggtctttccctttccccaaaaatgggggtcctttcccccccctctttcctgccccctggggggggggggggggttattttttgggggacgggtggggccttttgtggttggggaaaaataaaaaaaaatggggggcccttta

SEQ ID NO: 608057 - DNA, 1019 bp, Homo sapiens
atcccagcactttggagaggccgaggctggcgctggacttaccctgcaggctcacggagctttgagaccagcttgaccaacactgcgacgaaacccgtggtctgtactacaaaatttcaaaaaattagccaggcatggtggcacatgcctgtaatctcagctactcaggaggctgaggcaggagaatcgcttgaacccaggaagcggaggtggcagtgagccgagatcgcgccattgcactccagactgggcaaccaagagtgaaactctgtctcaaacaaataaaaagaaatcatagagctatctcattgcctttcaactctgcttctaaaaccctgactgcttctgcatgatgcattctaagaaagatcatgcgatgtatattcataccagtggacaagcagggatctacagtgtctcatgtccaacaacagtccggatcgtctcacgactccatttagaaatccagtgcttctatcctgctcatacctgaactggaaaactgcgataaaatctcgaagccgaaagctccacggacacgcaaacacacaaaacaagaacaaagaccacacacagcacagaacacacacccaaacaacacacacccaccacccacacacacacccaaggaaccggcacggcacagcaaccaagtataaacgagtaacaagagaacagagcacagacacaagagaagaaaacaacaacaatcacatacgtgtgataacactgtccggacacacggagacggcacagcaaaagaggacatacaagcaaaagaacacacgaaaataaaacccgcccaacgttgaacaaaattagaccaacgccacgaacgagaaacgaccgcgcgccgccagcggacgccgaaccaggggagcggcacgaagacatccgacgagcacaacgagaggcaccggcaagacaaagatcgacacgacatcacatgcgagtcgagacagtacgctcgatagacagtgttcaagcagccgggtctaccgagaacacaaaaagacatc

SEQ ID NO: 608058 - DNA, 510 bp, Homo sapiens
gcattgaatatcctgttggtttactaagagacatgcctatatcttagttcatggggtgagaagagaggttaaatgttctttcccgttccctagagggaagtggggttttgccccaccacatttacacaacaaaattgctcccaagtagaaaaggggcttagattatatgtagacaaaaataaagcaaatacccactgaacatattaatctcattattcaataattaaaatgattgaatgggtgaattaagagtgaattagttcacataattgcttaacctcttttcatttataaaataagggtttgacctatgatctctgatttttattataactttaaattcttttttaaaaattattgtcagccggacatggtggctcatacctaaaatcccagcattttggaaggctgaagtgagaggatcacttgagaccaggagttcgagaccaacctgggcaacagggagacactgttcctacaataaataaataaataaatatttaaaaatta

SEQ ID NO: 608059 - DNA, 122 bp, Homo sapiens
tcatgatccagtcacctcttaaagggcttacctctcaatactgccacattgggaattaagtttcgacatgagtttcgcaggagacatacaaatcatagcatttacaaagcctaatatgttgt

SEQ ID NO: 608060 - DNA, 275 bp, Homo sapiens
ggagcttatctccaagtgctgggattacaggcgtagtacccatgcctggcctgtaatacttgttattgagtaacaattcaaagaaggaaaatataccctgataaaatgtacaagtataaatttgacctgagaaaaaaactgtccgtaaaaattacgaaaaacatataccatggctgaagacatggtgaataacatttgatgccgaccacaatacaacagacccccatgaagaagcacattttaattataaaccttaaataaaatagctcaaatat

SEQ ID NO: 608061 - DNA, 120 bp, Homo sapiens
ccctttagcccggcctagcccacctaagctcgcccgagagctcgcgtaaagcacaagacataaaacccccgcctatgtacgccaagctatgactgtcatgtatgtatagacagacactct

SEQ ID NO: 608062 - DNA, 1340 bp, Homo sapiens
agcggagtcgctgcccagaccggtcaggacgtgggacgcaaggggcaatcctgccctggttcgcaggtccgaggcgggcgcggtggcccttcgggccaggggcagggcacgggacaggaagcagacagcagccgacagaggagaggcacacacgagacaagacgacacgccaaacagagagtgcaacaacacaccaagcaaaccaacaacaacgagagacaacaaaaggacaaacaacgcacacaaagacacaaaaccacacacaaaacagagaccaccaacaccacagcccaccacgcccaaacggacagaacacgggagaggtagagcgaatcagggaagaaggggaaaaagaaagaccaaacacaaagacacagaagagcgagacagggaaacaccaaaacaccaaagagagaagcacaaaacagacagaaaacgcaacgcgagacacacggacgacacaggagacgaccaaagaaggcagcaaccagcgcaaagcggagagacaagaagaaagacaaagagaggagaagaggctgaagggagagagagagacaggagagcaacaggcggagcggaacggagggagcgaaacaggaagagcacatgagcagccgaccggacgacaggcgaacgagagggcagcggagacgaggcgaagagcgaaccaaggaactgccacggacggaggcaggcagaggagacgaggccaccacgcagcagaagcgagagaggcagaagcgacagaagaagaagaagagaggaagacgagaagcgagaggagagacgtgacaccgcgaacaagaaagacacagacgagaccacaggagagacgacacagcgggacagcagacaccaccacaggcagagcaaagggagcggggccgaagccggagcgagcatcgcgagcggaggagagaacccaggcaacgagacacaaagaggcgagccgagcggagccgcccgaacgcaaaaacaggacgccgacgagacgcaggacaggggagcgcaagacgcaggagaggagagggagcacggatcggcgaacaaggaggacgagccggaagcggaccaagcggaggaacaaacaccaagggagaggcccgggccaccgagggcccaagagagagaaaggagagcaccgcagacagagaagaaagcagaggggaaagataagagaaaagacagaacagagagaagtcctaggagcccaagaatgacgcaggagacagacagaagacacacacgagaacaggacccaccgcgcacaggagactagaggcaaacgacacaaggagcaaggtcacacgcagaaaggggagccgacaagaccaccagcg

SEQ ID NO: 608063 - DNA, 84 bp, Homo sapiens
cctgggctacagagtgcagtggcaatctcagctcactacagcctctgcactctagcctgggctacagagtgagactccatctca

SEQ ID NO: 608064 - DNA, 367 bp, Homo sapiens
atgatctctgcaacctctacctcccaggttcaagcaattcttgtgcctcagcctcccaagtaactgggactacaggtgcacgctaccacacctggctgattttttttgttttagtagagacagggtttcaaccatgttgcccaggttggtctcaaactcctgagctcaggcaatccacccgccttggcctcccaaagtgctaggattacaggtgtgagccaccacacccagctattttttctttcgtattttaattttaaagttggggggggtctcaatttgttaccctggctggtctcgaactcccggacttaagcgatcctctggctccaaggccactaccagtctcaggtttctttactaaaag

SEQ ID NO: 608065 - DNA, 241 bp, Homo sapiens
actctgaggatccccccgatagccgacgggttgggccagcgtgcctgtgcagctaggactggcaggcgggctaccctgggaaggacaggagggtgggctggggcccagcttgggaccctccaaggcacctggctgtgtgagtggcaggtagaagggagtgaggagacccgagggggtgaggcggccagcagggttgggccagcccttttccccaagatacaggctgtcgggctagtcgggg

SEQ ID NO: 608066 - DNA, 289 bp, Homo sapiens
cacgatggcgttccaaccacactcaggccaccaacgatccccctgatgtgaccgtgtttcccaaagagcctgtggagctgggacattccaccaccctcatctgacacattgatcagttcttcccaccagtgctcaacgtcacgtggctgtgcaacggcgaactggtcactgagggtgtcgctgaaaggctcttcctgccgagaacagataacagcttccacaagttccattacctgacctttgtgccctcagcaaaggacttctatgactgcagggtggcgcactgggg

SEQ ID NO: 608067 - DNA, 448 bp, Homo sapiens
caggaaacagctatatctaacaatttacgtgaatttatgtcgtggagcgattacaaataaatagcactaatgagctctaaaaaccatagttgtgcccgtgtctttcaactataggcagtaacctgtcattccacgaggatgctgactaaatgtttacgtggcacttttttggattctcatatttactacgggcttctgttggcactttaagcctaaacgacactcaccccatgttgtgaattggaaaaccccgtcccgatgaagaattagccctcccaaaatgtagattattttatttcaagggatagggcagattaccattagaagcaaaattaaaagtacaagctgggcaaactgacagaatactagataggagagactaattccaaccttctaaatttggctagtaaagtgcaataaaggcattgataagttctgttagctcacc

SEQ ID NO: 608068 - DNA, 441 bp, Homo sapiens
caaggctctgtgggccaaaaatggaataccatccccctgcgaacaagtctctgcagagaatctgtgctgtggactatgatgacagctattatgaaatccctgaatggttatgaggcaactactgtggtctcttatggagcaggaagcattcacgagcatggtgtcatctgactccacatcaccagattcttctttaacagaagaatcacgtactgagacagccagtagtttatcccagaagatttgtaatgggggattatctcctggtaaccccagagattcttaggacatgaaggaaattgagccccattattaaagtccctccctctgattataatcaggataaaggatttatcaaaggctttccaaagctcaataaaagtttccgaagacccacaaagcagtcattgggctcccattagaaaagaaagatatgcaaat

SEQ ID NO: 608069 - DNA, 449 bp, Homo sapiens
  misc_feature (425)..(425): n is a, c, g, or t
atctcgctcgtgcttcttctttcccactgtgaatgatctcagtgcttgcatatgtactgtgtgcctcatacgttgaagttcattcatgctcaattggcccatacctgtagtgtccgataacattcgctcgagcctgactcccaggatctagttcccttgcgcctcccgccgactcagcgcctttacctgcccctaccgctgactagtcccggaacgacatctggatccaatcattcgacgatatcgcactacacgcatgcctagggaacatccgatccattaccaacctcctgtccctgtacttacacgtctctaatttgattcttctatgaataggccttatggatctcagggctggacccgacgtcctagtggacctgactgtgaaattcctgtcaaacaaacaccacttttcaatggttcgntactccctgcgtactgaaagtctt

SEQ ID NO: 608070 - DNA, 366 bp, Homo sapiens
cgcgtgccaattaagacggtttctccctcttgctgacgtgcccagccgtgataatgaccagcttggcgtctgccgttacattctagtcttctgccagagacaatctttggtgtctaaggaaaaggctgccatgttggagatccatcatctctcccttcaatttgtcttcgatgacactctaccagagcaagttcatctgccaggtccttcattaagatactgatggcacaggccatgacaacagcaccaagcccgacaactgtaatcttattctggggggtctgttcttcctttagaagattataaatcagctgatcctttagagttgccataatagaacttggaaccacaaggaatcgggacatg

SEQ ID NO: 608071 - DNA, 575 bp, Homo sapiens
tgggaaaaagggaggggcttcaaatatctattatggcctatggcctgccggtagataaaagggtaatagggaaggactatgtacgccactcgactatgggggccaaacccagagaaagaatatcttattgggagtcatacagtaatttatgtttccccgtcaaagattcttggtgggagggactcccagttccaggccttttatctattaccaccagacacgaaaggggaagttcctttacacaagattcacataatcatccagaattaaaacccagtgagagaagcgggagttagctgggcaaagccacagcatttttaaccactcctgtgggaggaacatttacccatattattccatatgtgtttgtgcatatacctgggtagcctctcagctgggtgctctcaaaaaaattcccagttggcaatacattttaccgggggtgttgacccactgtggagttgtgtgttttcacggggacctgtctcaaatatagtgctctaaatagactcaaatttaagtgaggggacaggcaaaatttggcataatgtagattcatccccaaaaatatattg

SEQ ID NO: 608072 - DNA, 161 bp, Homo sapiens
ccttatctcttaaaagagtagagggggctgggcgtggtggcttatgcctataatcccaagccctttggggggccaaggggggccgttttcctggggtcgggggtttgcgccccgcctggccagcgtggtgaaaccccgtttttattaaaaatacaaaagta

SEQ ID NO: 608073 - DNA, 137 bp, Homo sapiens
ctgatctcatgtactgttgtcaggtagatgccctgggaagctggcacagcgagagtgtctgaggtgtctcgcaggaagtgcagcacgaagggcaaggtgcacagcaggcagagtgtcggccaccagccagagttggt

SEQ ID NO: 608074 - DNA, 347 bp, Homo sapiens
gggggagcagcgacagcaatatgagaacagcaaatattgctgctggttcttcctctggaagcttcgtctcagaggggcacctggccatatggggtgtcagtctgcccctactgggaggtgcctcccagttaggctacttggcagtcagggacccacttgaggaggcagtctgtctgttctcagatcttaaactgcatgctgggagaaccaccactctcttcaaagctgtcagacagggacatttaagtctgcagcttgctctttctttctttctttctttctttctttctttctttctttctttctttctttctttctttctttttctttccttgcttgttccgctg

SEQ ID NO: 608075 - DNA, 325 bp, Homo sapiens
  misc_feature (3)..(4): n is a, c, g, or t
  misc_feature (25)..(25): n is a, c, g, or t
  misc_feature (27)..(27): n is a, c, g, or t
  misc_feature (29)..(29): n is a, c, g, or t
  misc_feature (36)..(36): n is a, c, g, or t
  misc_feature (41)..(41): n is a, c, g, or t
  misc_feature (50)..(50): n is a, c, g, or t
  misc_feature (56)..(56): n is a, c, g, or t
  misc_feature (61)..(61): n is a, c, g, or t
  misc_feature (73)..(73): n is a, c, g, or t
  misc_feature (99)..(99): n is a, c, g, or t
  misc_feature (111)..(112): n is a, c, g, or t
  misc_feature (136)..(136): n is a, c, g, or t
  misc_feature (183)..(183): n is a, c, g, or t
  misc_feature (191)..(191): n is a, c, g, or t
  misc_feature (195)..(195): n is a, c, g, or t
  misc_feature (197)..(197): n is a, c, g, or t
  misc_feature (219)..(219): n is a, c, g, or t
  misc_feature (221)..(221): n is a, c, g, or t
  misc_feature (223)..(223): n is a, c, g, or t
  misc_feature (228)..(228): n is a, c, g, or t
  misc_feature (238)..(238): n is a, c, g, or t
  misc_feature (240)..(240): n is a, c, g, or t
  misc_feature (262)..(262): n is a, c, g, or t
  misc_feature (267)..(267): n is a, c, g, or t
  misc_feature (299)..(299): n is a, c, g, or t
  misc_feature (301)..(301): n is a, c, g, or t
aannatcaatgtttttccccgttcncncntattacntcttnccgttggcnttttcnatttnaaatgctttccnttggttgttggttttattctcccccnaccccgcccggnntcgtattattcggaatataaaccngcgaagctctgctcggttttggttttgaaagtttaagcttttctgcntctgtganaccncnggcttctgtcccgtttgattcngncngaacntttgtgttcncnaatgatactaacacggtgtagnttttncagtctccgaatttgtactggtaatgcatatncnggataaatagtttcgtttgttgcg

SEQ ID NO: 608076 - DNA, 561 bp, Homo sapiens
  misc_feature (442)..(442): n is a, c, g, or t
  misc_feature (452)..(452): n is a, c, g, or t
  misc_feature (461)..(461): n is a, c, g, or t
gagaccgagcgagattctttctccacaaaaaaaaaaaaaaagcaacagaagcaaatgagagtgcctgggagtggtcattgtggggcattcctgttcgtgtgacccaggtcatgtccctccctaagccctggtctctcttgcctcctgcagggctggtgaattaccatatctccgtcaagtgcagtaaccagttcaagttggaagtgtgtcttttgaaatcagacaacaaagtcgtggacaaccaggctgggacccagggccagctgaaggtgctgggtgccaacctctggtggccgtacctgatgcacgaacaccccgcctacctgtactcgtgggaggtaatggtggtttgggacttgcttaagggaggtcttttgctcccatctggtagccctggcttcagcaggagcccaggacaggtgaacgggcaggtgtggtcctntgagcttttntgagctttntgatgtttcccacccttggtgggaggcccagattttttatttatttatttatttatttatttatttatttgtgacagagcgagattctatctcaaaaaaa

SEQ ID NO: 608077 - DNA, 693 bp, Homo sapiens
gggtgagtgggggatgatttctagtctcatcgttgtcctctacctgtgaagataaactgttaatttacattgtcagcatgagggagaccacctgaagaactatgtagccttctatcttgcagctgtctgtttatgaacaaatgggagtcagtttgactgagttcccaagcttaactttccttttggcataggccgttttattttcctttcacaacttacactcaatataatgttgttttcttagagctgcttggggaaagagatttcatctgtttgattttgaaaagtgacctgcagaagaataatttacttgatattattaatagatattttttaactcattttatgaccaaggcagtgtgctaggtgttcctgggaatataaagcttgtaattttatcattattaactataatatataataaactctaaacagtaataaaagttatgatataggtacctgtagtggtgttcaagtgctactgaaatgtatgtggagttaactaggtgtggtagttcatgcctatagtcctagctactcaggaggtgaggcaagaggatcgcatgaacccaggagtgaggttacagtgagctctaatcacaccactgcactccaggcctgggaagcctctttttttaagagacagagtgagaccctgtcccattgaaagagaaaggaaacaccacaaaaaac

SEQ ID NO: 608078 - DNA, 294 bp, Homo sapiens
  misc_feature (26)..(26): n is a, c, g, or t
ggggggggggggggggggttgggganaacccccccaaacaaggggggcgccccccccccccccccctttcccccccccccgggggagggggagggccccccattgggcccccccccaaggcccaaaaggggggggccttttccccggggggggggggaaatttttttccccggggcccccccccccccaaagggggttttttttggcccccccgcccgggccccaaacccaaggggggggccccccccccccaaaaaaaaaaaaaaaaaaaggggaaaataaaaacccttttta

SEQ ID NO: 608079 - DNA, 619 bp, Homo sapiens
  misc_feature (12)..(12): n is a, c, g, or t
  misc_feature (119)..(119): n is a, c, g, or t
aaaaaaaaaaanaaaattaaaaattaagttctttagttgcactagccatatttcaaatacttgatggatacatgtggctagtggctaacataagggatagcacagatataaaacatttnctcgtcatataaagttctattggatagtgctggtctgtagcttataggatggtatcttagtctgcttcagctgctaaaacagaataccataaattaggtagcttaaacagtagatattttgaccaagcgtggtggcttatgcctgtgttcctaacactttgggaggccgaggcaggtggataacttgagctcaggagtttgagactagcctgggcagcatggcaaaaccttgtctctacgaaaattagctgggcatggtggtgcacgcctatagtctgagctacttgggatgctgaggctgggagaattgcttgaaccatgcccggcgttgactttttaataataaccattctgactggtgtgagatggtatgccattgtggttttgatttgcatttctctaatgatcagcgatatgggcttttttcatatgcttgttggccgcatgtgtgtctcttttgaagtgtactgtacatgtcctttgcccactttctaatgaga

SEQ ID NO: 608080 - DNA, 256 bp, Homo sapiens
tttgttcagccaagtgtgcaagtaggctgcccgccaaaagggggcctttgctacccgctgctgcctgccggttgacacactgcctccccagccttcctgttaggccaccctcctcccttcccatgcttgtaaccagctttggggcttgcccctccccaaagtaaggttggcccttggaggccatgtttgggtttccggccagggcctagggttaggccatgcccccaatgggtgcccaataaataacaggtcaaca

SEQ ID NO: 608081 - DNA, 514 bp, Homo sapiens
  misc_feature (12)..(12): n is a, c, g, or t
  misc_feature (119)..(119): n is a, c, g, or t
  misc_feature (446)..(446): n is a, c, g, or t
  misc_feature (450)..(451): n is a, c, g, or t
  misc_feature (463)..(464): n is a, c, g, or t
  misc_feature (469)..(470): n is a, c, g, or t
  misc_feature (478)..(478): n is a, c, g, or t
  misc_feature (491)..(491): n is a, c, g, or t
  misc_feature (499)..(501): n is a, c, g, or t
  misc_feature (508)..(508): n is a, c, g, or t
aaaaaaaaaaanaaaattaaaaattaagttctttagttgcactagccatatttcaaatacttgatggatacatgtggctagtggctaacataagggatagcacagatataaaacatttnctcgtcatataaagttctattggatagtgctggtctgtagcttataggatggtatcttagtctgcttcagctgctaaaacagaataccataaattaggtagcttaaacagtagatattttgaccaagcgtggtggcttatgcctgtgttcctaacactttgggaggccgaggcaggtggataacttgagctcaggagtttgagactagcctgggcagcatggcaaaaccttgtctctacgaaaattagctgggcatggtggtgcacgcctatagtctgagctacttgggatgctgaggctgggagaattgcttgaacctgggaggcngagnntgcagtgagccnngatcnngccactgnactccagcctggntgacagannnagactcngtctca

SEQ ID NO: 608082 - DNA, 114 bp, Homo sapiens
cctagtggaccatccagcatcctggtgaggtatatgacatgggtggtcttagctcttggaagagcttcaaagactctagaaagaaggaaggacaaatggcctctgtcttcctga

SEQ ID NO: 608083 - DNA, 1136 bp, Homo sapiens
  misc_feature (12)..(12): n is a, c, g, or t
  misc_feature (119)..(119): n is a, c, g, or t
  misc_feature (372)..(372): n is a, c, g, or t
aaaaaaaaaaanaaaattaaaaattaagttctttagttgcactagccatatttcaaatacttgatggatacatgtggctagtggctaacataagggatagcacagatataaaacatttnctcgtcatataaagttctattggatagtgctggtctgtagcttataggatggtatcttagtctgcttcagctgctaaaacagaataccataaattaggtagcttaaacagtagatattttgaccaagcgtggtggcttatgcctgtgttcccaaagtgctgggattacaggcatgagccaccgcgcccggcctatcatatgaattttgagggaacacaaacatgcagtctgtagcagatggtaataggctganatattacacttgttgatgtaaatctgataggtttctttctctccaaggacagctttttaaatatttaacagtatcaataatttttcaggttctgtgagaattttataatttataatttgcagacttaatgtataatctattttgtcctaacaattacaaatatattttttatttcagattgtatatattcctaccagatggagataattacagctttaaaaatttttattttttcattttatttcacacattgacattaaatttttatggacacataataactgtacatatatatggggtagaatgtgatgttttaatacatgtactcaatgtgtaatgatcaaatcagggtaatttgcataatgatttttctgtagggagaaaattcaaaatctactcttctggctattttcaaatatataatatgttattgttaactatactcatcctactatgcaataggacaccagaacttattcctgggttctacatccgttaaggcaaccaaggattggaaatattggaaaaaaaaattgcgtctgtactgaacatgtacagacttttttcttgtccttattccttacacaatatagtacaataactatttgcatgacatttacatcggatattatgagtgatctagagttgatctcggacgctatgggcagggagtgcaagggaagggacccatgtgcttcatccgagactgattcccttggtcccccggaatctctgacgggcccctggcatggagcgcggtctcc

SEQ ID NO: 608084 - DNA, 941 bp, Homo sapiens
  misc_feature (376)..(376): n is a, c, g, or t
  misc_feature (443)..(444): n is a, c, g, or t
  misc_feature (466)..(466): n is a, c, g, or t
  misc_feature (472)..(472): n is a, c, g, or t
  misc_feature (480)..(480): n is a, c, g, or t
  misc_feature (490)..(490): n is a, c, g, or t
  misc_feature (499)..(500): n is a, c, g, or t
ggcctgcgtccctgctgtcagcaacctggagcctggagtcggattccgaacgcaccctcgccgtgtcactcggccctcatgcgatccgcataacgtgcagtgccgaggcagtgcggtcccaccaagcagcactacgcggccgccttccacgcccgagggcatcgcagctggtcatacgggtagcctcctgctcatggcgctgctgcccatcttcttcggcgcccatgcagctccggtacgctgcgcccgcggcaagaatgcttcagacgatgccttgaaactaatcaccagccgggatgccaaccgcttccccatcatctgtcatgcttgacactcttggggctctacctctttttcaagaatattctcccaggantacatcaacctcctgctgtccatgtatttcttcgtgctgggaatcctggccctgtcccacaccatcnngccccttcatgaataagttttntccagnccagcttnccaaatcgancagtaccannctgctcttcacacagggttctggggaaaacaaggaagagatcatcaattatgaatttgacaccgaaggacctggtgtgcctggtgcctgagcagcatcgttggcgtctggtacctgctgaggaagcactggattgccaacaatctttttggcctggccttctcccttaatggagtagagctccctggacctcaacaatgtcagcactggctgcattcctgctgggcggactcttcatctacgaagtcttcttggggaatatgggaccaatgttcatgggtgaccagtgggccccagttcctttgacgggcacgcaattaaacacttgcgggttttccccagggaatctggctgcgaaaaaggggccctgaaaccacacaaccttgtgcccatgctgggaccttcggcacatgtctgtcattcccacgcgagcctcaaatac

SEQ ID NO: 608085 - DNA, 373 bp, Homo sapiens
  misc_feature (8)..(8): n is a, c, g, or t
  misc_feature (242)..(242): n is a, c, g, or t
ctcaaaancaaacaaaaataataataaagtgagctttatgaagacattacagaaaagattcaaatataaaatgacctctgcctcccgggttcaagcaattctccggcctcagccttctgagtagctgggattacaggtgcctaccaccacacctggctaattgtttgtactttttagtagagacggggtttcttcatgttggtcaggctggagtgcaatggcatgatcttggctcaccacanactccgcctcctgggttcaagcaattctcctgctcaggaggctgaggtgggagaatcacttgaacctgggaggtggaggttgcgtgaccggagattgcgtcactgcactccagcctgggcaaccaagcgag

SEQ ID NO: 608086 - DNA, 117 bp, Homo sapiens
agcactgtgagacttccttgctcctcaggctccgacactagtaatacctgtgccccaaagcctcctccaagcctcctataggaggggtcactccccttgtcgtctgaccgtgccatc

SEQ ID NO: 608087 - DNA, 497 bp, Homo sapiens
gagaccgagcgagattctttctccacaaaaaaaaaaaaaaagcaacagaagcaaatgagagtgcctgggagtggtcattgtggggcattcctgttcgtgtgacccaggtcatgtccctccctaagccctggtctctcttgcctcctgcagggctggtgaattaccatatctccgtcaagtgcagtaaccagttcaagttggaagtgtgtcttttgaaatcagacaacaaagtcgtggacaaccaggctgggacccagggccagctgaaggtgctgggtgccaacctctggtggccgtacctgatgcacgaacaccatgcccggcgttgactttttaataataaccattctgactggtgtgagatggtatgccattgtggttttgatttgcatttctctaatgatcagcgatatgggcttttttcatatgcttgttggccgcatgtgtgtctcttttgaagtgtactgtacatgtcctttgcccactttctaatgaga

SEQ ID NO: 608088 - DNA, 292 bp, Homo sapiens
  misc_feature (26)..(26): n is a, c, g, or t
actgggggggctcaataaatgcatcntgtgagaggcagtggttgtggttcctgtaggcacagggcaggcagtagattgcctgggtgaacgtggagaagcatttaatcttatgtttagcctggtagattacagactggggatgtccgaagtatgaaatcaaagctctgcttcttttggtttcccagtttggggtatggctttgtggtcagtgcccttttcttcttcttttttttttttttggggcggggggtccctcaaaagttcacccgtgcgggtttccaccttggccagg

SEQ ID NO: 608089 - DNA, 1058 bp, Homo sapiens
aaacgcttgtagggcttcaccagggctggtgaattaccatatctccgtcaagtgcagtaaccagttcaagttggaagtgtgtcttttgaaatcagacaacaaagtcgtggacaaccaggctgggacccagggccagctgaaggtgctgggtgccaacctctggtggccgtacctgatgcacgaacaccccgcctacctgtactcgtgggaggatggtgattgctcacaccaaagccttggacccctcccagcctgtgacctttgtgaccaactccacctacgcagcagacaagggggctctgtatgtggatgtgatccgtgtgaacagctactactcttggtatcgcaactacgggcacctggagttgattcagctgcagctggccgcccagtttgagaattggtgtaagacatcacaatcccattattcagagcgcgtatggagtggaaacgcttgtagggtttcaccagattgtatatattcctaccagatggagataattacagctttaaaaatttttattttttcattttatttcacacattgacattaaatttttatggacacataataactgtacatatatatggggtagaatgtgatgttttaatacatgtactcaatgtgtaatgatcaaatcagggtaatttgcataatgatttttctgtagggagaaaattcaaaatctactcttctggctattttcaaatatataatatgttattgttaactatactcatcctactatgcaataggacaccagaacttattcctgggttctacatccgttaaggcaaccaaggattggaaatattggaaaaaaaaattgcgtctgtactgaacatgtacagacttttttcttgtccttattccttacacaatatagtacaataactatttgcatgacatttacatcggatattatgagtgatctagagttgatctcggacgctatgggcagggagtgcaagggaagggacccatgtgcttcatccgagactgattcccttggtcccccggaatctctgacgggcccctggcatggagcgcggtctcc

SEQ ID NO: 608090 - DNA, 209 bp, Homo sapiens
gctagcttctgaggcttcaccagaagaagagctggagctggctgggtggtggctcatgcctgtaatcccaacatcttggaaggcgaggcgggcagatcacaaggtcaggagttcgagaccagcctggccagtatggtgaaaccccatctctactaaaaatacaaaaaaactagccgggtgtggtggtgggcacctgtagtcctacctac

SEQ ID NO: 608091 - DNA, 991 bp, Homo sapiens
  misc_feature (923)..(923): n is a, c, g, or t
  misc_feature (927)..(928): n is a, c, g, or t
  misc_feature (940)..(941): n is a, c, g, or t
  misc_feature (946)..(947): n is a, c, g, or t
  misc_feature (955)..(955): n is a, c, g, or t
  misc_feature (968)..(968): n is a, c, g, or t
  misc_feature (976)..(978): n is a, c, g, or t
  misc_feature (985)..(985): n is a, c, g, or t
aaacgcttgtagggcttcaccagggctggtgaattaccatatctccgtcaagtgcagtaaccagttcaagttggaagtgtgtcttttgaaatcagacaacaaagtcgtggacaaccaggctgggacccagggccagctgaaggtgctgggtgccaacctctggtggccgtacctgatgcacgaacaccccgcctacctgtactcgtgggaggatggtgattgctcacaccaaagccttggacccctcccagcctgtgacctttgtgaccaactccacctacgcagcagacaagggggctctgtatgtggatgtgatccgtgtgaacagctactactcttggtatcgcaactacgggcacctggagttgattcagctgcagctggccgcccagtttgagaattggtgtaagacatcacaatcccattattcagagcgcgtatggagtggaaacgcttgtagggtttcaccagtctttcccaggtaactccgatgaagtgttccaacaaaatgagcgagtgaaccaagaagaggatgacattagatccaggagatacaacagaggagataatctccaggatgcctgtgaagaaagatccctggatcccaggatgattataggacaagttgttcataatccagcaggccagaagacttccagggaaactcattcaaggaggtgaaaatgatggatgactcctccaagatgaaaatggaccagccgcagtggctcacgcctgtaataccagtaacactttgggaggccgaggcaggtggataacttgagctcaggagtttgagactagcctgggcagcatggcaaaaccttgtctctacgaaaattagctgggcatggtggtgcacgcctatagtctgagctacttgggatgctgaggctgggagaattgcttgaacctgggaggcngagnntgcagtgagccnngatcnngccactgnactccagcctggntgacagannnagactcngtctca

SEQ ID NO: 608092 - DNA, 1075 bp, Homo sapiens
  misc_feature (12)..(12): n is a, c, g, or t
  misc_feature (119)..(119): n is a, c, g, or t
  misc_feature (372)..(372): n is a, c, g, or t
aaaaaaaaaaanaaaattaaaaattaagttctttagttgcactagccatatttcaaatacttgatggatacatgtggctagtggctaacataagggatagcacagatataaaacatttnctcgtcatataaagttctattggatagtgctggtctgtagcttataggatggtatcttagtctgcttcagctgctaaaacagaataccataaattaggtagcttaaacagtagatattttgaccaagcgtggtggcttatgcctgtgttcccaaagtgctgggattacaggcatgagccaccgcgcccggcctatcatatgaattttgagggaacacaaacatgcagtctgtagcagatggtaataggctganatattacacttgttgatgtaaatctgataggtttctttctctccaaggacagctttttaaatatttaacagtatcaataatttttcaggttctgtgagaattttataatttataatttgcagacttaatgtataatctattttgtcctaacaattacaaatatattttttatttcagattgtatatattcctaccagatggagataattacagctttaaaaatttttattttttcattttatttcacacattgacattaaatttttatggacacataataactgtacatatatatggggtagaatgtgatgttttaatacatgtactcaatgtgtaatgatcaaatcagggtaatttgcataatgatttttctgtagggagctcatcctactatgcaataggacaccagaacttattcctgggttctacatccgttaaggcaaccaaggattggaaatattggaaaaaaaaattgcgtctgtactgaacatgtacagacttttttcttgtccttattccttacacaatatagtacaataactatttgcatgacatttacatcggatattatgagtgatctagagttgatctcggacgctatgggcagggagtgcaagggaagggacccatgtgcttcatccgagactgattcccttggtcccccggaatctctgacgggcccctggcatggagcgcggtctcc

SEQ ID NO: 608093 - DNA, 209 bp, Homo sapiens
gcaaaaccaacttcaccaaaaagccaggtaacattaacaaaggaattccctgtatcaatcttggatctcaacaatcgggaaaaaggaggcggataggtgtttatggagatgggttcctgtaggagaaaattagtgaggaaacacaggtgatgataatgtttcagcaggcaattttgccctcagagcctgtagacatctctacagcaatg

SEQ ID NO: 608094 - DNA, 1314 bp, Homo sapiens
agcgggaggccggtgggtacttggagaacttactacgtctagctggaggattgtaaatgcaccaatcagcatgctgtgtctagctcaagaactcaagctccatgaggagatgtttcattgtcgagagcagtcatgatggcctgcactccacacaatgcaacagagtgaaagagcaggttctgcttctttggtgtagtcctgaagcttcctaagaaacttcacatcaggtgatggataggagcaaccctgtaaaaccagccttagactatttttcaaacaggctggtgaattaccatatctccgtcaagtgcagtaaccagttcaagttggaagtgtgtcttttgaaatcagacaacaaagtcgtggacaaccaggctgggacccagggccagctgaaggtgctgggtgccaacctctggtggccgtacctgatgcacgaacaccccgcctacctgtactcgtgggaggatggtgattgctcacaccaaagccttggacccctcccagcctgtgacctttgtgaccaactccacctacgcagcagacaagggggctctgtatgtggatgtgatccgtgtgaacagctactactcttggtatcgcaactacgggcacctggagttgattcagctgcagctggccgcccagtttgagaattggtgtaagacatcacaatcccattattcagagcgcgtatggagtggaaacgcttgtagggtttcaccagattgtatatattcctaccagatggagataattacagctttaaaaatttttattttttcattttatttcacacattgacattaaatttttatggacacataataactgtacatatatatggggtagaatgtgatgttttaatacatgtactcaatgtgtaatgatcaaatcagggtaatttgcataatgatttttctgtagggagaaaattcaaaatctactcttctggctattttcaaatatataatatgttattgttaactatactcatcctactatgcaataggacaccagaacttattcctgggttctacatccgttaaggcaaccaaggattggaaatattggaaaaaaaaattgcgtctgtactgaacatgtacagacttttttcttgtccttattccttacacaatatagtacaataactatttgcatgacatttacatcggatattatgagtgatctagagttgatctcggacgctatgggcagggagtgcaagggaagggacccatgtgcttcatccgagactgattcccttggtcccccggaatctctgacgggcccctggcatggagcgcggtctcc

SEQ ID NO: 608095 - DNA, 246 bp, Homo sapiens
agtctgttagaggcaaggtaacccagagtctcccagtgaaagaaggtgacagaggtctctctccttcgagtggggtggtctgtgatttgtcccgtccacagctgggtgaagatgaattctcttacggtttcgatggacgaggactcaaggcagaaaatggacacttggaggaattgggccagactttgggggagaatgatgttatgggctgcttggctaatttggagactgaagaagtagaacttt

SEQ ID NO: 608096 - DNA, 1185 bp, Homo sapiens
gagaccgagcgagattctttctccacaaaaaaaaaaaaaaagcaacagaagcaaatgagagtgcctgggagtggtcattgtggggcattcctgttcgtgtgacccaggtcatgtccctccctaagccctggtctctcttgcctcctgcagggctggtgaattaccatatctccgtcaagtgcagtaaccagttcaagttggaagtgtgtcttttgaaatcagacaacaaagtcgtggacaaccaggctgggacccagggccagctgaaggtgctgggtgccaacctctggtggccgtacctgatgcacgaacaccccgcctacctgtactcgtgggaggatggtgattgctcacaccaaagccttggacccctcccagcctgtgacctttgtgaccaactccacctacgcagcagacaagggggctctgtatgtggatgtgatccgtgtgaacagctactactcttggtatcgcaactacgggcacctggagttgattcagctgcagctggccgcccagtttgagaattggtgtaagacatcacaatcccattattcagagcgcgtatggagtggaaacgcttgtagggtttcaccagattgtatatattcctaccagatggagataattacagctttaaaaatttttattttttcattttatttcacacattgacattaaatttttatggacacataataactgtacatatatatggggtagaatgtgatgttttaatacatgtactcaatgtgtaatgatcaaatcagggtaatttgcataatgatttttctgtagggagaaaattcaaaatctactcttctggctattttcaaatatataatatgttattgttaactatactcatcctactatgcaataggacaccagaacttattcctgggttctacatccgttaaggcaaccaaggattggaaatattggaaaaaaaaattgcgtctgtactgaacatgtacagacttttttcttgtccttattccttacacaatatagtacaataactatttgcatgacatttacatcggatattatgagtgatctagagttgatctcggacgctatgggcagggagtgcaagggaagggacccatgtgcttcatccgagactgattcccttggtcccccggaatctctgacgggcccctggcatggagcgcggtctcc

SEQ ID NO: 608097 - DNA, 121 bp, Homo sapiens
ctactttcgacttttcatttcctgtagttgacaattctgcatgtatctagtcctcttagaaataggttaaactgaagcaacttgtatggaaggatctctccacagggcttgttttccagga

SEQ ID NO: 608098 - DNA, 132 bp, Homo sapiens
attctgctactacaatgcctctatacaggctcttctcagcaaagcaaacaggatctccttttaaaatataagatcatgtcactctttggcttaaaaccctgtcatgactttccatcttcactcagagcaaaa

SEQ ID NO: 608099 - DNA, 265 bp, Homo sapiens
ggggggggggggggggggtgccccggggggcccttttttttttttccccccccttttttggggggggggttccggggggcccccccccccccggggcccccccccccccccttttttagggggggccccccccccgggggcccggggggggggtggccccgctttttttttccttttggggggggggggggggggtttttttttttttttttcccccccccccccccccccccccccccctttcccccttttttttgggggggga

SEQ ID NO: 608100 - DNA, 402 bp, Homo sapiens
gatccagtctcgtagtatcatacctatacccaggtgtaaaaggaccttctgtaggggctagaaagtgtgctggtagcatgtggctcactctctgtattccagcactttgtgaggctgagacgggcggatcacaaggtcagtgagatcaagaccatcctggctaatgcggtgaaacctcatctctactaaaaatacaaaaaattagctgggtgtgatgacaggtgcctgtagtcccagctactcgggaggctgaggcgggagaatggcgtgaacccgggagacggagcttgcagtaagccgagatcgcaccactgcactccagcgcttgcgacagagcaagtcaaaaaaaaaacaccggtgtgaaaaaatcaaagagttttcccttcaaaccaaacggccaag

SEQ ID NO: 608101 - DNA, 390 bp, Homo sapiens
ctacacaaaccttccctttgctctggaaggtgatactatcactgtgtctcaaacaaaggcagtcagtacctctgtataccacacttgcagaaatgtgatccatacccatgaataatagtcttccaatagtgccccagccaggaagcaaggaaaatgtgttcctgaagtagcggtttatgaactgagtctggaacatcttcctattttcagaaatttgccttctgaaaatgtcatggcaaagaagtaaacatgtaaaaaaacatttttgttttatacccagttttctttgtctttccctaagtaattgtatgttggttaatacattttctggagtttcaatactcagtgtgactatgctagtatcttgcttagttactgtgttttttcagc

SEQ ID NO: 608102 - DNA, 609 bp, Homo sapiens
ctgagaatccgtcgccatccgccaccatggtgaacttcacagtagatcagatccgtgccatcatggacaagaaagccaacatccggaacatgtcagtcatcgcccatgtggaccacggcaagtccacgctgaccgactcccttgtgtgcaaggctggcatcattgcctctgcccgagctggggagacgcgcttcactgacactcgcaaggatgagcaggagcgctgcatcacaatcaaatccaccgccatctccctcttctacgagctctctgagaacgacctgaacttcattaagcagagcaaggatggctcgggcttcctcatcaacctcatcgactctccaggccatgtggacttctcttcagaggtgacagctgccttgcgtgtcaccgatggagctctggtggtggtggactgtgtgtctggcgtgtgtgtgcagacagaaactgtgctgcgccaggccatcgctgaacgcatcaagcccgtcctgatgatgaacaagatggaccgggccctgctggagctgcagctggagcccgaggagctctaccagaccttccagcgcatcgtggagaacgtcaacgtcatcatctctacctacggcgagg

SEQ ID NO: 608103 - DNA, 800 bp, Homo sapiens
  misc_feature (512)..(512): n is a, c, g, or t
  misc_feature (517)..(517): n is a, c, g, or t
  misc_feature (585)..(585): n is a, c, g, or t
  misc_feature (599)..(599): n is a, c, g, or t
  misc_feature (608)..(608): n is a, c, g, or t
  misc_feature (662)..(662): n is a, c, g, or t
  misc_feature (682)..(682): n is a, c, g, or t
  misc_feature (691)..(691): n is a, c, g, or t
  misc_feature (697)..(697): n is a, c, g, or t
  misc_feature (714)..(714): n is a, c, g, or t
  misc_feature (756)..(756): n is a, c, g, or t
  misc_feature (777)..(777): n is a, c, g, or t
aagaaaactgtgagctattatatagtgtttcttttttaacacaaatcttttaactttaaaaaaaggcaaaaatttttttttctacttcccacccagcttaccaccttgatctctttaacttatgttctaaactttggtgttaatggtggtgtctagcatgctagtagttagattttatttagatgccataactggtaatacagcttttattttgactatattaatttagttttttgaggggaagtttgtttattctgtgactctcaaagcacacagaggttttaaaatatatattattaagactgagagaagaggaaatgggagggagtaacatcacagaagtgctgttgttcaactgttcttcaatatagttgctagtagggttgtatttactcagtaaggaagtcagtgacctgaactacctataaaaattcaacagtgctgcagtggtgcttaagtgaaaccctttggctatctagtagtttttatgctactgaaacttggattactgnatganattcacttggcttgggccctctatgtagacaaacattcatattcataagtaggggtggatactggccnggtttataacttanttttcaaanattaacaacccctgcttttcaagggggtatttttttttttttgaagcaggaaanaaacctttgtttttgccccngcggattgngtaagnaatatgggtacctggcnaaggctttttttttcctgggaaaatttgaagcgggccagctncttgctaccaaatgggccttnaaatattggacggggcttttaaa

SEQ ID NO: 608104 - DNA, 674 bp, Homo sapiens
  misc_feature (458)..(458): n is a, c, g, or t
  misc_feature (460)..(461): n is a, c, g, or t
  misc_feature (478)..(478): n is a, c, g, or t
  misc_feature (515)..(515): n is a, c, g, or t
attttatgtttaccccaattaaaattatgaatgggttgggctgttggtttgtagatggtagaccagacggcccagcctgttggccagggtcaaattccaacatgctgagcctgttgcagaagacttagcctttgaagcaggcagccctgagcttctgattcctccaggcccaaaccaccgttgccctattttacaagaccttggctggcttcatgacgtgttcttgaactggagccagtggtgagctcagggaggctcgtgtaacaatagttccctgaggcatgtttatagccgggtgccctcttcacaacagacacatgtcctgggtcatctcattctctctgcactgccacggggaggatggggaggcagtcacgtctccatgtggcatatcaggggaccggggtgggaggggctgacttgagcaaggccagaactaggtctgcgcccttgccctntnnctaatgccagattcggncttacccgtgaagcttgcctggcaagggatggccttnctgaattctgtgtggctaagcttgggttgcatgctttcttgacaaagacagatagtcatatgctcagttttcaagctggacgggtgtgtctcactactcagcttgctgttgtatgcttaggctgcattgacacaacagaattagtcgaggtggccgttt

SEQ ID NO: 608105 - DNA, 987 bp, Homo sapiens
catttattcaatgctactgtgtatataatggaaaacttaagtccagtttgaaacatctagtctttctaggtgtttaaaagtgtacaacagcctgtcgcagtggcgcatgcctgtaatcccagcacttgggaggccgaggcaggcggatcacgaggtcaagagatcaggaccatcttggccaacatggtgaaaccccatctttactaaaaatacaaaaattagctggtcgtggtggtgcccacctgtagaccccagttactcgagaggctgaggcaggagaatcgcttgaacttgggaggcggaagttgcagtgaggcacaagatcgcaccactgcactccagcctgcgacagagcgaggctccgttcaaaaaaacaaaaagtgcacaagtaggttaccagtagagggcttaagtaacacccactctaagcaatatgttttcagatacttcctaggagtggttgcattatgggaatggacattgttacaaattgatgctttaggagcgaatgcagatatcatgggtgtaggggtgggggaaaggggggtgggagagaaaggtatgcagggaacaggggtctggtgtccatgaatagtacacatggtctaaccatgtgtctatatgtgctttaggtaaactggtcttaacagggactgcgccaaaaaggcccaacgcatgtacacacaacagatggtgcaaatcacgccttcgggggaatggaccctaggagacagtaacagaaaggcccatccacgggaatgacaccaacttagaacaccactgggatcaaatccggaattaacaggggcatgtgcaacggagacacgaagggacaggaaaggaacgtcaacatgcaattaacacacgtaagtcacccggccaaaggcgagaaacgcgtggagagcacacatcgaaaacagaagggacactacaaccaacaaccatacagaaaaaacaagagagacaaggacaaacacaaaagaacaa

SEQ ID NO: 608106 - DNA, 829 bp, Homo sapiens
catgagggtccagtgtgtgacttgctgtggtcagatccagatgaccgtggtggttggggtatatctcctcgtaggagctggtcacaccttcggggcaagatatttgtgagtacaatttaatcatgccgatgggccgtcacggtaggttggtctagagtctcacgcagcactagatgatggtaggggataatagacgtggatgcccttactgacacggtaatgtggtacaccgatcttcacgcggctccacaactattgtaatcgcttgtgggtgagaccaagtcccgtcttagtacatgggaaactatgagcgataactctaacccattatctctatatcttggcggataggatactcaggaataactcgtaagtaggagcgagaccaaatggtaagttgagatgagatatcacacaagagatagtgtccctggtatatgaaaatttataagactctgaatcaggatagtatgccattgaaaacgattattagtcgagcttaagtggtaatatgggaaagatgacaagcaagtaaactccaataggtgtccagaagacactaggttatggcagtgtaaaagagaaactatgtgtttgcgcataggaaccatgggtgatgtgggcatataagaagagtacgaggaggcctcgtttgtaattgcaaacatgccgtgtccatgtttagcaatgaatccagttgataggatgctagaagcgatatgtgtggtgaagaaaggccaagtttctgggattgggcaattagggctacttattgattacgtgtgagaaagtggcgattcatagggatggaattaaaacatcgggatta

SEQ ID NO: 608107 - DNA, 354 bp, Homo sapiens
aacctcaaactgtctgtcctgtccagcggcggccccggtggcacggacgatgaagccgatgcgtgaaggatgctggctgtgtgatgcctggggacaaggacaaagaacatggatgctgtcttgaacgatggataaacatgcttcaagatgaacttggagatgctcgtggaacgactaggtgtgagaattgatacatccctgtatcgaccagctgctggagcgaatttgctgaagtgcagattctgttcttactacaacgttccgatgacattcaggttgccccaagccctctcaaacattatcttgctgtcacaacaactactgtgcaacaaccttgacatgggacacactcct

SEQ ID NO: 608108 - DNA, 913 bp, Homo sapiens
gcgtgtgcacctcgctgctccagcctctggggcgcatgccaaccttccagcctgcgacctgcggagaaaaaaaatcacttattttcttgccccatacataccttgaggcgagcaaagaaaaatgaaatttgaatccatgagggaaatcgtgcacatccaggctggtcagtgtggaaaccagatcggtgccaagttctgggaggtgatcagtgatgaacatggtatcgaccccaccggcacctaccactggggacagcagaccttgcaagctggacacgcatctcttgtgtactacaatgaagccagaggtggcaagatatgttcctcgtgcgcatcctggtggatctagaacgctgggaccatggagctctgtacgctcagcgtcctttaggtgcagatcttgagaaccagaacaacttggtacttgggtcagatctggggcacggtaatcgaactgggccaacaggccatatagcacatgagggctgccgagctggatagattctgtcctggatgtggtacggaaggaggcagagagcttgtgagtgcctgcacgggcttccagctgacccattcactgggcggggcacaggcgtctgggaatgggcgctctccttagcaggaagatccgataaggaataccctgatctgctatcatggacgtaccttcaggtgtggttgccattcacccgaaaaggggtctgaggaccgatgatcgaggcgctaaaagtgcaccctctccgtgcaatcagtaggtagagaatactgctgcgacctatggatttgacaaacgagggccccccaaggatatcctgctccgatcttagctgagcacaccaagctaagggatctgaacacttgttctagcaccagaagtgtggcacacctgctcattcaggcgagtaaggggcac

SEQ ID NO: 608109 - DNA, 304 bp, Homo sapiens
agattattccttcagagtaaacccatgaccaactatctacatccccctagatggtcctgactgaagtacaggttcttctatcagtttctgctggcaatgaacgagccacagcaaatgagatcaaggatgaatatgtggagacgctgagcaagatttacctgtcttactaccgctcttacctggggcggctcatgaaggtgcagtatccatttgaggccctcttccgcagccagcactacgccctcctagacaattcctgccgcgaataccttttcatctgtgaattttttgttgtgtctggccc

SEQ ID NO: 608110 - DNA, 470 bp, Homo sapiens
gttttttaaggtaccaaaagaaaaaagtctctctatgattggtgtgaggatggcattacaagtgtagataagtaggagaagaaatacttctttataaaatttgatctctttatttaaatattttattaaactatgtgaaatttcataaattttatataggatttacatgtgattttttaaatggggttgataaccatggattcaatacatattggtagagcatctactatgttcccatcactgtgttagcctctactgagcaaaaccagaaatgacccttcttctacaaagacattatagttccctgtggaaaaactgatagcaatcaaagtacacaaagaaacataaaccaacaacagtgtgagagctacacatgacagcacagtcagaagatctggcctggtcagtttcccgaggacgtgaataacaccagctaacacatagttaccgtgtacaggcaaccttagaat

SEQ ID NO: 608111 - DNA, 447 bp, Homo sapiens
  misc_feature (112)..(112): n is a, c, g, or t
  misc_feature (286)..(286): n is a, c, g, or t
  misc_feature (406)..(406): n is a, c, g, or t
cgggtgatgaacgctttaaagctgaaatgtttgcagaattgtacaagaagtaaatataagagatgactataggaaatgtcctagtaactgtggtcaaaaaataaaaattcgncgtgttttaatgaattggcccaggagattggtgagcattggtatagtctgggactccgagcattctgacttgaccgaagctgtagttcggaatctagcaacacacctttatcttcctgggcttttttatagagttactgatgaaaatgccaaaaatagtgaacttaaccttgtnggtatgatctgctacaccagccaacattattgtgcctttgcatttcacaccaaaagttccaaatgggtattttttgatgatgcaaatgtgaaagagatcggaactagatggaaagatgtngtctccaaatgcattcgatgccactttcagccactactttg

SEQ ID NO: 608112 - DNA, 1125 bp, Homo sapiens
  misc_feature (104)..(104): n is a, c, g, or t
  misc_feature (107)..(107): n is a, c, g, or t
  misc_feature (109)..(109): n is a, c, g, or t
  misc_feature (111)..(111): n is a, c, g, or t
  misc_feature (113)..(113): n is a, c, g, or t
  misc_feature (115)..(115): n is a, c, g, or t
  misc_feature (117)..(120): n is a, c, g, or t
  misc_feature (122)..(122): n is a, c, g, or t
  misc_feature (124)..(124): n is a, c, g, or t
  misc_feature (127)..(127): n is a, c, g, or t
  misc_feature (809)..(809): n is a, c, g, or t
gtaagtctgaccagtcaaaggcaagaggtatcaaggtggagaaacagatctttggagaagccaccaagcagcctggaatcgtatttgttgcagccaagtttganggnancntngncnnnngntnccntcatatctctgttaacaacgtgcttccggtcttgacaacctgatgcaacagaagctggtggacaagaacatcttctccttctacctgaacagggacccagaagggcaacccggaggagaactaatgcttggtggcactgactccaagtactaccacggggagctgtcctacctgaacgtcactcgaaaggcctactggcaggtgcacatggaccagttggaggtgggcaatgagctgaccctgtgcaagggaggctgtgaggctattgtggacacagggacatctcttctggtggggcctgtggaagaggtgaaggagctgcagaaggccatcggggcagtgcctcttatccaggtgagtatatgattccttgtgagaaggtgtccagcctgcccacggtctacctgaagctaggaggcaaaaactatgaactacacccagacaagtatatactcaaggtatcgcagggtggaaagacaatctgcctgagtggcttcatgggaatggacataccccctcccagtgggccgctctggatcctgggcgatgtcttcattggttcctactacactgtgtttgacagagacaacaatagggtcggctttgccaatgctgtcgtactctaacttgctccttctccactgtcagggaactggatcagagtccagtagaggaagccagncagcccatcctccactgcccactcacacatagtcacactcgttatgttgctggaccctggggggagacctggctggagcttgtccagctgttctgttctgtggttcctcaccctgggttcagattgctgccctctgcctgtctgaaggaggccaaggccacccagtacacgaggctgccttcaaaggcccctactggtttaatagctgctgagatggattgtcttgtcctgccggcctttgctgtgtgggcagtactctgaagcaggcaaatgggtcttaggatcctccagaaactgtctgaaccagaccattacc

SEQ ID NO: 608113 - DNA, 522 bp, Homo sapiens
tggtgaccagacagggatgtcgttggagagattctggtgttgaagtgcttcagctacatgtctcagtgaaaagaagttcagcgaagtggcgtctctctctgatgagaccaattcaattgatgtactctcacagccatggaatgagcccccagtaattctctcgatggtcattcacatgctaagttatggacgtggtattgccagggcaatggtgctgatgcagtggggggctgtcctgcatatgcaccggacagtgaagacgatgtggtacctccacctcagcgtggcggacctcctctgctgcctcatccttgcccttctcgcagggtcacttggatctccagggaagcagtgcccctatgttaggttcctatgcaatctcatcccctccatcattgtcctcaacattgtttgccagtgtcttcctgctttactgtcattagcctggtatcggtgtcttgtgctatacaaggccaatttggtgtcagaatcatcgcaagtgtagggatggactgctctatc

SEQ ID NO: 608114 - DNA, 837 bp, Homo sapiens
  misc_feature (488)..(488): n is a, c, g, or t
gggggtgaagaaggggccggccttcaagcaacagcgacgcaagatggcagccaccacgggctcgggagtaaaagtccctcgcaatttccgactgttggaagaactcgaagaaggccagaaaggagtaggagatggcacagttagctggggtctagaagatgacgaagacatgacacttacaagatggacagggatgataattgggcctccaagaacaattttatgaaaaccgaatatacagccttaaaaatagaatgtggacctaaataccccagaagcaccccccttgtgtcaagatttgtaaacaaaaattaatatgcaatggcagtacacatcagtctctcaatggagtggtggcacccaagagccatatcagtgctagcacaaaatggcagcaattcatatagcatccaaagttgtcctgcagagagcttcggcgcctaatgatgtctaaaagaaacatatgaaactccctcagaccgcccganaggacagtgttacagcaattaactcaagaaagaaaaaccacaggcccttccccttcccgcccaattcgatttaatcagtccttcattttccacagaagtaaattttctagatacgtcttgtagaacctcaaagtaccggaaggaagctcccattcgaaggaatagtttatctgtaagatactgtaaatgatactaagtttgttgtccatttgaaactagataagttgtgctataacgaatcatcctgtcaggtgtaacgcactgtccacgtagttgaacttgctgggatcagagaaagtctagtttacaatggattcccatcataactggtggggcacatctaactcaa

SEQ ID NO: 608115 - DNA, 416 bp, Homo sapiens
cacatttagcgtcacggccagcagtgctcgggccaaagaaaatgtctggctgctgcacgacacaacgaaagcggtgcatggccatcgttgtgtagataagcttcccaaggatgccgtctctcaccttactcgctcagcacgcaccaggtctgcccacagcgcagtacggccgcaggcgatgcagtcgatcagttcaagattcatggttggattgcctcccctgtaccggtggagaataagcgcccagaggtcaggcggctatgatggctcggttgattgctgccagggagcaaccgggctaagttgccaagtaatggaataccaatcccggaaaccatctttgcctctgtgacattcaggtaggcgctaacactgcgcgtcaaatacagcgagcaggcaacccctatcatcaagaa

SEQ ID NO: 608116 - DNA, 395 bp, Homo sapiens
aggaattgatcatgtgaaagcactgccaatttttagatatgaacactgggagggttctatacaaactgcggtgagaaaacaaaagagcaaactcttggcagcaacctggaaagaaaactggtcatcacatttgactccctgttcactaatgtgctgataaataaatgggaagtggacttttagaatccctggtcgacagaggccacagtgaggcctggcaaagacgccagagacgaacgacagccagcccgggcggacctgacacgtggcacagggacttccagcagtgttgcctaatggtggcacattgtaaatggcaacccagacaccaacacaggctgctgtaaacctgcttccagggtgaaggcaggtgcgagctatgtgttgaaagggca

SEQ ID NO: 608117 - DNA, 870 bp, Homo sapiens
  misc_feature (1)..(1): n is a, c, g, or t
ntgctcctgctgagagtgcgcttcccctctcctcccggccgtctttgtggggcaactcctttttgttccgctgcaaaccttgtttgtgacctcctcgtcggaggccccaattggcgccttccacaatggtcccccggcgataaaaacttctttggtagtgccttgacagtgttctcgcaagttatatatgcatttcaaagaggattcttctgcgtccccagagtgtgttttgctgtcacccgcgtctgccgggggcgccgcatgacgcccgtggtaggccgcacgtttgagggtactacccccctgtgccggtataatacccacacccgcgcgttataccgccccccagctgggtgaggcgaacacggctccccctcttgggggttgtctcacatccgtgccggaagaccactggtcgctgtcggattagacgccccctctattgcggtcttctacgactctctatctctccggacggtgcccccccctgtgtgtgaatttttcccgggggaggtggtcattcgcccccctcggccctcgtgggagacattacaatccgcgcgctgccacgcctgctgtgccaaaatctttttgacgccccgacactatacaaaaggcgatgacatgtgccccgtaacaaccccaccatctcttacccttctctcacagtatcattataatttgatccccggagtcatatctaacacactcttcttataataaatcggatattccccccctgaaccacaagagcatgggagaacaacccgataatcccaacagtttcccccacaacaaaaacagatgaggaacccattctactccccaaacacccggggaaaaaaaacccaaatgggcgccgacaaaaca

SEQ ID NO: 608118 - DNA, 342 bp, Homo sapiens
  misc_feature (274)..(274): n is a, c, g, or t
  misc_feature (301)..(301): n is a, c, g, or t
  misc_feature (313)..(313): n is a, c, g, or t
  misc_feature (329)..(329): n is a, c, g, or t
  misc_feature (340)..(340): n is a, c, g, or t
cggcacgagtgcagaccagtaccagcttgtggcccgttaggaaccgggcagcacaggacgaggtgagggagcatgattgcccgagctccacccactttcagatcagcctgggcatcagattcccataggagcgtgaaccctactgtgagctgcgcacttggatctggattgcgctctgcttctgtgaggttggctggcagtccctgaagactcctgcctgaggcctctgcctgaaccctgtcctcagggggccagaagcaaactccagcccttnccgtggtctactgctcgctgaggaagncgcagtgcacantgggatccacaaaggnacagaaccatntt

SEQ ID NO: 608119 - DNA, 146 bp, Homo sapiens
gagcactgcagctggtggagtgtggcaggtggcagcagcgggttcaggaggagtggctccctacctgggacacgaggtttagctggacatgatgtgctacacaatgcttcatagttgatccagccatgggagtcctcttgcccagc

SEQ ID NO: 608120 - DNA, 966 bp, Homo sapiens
ggccgggcgcggtggctcacgcctgtaatcccagctctcagggaggctaagaggcgggaggatagcttgagcccaggagttcgagacctgcctgggcaatatagcgagaccccgtcctccacgaaaacaggaacaaaaaaaaaaaaacaagaaaggacaaacaaaaaaataaaggggtagtgtcccctctaagggaaacctttccaccttccggggtccaagcgcggatcctctcgggcataaaggcccccaagaggcaggggaaccccggggttccgttgccaccatagtgccggcgcaaagtttgggcatttttaaggataaaaccaggggaggtttccccccatggttggggcaaggggcgggccttcagaatcccgtggacgctcaaggttgggaatccacccacaacttttgggctcccaaaaggggggcacagagcgcaatggggttgtagagcccaccgtgtgtgtctgagccggggcttcaaccattttttcttggacgacaaaatatccatttgccaacaccgtgcttcaaaagtgggagccggggccaccgcaccagggggcttccaacaacttggaatccccaaggcacggggggagaaggcgtagagcgcaaattctcgttggtactaaaattccgttcacactcctgtacatttcaaacgaaaaatattttggtgggccacctcgggagccgtgaggccggaccaaacggccaaacctggggggcgcacgacctgcggggacccggaaatggccccgggacccagggcggggaacaaaggcgaaactcctccgccagaagagagggatttccccagtgtatcacccagggggggaagggtccccatgggcccaccaatgggcgggagaactccaaggtcaggcggcaaatccgggcgactcggaaggacgcgacccatgggcgccggggccatagaccggctgagacagaaga

SEQ ID NO: 608121 - DNA, 418 bp, Homo sapiens
  misc_feature (297)..(297): n is a, c, g, or t
  misc_feature (314)..(314): n is a, c, g, or t
  misc_feature (335)..(335): n is a, c, g, or t
  misc_feature (389)..(389): n is a, c, g, or t
  misc_feature (411)..(411): n is a, c, g, or t
  misc_feature (417)..(417): n is a, c, g, or t
tgaggagtcttactctgttgagtgcagtggtgtgatctcggctcgctgcaacctctgcctcccgggttcaagcgattgtcctgcctcagcctcccgaataggtgggattacaggtgcccgccaccatgcccagctaatttttgtatttttagtagagacggggtttcatcatactggccaggctggtctcaaactcctgaccttgtgatccacccacctcagcctcccaaagtgcttgggattacaggacatgagcccccgcgcccggccaagtttaggaagatagtttgggcagtntccaccaaagctgagcngccagccattctggccctagntgtgtggcacagggagaagtggggggacacacacttcacctttaggaaagtgtnccccttcattcaggcagtcagngatttna

SEQ ID NO: 608122 - DNA, 189 bp, Homo sapiens
tatgggaataaaaggagatactggcaacaggatgtgtcgacgaaagttacggtcactcagtggtaaatccatcagcttttcactggtaaaaaatttggcaaaatatacatgttctcctccggttttcatttcttccatcttttttctggaggccggagtatcatctaatttataactcttaaaaacagg

SEQ ID NO: 608123 - DNA, 125 bp, Homo sapiens
  misc_feature (84)..(84): n is a, c, g, or t
  misc_feature (94)..(94): n is a, c, g, or t
ttaaacaccgcaatcaacaccgcaatctactataaaatacaaaaattagctgggtatggtggcgcgtacctgtggtcctagccnttttaaaaanccccccaaaaaaaaggttttttttttttttt

SEQ ID NO: 608124 - DNA, 845 bp, Homo sapiens
  misc_feature (596)..(596): n is a, c, g, or t
  misc_feature (739)..(739): n is a, c, g, or t
  misc_feature (769)..(769): n is a, c, g, or t
  misc_feature (780)..(780): n is a, c, g, or t
  misc_feature (839)..(839): n is a, c, g, or t
gaggcggcggcggcgggccgggcggcgggcccgggcggcgcgcggccggcgccgggggcccggggcgcgggcggcagccggggagcccggccgcagcccccggggcaaggcccggcccgggaacaggacgaagaggcccaaccaccggcgaccacagcacgcaggccagacgccagccgggccagcgagcagggcgaagggcggcggggcacccacggcagccccgagcggcgcgcgcggccgcggggccagggacgcgcccagcggcaccagggacggccagcacgagcccagcaagcccgggaaggcggggggcgagcgggcccggcagggcggggagcccagacgcagcaaggaccgccacgcggggccggagaaccgggccggcgaggagcggccaggggacgacaggggcgggggcagcgcgcccgaggccagcgggacggcggacggagcggaggggccgagggaggcgaggaacggaaacgggagaggggcaagcagggaacgcgcggaaagggaagccgaggagagcgcacgacagaagaccgagggacggaacaaggacaacgagggcaggcgggcgaaagggaaanagagaaagacgaagggccaggaggggacggcaggaggggaggggaaggagaggcgaaaggccgcgcggggaaacaggccacgggacacgggcaaccgcgagaccagcgcgggcggccgcggcccgccacggaaggggaaggangaagagagcagcaggggcgaggaagaggangaacgggccanaggacgcgggggggaaggcgcgagagcggagaaggggaaggagcgacgcgggaaaaaanggaagc

SEQ ID NO: 608125 - DNA, 162 bp, Homo sapiens
tgtcgtattccaaacagtcccaatgtagcgactcttcctttaggacctgaggtgggaggatcactcgagcccgggaggttgaggctgcagtgagccaagacggcaccactgcactccagcctgggtgacagaccgagactccatctcaaattaattaattaa

SEQ ID NO: 608126 - DNA, 106 bp, Homo sapiens
gttggctgtcgtcactaagacagggcccttcagcttcctctggatcgaggggctcttctttgacgtgtaccggatgcgacggcttgctatggagatctgcctggac

SEQ ID NO: 608127 - DNA, 504 bp, Homo sapiens
tgagaggattgcttgagcccaggagttcgagaccagcctgggcaacaaagcaagacccccatctctaagaaaagtaaataaataggcagggtgcagtggctcacccctgtaatcccagcaccttgggaggacgaggtgggcagatggcttgggctcaggagtttgagaccagcctggccggcacggcaaaaccctgtctctactaaaaatacaagaattagctgggcgtggtggtgggtgcctgtggtcccagatactcaggaggttgagacaggggaatcacttgaacctggaggcagagattgcagtaaccggagatcgtgccattgcattccatcctgggcgacagagcgaaactccgtctcaaagaaaaaaataaaaggactatgagtgggagcagatgtagggagatgcaagggacggcgtatcaggagaacagtacctgttctgggctctccgataatcaaaccactcccgtaccaggagtaccgagctcgacatcgt

SEQ ID NO: 608128 - DNA, 922 bp, Homo sapiens
gggatccgtctcgatctctgcctgggagggcgcgccccggtgggcgtggacactgttctccggccgcgtcgggccgggcgggtggggcgtcctgcgggttgggcggctggcctccgggtgtggcaccccggctcgccctggcccctcctccgcgcggctcccgggtgtggtgtcgcaccagctctctgctctcccaggcagcgccgccgccgggcccctccagttcccgggaccatggccaacctggagcggactttcatggccatcaagccgggacgggttgcagcgcgcccttggtgtggcggggaaaatccatcaaagggcggctttcggagccagaggggaattccggccttcggtgccaatggagatgttccctcgcgggccccctggaaaagaacactttgaaggcgggcattatatttgggccttgaaagaccgggacatatcttcccgtggctgggtgaaggtactattgaacctcgggggccgggttgtgtggccatgggctctgtgggcgggggcttggaactgtggtggaacacaggccgaggtgatgctgtggggggagaccaatccaggagattcaaaggccgaggcaacattcgcggtggggactttcgtgcattcaggtgtgccaggaaacattcattcatgggcgtgctcagaacagttgtgaaaagaaatcggctatggttaagcctggagaaatggttggtacaagtttgtgtcatggctggtcaatggataaggagggggcaaagaggttcctacgccggggtggtggcctgacaggttctcactgtgaggcagggggatttttaggttgcaaaggtggcggagaaaaaaaaaaagtggggggcagataactggggcgaagaggggtcgacgggggtaaacggggcgtggtgttaacgggggg

SEQ ID NO: 608129 - DNA, 1391 bp, Homo sapiens
agtcgatgatctgggtcgcttctgtgcttcgggctgtcagctgctgttgcgcgtggcattctcacgcatgtatctttgccgctgtggtagtaattgtctactcccgtcgcgcccgtctgccgcgcgtgtgggagttcgtcatatccgcgctgcttgttttgctcgtgtgctcttctgtggggccggttccttccgttggtgtttgccccccccgagagctatccttgcggcggcggacatgattccaccctctccctctgggtgtgcctccccacgctcattggctgcggcgccccgctatggggggctggttcaccccccctggtgtcgatggtgggtggtcacaagttggtgtctacacatgagtggggccccccttatcttgcccccccctgttgttggatccacagtaccgcccgttggtgggttgtttccgggccccggggcactttttcccggggtaatatcccgtgcggctctcttttcggggttttttgtgacccccgttttccccattgccgtgttctgccccttggtgttgagcacctccaaaccgtgggcgctgcccttgttgtagttggtgacccaccttgttgggccttagggcgcgtgttgaccgcagagtccccttgtgggatcacgacagggggtgagccacctcacagacgtgctgcattgttacggccccctggattcggggcgtcacttccggggcaagtatcgcccccggccgcatcctcattatggaagtcaccccctatgcccagtcagtgtcgtacgggtccaccctgtgcgtaataagtcgggtcccttgtggaccttctccgcccgtttgtccccagcccacaggaccacctctcgagttacttcctgacccagtcatgacccccttggcccacatagaaatgatttcactgtcccacccgctatgccacgagtgccccaccgcgaccccccttcgaaaccttggccgcaaggggagctccgcaaactacgttctcacggccttcaacaatcgaatatccccgccacggccccttcgcccctattttcttcgatagcccgcattacccccaaccacttagttaatacacttataccacccctctacccacctacacatcgttcctacgggaccacaacactatgtgaccgcacctctcccctgagactctacacaacatattgttgtcacccagaccctacttctaacctccctgttctttatgaattcgtaccagcatacccccgattccgctacgacccaactcgataccacctccttatgtagagacaaacttctctcacccactctaccctcagccttcacttattatgtatatgtctccataccccattaccattctccagcattccccctccaacctcta

SEQ ID NO: 608130 - DNA, 412 bp, Homo sapiens
ttttttttttttggccccccccgttggcccccccgggtttccccttttttttttgggggggattttgggggggaaatttttttcccccaaaattttctcaggggaaaatttttccccctttttaacccccccccccaaaaagccccccaaaagggggcccccccccgggggcccccccttttgggggcgggttttcccccggggggcccccctggggccgggatttttttttttttaaaattaaaaaaaaaaaaaaaaaaaaatgtgggggccccttgggggcccactttttaaaaaaaaaatttaaagggtttggttgagggggggggttggggtgggaagttagggtttattttaccctttttttccccctgggcccccaaaggggggcccttttttaaacccttttcca

SEQ ID NO: 608131 - DNA, 378 bp, Homo sapiens
gaagcgagatgacgaagggaacgtcatcgttggacaagcgtcgcaataagacgcacacgtagtgcctgcgtgtgcgtctaaggcctaccaccttcagaagtcgacctgtggcaaaatgtggctaccctgccaaggcgcaagagacaagtcttaccctggacgtgccaccggttaaaaagacgaaataccaccggaactggtcgccttgaggcacctaaaaattgtatcccgcagattcacggcatggattcccgtgacgggacacaacacctaaaacccaaggagggcagatgttgcagcatccaggttcactctcacagaatgtcacacgcttagctcatgaccaataaatgttcctggttttacaccacacataga

SEQ ID NO: 608132 - DNA, 551 bp, Homo sapiens
cggcgcctttttttttttaaactatgcaagtctcattacatttaaaaccctttttttaaacttggtcccttttctgtgccaactttatgttggttttggttcttgttttggtttgagatggagtctcgctctgttgcccaggctggagtgcggtggcgcgatctcagctcactccaacctctgcctcctgggttcaagtgattctcctgccttagcctcctgagtagctgggattacaggcgtgcaccaccacgcctggataatttttttggtaattttagtagagatggggtttcaccatattggtctgaaactcctgacctcgtgatctgcccgccttggcctcccaaagtgctggcattacaggtttgagccattgtgccaggcccctattttttattttctgagatgaagtctcgctctgttgcccaggctggagcgcactagcatgatctcagctcaatgcaatctccgcctccaaggttactgcaattcttctgcctcaggctctaagtagctgggatcaccggtgcctggaacgtgccctgctc

SEQ ID NO: 608133 - DNA, 948 bp, Homo sapiens
gaaagcgcctgaaccagaatcagacataaagctacgcgctaagctcttggcgctgacgtgaggctcgcgacgatatggcgtcattaggtaatagtttctccaacgctctattctcactatcgcctgacttaacagagggatcgtcttggagatcgttagagtgagggtcccgtgattggtaaagaagaagacaaccatgagaagaggtactgtagatagccgtcgctctgagaaaaaatggagcatgcgctagaataatcgagaaaatgcctccgtcttgagaacgggaatatggagataggggaacacacgatagtagaagaagggttgagaatggtagtatgtacaggagggtcgaaatcacctattgcgcgatgataaatgagggtactatatagaggggcttggaagaaataccagtggaatgtagagagagttatggcagataggggggcatcgctggatatggtgcataaaatcgaattacttggcaacgtaatgtgcataatgataaaattgtcaacgatgaatatcagagaaagcaggggaaaagaaatccagaggagaaaaaagagagatctagagggccggtccaggagatacaatctatgcataatagggaataccctgaaacctgaggacagagcaagtggagcttgaaaggaattaaaggatctagttgaaaaaattcttccagaaatttgaatgagggaacataagatctaacaaggtgggcacaaggctcatagggaatacctttaaagtttaactgaagagaaacgctgggatctagaacatatcgggggtgaacggttataagaaatttcgaagacgaaaccattttaacaaggccattccagttcagagaaaagcagggttactttcaaaagggggcacaagtcaggtttgaacatccagattttcttcatgcaagtgctaactggcgta

SEQ ID NO: 608134 - DNA, 311 bp, Homo sapiens
atgtgtggttgtgggtagcagacttgggttgtattggtagaggagcatcctttcccacaggacccaaggtgcagccctaccttccggagcttatggaatgcatgctgcagcttctgagtgaaccccatgcagtcccctgggccaaggatgctggctgtgatgcgccctggagagccatgtggtgagtgagatgaggcagtgagtgcagggagtgtggtggttcacaccaaatggcccttgtggcatgggtggttgttgggtagccacatttcctcagttgtgacgtttgtctgccccgtgcaccccacctc

SEQ ID NO: 608135 - DNA, 343 bp, Homo sapiens
  misc_feature (264)..(264): n is a, c, g, or t
gaggaggaagacagggtgtagcaatggcatcaggagggcgtggacactgagcaccacccacccacccaaatgctccctggggcacctgctgtgcagtagggagtgagtgtaccagaccctctgcatcctattccatttaaaacattttgctcaagtaatctgtgcccattgtagaaaaaccaaatacagacaagaaaatcctccctaaaccccagcatccagagagtcacagtcatgggtcgctgaatgtcctggccatctccnttccttgcctgtctagtggggacgttctgcttacctttcagatggcttcccagatcagggtggtgtgaggggctccacg

SEQ ID NO: 608136 - DNA, 276 bp, Homo sapiens
gctcgactgcacattctggacatgtatcccataatttaaagtatatataaaaaaaaaatcacctgagatcaggagttcaaaaccagcctggccaacacggtgaaacccatctctacaaaattacaaatattagctgggcacgatggcgggccctgtaatcccagctactcgggaggctgaggcgggagaattgcttgaatccgagaggtggaggttgcagtgagctgagattacaccactgcactccagcctgggtgacagagccaggctccatct

SEQ ID NO: 608137 - DNA, 215 bp, Homo sapiens
catccttcttcattccttctaccaacagataagggcggtgctcgggtctcaggcactgggtcctcaggcaacccagctctgagcagtttctgaacataatcccaggagcctcacttccctcgcaggcctgtgcagtgatcatgtacaagtctgtgggactgggcgcgggggctcatgttgggaatcccagcacttggggaggttgaggcgggagc

SEQ ID NO: 608138 - DNA, 103 bp, Homo sapiens
  misc_feature (9)..(9): n is a, c, g, or t
  misc_feature (22)..(23): n is a, c, g, or t
  misc_feature (55)..(55): n is a, c, g, or t
  misc_feature (66)..(66): n is a, c, g, or t
ctccagccncgacctcagtttnnatgagaacgacggcatgagttctcactcattntgttcagcttntccaaggaatgtttttatgggggactcatcatcgatc

SEQ ID NO: 608139 - DNA, 860 bp, Homo sapiens
cgccgtcggctgggcgggctacgcccaaagcctcctggccgatgccggggtgaggttgccggcatggctcgccgccgcgccgggggagggcggtgggttcaacctcccggcggccctgatcgtgctggtgctcaccgcgctgctgatgcgcgacaaccggcaggcggcgggcgccaacgccgtgctggtggcgctgaaggtcgcgatcatcttaggctttctcggcatcggcgccgcccatgtgcggccggagttgtggcagccgctggtgccggccaacgaggggacgttcggcgccttcggctggagcggtgtcttccgcggggcgggggtggtgttcttcgcctatgtcggcttcgagaccgtctcgaccgccgccggcgagacccgcgatccgcagcgggacgcgcccgtggggctgatcggctcgctcgtcgtcaccgccgtgctctatgtggcggtggcggcggtgctgaccggcctcgtgccctatcgcgacctcgacgtggccgacccgatcgccagggccatggcggcgaccgggctcaccggcttctcggtggcgatcaagctgggggcgctgatcggctgaccacggcggcgctgacagcgctctacgggcaggcgcgcatcttctacgccatggcccgcgaccgatgctgccggatgtgttcgcgcgcatcggcgcgaccagccggacgcccttcgtcgcgcaggggctgatcggggctcgtcaccgcgcctggtggcggcgctggtgccgatcgacgtgctcggcgaactcgtcagcaatcggacgctgttcgccttcacctggtctgcgcggcgtgctgatcctgcgcgcacggagctgaaagggg

SEQ ID NO: 608140 - DNA, 198 bp, Homo sapiens
gacaccaagaggctgaatggagccgggataccatgtaccttcgaaggaggtgccacatagactttaggtcgcatctgtagtcccagcttctcaggaggctgaggcaggtgaatcacttgaacccaggaggcagaggttgcagtgagctgagatcataccactgcactccagcctggcaacagagcaagactccatctc

SEQ ID NO: 608141 - DNA, 313 bp, Homo sapiens
  misc_feature (299)..(299): n is a, c, g, or t
  misc_feature (302)..(302): n is a, c, g, or t
ctttatctactttttcaatagaccacatcaagagctccccacgtgctctacttatcaattaactgagtagctctctgacttttaatgtcatttgttaaaatacagttctgtaatatgttaagcagctaaattttctgaaactgcataagtgaaaatctacacaggcttatgaatatattaagcacatcttttaacctgcaaatctgttctaacatgtaatgcagatactcgacttcttctgatatttatcttccttcgctttccttgcttccctttgccatctaacatacgcggagganctnttgttttttac

SEQ ID NO: 608142 - DNA, 294 bp, Homo sapiens
aacatcagcgccacaggtaacttccacaaaggtgtgaacgatctgagagacaaggcaagaagggcactctatgccatcaaaagaaacatcaatttcaacataccaattaggatttggctaaaaatacttgaatcagtcatagagcccattgccctttatggttgtgaggtctggggtccgctcaccaaccaagacttcacaaaatgggacaaacaccaaattgagactctgcacgcagaattctgcaaaaatatcctccgtgtacaaagtaatacacccgataatggtcgacgc

SEQ ID NO: 608143 - DNA, 111 bp, Homo sapiens
tttgtcgttctgagttccccccgcggtctgggctgggtactatgtcactatgggaccacttactatttacattactatgcaccaccatcaccattctgcagctcagggcgt

SEQ ID NO: 608144 - DNA, 806 bp, Homo sapiens
  misc_feature (38)..(38): n is a, c, g, or t
  misc_feature (71)..(72): n is a, c, g, or t
  misc_feature (172)..(172): n is a, c, g, or t
  misc_feature (180)..(180): n is a, c, g, or t
  misc_feature (210)..(210): n is a, c, g, or t
  misc_feature (241)..(241): n is a, c, g, or t
  misc_feature (265)..(265): n is a, c, g, or t
  misc_feature (274)..(274): n is a, c, g, or t
cgggtttcatttagagtggtgatgtatgaagggaaganaatcatggctgactcaggacccatctatgatannacctatgctggtgggtagaataggggtgttgtctttctctcaagaaatggtgttcttctctgacctgaatacgaaatgtagagatcctaaatcatcaaantgtgatgnaaaagactgatcataaaccaatgctggtantgcactttctggaactatgggcttgagaaanccccagggatcacttctcctggcnttccttctnttctgtgcttgcatcagtgtggactcctagaacgtgcgacctgcctcaagaaaatgcagttttcaaaaacagactcagcattcagcctccaatgaataagacatcttccaagcatataaacaattgctttggtttccttttgaaaaagcatctacttgcttcagttaggaaggtgcccattccactctgcctttgtcacagagcagggtgctattgtgaggccatctctgagcagtggactcaaaagcattttcaggcatgtcagagaagggaggactcactagaattagcaaacaaaaccaccctgacatcctccttcaggaacacggggagcagaggcccaaaccctaaagggaaggggcataccccagccgattgtattaaaaaaatatggaggaactggtacatggtcgggacttagtccttttccagggaattaaaaaccaatggtggattttcataatgtggccggccgtaagttgataacccctggtaattggccctttaattggagccagaaaggagagccaaa

SEQ ID NO: 608145 - DNA, 262 bp, Homo sapiens
caaattctaatcattattattatttgaaacccatctttaaattattattgattttgattgaaaattgcattcctaaattttataatttcttttacctactaatttatattcttgtataataaaacacatgggtttgtaatggttttattactatggtatcatgtctttttaatattttttaaaattttatttttctatattaacttcttgtacattaaattgtctaataaaactctaataggtttatatatttttccattgt

SEQ ID NO: 608146 - DNA, 1161 bp, Homo sapiens
gctcttctttcttttctcttcttttttctgttttgttttctcttttttttttttcctgtgtttttgtcgtttcctttcttttcgtttgtgttttgttgtgtgctcgggtcttattttatctttgtgtttctttttgtttctcttttctcttctgttgtcgttgttgttgtctgttcttttttcttttcttcattatgttctttctcctgtcttttcttgttcttgttttgctctgttttctttgttttgctgtctactcttggtccttttttttcgtttgttttttcttgatgttttttacttttgttctggtagtgtgctggttttctttgtctttcttttcctgtgttctggtggctttcctgtcttattttgttccttggtctttgttttttgtttgtattggttctttgtttcttgtctgcttctgctccttctccatgtttgtattgtggttcctttgtagttgtgtccctctgttatcctctgtcatgtgttccctgttggtctttggtggttgacccctggcgttgagttggtcattttcttggtatgctcatgtcttctagtccctccgccgtgacgtctgtccacatcgtgcgcgcttcctcactggttatgttattgcacggatcttaagttattctccccagccatgagcccgagtctcctgcttccctgggaaaagtgtgcgtatggccctgagctgggcttctatattttatatctgcaaatgaaatcacattttatcttatatttcagggaaagccggagtatcatacgaccgaataaatgtttaagccgggcgcggtggctcacatctgtaatcccagcactttgggagtccaaggagggggatcgcttgagtcctaggagtttgagaccagcctggacaacatggtgaaaccccgtctctacataaaatacaaaaattagaccatgcatggtggctcatgcctgtagtcccagctacttgggaggctgaggccaggatggatcacttaagcccagaaggcagtatggttgtagtgagctgagatcgcaccactgcactccagcctgggctaacatgagcaaaatcctgtctcaaaaaaaaagttaatataatattgcccggctcctagaatttatttatttcctgatatcaccgcaagcgagtta

SEQ ID NO: 608147 - DNA, 330 bp, Homo sapiens
acgcgtccgctcaccctgttgcccaaggtggagtgtagcggcttgatctcagctcactgcaacctccccctcccaagttcaagcgattctctgcctcagcctcccgaatagctgggattacaggcatccgctgtcatgcctggctaatttttgtatttttagtagagacgggggtttcaccatcttgaccagactggtcttgaactcttgacctcgtgatccagctgcctcggcctctcagagtgttgggattacaggcgtgagccaccatgcctggcctcttggaatatttaataagctaaaaaattcttatacacacgtagattaatt

SEQ ID NO: 608148 - DNA, 488 bp, Homo sapiens
tctgggaggtggaattcatccaggccaggtgtatcccaggatgtgcagcactgactctgaagaagctgatggtcttcaaggagctgaagaaggagctgatctccgtggtgatcgctgtcaagatgcaggctcgaaacgaatccgtgcggtcccatgagattgtgctgccccccagtgggacaagtggagacagacctggccctgaccttctccttgcagtatcctcacttcttgaagagggaaggcaacaagcttcagatcatgctgcagcgcagaaagcgctacaagaacagaaccatcctgggctacaagacgctggccgcgggctccatcagcatggatgcggtgatgcaacacccgtctgacaggtggccaggtgctgagcctctgcagcagcatcatggaggcccccgtcaaggcggacgaaatctgaatcgcctccctgtccagccagcccattgaccacgaagacagcaccatgcagagcg

SEQ ID NO: 608149 - DNA, 1089 bp, Homo sapiens
tgggttgagcacagggtactttatgtgacgtggtacattgacaagggtgcggctccctaggccccttccccttcttcaaggggttctacagtggcaacgtggtaaggaggggagattcaggtggtgggtgggggacgtgacggtgtggcagggactcccacagacaggtgcaagggttcttttcttctttccttcttgtgtgatgcctcaatgtgcgtggggcagtgggtggctccaaaggggctctttacactcctttgagagggccagtggtgggccattagaggttcccaacaacccgtgatgtgcttgtgtaaagcacaaaatttcggttgtgtctatacaccatgtgaatatgagactctttgggacccaacatgtgggcgttccgttgagagggggcaaatgtcgcccagcccccaacgctgtccaaaacgtgtcggaacgccagtggcggtggttcagctgagtttcaaacgttaatatgacgtgaacacccacccctgcgtgtttgcctcatccgcggtaactcccacaacgcagatttgcccccttatcagacgagggagagccccttccatcgcaccgccacttcgatctttacacaccacaacccattttccctttagatatagcgtctatatcaaacaatcctgcgcaccaaggaggtcacaacacacaacacacacagcgcacagcgtcacacgcgtccccacccaacacaggcacacccagataggcgccaactaggggagacaaacaagcaaacagcgccaatacccaccacggagaccccaccccacacgaaacaaccatcccaaaggcaaataaacccatctacccccaacacaagcctgtgcgcaaaagccgcccaagtaaaaagcgccagcgtactagacagcaaagtagaaaacaagaccccccaggcggcccaaaaacagccaacacagtacatcccccgcgaaagaggcatcacaacacacaaagcacatacacactgaaacagagcacacaaagacacgaaaaagttgaaacatagatagcacagaagatagcgcccaatgaacaacccacacataccgcaataca

SEQ ID NO: 608150 - DNA, 246 bp, Homo sapiens
actagtcgttcatacacggatccccctggctagctcaggtctctcatagtgttacggattacataggctgtgagccaacgcgctccagcctgttccttattattgtgagtagtactccatggtatggatgtgtcacacagaaatttcattttttttttgttttttttgaaatgaacccccctccttttgccccaggcgggacgtcgacggggattgactcttggtcctctcgtgcaagcctccacc

SEQ ID NO: 608151 - DNA, 1136 bp, Homo sapiens
ccaggacgtgctgccagacaccatgccactcagatgcgcctctgtcgctgggacccttcagaaactctctttgctcacagagttaccaaaaaataaaagagccaacatgtggtattgctggctggtatctttgtggtccacagtcgctactgttattatgctattggttagcaccatggccaatgtctggtagggtttccaatacggtagatgcatcagtaggtcttgggaaaatactgtaccaacattagctgcaagtgacagctctgtcatatgccagtgacagatgccctcaagacagtgcaggccttcatgattctctctatcatcttctgtgctcattgccctcctggtcttctgtgttccagctcttcaccatggcacgcaaggggccaaccggttcttcctctcagggtgcaccacacttggtgtgctggctgtgcattctctgctgcgaggtgtccatcatacactagtcattatgccgaatcgtgacgcgaacgccagtatcaccaccggctatccatacatcctagggctggatctagcattcctgcattcagcattacatcatcggcgttctctatctgggtccctggagaatacgacataaggccggacgaagtccatggacgatctggacggagttgcgagacagagcaacgccccggtcgaatcctggcggagcgccaccagatcgatgagaggaaggccagcgaaacaccgcagccacgcgcacacgcacaccgacacaacacacacgggaaagcccaaaacccccaccatcacaacgaaggacacactacctccccaccccctcgccctgaggccaccaacaccttcggcacaccaacctcctgctcaacccacgaacgagccccacaatgccacccgtccaccccaaattggccccccagctgtcaatagacacccaccgtgacttggacccaacccatcctaacacagcacatacctgagaaaacaaacagtacaacaccgcgaacatacccacgcaacacactaacacactagcagtcacaccaagcaccacccacagcagccacacaccacccccaacgtacatcaagaacacacacacaatcaatcccacagacaaacgtacacaaaaaagaaaa

SEQ ID NO: 608152 - DNA, 312 bp, Homo sapiens
  misc_feature (163)..(163): n is a, c, g, or t
  misc_feature (228)..(228): n is a, c, g, or t
aaaaggaatgcttttacactgttggtgggagtggaaattaattgaaccattgtggaagacagtgtggcaattgctcaaagatctggaagaagcaatatcatttgaccagcatttccattactggaaatgctttatataaatgctttatatgtgtatataaatncctttatgtacatacaggaatataaatcattctatttaaagatataataaatgaatgcatatgtntcattgcagcactattcacaatagcaaagacatggagtcaacccaaaatgcccatccaacaatagactggataaagaaatgtgg

SEQ ID NO: 608153 - DNA, 245 bp, Homo sapiens
  misc_feature (2)..(2): n is a, c, g, or t
  misc_feature (40)..(42): n is a, c, g, or t
  misc_feature (47)..(48): n is a, c, g, or t
  misc_feature (86)..(86): n is a, c, g, or t
  misc_feature (88)..(88): n is a, c, g, or t
  misc_feature (97)..(98): n is a, c, g, or t
  misc_feature (100)..(100): n is a, c, g, or t
  misc_feature (137)..(137): n is a, c, g, or t
  misc_feature (144)..(144): n is a, c, g, or t
  misc_feature (168)..(168): n is a, c, g, or t
  misc_feature (217)..(217): n is a, c, g, or t
  misc_feature (221)..(221): n is a, c, g, or t
  misc_feature (231)..(231): n is a, c, g, or t
tnaatggggaccttttgagttgaatttattttattatttnnnttttnntttaatgtctggtgctttctatcacctcttctaatctntnaatgtattnntntgcaattttggggtaagacttttttatgagtactttnctttgangttttagcggtcaatttgcctttntaatgaacatgtgaagttatactgtggctatgcaacagctctcacctangggngtcttacttngagttagtgccata

SEQ ID NO: 608154 - DNA, 143 bp, Homo sapiens
tcaggagatcaacatcctggataacgcagtgaaacccatactctactagaaaaaatatatatatatatacaaaaaattagccgggtgtggtaggagggcgcctgtagtcccagctactccgaggaggctagaggcaggagaat

SEQ ID NO: 608155 - DNA, 268 bp, Homo sapiens
actgagtacttatgtaacttcttattcgtatggaaatgcgcttatttgaaaggatattaggctggatgtggtggatcacgcctgtaatcccagcacttgggaggccatggcgggtggatcacttgaggtcagaagttcaagaccagcctgaccaatatggtgaaaccccgtctctactaaaaatacaaaaattagccgggcgtggtggcgggcgcccgtagtcccagctactcgggaggctgagacaggagacttgcttgttccgctg

SEQ ID NO: 608156 - DNA, 294 bp, Homo sapiens
gaggcgataatttcttgagtttctactgggtacatacctaatgttgtgatgtttaaaacaatgtggactgatcaaaatatcatcaggaaggatggctttctctttatcgtctgctctgatcccctcttctgttggagcggcatcctctagtagctcttacctgtcgagacttgccggtcttggctgtggccgtccttctccatcgtctctgactttgtagataccatcgggcagagattccctatctttctcatctctccatgaggccttctctttttcaccttccctttctgg

SEQ ID NO: 608157 - DNA, 354 bp, Homo sapiens
tttttttcctctccccctcctcccctgccccccatacatttctatccctgaggtaggtttggaagggcaggaagtacttaacatctcaggaggtagattggggaacatggtcaggtataagaactgagcttttaattttgaggttaaaaaaggacatcaggagcagctggggagggtccttttttaaaaaaatttttccaaattgggttttcgggcaaaaggccggtttggaaaaaccttgggggttttcaattttttgaaaggagaagaaatttggtgtgggattttttttcccgaaccattacaaaataacccgtttatttacatgcaaataaacttctttgataaaaagta

SEQ ID NO: 608158 - DNA, 125 bp, Homo sapiens
catgtcggtagcgtgagattatgccattgtactccagcctggagacagagcgatgactccgttctcaaacaaactataaaaatctgtcactcaggaacaagtgtatgggtgatcctctagcagtc

SEQ ID NO: 608159 - DNA, 166 bp, Homo sapiens
cagctgatgctgaggtgacttctagaggatcccttaaaagctacccggaggtattgcacgaatgctacagccatatcatttctgcagacgcctggcgcagaaggcctacgcgtccgaggtttcgggaaaacttcgggagccatggtagttactgtcctttatacgt

SEQ ID NO: 608160 - DNA, 935 bp, Homo sapiens
  misc_feature (770)..(771): n is a, c, g, or t
  misc_feature (914)..(914): n is a, c, g, or t
gaaccacatgtgaaccacttacctgtttaaccctatgaacttgaagagaacatgtaatgccacttaaaatacctaagctcgggttctgccttcagcgactcctggtagtagtgcccttatgagccatttatcaagaagtgataggatcgcattctgtcacccagtctggagtgcaatggcatgaccttggctcactgcagcctcgatctcccagcctcaatcaatcctttcacctcagcctcctgagtagcttgaactacagctgaggatgctatgaaaaccccttgaggaaacaaaggcaccttgggggccattgagaactcctgacgaagagggctcagctgccagacctgctcaagaaagacctcagaaatctctatggggctgtcagaagaaaaggtttgaaaagggtctggagagactgaaatttgtctgccttggacttttcttttgacaattcacatccaacttaagcagaatcattgtttattcttattatgccaggtttccttttctggtctgcaggttctctagggtttcataggctagtagttggaattttcatatttccaaagcattggggattttgcaaaaacaaaatctaaaggatattcagcagcacagtttacttaggaggttttaatcataataatctgcataatgtatgagaatttctacctcagctgcctcctttctttctctttcgtgtctgggaaaaagccagggatttttcccttcctctgatttaaataccttataaaattttggtnnaagcattttgtcctattctgtcttcctgattcattttctgctgtaatgagcaaaattaatttgcaagagctgctactgacatagtgtaataaactggggtcataggtagaatcagtgccgccttatgacccctagctgtcatngctttaaggaatttggcatgg

SEQ ID NO: 608161 - DNA, 392 bp, Homo sapiens
  misc_feature (1)..(1): n is a, c, g, or t
  misc_feature (42)..(42): n is a, c, g, or t
  misc_feature (148)..(148): n is a, c, g, or t
naataatcctcttttagacggcaaaaatgaataagtacagtngtgtaaataccatacaatgaatgttctacgtttacaatgttctgatactgtgaaaaggttgtttatagcaaatctgtttccagctaggtgggcttaaaaacagacntaaaccattatattatgaagatatttggtacttcttcacagtgaagtatgtataccttgttgaataaaatcatacattaaaattttggacaaataggctgggcacggtggctcatgcctgtaatcctagcactttgggaggtcgaagcggatagatcactgttggccaggctggctggaactcctgacctcaggtgatcacaccattgcactccagcctgggtgacagagcaagactttgtttc

SEQ ID NO: 608162 - DNA, 136 bp, Homo sapiens
gatgtctaggtgcctggctgcagcagctaggccctatggattgctggcatcccaggagcctgtccagttcaagggctcatggatgcctggaaagcgcctctctgccagagggcggaggcagacaatatggaaactc

SEQ ID NO: 608163 - DNA, 87 bp, Homo sapiens
  misc_feature (36)..(36): n is a, c, g, or t
  misc_feature (65)..(65): n is a, c, g, or t
gtttccatggagtggccagaacgactacgtctttgnccctgtgatagtactgactcaatggtgtnagtactacagagctatagactg

SEQ ID NO: 608164 - DNA, 133 bp, Homo sapiens
ctagctgactctagagggtaaaaggacgcccagggagacggataaaggaactgagaagcctgcagggatgaaagctctgccttaggcctcctcttcggcctcctcaccggaatcctgctcctcgtcttgcggc

SEQ ID NO: 608165 - DNA, 1321 bp, Homo sapiens
acatattccaagactcttttacattatgtcagaatgcaagcccatgcctcagcttctcccagacactcagctttgtcgcaacataatcccagcactctggaacgctgggtggattgcttgaacccaggagttcgagaccatcctgggcaatatggcaaaaccccagtctttaccaaaaataagctgggtgtggtggaacatgcctgtggtcccagcattcttggagaggctgaggatggagaggattgcttgaacccgggaggtagaggctgcaaatgggccatgatcacagatccatgcacatccagcctgggcaacagagagagacagatccctggcccaatgcccccttcccatggcccagtcatcaaaacaaaatgaggatggagcgtggtgagctcacaatctgataatcacagccaaggaatgaaagaatcactatgagcgccaggagatactgagacacagcactggcctataccatggatgcacaacaccacaaatcctctactacaaacatacaacaccctggccaagccactggctgacgacggcaccagataagaccgcaggactaccattgcgagcaggcctgacggcaggcgcgaacatcaccataacaaacccgagagaaggatgagcaaggaggcccgaggacagagaaagaatccaccaccccaactggaaccccccaagaccatggaaagagcagacaagcaaaacaactggcacacaacagcaacaaaacacaaatacacaaacacacaacaaacaaaacacaacacccacgacacacaacacaaacaacaccccccaacaaacggagcaacaaacccatacaagcagacacaccacgcaaaaagcagaaaaaagagagaccacaacataagacacagaacaacaacaagaccaccgcccagcaacaaaaataaaacagacaaaaagcaagagaacacacacaaagacgacgaacaagagacaacagaacttaaacggatcgagcaggaaaaaacaggacacacacccacacaacaggagacatgacagaacagggacacaacagcacacacagcggcgcacgcgcaacacgccagccacacagcagaggagacaacacaggctcagctgagagcagcgcacgctcacaggaccccgtaacccgacagcgacgacaggagcaacgacaaacacgccgacaacagcacacgacgcgccgcgacagaagaagaacagagcacaagacagcagagaacgaccacacgcagcagcaaacaaaaagaacacgggccagacgcgagagaaccgaagaccgcgccaccac

SEQ ID NO: 608166 - DNA, 950 bp, Homo sapiens
  misc_feature (1)..(1): n is a, c, g, or t
  misc_feature (71)..(71): n is a, c, g, or t
  misc_feature (89)..(89): n is a, c, g, or t
  misc_feature (93)..(93): n is a, c, g, or t
  misc_feature (100)..(100): n is a, c, g, or t
  misc_feature (103)..(104): n is a, c, g, or t
  misc_feature (113)..(114): n is a, c, g, or t
  misc_feature (116)..(116): n is a, c, g, or t
  misc_feature (118)..(118): n is a, c, g, or t
  misc_feature (121)..(121): n is a, c, g, or t
  misc_feature (126)..(126): n is a, c, g, or t
  misc_feature (128)..(129): n is a, c, g, or t
  misc_feature (136)..(137): n is a, c, g, or t
  misc_feature (142)..(142): n is a, c, g, or t
  misc_feature (157)..(158): n is a, c, g, or t
  misc_feature (176)..(176): n is a, c, g, or t
  misc_feature (212)..(212): n is a, c, g, or t
  misc_feature (214)..(214): n is a, c, g, or t
  misc_feature (217)..(217): n is a, c, g, or t
  misc_feature (228)..(228): n is a, c, g, or t
  misc_feature (237)..(237): n is a, c, g, or t
  misc_feature (239)..(239): n is a, c, g, or t
  misc_feature (253)..(253): n is a, c, g, or t
  misc_feature (264)..(264): n is a, c, g, or t
  misc_feature (270)..(270): n is a, c, g, or t
  misc_feature (274)..(274): n is a, c, g, or t
  misc_feature (277)..(277): n is a, c, g, or t
  misc_feature (282)..(282): n is a, c, g, or t
  misc_feature (292)..(292): n is a, c, g, or t
  misc_feature (623)..(623): n is a, c, g, or t
  misc_feature (625)..(625): n is a, c, g, or t
  misc_feature (844)..(844): n is a, c, g, or t
  misc_feature (935)..(935): n is a, c, g, or t
naaaaagccattattaaatagaaatgtatttaaacagcaagaaattaactataaatactaacaataaagtnctgcttaggacgtgaagncttnccctggnccnngccgtcgtnngncnggnggggngnntattttnnttttnctgttcacctaatcnntcttctccattataccantctctgtgtgtgtgtgtgtgtgtgtgtgtgtatacncngtnctctttcagtngagcataancnctgggggggggggnaaatacaatanagcggnggcngcngatgngctgtctgantttctgcagacaatctgcaaaaaaatggaagttctcaaggcccagttgctggtgtctcttttgaggccccaaaacttggttgatttatcttattggcactctgcatgaatcaagagtaggctcaaaggcaagccttatctcctgcgaacacaattccatacaggtctcaactcaatatttaaatttgtttggaactggctacaaatttggaacttcctcaaatgatattaaaagctctacacaaaaggtatgcagaagcagttactggtttttcaagaacaaagacaactgcaaaaaagcaacagttctgtaaatggagctgtagtaaatntngagacagcaataacaaggtaacaaatagagcagaggatgaccttttttgtaaaaaattgctgcctcaatatttcactatttaaaaaaaagattcccacaacatgaccttctgagagaaagaatccactgctgtgtttgaaagaggagttggttctggtggtgaaaggactgggaatgtcgattaagatatgcaagaatatctaacacaaagtccaacanttgcatcagcaacacccagtcagctccaggagggtgaagtcctgctctctagctgtatccagggctcttttcttgtggcattttaaaaaangtagcagtagttgca

SEQ ID NO: 608167 - DNA, 192 bp, Homo sapiens
aacagaggcgatgtgagctcaggctcccatccaatctacacctactagcagcgcggcactactccgggccatcaccgcccgtatatctacaccctacctgcctactagaagaggcatctagaactaccacgactccctattctactacctactctatacccattcatccctacctatcctacctacagatca

SEQ ID NO: 608168 - DNA, 262 bp, Homo sapiens
gtgttccaagttgtactgattcatcaaatggcgagcttgacgaagtgcaatttccacttcgtttggggcagcgccttgtgacttggccagcgccatgagtttggcgaccttgctgaggactttttgcttgtccatcattcacccccttcctgttggaggcggggggagagcgcctctgaccacaggcgaagtgtttcttcctcatcagcagagaggtgagtccgtcgacgcggccgcgaatttagtagtagtagtaggccgc

SEQ ID NO: 608169 - DNA, 1398 bp, Homo sapiens
taggaaacaaagttccactctgtgttcgcccaggctggtgtgcaggggcacaatctcgtgctcacgtgcaaccctcgcgcctgtgccgggttctccagtgtgatttctcctgtggcctcagcctttccatagtgtggcgtgggatttacaggcatgtgtgtgctaccagcccccggcataattttctggtatttttaagatagggaacaaggttttccaccaatgtgtttggccaaggcggtggctcttgtgaaaccgcctgtgtacctctcgaggtgtgactcccgcccgcctgtgtggcctctcccaagagtgtgcgtgggaattcacgcaggcgttctagaccacgcggcgccccgcggagcgcgggttttatatacttctctgtgtataggccatttttatcaccacaacttagagaggacacagagcggaaaagcggagagagggagcccagggagaggtggcgtgtctctcgttttgtgtccacaaacggagagtcataaagttgtgtgagagaaacacactctaagtgtgtcttctcccaagagggcctctgtgagagacaactctgtttgagacacctctctgtgagaaactctcggacacactgtgttgtatagccaccacaaaacgtcgtgtctccctcccacactctctcgagaggggggtggccctattaaaacaagtagtgtcaccattttgtgaacagagggggtgtgtgttaaacacggttttcacccaaaaatgtggtggggggcggagaggacccccttcaatattcccccccccaaaaatagtttttcaattatgtggaaaatatggggaagagcccaaaaaaagcgggggaaacggtcttgtggacccaaagtgccgttggtcatacaccatcttttttgtatcaccacaacaactgttggtaaccggccaaggtttccccctctggtggagcgccacgttgaaaagaacactcgttgggatttgttgcactagttgtcttcaaacccgcccacatcttaaaccaatttgttcggcgacgacacacaattctctcactcggggggcactccccttacaaccgcccacatttaacaccacacggcggtggtgtattacccagaccgccatgtatggtcttgttgggaaaaacacacacaatatgtcttgttcacacaaccacccctcttgttgttttgctcccccggtgagtagaacaattataccaccgattttcccccattttattcgtccccaaagataatccctcggagtagattaggggaacgaggaagtggtattatatctactcacaaaaaacacttaaacaaggatggcgagcggttacaaacagagacacacaggtgggaagccctcctatgtgggcgggacacaacgaac

SEQ ID NO: 608170 - DNA, 394 bp, Homo sapiens
  misc_feature (55)..(55): n is a, c, g, or t
  misc_feature (116)..(118): n is a, c, g, or t
cccgggaattggctttggtttgtgcaggtactttttctttgagacagagtcactncgtcacctgggctggagtgcagtggtgggatcactgttcactgcagccttgacctcccagnnntcaagcgatcctcccacctcagcctcccaagtagctgagactacaggtgtgtgtccatgcacagctaactttttattttttttgtggagatggggtttcactatgttgcctaagctggtctcaaactcctgggctcaagcgatcctcccacctcagcttctcaaagttctggggactacaggcatgaaatactgtgcctggcctggggaccagttgcattttaaggttccttggtgttcaaaaaccacggtttttagcctagattgagtttagatt

SEQ ID NO: 608171 - DNA, 475 bp, Homo sapiens
agtgctattactatggaaatcactaccaaaacattaaaatgtttctctttaaagagtgtttatcaatgctcaaacctgaaccagtcaacacagcacacaaaagcacaaaaaaatggaaaagcagtgcttaaaatcattcaaggatcattaagcatgtcaatccttttcttattcctaataccaaaagaagcaatcctaagcatcaaaagattgatcagtgtcatgacatgcaattcaattgagtttaaccatcatttaagtaaatatttgacttttgattttgtaagatcagccgggagaaaggaccagagagcaagatccaagttcaggcaagcttttattaaacccgccggctgctttatcacagacaaaggaggcagcagcagccagcttacagaatgaggggtttatattgaggagggagtcagagggagttctttggtatggccgcatcccggtgttgtttgctgattta

SEQ ID NO: 608172 - DNA, 251 bp, Homo sapiens
gaaaacgaaaccatgcagctctcaactaaagtagagagcactacttgtgattcatctatctaagacatcagtcgaggcgctggataggcgggggatgatgaagagagctctcatagagtagcatagtcatcagagagggggagcatcttctgtcaattcaatggcggtgataaccaaagatcacaagacactacttgaaatcctatgttggcgatctgggtaatcatcacaggtcataacttctaggtggc

SEQ ID NO: 608173 - DNA, 361 bp, Homo sapiens
atgatgagtggacacccctttcgatttttccacatagaaagcccttctatgctccccttataataaatcccgtggagggctggatcatggatagactcacgcctgtaatcggcagcactataagaggaggccgaggctgttgtggatcacaaggtcaggagttcaagaccagcctgaccaatatggtgaaaccccgtctctactaaaaatacaaaaattagtcaggtgtggtggaggcctgtgatctcaatctcagctactcgggaggctgaggcaggagaatcacttgaacccaggaggtgttgcagtgaaccaagatcacaccactgcactccagcctaggcaacagagactctgtctc

SEQ ID NO: 608174 - DNA, 846 bp, Homo sapiens
  misc_feature (846)..(846): n is a, c, g, or t
catacgccgcatatgctgaactgctggtcctggagaccccaaggcgagacctgcattattgaatcggcatatgatgctggtggacctgctcgagggtgggcctgcagaaaggaagatgtatgagtctgcatggcgccctgagcaagctcatcaggagcatcagaaagagggcatgcattctcgcaaggtgtccaccaatggccctacacactcgccacaggctgacagctgatgtgacatgcccgccaagccgtgcatgtcgccatataacatgtgccgccagtggtattaacaactggcgttgtcctattcccgggtgccctggtcccttgaggcggctgagacccagttgtgttcctccaggtgttgagtcgcacttttttgtaggatatttccccattgtatccctcatacgcactctacaaaggtctctgtgggatcataccataccagtgcctcgtggtgtgtattggttgcgcttggtcccttccgtcgcctcgcgcttttcgccgcccgcattactgagcacggcaagtgcctttagtacatttacattacgtctggctctatcaagggctatgtccttgtctctgcctcctatttccgatgcccgccaacatcggcacgctccttcctctgtcctgctccattttacccattactcgtgccgcgttataataccgcgacctccgatatcctcctcgcgactttttctcgacctttcccgcgttctctctttcttattcttgctttgtcgtccctttcgagaccgtctccaatggatgtggacccccgtttggcgcctctctatcgatctcctcacccagcgctgggcccgacggcatn

SEQ ID NO: 608175 - DNA, 295 bp, Homo sapiens
gacatgtgatagctgatacggctgtcttcctctgcacgttgaacagactggttaatatcctgctgccacgcgttaaagctgccgtcgaacgcatcctgtgaggcctgcaccggcgcggtcataaagtccgagagctggttgttctcaagccaggtcgcctggtggtccagatcgctgtaccactgttcaaagttcttcttcatggcggctttcagcgcgtgctctttctcgctgcccgccgcctgcgccgtgaaagcgttaaactgtgcgccagcctgtttcaggctgcttcgcg

SEQ ID NO: 608176 - DNA, 340 bp, Homo sapiens
cgcagacgtctttccacaataaggtcacacttccaagttccagagcagtgcttcgcggcttggcactatctattggggcacacttatcaagctagtcaaaagacaattgtccacttcatagacaaagagctggtcatatcagcgatggtatagaccaggggcccgccacattctgtctctaaagggccaggtggctatgtgggctctgtaggatagaccttttgtagcagaaagcaagccacagaggagacgtaaactgcacggtatacgctgtgttccggcaaagctttactggaccgtgggccaaggtagcaggtggatcacgcctgtaatctcagca

SEQ ID NO: 608177 - DNA, 280 bp, Homo sapiens
tgtgtcctccctaatccaggagtcggctgctaagtgtttcttcggtgatcgctgccgtttctgcacgacgtgggcgctacctggagaccaagccggccgacctgggcccccgttgcgtgctcttcgagaccttctgccggtgcccttacgcggtgacctgccgcttcgttgggcccacctgaggcccgaggaacagaacctggtgcaggaggagttggcggcccggggaacccaggcccccccgtccatccgcaactgccttggacaaaggcccttatag

SEQ ID NO: 608178 - DNA, 199 bp, Homo sapiens
tccatctcaaaaaaaaaaaaaaaaaaaacaaaaaaaaatttgttgggcgcgcgcgcctgggccctgcggaagaagagtttttgtaagacaccaatcgcggtgggggcgcgcgcgggggcccaagtggaggaaggtggaaactggggccaaaaccggggtccctaagggaaaccggggccgaggcacaagggggggggta

SEQ ID NO: 608179 - DNA, 1517 bp, Homo sapiens
gggaaggactgagcccagccagaggcgggcatgggcatgactgactggactggactgactggacatggctggatgtgtcccgccccatggcgatgaaagcgagaaatgaagaagagtgatacagggtatgctgcgtgaaaagagcagggacaaaaagatagataacgcaggagagggaggcagcggaaagagagagggagcggacgcaaagcgagagaggcggcgcaaggagacaaccgagagaggggagagggagagggcaggcagcaggggagagcgcgacgcgcagccgcggtagaaggcgagcagacggagcgcgtgcagcgcggaggcgagacggggacgagagcgaacgaagaacgcgggcagaggggcgaggcgaacgggaacggggaggggagcggggaggagcgcgaggggaagaggggacgggagggggagagggggaggggaagaaggggaggagggggaagaagagaggggggcgaggaggaggcggcgagagagagtgcggagaagagggtaggggaggggaggggggggggcggaggagacgagagagcgaagaagcggcgcggcgggaagggggatgagcgcggacgggcgagacgagggacaggaggagggggaagggaagcagagagagagcacacaaggaggaaggagacgcaaggggggaaggggcaggcggaaaagagagggaagaggagaggaggggcagcggagggggaggagacagagaggggcgaactgggggccagccggtgcggaagggcccggcgacgggacggggcgaagccgagcgaggagagagggggagaggcgaagtaaagacggcgagacgccggcggagcggagcggggggagagggccgaggaggagagggaggagggagagagaggcgacgggaacgagaggccgagggaggggggacgagggaggggggacgggagcaggaggggaggagagcgaggggcgcgagaaggaggacagaggggggggcgcgaaagcgcgaggcgggacagggggggagccgggaggggggagggagcgcgcggggcggcacgggggagggcgagggagagcgcgcgcagggcagagggagaaggagagcgagaggggaggcgggaaccacacagagaagaaacagtaagaaagagaacgggagggcacaagcagaacacacacgacgcagagggcgcgggacggggaggaccacacgacaagcagggagactcgacaaccagagagggaacgcgaagcagagggaacggcgagcggcccgccggcagccgcgcagggaggccggagcggggagaggagagacgagcgcgcgagaccgcagcgagcgacgcagagcgagcgcggagccggcataacgagggcgagaagggacggagagacgggagggagggggcggcgcgagggagccggcgagacacggggacgcatcgggggggcagacaaagaaggaggggggaggcgaggaccgggcagggagagcagagggggagagc

SEQ ID NO: 608180 - DNA, 487 bp, Homo sapiens
ccattcaacccagtacaaaatccaactgaagcccagcaagtggctcatgcctgttctatctctgaggacagttgtgattggatttagggcccatccagttagtccaggatgatctcatctcaagatcctaaatctgattacaattgcaaagatcctttttccaaataaggtcacatgcacgtaagttccggggattatgcttgcgtgggacacatcttttttgaggccgaggcgggcggatcacctcaggccgaggcaggtggatcacctgaggtcgggagtttgagaccagcctgacatacatggagaaaccccgtctctaccaaaaatacaaaaattagctggggcgtggtgcaggcgcctgtaattccagctacttgggaggctgaggcaggagactcacttgaacccgggagcggaggtttcagtgagccgagatcgtgccattgcactccagcctgggtaacgagcaaaactctgtctcaaa

SEQ ID NO: 608181 - DNA, 80 bp, Homo sapiens
ccgcctactactactactactactgctcgaattcaagcttctaacgatgtacggggacatgataatataattgctctccc

SEQ ID NO: 608182 - DNA, 143 bp, Homo sapiens
ttcctgtgccttctatagcgacatccaacctctgtttagctatacatgactggttctccatcgatttcagctgctgccgccgctgggcttgatgtgtggttgcctgggtggactcctgttcttcacgctctggtactgctaca

SEQ ID NO: 608183 - DNA, 662 bp, Homo sapiens
  misc_feature (270)..(270): n is a, c, g, or t
  misc_feature (273)..(273): n is a, c, g, or t
gaggatccctgcgggttcttcctgactgctggtgtccctgtctctgttttctggaagagttgtgtagaattggtgttagtttttccttaaatgttggatagacttcaccaatgaagccatctgggcgcagagtcttgtagtgtatttccgtagtatgggtagggttacctgtttcttcttgaatgagctttggtgtttatatctttcaagcaattggttcatttcatttaagttgtcaagttctgtggcataaagtcctccataatactnctnacacgagaaatgtgtggcacagaaaagggcttggttggacaaatttacaagggttgttaaacatacaaagtgccaaaagcctatagttattcattctattacttgttggcaggtaaatattttgtggaaagtatttgtttatttttatttttactttttgaggtggagtctcgccctgttgcccaggcagcagtgcagtggcgcagtctcggctcactacaacctctgcctcccgggcccgagtgattctcctgcttcagcctcccaagtagctgggactaaaggcatgcaccaccacacctggctattttttgtatctttagtagagatggggtttcaccatgttgggcaggctggtctcaaactcctgacctcaggtgatccgccca

SEQ ID NO: 608184 - DNA, 209 bp, Homo sapiens
ggtaccagcaggcttgggcccagataaagatgtcaggtctacagctatccagccaattcggtccgggttccgagctgacgcgggttcgacccgctgtccccgccgacacggacccccgtgtcgaggggccgtgcggtcgacctgctgtctggccgactcggacccgtgtcctagtagccgtggggtcgactagctatcccggcggactc

SEQ ID NO: 608185 - DNA, 117 bp, Homo sapiens
cctggcgagtattgagcccacttcacacacagcacacacgttcctgctggggtatgttgtgttgcgcatgtgtgtgtgcaggtgggtgcttgcgtgtgcacgtgtgtgctccgctta

SEQ ID NO: 608186 - DNA, 87 bp, Homo sapiens
attgacgtatatttgtctggactgaggttcggttacggttccctgttagcatggactttatttaggacccatgcttgggcctgctgc

SEQ ID NO: 608187 - DNA, 232 bp, Homo sapiens
tctttatgggaactgtagtggagcacatgtaggtgtttaactgaagtatgacatcaaaatctgtcatgctgatctcttccttttaggtagtttccttgattcctttcttactccctttgttaggaaatacacgggtggtgaaaactactggctagataatcaagtggtttgatttattccttgtccacctttgttaccctttgcccacttggacatctggtgaggcacgaga

SEQ ID NO: 608188 - DNA, 390 bp, Homo sapiens
cttgtgaaaacttcgcgtgcacagctcagtatgggtcccaagatacacagtataacctatgtgtgggtaggaagagtattcagtacaaacagggctggggacaggaaggggaagagaacttcagagctttcacgatcctcatctggttataggctgctccagaggccaaggtcccccatggaacaaactggcacaacgtgagggtaggccacatgggctcttttctttagcctttcattatataattttctcaacatagatctgactagtcatgtggctgggaaaatagttaattgtgatttttttttttaaactgcgtctcactctattgcccaggctggcagtgcaggggtatgatctcagctcgccgcaacctctgcctcccgggat

SEQ ID NO: 608189 - DNA, 216 bp, Homo sapiens
gctaagtcagttgtctcatttttttgtgataaggttttggaatttttagttaattgaaataaataatgctttaaatagaagtaaaaggtttataagtgttgcaaattgtagatttatcaattacctcagcaggtatcctcccatgtaattattagtgattagtgtaataagataatagattcaggtctcccaactatccctgggattgtcgcccac

SEQ ID NO: 608190 - DNA, 156 bp, Homo sapiens
atggttgctctatagtttctaacgtcaatactaagatgtgttcactatagttcaaattaaccgtggagaatacctctaattgcccatgcactatggtatttaggacacactaggctatgtacgaaccagcaacatcactctcagttctcagttaag

SEQ ID NO: 608191 - DNA, 201 bp, Homo sapiens
  misc_feature (5)..(5): n is a, c, g, or t
gaatngtccctcttcttaactggaaatcacacttgtgaggtatggtatccattatcgacagtggattcatgactgacttcatatttggtgtatctggttataaatttggtatagcatttaattgggcacttaatataaatccattggattggaatagtgtgtgtgtgtacatggtgtgtgtgtgtgtgtgcacttcagttt

SEQ ID NO: 608192 - DNA, 873 bp, Homo sapiens
taacggtccaccttggggccttacatgagggttaattaaactacaaaatgctcgacgggtccaggggtgaaggaatctttgttttggaaactaaaacttccaaggtattattattctttttttatgttagcttagccatcatgcaaaatttactggggaagcagttaataaaacacacattcccatttgaagggtttggtacattttcagtcctttacaaattaacaaagcaagtgataaacccggcacggtccgtgagaggaaattccttgtgcttcttaaagctgccagtcccggctttttggggggcctcagtggtgttattaaatttctggaagctcttttagctgcagttgtgagcattcaggacaaatcttcttcctcttcctcggtctcgctgtgtgtttaaaaacaagttcaaattttaagaaagggggtgtgttagcgtgttcgatacttcagtaagaattaaagaatcgtggtccgtggaagttttcgtggaaacattcagaaggggtgcggttcttccaggaatcttcctcggttgagcccgagaacgtgccccttccacgtttgaccgtggtgactgaggcctttgctgggacagaaaaggctagtgtaaattctcctttgtgcctttatccgtgcatctgtgggctctatatctggcaatttccttaaaatcttcactgtgctagccaaaacaaaacatttccttcactgaattccttttttaaaaatttccctaaatcttttcacgccttcgtgggtcttccagcagattctcccaggagtgccgcccatttggcctgggcacttagaggctcaggatagctgattgtggaactgcatcggctgccgtggatgtctaac

SEQ ID NO: 608193 - DNA, 110 bp, Homo sapiens
actacagtagtgctatcacagctcactgcagacttgaactcctgggctaaggatcctcctacctgagcctcctgagatagactaggactgtagggtctgcctatactgtt

SEQ ID NO: 608194 - DNA, 773 bp, Homo sapiens
atcggcacgaggaagcggcggtggcggtcgcggtgtatggcggaggagattttctggactgcgacttcctgaacaaccctggcaggagtgagcggctgttcagcctggggtgaggcctgaatgaaacgctccgtgggcccagtggctctacccctgctcctgccctgaccctgaccagcctccctcacgtgagccatgcgtgcctgggtagtgatgcatgacatcagaagctgtgagtgggatgatgggcctggatgctgagccccagctgtgatgccctgatggctcccctggatgtctccaccttttcctaccaagtccccagctgtttgaccttttcaacttgtgttctctcctacaagacggcttggagatctacctggaacccttgaatgtgatgcagtgttgattgtgtgtatcgatacttgctcatgtgtgggcagaatgcctttgttgttccttgcttgaacctgacctggggcctcaaacgtcttgtaccatcacttttgaatgagggtgccatggtaactcagataggttgccactgatgatttcagatggcccgcgcctgactgggactacccttcaagggagcgtatgccagtggcacggggctgcctgaattcctgaagcttattgcggcggtgaagttatcatagcgtgaggcactgaggacctgccaagaagtcggcatgtctcggacccgagggacagtgagttgcggtgaaccagcttctttaatccaagcttgaagtgctactgagcccgcactg

SEQ ID NO: 608195 - DNA, 619 bp, Homo sapiens
  misc_feature (43)..(43): n is a, c, g, or t
  misc_feature (71)..(71): n is a, c, g, or t
  misc_feature (74)..(74): n is a, c, g, or t
  misc_feature (77)..(77): n is a, c, g, or t
  misc_feature (99)..(99): n is a, c, g, or t
  misc_feature (101)..(101): n is a, c, g, or t
  misc_feature (121)..(121): n is a, c, g, or t
  misc_feature (128)..(128): n is a, c, g, or t
  misc_feature (132)..(132): n is a, c, g, or t
  misc_feature (134)..(134): n is a, c, g, or t
  misc_feature (165)..(165): n is a, c, g, or t
  misc_feature (183)..(183): n is a, c, g, or t
  misc_feature (187)..(187): n is a, c, g, or t
  misc_feature (189)..(189): n is a, c, g, or t
  misc_feature (215)..(215): n is a, c, g, or t
  misc_feature (218)..(218): n is a, c, g, or t
  misc_feature (310)..(310): n is a, c, g, or t
  misc_feature (322)..(322): n is a, c, g, or t
  misc_feature (331)..(331): n is a, c, g, or t
  misc_feature (340)..(340): n is a, c, g, or t
  misc_feature (348)..(348): n is a, c, g, or t
  misc_feature (355)..(355): n is a, c, g, or t
  misc_feature (360)..(360): n is a, c, g, or t
  misc_feature (363)..(363): n is a, c, g, or t
  misc_feature (366)..(366): n is a, c, g, or t
  misc_feature (374)..(374): n is a, c, g, or t
  misc_feature (386)..(386): n is a, c, g, or t
  misc_feature (401)..(401): n is a, c, g, or t
  misc_feature (416)..(416): n is a, c, g, or t
  misc_feature (421)..(421): n is a, c, g, or t
  misc_feature (424)..(424): n is a, c, g, or t
  misc_feature (426)..(426): n is a, c, g, or t
  misc_feature (442)..(442): n is a, c, g, or t
  misc_feature (455)..(456): n is a, c, g, or t
  misc_feature (492)..(492): n is a, c, g, or t
  misc_feature (579)..(579): n is a, c, g, or t
ccaaagaaactgttttgcagcctgtcacctcctctggcaggcngccatcctggtctcggagagtggggtcngcnccngactggggcggcggctctacantntccagaaactcacaggcagnggcatantgtngngctgtttggccttcattgtcctgacagttantgtcagctctatgttgcngcancnctgtgactagttccttatgtcctcgntcncaggcccagtgaagtagagccctaccctcttcatctttcacattcacatccacatttttcgatttgatggctttggttatatggtcaatgtngttttccctgcngtaatcaantatattttngtcttctnccctganggttnctncangatatagngaactaataacnggcccaccaaaaccngtatttgcttctttnccttnctncncgggtatcgggggatnccaaccgggatcnngttttttaactacggcgatatatcccggcatggctnggcgggggcttgaatcaccaagtgctttccaagcttcccatttttgctttccttcaaaatcaaagaagcttggtttaggagtattanaatttccaactttgacctgtttgtacctggcatacaggta

SEQ ID NO: 608196 - DNA, 267 bp, Homo sapiens
tcgagatcttcaagagtttggtcatcgagctggacaaagatctttatggccctgcaaccacctgttgagtggcatcggacacccacgacccaggagacggcttccaggtgaaagcgcttcctggggaccgtaggtgttgctctgacctgctcctcagtctggactaccagcctccccagttcaaactgggatccgccctagcccggctgctggggctgcacacacagagccgctcagccattgtccaggccctgtgacagatctcga

SEQ ID NO: 608197 - DNA, 131 bp, Homo sapiens
aatatccgctagctccaagtagctgggattacagcttcaccagcaatttaatttttggtaaggcagggtctctccttgttggtcaggctggtctcaaactcccgactcaggtgatctgctgctcggctccc

SEQ ID NO: 608198 - DNA, 345 bp, Homo sapiens
caaatatgtaaacctctacattatttctatgtagaaattatgatactctttaagcctgtcacagattttgttatttaatgcaaagaagcacatatattactatgggacacttttggtttgtttaaatatattgatagttgtattttaatgtaaagggtttcatttataatcttatacagatgatcccctacttacaatggtacaacttaagatttttaatcttaacaacggaatgaaagaaatacattataagaagaaactataggtcaaatacaaatacaacaataaaaaatacaatttactgaagtatataaataaaacatttgagatattaaaaatataagc

SEQ ID NO: 608199 - DNA, 171 bp, Homo sapiens
aggacgtaagaacgcaggtcgagagcgagctgggctctggggaaaggctccctgcggctggcgcaggctgtatgagcaagggtggacgctgggatgtgtgggcttccatgacatcttgaagacaaatccctcattctccttgtgttccccagagctgttggcacctccact

SEQ ID NO: 608200 - DNA, 393 bp, Homo sapiens
  misc_feature (225)..(225): n is a, c, g, or t
  misc_feature (229)..(229): n is a, c, g, or t
  misc_feature (234)..(234): n is a, c, g, or t
  misc_feature (236)..(238): n is a, c, g, or t
  misc_feature (240)..(240): n is a, c, g, or t
  misc_feature (251)..(251): n is a, c, g, or t
  misc_feature (338)..(338): n is a, c, g, or t
  misc_feature (358)..(359): n is a, c, g, or t
gtggagtgtatccaccagcaggtagtaggtcaggggctgaggagtgatccccagcaggtagtaggtcaggggctgaggaatgatccccagcaggtagaaggtcaggggctgaggagtgatccccagcaggtagaaggtcaggggtggtggagtgatccccagcaggtagaaggtcaggggctgaggactgatccccagcaggtagaaggtcaggggtggaggagngatntccancnnntngaaggtcaggngttgaggagtgatccccagcaggtagaaggtcaggggctgaggagtgatccccagcaggtagaaggtcagggctgaggagtgatccncagcaggtagaaggtcaggnntggaggagtgatctcagaaggtagaaggtcaggg

SEQ ID NO: 608201 - DNA, 771 bp, Homo sapiens
tttttgttttttttttcccaggaaataaaaaacatatatttaaatgcccaactatgcatccatatgcctcagcccagggcaggggtggggagtaaggtaaaaagggatgcattaagttggccctggtccccaaagagcgggtaaatagcttaagccacttcttcatctcccagcacagacctttcagaaacccccagaatatcaggagtgataaggtggatagggcctcacgtgctctcattaaaacagcctcaaacaacctgtttccccgaggagaggcaagcctttcgtgcctccttgggtccctccgtgcctatcaccattaggaccacaaggtgtcttctcgctctgtggcccagaacatctcgtgtgtgaaagggcgtggaatacagggacaagcgttacccaatcttctccatctagtaatcaactactccattaggctcctcgtgataccccattttgggagcacgtgttgaagtctcagctctcgtggaggttaggtgctgacgcagaggggggcacacgtgaaaattagagcctcaaagccccccaggggaagcggggcaatgggggaacgctaaatagtgcagagaaggtgttggccggaacaccctaattctgccagcagccaggtattctgcagaatactccctgggggcaggtttggacctcatctgaccccggtgggtctgacagaaataagctttgtattgggccaagcccagttaaagcacgggccaactgtggggcgccaaaacaggcggaatt

SEQ ID NO: 608202 - DNA, 151 bp, Homo sapiens
agcgacgcattcgtatgatgtatatgcaatacttacatatccagttaaaaggagccagtcaggttgttcccttggtttttgcaatgaaacaagcaaatcaatcttttcaatgttctggatgttgttggagatgataaagccagcgaagatg

SEQ ID NO: 608203 - DNA, 415 bp, Homo sapiens
cggaaggaagtagggaagcggttgtgggggtgaagctaggtcagcatgacgggcctctggattagctgagcgagcagcgagcattggaggtggtcgctgggtctaaaggaatgttattctgggctacaggctttggtcgaacctatagggaaaagagagaataattctggtattacattaagctgcgcttgtcctattataagctacatcttccacactctatgtagtgaaatggtgttgaagtacacgtgtattaatgttcatttgggttctattagtgtgctatggacgtcagggcatgtcatcttattctagactcatcatgctcttgcggtccggtcctcaccctagagcatcgcttttgattttaatccctgtgttccctcttctataccatgtcacctcttctagctta

SEQ ID NO: 608204 - DNA, 138 bp, Homo sapiens
aaaggttagactcctagaggatccccatgtaccatctcctgcaacaagagctgactgaggccagaaggctacaggatgtggaggccagtgcgccacctgcaaccacactgtgatggccctaatggcttccctggatgc

SEQ ID NO: 608205 - DNA, 546 bp, Homo sapiens
  misc_feature (161)..(161): n is a, c, g, or t
  misc_feature (243)..(243): n is a, c, g, or t
  misc_feature (252)..(252): n is a, c, g, or t
  misc_feature (268)..(268): n is a, c, g, or t
  misc_feature (481)..(481): n is a, c, g, or t
ttccgcacgcactcgggttttattgactacattgcaagcaaaagcatcgaacaaaaaacaatcatttaaaaacaccaaaaagcctgggggagcaaatgaaaacaaataaattaacactcctattgggttgtgtctgccagggaggatacaggcctcattcnctccgggccttgggttcccgggatttccactggatgtaatcaaagatgtctttttcactatccactgggggggggtctcctncaactccantgactcccaagggacngatgggggactcattaattgggaaacccttttctagggcatgagccctcatattcttattgaaaatatcactcccaggggaataaagaacaccacagtaatactgatctttggggatcaacctgatatcaattcttctgggggggtattctttttcatcatttttaccgggaagctgggaaacacccataaactttgtctcaccctttgacangggatctgggataaaatgaaccttttggaactggtccacaacctgatgtaacagtgttgggcttg

SEQ ID NO: 608206 - DNA, 211 bp, Homo sapiens
cggaggctgtaatgagccatgatcacgccaccgcactccagcctgggcaacagagtaagaccctgtctcaaaaatgagagagaggccaggagcattggctgatgcttataatgccgaggtgggtacatcacctgaggtcagagaccagcctggccaacatggtgaaatcccatctctactaaaaatactaaaattagttgggcatggtggc

SEQ ID NO: 608207 - DNA, 1347 bp, Homo sapiens
ggcaaaactagaaacgaaggacgcagtggagcctggtgccccaagcattgctcctgccaacatcatatttatttccttgtttgtgctatgctgggcaggccttcatcttgtcaccttatagtgtaccttggaggggccagggctgatggaaggccggacccaggttccatgagggcagcagtgcagtcgcggacttaatatggctagttgctacatacgggtgcttatattctacacacagagtgataacatgcataagtgtggcgtatgggcattagagacctgaatgatccccataatgatacaagaacatgcataaatgtggtgtcctccttgacagagagaacgcgagagagacacaaccacaacagcgaaaaaaagcagcacacaacaagcaaaaaagaaaccgacacaagacggggacaagaccacacacaggcacaaccagggccccgacagccacagcagtacgcacaacattgcagagcgagcaacgcaaagaggagcaggcaagcaggagtacagtagcagcgagtagcaacaaacgccagtgaaacagaggaagacgagcgcggggacgccagaggccgaggacggcgccgcagaaacaacaggggaagggggagatggtgagcgggcgagagcacgcgcgaggagaggcggaggccggagcggaggcaggacgaggagggggagggacgcggaggagagaggagaggaggacggagcacggggccggggggcggcacgcgggcacgagggggggagcagcagcagcagcgaggaagaggagatgaaggagtagaaaataggggaggaatggaaggaatgtgaagagagggagaacgagacgaagtggagatgtaagaatgggaaagatgagagaggagtacgaaagaggagagaagaaaaatagagaggggagaagagaggagatgaaaagaggggggatgaagagaaaggaggagcacagacgcacgacaccggagagaagagcagacagaagacaagaagcgaaggacggagagaggcggccgggagcgaggaagagggaggagagagagacaagagaagggcaagaacggacgacaaaacagcggaacggagcaagagagagccagaccacaggacgagaagagaggcaaagagagaggagaggggagaacagagacgaagaggagggaagaagagaaaaagatcagtagcaaatgaagagagaaggcgaggagaaaggaggagaagaaaggataagcagagaatgagcaagcgagaggaataaaaggaggaaagaggcagaagaagggggaagaaacaggaacaagggacaccaagggagaagagaagagg

SEQ ID NO: 608208 - DNA, 164 bp, Homo sapiens
  misc_feature (28)..(28): n is a, c, g, or t
  misc_feature (54)..(54): n is a, c, g, or t
  misc_feature (154)..(154): n is a, c, g, or t
  misc_feature (162)..(162): n is a, c, g, or t
acattggaagccctcatgagtgcagggnccgccacttgtccagagggccacgantggggatgtacttgaccccacagccatctggggatgagccgcttttcagccaccatgtcttcttcatcagcattgaattggtggccccactttctttganatgtggtntt

SEQ ID NO: 608209 - DNA, 266 bp, Homo sapiens
  misc_feature (38)..(38): n is a, c, g, or t
taggttttgttactctcattctcaattataaattatcntcgtctttctcacttatctaagtccttaaaaaccccaatactatacttggtattaacgaatttacaccttacgacaccttatgttggacgtacatatataaacctgtcaaatatatgttttatattcactaaactaaaataatacatacctcacactaaattaaaatattatcagtagtattttatgcatattaaattactactcccttccaattttgtttctcatta

SEQ ID NO: 608210 - DNA, 166 bp, Homo sapiens
aaggacactagagcacccctcttgcgtatacaagggggcctaagaagacccttcttaggccctctcacataccaagaggctctagtgccatagcagtagttcacaggaaggacaccaggagaagttatacctaggctactagacgctcatatccctctttctcaca

SEQ ID NO: 608211 - DNA, 237 bp, Homo sapiens
ccttatggctgtgttggtctttgaaacagaggctgtgctggtggtggtcacaggggctgggagtagttccatgaaccggaggttgtgctgcttgtatcagctcgaggttttgcgtggtctgtgtgagtggaggttgtgctgcttgatagcgggaagagattgtgctggattgtaaggggcagagacttgtagctggttgtagaaggcagaagattgtgctggacaagccattatagg

SEQ ID NO: 608212 - DNA, 795 bp, Homo sapiens
  misc_feature (511)..(513): n is a, c, g, or t
  misc_feature (567)..(567): n is a, c, g, or t
tagaataacgagacactatgaagttatcaagaatttgtcatgatcaaccagtaaaggtcgagcagtcttctggattgaatttgtcatgtgctgtaaaggagccaagcaacctcgggttgcagcccaggacctcacaggcttccagtaacactccttcaacgtgattgggttcctgctgtcctgtgtggcaactgtgatatttaccatcatgaaatgttgtatgttttgtgtctggaaatttgctagaactggaaagaagggaaacagatttgttgtatttgaagcttgaagttgggaaacctgatagatgggacttcttcagtttattccaacaagaaagattgtgatgcaagattcctttctttctgtgacagaatatctcttcaaaaattacttaccttggcaactaaaaaatttgtttttcagagatttaatacctgtttaatggttagaaatactttttgtcaagaaggaaaatactggcaaaaatattaaatagtataaagccttnnncaaaaaacaaaaaaaaaccacccaaccacgaacccaccacaaacactacccganaacaaatcccaccggcaaaactaaataaaaagggcctttttgcccctaaggggggacctttggcgccccttcctctttggaggggtaattcataaactctcgcccctgactccctgcctccggcttagggtgcggaaaacggtttaccttcattaaaggggggatacgggtttccccaaattccgggaatccccaggaaaaacttttaaacaagggcccccaagggcg

SEQ ID NO: 608213 - DNA, 149 bp, Homo sapiens
agatgaagcaagcggcccaaacacccagttgcgttctattagtatggaaccatttgcattggtttattttaagctttatctttccttgtgcatccggaccaagaaaatatcttggattatgagaatgacggcgccggtgggcttcatgt

SEQ ID NO: 608214 - DNA, 257 bp, Homo sapiens
  misc_feature (252)..(252): n is a, c, g, or t
aagtgtttctacaggataccccattttatctagaaggctgccttaccatattgtataacttttatccttaccttttttgcccttcttaataagctgtgtgcaacaagccagaagtcctggctaatgcgattacgcactgttattaagattgtctacagatagctattcttatgggctgtgccatcttgccacatcttagaagtttagttgaaatcattgaacattgtcttgtggatgagcagccttcagatnaaatg

SEQ ID NO: 608215 - DNA, 564 bp, Homo sapiens
actcctcgccatcacgtgctttgttgcagctatttgtttgagcccccccatctgtttacacaccatgtctctctcttggtgttgttacaatacaagaagacacgctccgtcacacacactcggtggttacaagaaaagaaaggtgtcttgtctggttgggtaaaatgattgtagaacatgtggcgagagacaaacggggcttagtacagggggatacaaaatggttcaaaactactctctccatcctttttctttgaaaacagcagttgtatagagtacacactacactggcgtgtgatctagtatccgacacacacacatggctggggacactcacacacctgtctgtgagagagagagactcgtgacaaaagatatatgagcgtccgccttcctccatccggggctggggtgaaggtatatctcaacagcatttttttctattcctcttatggattttctgtgtattcttcttcaatgtctccatggaaactagactcccccttttctttttgctcaagaataagacatacgtcttcgatacacaacagatgtccacaaaca

SEQ ID NO: 608216 - DNA, 782 bp, Homo sapiens
cgagaggtcgcgagttggtggcgcttcctgcttcctgcagtgctgcagcctccggccggccggcgagccagtgcgcgtgcgcggcggcgtgctccgtcagcgaccggtggagcggactgaccgtgcggtgtagggctattcagagccagacggatgtgagtgctgcgacgtgcagagtgccagacgccgacgatgctgacattgggggtacctgtgcgaggcatccttgacttgcacggcagtggactgctgagattggacctagaagacaaacggacgtgaagacgactatcgaagcgaccaattgggtcgctaccgtctactgaacggtcgggtgagcaggagtcttgagattgaacctcgtctacgtcgcaatgagaggaatcggaaattgtcttcccttctacttgtaggtccttatcaaatgaactggtggggattaggttgcgcagtgacgatctttccgtaggaggtgttccaattgaaccaggcgatttcggagccaggataaacgccattgagcttcgcattgcgagaggactgcacatatacgcagagattcgcggtacggacacgatgtgtcaacaggcttttacgcggcgtgcaggatgcgcattgggacccagagcgcatcatgggaagcacccagttattgcggaatcgaatggttcccattgttcattcatttggttttggtaccaatggtttcgcttgagaattccaaaggaaaattttgcgagatgcgattttccccaagttattgcaggaagccgaaaggctgg

SEQ ID NO: 608217 - DNA, 173 bp, Homo sapiens
atgtgatctgtttccagtaacacctattctcctgatgggggctccaatggggggggcactccatccactttaccaccctttacaaacacccaccctgtcgagacaagctcgtccctattagcctggtctagaccagtaagaactttcagcaccatggtcagcactgacactga

SEQ ID NO: 608218 - DNA, 191 bp, Homo sapiens
accatgagagctctctcctattatccaggtagcattgttagatatgttggattacaaataaaaaattattgcctaattcagtatttaaagtagttggattctataaactttttcctgttttaaaaaaaggtttagatttataaagccttctcagtggccctcacttctctgttttattgtcgttacagatt

SEQ ID NO: 608219 - DNA, 163 bp, Homo sapiens
tacgagttgtctctctgctgcaagcaaaacacatcatttgctaaatcccaaacaggtgcctgcatgtcaatagcttccatggcatattcaacttggtataagcgaccttctggagaaaatatagtggtcctggggtcatatcttcgagactgcctcgccaaat

SEQ ID NO: 608220 - DNA, 351 bp, Homo sapiens
  misc_feature (296)..(296): n is a, c, g, or t
aaggatgttgcgagaccacgagccaggtggccacgcagagcaaaccgtgggtgtgcacgaatcaccgcaccatgatgttcatggacaagttttgaagattagcgacacagaccctgaactgtggagggactgcctcgactggcagagcgggaaacgtcaaactcgaggaaagtgcatataacatactctgcattgttaaacaaagaacaggatcttttggggatcgtcctgcaagacctactcttttagaacaagtgttaaatcaacaacagctatttcagctggttctggagcanagacaacagcagtttccaggaacatcaatgtgagggaacttaccaagcatgtact

SEQ ID NO: 608221 - DNA, 277 bp, Homo sapiens
cacggtcggccgagaatgtgctccccgtggtgatgaacgtcctccgtccatgttcccatcgtcgtcgcccgaccccagctcacagatgtgctgtcgcgctgagctgctcctagcgcgcttgtccgcgtacttgcccatgaccttgaagtgctcgtatgtcttgttcccgtagataaacaccgggatacttgcacccctcgagagatcgaggtttgtctccctgcagccttgtcgtagaagtcctgggaccttgtcaggaggagtctccctccagctg

SEQ ID NO: 608222 - DNA, 209 bp, Homo sapiens
gagcaaaccctgtctcatactcacaaacacacaacattagcccagcgcggaggtacatgcctgtaatcccagctacttgggagggttaggaggataggaggaggtttctctctctactcacctctttactatactacgtagagctcatgtaatgttaaactatttctaacatacggtgaaccctgtaagttccctagtagaggcagcag

SEQ ID NO: 608223 - DNA, 355 bp, Homo sapiens
tagatttatttctagatcctttatattgtttatggcttttgtaaatgcaataatctctctaaaattttccacttggtcctgatatagagtaatacaaatgaatttgggatattgcttctgtattcaggaaccttatgcttattaattctaaaaattacctgtagatttttttggatttttctacaaagaaaaatcacatcatctgtgtatgatgatgtttttcttcctttccaagtatgggtttttatttctttttcttgtctattgtacttgctggactctcaagcctgtccaaccccatggcctccatgactttttcaaaaaaaagactagttctagatcgcgagcggccgct

SEQ ID NO: 608224 - DNA, 615 bp, Homo sapiens
aaagcaatactaggcaaagaacaaacagtgtaagaatcacattacctgactatatactacagaactatagtaaccaaaacactatggtactggcataaaaacacatagatcaacacaatagagaaccctgagataaatgtataaatctgcagtgaactcacttttgacaaagttgccatgaatataccctggggaaaagacagtctcttcagcaaatggtgctggggaaaaactggatatacatattcaggagaaaaaaactagacccctatctctcgccatatataaaaatcaagtcaaaatggattacagatttaaatcttagacctcaaactgcgaatctactacaagaaaacattggggaaactctccaggacattggactaggcaaagatttcttgagtaatacccaacaagcagaggcaacaaaagcaaaaacagaccaatgtgattgcatcaagttaaaaagcttctgcgcaacagaggacacagtccacaaagtgaagagacaacccacaggatgggagaaactatatgaaactacgcatctgacagcgataataaccggaatatataagaactcaaacattctgcggacaaaaattaacaatcggt

SEQ ID NO: 608225 - DNA, 459 bp, Homo sapiens
gcggcctcctactactactaaattcgcggccgcgtcgacttttttttttttgggacagagtcttgctctgtcgcccaggctggagggcagtggtgcgatctcggctcactgcaagaatgtccactcttgactcttctgttcaatatagtactggaagtcctagcccaaccaattaggcaaaagaaaggaatacaaggcacccaagttggaaaagaagaaataaaattatctttgtttgcagataacataatcttatgaagtcctaaaactccatcacaaaattgtcagaactaattaatgaagtaatgttgcaggatacaaaatcaatatacaaaatcaatagtgtgtttatacactaataaataatccaaaaacatttttaaaagtccacttacaattgctacaaaaaaatgaaacacttagaaataagttttgccaaggaggtaaaagatttgtaca

SEQ ID NO: 608226 - DNA, 131 bp, Homo sapiens
gtgctctagaggatctcacggaggagaagctggagacgtggcacgcgcccgggcataggaactatgctacgttatctcccacaaccctgagaccaagaagacccgtgtgaagctgccctcctctgtgctgt

SEQ ID NO: 608227 - DNA, 580 bp, Homo sapiens
cctcctgcctataccggccacttcccccaatgttcccaggccgggaccctcaccccgtgtacccgttccaatgccctcctgcgtcacctgggccgcccccttgggctctatgggaaggaccccccggaggcccccctggtggacctggtgaatgacggcctggaggacctcccgctgccaatacgtctccctcatctacccccactatgaggcgggccaggatgactatgtgaaggcactgcccgggccactgaagccttttgagaccctgctgtccccagaacccgggaggccagaccttcacttgtgggagacccgatctccttcgctgactaccagcctgctggacttgctgctgatccctgaggtcctagcccctggctgcctggatgcgttccccctgctctcagcatatgtggggcgcctcagcgcccggccccaagctcaggccttcctggcctcccctgagtacgtgaacctccccctccatggccacgggaaaccatgagggttggggggactctgagcgggaggccgagtttgccttcctttctcccggacccataaaatttctaagaga

SEQ ID NO: 608228 - DNA, 196 bp, Homo sapiens
  misc_feature (1)..(1): n is a, c, g, or t
nttggaggtcggaaggttgagacaaaattaccagcaggttagctttcttcttggcttaataaatagctttcctctccctgtgtcttcacatggtctttcctatttatctgtctgtgtccaaatattctcttcttacagggacactagtattattggattagggccactcctcgattaagcgttggtaccgagactc

SEQ ID NO: 608229 - DNA, 616 bp, Homo sapiens
ctgtgaagcacctcctcagtacgttttgcctacctatgaaatggcccgtgaaaatgcctgaaaaagaaccaccacctccttacttacctgcctgaagaaattctgcctttgacaataaatcctataccagctttttgtttgtttatgttacagaatgctgcaattcagggctcttcaaacttgtttgatataaaatatgcttgtcttttgtttaagcatttatgtttcaaacactaaggagctttttgacatctgttaaacgtctttttgtttattttgttaagtcttatacattcttatagtttctgaagacgaatcataggttaacagcacatgagcaacagtgccacttagtctatgcctcttaatttggggggtgggaagggaaagatgggtacttgccacatagtgtatcctttatgtaactggcactttctctctatataactcgatttgcactttgtgtatacttgactatccctgagtactttcaggaagactgacttaaatatatccggggtgagtaagatagatagggtataagactctgaactttatcatctgcagaggcaagagaaaactattttgacattgtgacttcgacctgtggaagatt

SEQ ID NO: 608230 - DNA, 543 bp, Homo sapiens
  misc_feature (367)..(367): n is a, c, g, or t
  misc_feature (381)..(381): n is a, c, g, or t
atctatttaaagattgcaatatataatcatttttaaagtatttgtttaacctgatgggttttccagaaatgaaaacaagtcagttctaaaaccaaagctgatatttagaaaatgtgaaaatgtaaatcagccctatccataatatagtttctctaagactttatcttaaagagtcattttaaaagaatataactattcataagtgtaactgctatcttaatgttttgaaataagttaaaacactttaaaatatgaatactgtagtttgaaagaaagaaactgggggaaggaaaagtagagaaagaaatgccaattccaaagtttttgggggggggggccccccccccaaaaagaagaggggggggcncccctttttttttnaatttttttttttgggccaagttttcttagaatgacttttaccagtttatgaattcttgtaaacagaatgtataatagaaatactgaaacactgttgcctaaagtggcattgttgactgctactgtgatgctactgtaatgtaataaattattaaatggtaa

SEQ ID NO: 608231 - DNA, 796 bp, Homo sapiens
gagcgggcccactgccaccggccgcgggactggctgggactggctcggccgagggcactgctcctcggtgcattgctgctcgggcgccgcagcccgcagccgccagcctccaccggccgtgcccctcccccgtggagccggctgtccgtcggcgcccactgcctggcggcagcggcggagccaggcagccccgcggcggccgagcgcgctcgcgcatcgggccctctggccttctttacctagggcagcccgcgccccggtgcgagggagcggtccttaccgagacccgcccggcccggcggtgcgatgagcttcttcggcttcgggcagagcgtggaggtggaaatcctcctgtaacgatgccagaagtatggaagcgcggccgcagcacaagacaggagagacggcgaacatactgacgaagactactttcctccttcttactaacgagcggaggacgagctgcgtcctccgagagagatggtgacgtcgcttgctcctcaaagaaccccaaacaagggcggctggagccaccagggccatcaagatcgagttcatcgaggccagaatcgaactctacttacgatcgcgggaaaccaccatgagtttgtgtccctggtgaaaggaccttggcccggcctggagagatcacccagtcgcaggccttcgactttgagttttacccacgtggagaaagccgtattgaggtcctacacaggggcagactgtgaagctcacgcttatttccttcgtgctaccatcagccgcccgctcaatgatgtcgtcaacgagatgg

SEQ ID NO: 608232 - DNA, 412 bp, Homo sapiens
cagccctctacagtaaatggccccaatttcccaaacatatgtaactcctgccatttcctgcagggccccaatagcatcaacagaatacttactatttcctgaacacaactgagctctggcttatgtttgtttgttcatttttgctttggtttttgcatcttggcgattatatttattggaagagttgtaggaaaaagcgccatttagctcaagacgacatgagctatctgcaaaccaattcatttccagagtggaaaaatcctcagaattacttcctaatatctgtatgcacggtcctctttcaaacgcttcgcacactaaacgcggcactctgccgtcccctattccccataccgcacaatttctttgcgtcagccctctttcctgccgggacacccggccctccctctcc

SEQ ID NO: 608233 - DNA, 113 bp, Homo sapiens
gatagccgacaggagctgggctcagtccttcagctacctcggccatctgacactgtccccattggtcgtttctcctaagcgggtctttgtgctctctttgttttgtcttattt

SEQ ID NO: 608234 - DNA, 929 bp, Homo sapiens
ggctgcagtctgtctgagggcggcgaagtggtggctcattaagatgaggcttctgtgcttctcctagtgcggcgtctgcgatggtccggagcgagggcctgggccaatctgggcggcgttgcccagcacagagattagcgatgcagtacgcccacgggggcccgcttgctcaaggtccaagatttgtgtttcccctgagggtaatacggcggggtgttggagggaggtacaatgccggggttaataagcccagggggacccaggatattccggcattgaagggaggaagaaaataacccttcccctcaaacaattatataggacccgctattagcatctattcctgtcagtcttccaaagaagtaagttattaacattaaggggcttacactaaattgtttcggaagggattcttttgtgggtattactttgtgggatttgaaggctttcttaagcattcttggggaggtgggggccaaagaaaaacttaagggttttatggcattgtattgatgggtaaccttcatggagcaaacagtgattggagaaacccagtgtgttattgttcacacagtgtgcattttggagattaatataaagtgattgtaccttggttatggtataaagcgttgaattttggtcacccttcaattccgatgaaacaacttgtccaagattctggacaacgtgaacgtgaaggtcaaatggcctatggcatcaattcccacaccatcgatatagaccactaataggcgtgaaacctttggctttagggacattgcaaccgggttgcattatacgcctgtatgaaacgaaggttgaccagccagagctactgcaggcgtgcctgtgaccatgcaaagtgtcagggggatggattgactgggcaatgtgttcccccaaaccagtgtggctaagaaatggttaga

SEQ ID NO: 608235 - DNA, 634 bp, Homo sapiens
gggccgccttttagagaagcaactcttgtgaaggtccccataaaataatgggggtctattcggggcaccacctttgtgccaaccccggggccccgatcttaagcagatacggttaagaccagacgcttaaaaatggcgcgagccgctttgcagtttttttacgaccatatgttaaattggaaattcatgtcataaaacgatgattggggagaaattttgcatcctccccattatggggtgcttcaagtcaccccctcgtagacactattcgggtctggaacaccctctttcccccaaatgagaatttttctctccgcctgacaatattcccgaggaaaccttttttttttttgagataaaacccccccatcttgcttaaatataggaaatcccccgtttctaccaaatttcttgccccaaattgcgctttctaatatcccttctaagtgcctccttgtgctctcttcaaaacgaggacacaccactttgttttttcaaaggcccgaaaagacacgcactagtgttaactatatagatgcttgcaaagaacgaccacatcaaagccccttgtttacagacagggaaattcttttgatcccgggggggataaaaatctcttcaaacccaacatgca

SEQ ID NO: 608236 - DNA, 627 bp, Homo sapiens
cgatcaagagggccgagcttcaagcacgcagcaatgcagctcagaccgttaagcgtacccacaccccccgggaaccagcagtgattaccctttagcaataaacgaaagtttattaaagctatactaaccccagggttggtcaatttcgtgccaaccaccgcggtcacacgattaacccaagtcaatagaagccggggtaaagagtgttttagttcccccctccccaataaagttaaaactcccctgagttgtaaaaacctccagttgccacaaaatagactacgaaagtggctttaacatatttgaccacccaatagttaagacccaaactgggattagataccccattatgtttagccctaaccctcaccagttaaatcaacaaaactgctcgccagaccactacgagccccagcttaaaactcaaaggacctggcggtgtttcatacccctttaaaggagcctgttttgtaatcgataaaccccgatcaccctccccccctcttgctcagcttatataccgcctttttcaccaaaccctgatgaaggctccaaagtaagcgcaagtacccccgtaaagacgttaggtcaaggtgtagcccatgaggtggcaaaaaatgggctcca

SEQ ID NO: 608237 - DNA, 317 bp, Homo sapiens
aggttgagctcaccagcactgtaactttctttcatgaattcccactgatcacaaaccccacaccaccatctcactgacaccatgttcaaccatgtcttttacttaacaaattccaggaactggccttaggaaatccaagtatcaaaccaaggttgtggagtattccacctcaggaaggaatgctgaacaactgatttacagacttgttgccccagctagaccaccaggtagcccattactcaaggtaaccattacaaccaaatagtgctaacctgcataccctacccctcacatgctttgccaagccccagctgcgg

SEQ ID NO: 608238 - DNA, 878 bp, Homo sapiens
tggaaagggggtttccccccgggtattccccgctactcgggggggtaaaagcagaggaaaattgggtgagaacccggggaggggggagggtgtgggggggaggccagaaatacgcgccactgggcctcccactcctcgggagcaacacaggaggtggaaactccgcggctccaaaacaaaaaaaagaaaaaaagaaaagtttcaagaagattttataataccttttgtgagaaagaggaacaaggtgtggatctcaaacgcggggaaaacaggtgtgttaagagggggataaatctctcgagacactttgaaagagctctctttattcttgtggaaagaggggatatttatccagacaacaatactctctccaaaacagcacgcgcgcgggtgtggggggaggaccacaccagctttgtgacacacgcgggaacatatggggggacgaaaacactacgagatctcgagggagagggcgggggagaacaaggggccccaacgacggtgggggagaggggggcctcaaaaaccgagacacctatagtagaccacacaacctgtgggtggaaaacaaaaacactgtggggcacacgagaggtggttttctcaagaggccacagagcgtgtattttcaccccacggggagaaaataacacattggcgcacacagcttctcaaccaacaaatctcttgtgtgaaccctctgtggcgcaaacaaaagaggggggcgcctcgtgaaaaaaagagagttgcaccaagagactcgccatggtgacccccccaaatggggagggaaagcaacccccgtaaaaaaaaaaaacttccccacaaaaggaggaccacccgacatacggggcatgacaacacaggaaaatgtg

SEQ ID NO: 608239 - DNA, 177 bp, Homo sapiens
ccaatatcgcgccaccgcactccagcccgggcgacagagcgtctccaaaaaaaaaaaaaaaggaaaaaaggaggaattaaaccgggggggttggccacaggggctcacgcgtgtaatcccagcatttggggaggccgaggcagggggatcacccagcttgggcaaggggtaccgagc

SEQ ID NO: 608240 - DNA, 418 bp, Homo sapiens
  misc_feature (13)..(13): n is a, c, g, or t
cccgccccttccncccctgggttgcaacaccccctcccccttcgaccatgctggattttccacaccgtttccctcgagctgaagttagcaggctagcatcacttaattccctggatgaacatggagtgctggcgcagctcattcctgcattactgcctttgctcgccaaccaaagcagcaaatgaccttgggctcaaggacataacttattactatgtcgaaggcttatgccgagcaagaagccgaagccacttgccctcctggaggagacctgcaagctccctgagcggtgggcgggcctcgtccgcaggtctcatcccacactcttgagaagccttggtcactacagtggtcgcacatgttcctcttcctgttcctgttgacatgtcgttgtttaaataaatctcacttgccacca

SEQ ID NO: 608241 - DNA, 580 bp, Homo sapiens
aggatccccgttgctgtcgatgtagatcatatgctggtcatctgtgcactcatcagatcgcggcaaagggtaagttctacaagggtgcaggagaaagcttagcagggaaaaaatatatgctgtagttttagcgttgtgctttgccgtatgaatgaggttatagcattacacaaagaacccctacaaagaaagagctgaggtaattgcctcatgacattagtaaatgatttcagcacataaagggaactggatggcagtaattcaagcagtctaaaagactctgaaaaaggccacaagcactaaaagaaccatagatagctaccaatttagagaatttaaattttctaattcacaagatagaaattagtgtacataattcaataagcaaattttagggtgactgacatcttatcaggtgatttgtgaacaaaagacaaattatttcccatgccaactatttaccatattttccagactatatgatactataaataaagccaaaatatctgacatattttactccttaatcctttttattaaatccctcaaaaagagcagctctagattttcatcagttcag

SEQ ID NO: 608242 - DNA, 935 bp, Homo sapiens
agcctccctgtgcctggcctggccggccggggtgaacatggctgggcgctctgagggtgtgctgctcgtgggtggcgcgggtgtgatgttccgtgttcctggttctttgtgcgtgctgcatcgtgcggctccgtggaagatggcggccctgggcgggtttccagtctgtggctccaagctgtgctgtgctgcctggagctctcagtgcagtggtgctgggctgctgtgctagctttgccttgtgtgccctgtgtgctgtgaactcctggtggcctccttgtgcgaatgtggcccgtgctcctggtgtcaatggtgctttgtacctgctcccctgatgccccgggaggctgtgccttatcctgatgacgcaggtaatgtatgccagtgcagcctgaatgacacctcagggaccttccatgtgggaccccccttggctaatggcgggggaaccccttcagtcctgacctggactggcccagtcaggggatggatcagtcccgcaagagacctgcccctcagcagatccagcagggtccagcagcaggcggtccaaacatcgaaaccacaaatgcaaaagcaaaacagaagatggctgacaaaattctacctcaaaggattcgtgaactggtaccaggaatcccaggcctatatgggatctcttggcttttgaaaggaaactggaccagactatcatgaaggacaacggctaggaatatccaagaggccttgaaaacgtcccatcaaagtccagccttgttccaaatattgatgcccactaaaccaaatgcaggacagtttctcttacctttatttaaggtccttgggtgatttgagctggacaaaagacctgtatgggccacacgaagcaatctggtagcaatggccacaaggaccggcacactagcgcagggagaccgaatggctatcagggtgac

SEQ ID NO: 608243 - DNA, 454 bp, Homo sapiens
caagagtcagagcctcggggaggtggccgccagcatgggccggcactgccgccggatggctggcaaggctgcctagttcccttgcagcagaaatgaacagttctgacttatagtgagcacggccctgtggcccttcctcagtaggcacaactacctctcagccagcccccgccagcctttggtttggggtctgggacgagctgccccatgtcacacgtctatgtgcatgtgcacacacactcaaacatgtacacacacgtgccctccccacctcactagactctccgggagatggggcaggactgggagagcccacgattggtgatttgggtgtgttgggatgaggcggagtgcctgtgggatttgtcccggtcagagcctcagggggctggggtctcagggcactcagcttcccaggcaataacagccgtggggtaataaatggtctctgcac

SEQ ID NO: 608244 - DNA, 128 bp, Homo sapiens
tcagctcggtaccatagctggcgggcacggtggctcacgtctttatggtttatcagtaccagtctcccaaatgaggaaagatggaattatataaccttatcttgattgagtacgctggaatggaattg

SEQ ID NO: 608245 - DNA, 505 bp, Homo sapiens
cggccattatggccggggttttgggatcgggtaaattatgagttgggtttgaatgacttgaatgtccaaccgtctgaacgagctggctatgcgtgtgaatcaattttgaagagacctgttttgcaaagaaaagacaggacacgtgtattcatgtatgtaacgagctctgtaaaatgcagtgctcctgtcggacaattgtgaacaagattaatacctcattctttgtgagcgtattttgctgctttaaagaatgcatgagatttatcaattacaacctaggcaacgaagctactgtctttgtgcagagagtgatacaaggcgtcctggcaaccaatgtcagtaataagcgtattaacgaagaaagcgacatgcttgatacagagcagagagtcaatgttcttgacaaggaaaccaaagagtttgtagtcgatgcaaattgacacctatgaaacagggttttacaacatcccactttatttttgaaaaagtaaccctttataaaaag

SEQ ID NO: 608246 - DNA, 105 bp, Homo sapiens
ctcgcaccggactcggcgtagctgagagcagaagcgtagcacgctgtcagcaggagtaaatctctttgtgggttggaagctctcaggttcctgcagaggaagctc

SEQ ID NO: 608247 - DNA, 910 bp, Homo sapiens
tgatagaccacatggtacaaggccatgctgcttttccagaactacaagtaaaggccacagccagatgccagagtatatatgcatatttgaacagtcacctggatctgattaagaaggctcagcctgtgggtttccttactgttgatttacatgtttggccagatttccatggcaaccggtctcccttagcagatctgacactaaagggcatggtcaccggattgaaactgtctcaggaccttgatgatcttgccattctctacctggccacagttcaagccattgctttggggactcgcttcattatagaagccatggaggcagcagggcactcaatcagtactcttttcctatgtggaggcctcagcaagaatcccctttttgtgcaaatgcatgcggacattactggcatgcctgtggtcctgtcgcaagaggtggagtccgttcttgtgggtgctgctgttctgggtgcctgtgcctcaggggatttcgcttctgtacagaagcaaggcaaaaatgagcaaagttgggaaagttgtgttccccgagactacagggatacaacgctactatgataatgaaataccaaagtaattcttgaaaggctggttgaaccaccagaaaggagttattgggggaatcatgaatgattgactgtaacaggggcttgcagggtgctgatgccagaaagctttctgtgccatggattaaggacttctgtccattgtgtccaggttcaagaccctgtgggtttggttcatacatttgtatggtttcataagaaaacagactgtgttacaaaaaacaaaaaagaaatgtgcggggcggccggaaattaaacactgtgggcggccagataatggagtcacaacacgagggtggtcacaaaaaggcggggaacagtgtgtac

SEQ ID NO: 608248 - DNA, 891 bp, Homo sapiens
  misc_feature (89)..(89): n is a, c, g, or t
ggtcttcctccctccctcccttcctcttactctcattcatttcatacacactggctcacacatctactctctctctctatctctctcanaatgacaattctaggtacaacttttggcatggttttttctttacttcaagtcgtttctggagaaagtggctatgctcaaaatggagacttggaagatgcagaactggatgactactcattctcatgctatagccagttggaagtgaatggatcgcagcactcactgacctgtgcttttgaggacccagatgtcaacaccaccaatctggaatttgaaatatgtggggccctcgtggaggtaaagtgcctgaatttcaggaaactacaagagatatatttcatcgagacaaagaaattcttactgattggaaagagcaatatatgtgtgaaggttggagaaaagagtctaacctgcaaaaaaatagacctaaccactatagttaaacctgaggctccttttgacctgagtgtcatctatcgggaaggagccaatgactttgtggtgacatttaatacatcacacttgcaaaagaagtatgtaaaagttttaatgcacgatgtagcttaccgccaggaaaaggatgaaaacaaatggacggcatgtgaatttatccagcacaaagctgacactcctgcagagaaagctccaaccggcagcaatgtatgagattcaaagttcgatccatccctgatcactattttaaaggcttctggagtgaatggagtccaagttattacttcagaactccagagatcaataatagctcaggggagatggatcctatcttactaatcatcagcattttgagtttttcctctgtcgctctgttggtcatcttgggcctgtgtgttttgcgacccg

SEQ ID NO: 608249 - DNA, 479 bp, Homo sapiens
ccatacatctactaagagtaaagccattcctggatccagtcttctgactccaaacctttctactaggatgtggcacctttcttggtgatagtacagtgtgatttgagagtacagtgggctagcttctctgaagcttttaggagcctgcttactttcctggatctggaagtacaaatggtttctttctatagaatgatttgctccctgaccctatccccccttcaaaaataaaattcacttctcttccagatgccagagtatatatgcatatttgaacagtcacctggatctgattaagaaggctcagcctgtgggtttccttactgttgatttacatgtttggccagatttccatggcaaccggtctcccttagcagatctgacactaaagggcatggtaagtaacagctagtccttgcacatgggtgaaggcaggccaaagggctacaaagtttggaagaagcaaagtgaggaaaaag

SEQ ID NO: 608250 - DNA, 410 bp, Homo sapiens
tcactcacaaggccacaccccactgcaagagaggctggagaatgcggactggatttaaacccaagaagaagaaatggttttctgaatagttggccatttactgacacaaaaagggtcaaagtgacttgcagaggagatgaattttaaatactataattatttccttggctgccctttagacagaatttatttctttttcttttccagttaaacctgaggctccttttgacctgagtgtcatctatcgggaaggagccaatgactttgtggtgacatttaatacatcacacttgcaaaagaagtatgtaaaagttttaatgcacgatgtagcttaccgccaggaaaaggatgaaaacaaatggacggtatgtagttcaactacattaataaaataaaaacttatgaatgct

SEQ ID NO: 608251 - DNA, 1521 bp, Homo sapiens
  misc_feature (372)..(372): n is a, c, g, or t
  misc_feature (863)..(863): n is a, c, g, or t
  misc_feature (1509)..(1509): n is a, c, g, or t
tgtgagtccggtgggtcctgggcccacgtaaccggcccggagccgtggactgccctacagacgtgagcaatgggacccaaggggtgtcgagcgcggcgctaaggcctcctagtgaccgcctgcccagcctcacgcattccgtacggcatacatagtagagcatttctgcagtgacggtccggcgcttcctgcgtagcttcgccgctttcctcgatgccactggaggctgggtgagtacgagtgtgagacaggttcggtgcctgcagcgacagtagtccccaaacgccgggggttttcagacactcggagagaacgcccttgcctgggctgctggatgtgcatcacggaccgtttgacctggtaatcccctangcgacgttttgtggtagtgccctgcgtggatggcagtgcgtgttggctggaggtcgcgagcggagacagtgcactcatagcgaagcttgctgtgcgcaaggtgtcacgcatacccgcgatcctgtagggctttcaaatccaactttcgtttagcaacacccacgcggagtatgtctccccgtcctgttgaacacacatcttaacgggaagagagatgtatgaaacccacgagtgtgtttgtcgtgtggtagcggcaaacaccatctgcccactattggtttgggtctcaaccccaggcgaggatcatcgtaccgtgtgaggagaagcccctgtttaattacgagatatagacgccgccaagaaaaccacttgcgggatcatgcgtgatacacttcctctcagaggggaaaaagcggcgccagcggaaccacacatgtcgttctttcccgcaaagtgtgtttccaagatcccccggcgaattgagaatatgngcggagcacaggccacggacaccaggtggactcaattcctaccccccagtaggaggcgtctctgttaacaccgaggcagtttatgttgtttccgcttccccccgtctcttttgttttgtgtctccccccaggatttgggaccactaaaatactagtacaccacccagggggacatatccatattacaggcggcgcgcagttaactcggggggcggtccaacataactaaggaggtggaagggtcctcctaccagcgggccatagtggtttcaagggcatctgtaataatccaaacggagcaatttatgtttggaggaaagaaggtgcactgtaagtagaggaagtaacgttagagaagagaagggttcttccagttcagccagtttgagcgagcagcaccccttttttgggggccaccaaccaccacctactttttgcgaagaaacaataaaaaaccaccgccacgcaagagagttttacttactactactcgctgtgggcgaagcaaaaaacttcttatctacccagaaagtaaaagaaatcacagagccagtacggttacttatcgcaccacctaggagcgagaacaaacacttgttgttggttgtgacgagcacccactagtgtataccactcagttgagttntacaaacacccc

SEQ ID NO: 608252 - DNA, 862 bp, Homo sapiens
tgatagaccacatggtacaaggccatgctgcttttccagaactacaagtaaaggccacagccagatgccagagtatatatgcatatttgaacagtcacctggatctgattaagaaggctcagcctgtgggtttccttactgttgatttacatgtttggccagatttccatggcaaccggtctcccttagcagatctgacactaaagggcatggtcaccggattgaaactgtctcaggaccttgatgatcttgccattctctacctggccacagttcaagccattgctttggggactcgcttcattatagaagccatggaggcagcagggcactcaatcagtactcttttcctatgtggaggcctcagcaagaatcccctttttgtgcaaatgcatgcggacattactggcatgcctgtggtcctgtcgcaagaggtggagtccgttcttgtgggtgctgctgttctgggtgcctgtgcctcaggggatttcgcttctgtacagagtgatccaagaacaggacctgttactttccatccattgtcatttcatagaccccttgaagcaacccagtggttggtagcagcaatccttgtgcagatgaggactctgaagctcagaaatgttgtataacttgtttaatacaaagcccacgctctttgtattccatcagaccatatcctgtagatacatatacattgctagggaagtacactatggcaactgagacacccctcacaaggtggtatcgtttataagaaatagcattatgtatttgtcatcattgcttggttgagtgtccaacacagaaataaaaataaacgggtggcctcgttggcctcagcggtggagctctgcggccg

SEQ ID NO: 608253 - DNA, 672 bp, Homo sapiens
  misc_feature (89)..(89): n is a, c, g, or t
ggtcttcctccctccctcccttcctcttactctcattcatttcatacacactggctcacacatctactctctctctctatctctctcanaatgacaattctaggtacaacttttggcatggttttttctttacttcaagtcgtttctggagaaagtggctatgctcaaaatggagacttggaagatgcagaactggatgactactcattctcatgctatagccagttggaagtgaatggatcgcagcactcactgacctgtgcttttgaggacccagatgtcaacaccaccaatctggaatttgaaatatgtggggccctcgtggaggtaaagtgcctgaatttcaggaaactacaagagatatatttcatcgagacaaagaaattcttactgattggaaagagcaatatatgtgtgaaggttggagaaaagagtctaacctgcaaaaaaatagacctaaccactatagttaaacctgaggctccttttgacctgagtgtcatctatcgggaaggagccaatgactttgtggtgacatttaatacatcacacttgcaaaagaagtatgtaaaagttttaatgcacgatgtagcttaccgccaggaaaaggatgaaaacaaatggacggtatgtagttcaactacattaataaaataaaaacttatgaatgct

SEQ ID NO: 608254 - DNA, 850 bp, Homo sapiens
gtgtcagcctacatcgcatctcgggtgaattaaagagacttttgtgctcacactatagccttgtacaattgtctcttcctttaagtgtgctccgcataaattggttggcgacaagcccgcgatagggggagctcctctgagcaggagctctcctactatgctctaggttacccatcgtcttgcaacatgtacagtagacttcgcatagctgctcatggatctcagaccgagttccggagcaactccgagcgtctgtctatggatatggtgtcactaatagggaaagagacttgcccggcgacagcgcattttcagaaccttacagtatgcttgccttcccgccatagtcacaaaacccccgagttgcaactgtcctaccttgcaagacacttcaaggggcactcttaagcgccaaacattccaagagccccttctgtgaacctttggctttcacagccgaatgaaaaaccctgggccatctggggcccaagggcaattgccattgagccctgggggattttccctcctaaagggccctttggcccacagctttggtagcgggggccccctccactggggacaggctccttgactgggcccgaacattctttcaattcaggccaacttccggggagagcttccatggggagctcctcaaaagaccccaaaaaaggatcccccagacgagacttcgtttccccaaggatttctcccctcggcaatttgggtcggcgtcttgaaagaacctggaccatcttcgccccagaaagacgatcttcgggaaggacccccctttagagaacatatccggcgatattcgccacagcccgttcaggggaggaaaaccctc

SEQ ID NO: 608255 - DNA, 807 bp, Homo sapiens
  misc_feature (88)..(88): n is a, c, g, or t
  misc_feature (117)..(117): n is a, c, g, or t
atgatgctggcctcataaaatgcgttagggaggattccgtcttttctattgattggaatagtttcagaaggaatggcaccagctcctnctttggtaccctctggtagaatttggctntgtgaattccggtcgttggtcctggactttttatggttaggtcaccggattgaaactgtctcaggaccttgatgatcttgccattctctacctggccacagttcaagccattgctttggggactcgcttcattatagaagccatggaggcagcagggcactcaatcagtactcttttcctatgtggaggcctcagcaagaatcccctttttgtgcaaatgcatgcggacattactggcatgcctgtggtcctgtcgcaagaggtggagtccgttcttgtgggtgctgctgttctgggtgcctgtgcctcaggggatttcgcttctgtacagagtgatccaagaacaggacctgttactttccatccattgtcatttcatagaccccttgaagcaacccagtggttggtagcagcaatccttgtgcagatgaggactctgaagctcagaaatgttgtataacttgtttaatacaaagcccacgctctttgtattccatcagaccatatcctgtagatacatatacattgctagggaagtacactatggcaactgagacacccctcacaaggtggtatcgtttataagaaatagcattatgtatttgtcatcattgcttggttgagtgtccaacacagaaataaaaataaacgggtggcctcgttggcctcagcggtggagctctgcggccg

SEQ ID NO: 608256 - DNA, 702 bp, Homo sapiens
taagccggtctgaaaagcgcaatattcgggtgggagtgacccgattttccaggtcaccggattgaaactgtctcaggaccttgatgatcttgccattctctacctggccacagttcaagccattgctttggggactcgcttcattatagaagccatggaggcagcagggcactcaatcagtactcttttcctatgtggaggcctcagcaagaatcccctttttgtgcaaatgcatgcggacattactggcatgcctgtggtcctgtcgcaagaggtggagtccgttcttgtgggtgctgctgttctgggtgcctgtgcctcaggggatttcgcttctgtacagagtgatccaagaacaggacctgttactttccatccattgtcatttcatagaccccttgaagcaacccagtggttggtagcagcaatccttgtgcagatgaggactctgaagctcagaaatgttgtataacttgtttaatacaaagcccacgctctttgtattccatcagaccatatcctgtagatacatatacattgctagggaagtacactatggcaactgagacacccctcacaaggtggtatcgtttataagaaatagcattatgtatttgtcatcattgcttggttgagtgtccaacacagaaataaaaataaacgggtggcctcgttggcctcagcggtggagctctgcggccg

SEQ ID NO: 608257 - DNA, 372 bp, Homo sapiens
ctgtaactcactgcttcaaaaggtgcggttgtgcctgtagtgatttctgggtgaagaagagcaagcgaagtagaaatacgcgtcgcttagcaaagagacgcggaggatgtggtcctgcgaattaaaaagccatcaacgaagattcgctttaatttgcaggacatttcctagagactctctaccctattgcgccataccgtttgggtcactagcctcctgacttcgctgctcatcagcgatcgggtttagcgatccgggtttcaggcgtgacactgcccccaacagtatcagctggctctcgtcagcttttagcgttttatggcggctgtgtgcgggagactttcgagtctacccgggatgcgctctggcccg

SEQ ID NO: 608258 - DNA, 846 bp, Homo sapiens
tgatagaccacatggtacaaggccatgctgcttttccagaactacaagtaaaggccacagccagatgccagagtatatatgcatatttgaacagtcacctggatctgattaagaaggctcagcctgtgggtttccttactgttgatttacatgtttggccagatttccatggcaccatctgacactaaagggcatggtcaccggattgaaactgtctcaggaccttgatgatcttgccattctctacctggccacagttcaagccattgctttggggactcgcttcattatagaagccatggaggcagcagggcactcaatcagtactcttttcctatgtggaggcctcagcaagaatcccctttttgtgcaaatgcatgcggacattactggcatgcctgtggtcctgtcgcaagaggtggagtccgttcttgtgggtgctgctgttctgggtgcctgtgcctcaggggatttcgcttctgtacagagtgatccaagaacaggacctgttactttccatccattgtcatttcatagaccccttgaagcaacccagtggttggtagcagcaatccttgtgcagatgaggactctgaagctcagaaatgttgtataacttgtttaatacaaagcccacgctctttgtattccatcagaccatatcctgtagatacatatacattgctagggaagtacactatggcaactgagacacccctcacaaggtggtatcgtttataagaaatagcattatgtatttgtcatcattgcttggttgagtgtccaacacagaaataaaaataaacgggtggcctcgttggcctcagcggtggagctctgcggccg

SEQ ID NO: 608259 - DNA, 816 bp, Homo sapiens
tgatagaccacatggtacaaggccatgctgcttttccagaactacaagtaaaggccacagccagatgccagagtatatatgcatatttgaacagtcacctggatctgattaagaaggctcagcctgtgggtttccttactgttgatttacatgtttggccagatttccatggcaaccggtctcccttagcagatctgacactaaagggcatggtcaccggattgaaactgtctcaggaccttgatgatcttgccattctctacctggccacagttcaagccattgctttggggactcgcttcattatagaagccatggaggcagcagggcactcaatcagtactcttttcctatgtggaggcctcagcaagaatcccctttttgtgcaaatgcatgcggacattactggaagcaaggcaaaaatgagcaaagttgggaaagttgtgttccccgagactacagggatacaacgctactatgataatgaaataccaaagtaattcttgaaaggctggttgaaccaccagaaaggagttattgggggaatcatgaatgattgactgtaacaggggcttgcagggtgctgatgccagaaagctttctgtgccatggattaaggacttctgtccattgtgtccaggttcaagaccctgtgggtttggttcatacatttgtatggtttcataagaaaacagactgtgttacaaaaaacaaaaaagaaatgtgcggggcggccggaaattaaacactgtgggcggccagataatggagtcacaacacgagggtggtcacaaaaaggcggggaacagtgtgtac

SEQ ID NO: 608260 - DNA, 189 bp, Homo sapiens
tggtagagactaggtctcactatgttgcccatgctggtctcgaactgctgcacttaagtgatcctccaccatgagtctcctaaagtgctgggattacaattaccatgcccagcccttagaatattttaaagcagtctactggcctggagaataagccacatccgctgtcttaaaagaaatactgtatct

SEQ ID NO: 608261 - DNA, 106 bp, Homo sapiens
cacgcccattccacaacctacagatgtcctttgtccttttggctccttctttgccttccaccatgattctgagcgcctctccagccattgtggacatggagcgtga

SEQ ID NO: 608262 - DNA, 373 bp, Homo sapiens
agcagagcagctaaaaactctggtctccagagcactcgtctcctttggaggggttattaggttgggagaaatgtagatacttatgtattgtgtgtgtgtgtgtgtgtgtgtgtgtgtgtgtgtgtgtgtgtttaaatatctgtgacccaggctattactcctgctagagcaagagggagagctaagtgaaatccgactcattatctctgggtttctcataaatattccccccatatattctagaagcaagggatatgtaatagataaacaagaagaaatgtgcattaaaacccttaggggggccgagtgcagtggctcacgcgtgttaccccagtactgggggagcctgggcgagagaacaagactctgtctc

SEQ ID NO: 608263 - DNA, 368 bp, Homo sapiens
tacacaatcacgtgtagacatattgtatgcatacattcatatacatgcatccatatatatacacctctttacacattcgtatacatacgttcacacacacgtccatacatgtctacatacagacacatccatgtatacacacattcatacatctgtatgcacccacatgtctgtgtacatacacgtctgtatacacacacccctgtatacacacacatccatgtacagatacatctgtacacacatccacacacattcatacacacacatccgcacacacatctgtggggatcggggacagagagcattaagtagtggcagtgtggtaatagtgagtcttgttttggcgtcttttgtgtaaactgatt

SEQ ID NO: 608264 - DNA, 255 bp, Homo sapiens
  misc_feature (37)..(38): n is a, c, g, or t
  misc_feature (40)..(40): n is a, c, g, or t
  misc_feature (128)..(128): n is a, c, g, or t
  misc_feature (162)..(162): n is a, c, g, or t
agagcaggggctcagggagccagagcctagagccacnncncttccctgggattggcacccacctcctcagaaccatccaagccccaggtcaggggtggcagcagggaacacgagtgttttccatctgncatcacccgtctccctctttttgcctgcggtggnctcatggtcccattgttccttggagcccaccaggaaatgcttgggccaacttaaaagggaaagtgccaaaggaaaccacctaaatagcaaacc

SEQ ID NO: 608265 - DNA, 179 bp, Homo sapiens
ttaaggcatggtatgatgccgatgggtcggtaatgtgagtggatagtggattggcatcccttgctgaggatctgtgacggtgctgcgggcgacaggaagccccgtagcccaggacctcaagcgtgggcacaagggtctcggccagtagtgcactcggtgctcatgggactcctcaggga

SEQ ID NO: 608266 - DNA, 263 bp, Homo sapiens
ctcggtacccatccttccctctttcacgcaccacacatagacacaaacacaccacacacacacaccaacacaccacacacacccccgacacacactatacccacacaggacacacacacctcacacatcgcacacacataccacacacactacatacacatgcacgcacatgcacacacaccacataccacacaccacacacactacacatcacacacaccacacacaccacacacatcacaccaccgtgaagagggaaggat

SEQ ID NO: 608267 - DNA, 636 bp, Homo sapiens
tcccatctactcgggaggctgaggcgacgagaatggcgtgaacgctgggaggcagagcttgcagtgagccgagatggtgtcactgcactccagcctgtgagacatgagcgagactccgtttcaaagaaagagaaacgaccccacctctacaaaaaaatttaaaacattagccaggtgtggtggtgcacacctatagtcccagctacttgagaggctaaagtggcatgatcacctgagcctagggaggtggaggctgcagtggagccatgatggcgccagtgcgactctagcctgggcaagagagtgagacctcatctcaaaagaagagatagattaattacttagagaactgcgcagcgcaagagttcttaacctgtcaatccggagaagcccttgacagaatctatagataggcttcaggggattgaactaaaatggtgtgtacaacatggtgtttcgggtatcttccttggaaaaatcctgagtatgactttattgaattctcaaaggagcgaaagacccaaaagagtgtacgaactatcaccgatttggcaggaatagttggcacatgcctgtaatcccagtgacttggggagcccagcgagaaggatcactagaagtcagcgtcaagacgag

SEQ ID NO: 608268 - DNA, 953 bp, Homo sapiens
ggccgggcgcggtggctcacgcctgtaatcccagctctcagggaggctaagaggcgggaggatagcttgagcccaggagttcgagacctgcctgggcaatatagcgaaccccgttctccagaaaaagaaaaaaaaaaaaaacaaagacacaaacaaaaaatatagcgcgttatttccgggaaccccttaaaaaacccccttcttaattaattaaattaaccgtgaatttcttaacccttcaaatatcctgggcaagagcccagcgcccaattttatccggtgtgaaaccattttcaggaaaaaaatttctaactttctttaaataattaaaatctccttaaaaatatctcctttaattataactttcacggggccacaggaacttaactcatattttaattttcttctcttctcggaaaccaaatttatccccaacctttggggttatcatcacccggagggggcacccagccagaagagcttgaaggcagggcacattatttccttatttttatacccttagttaggctcctttccccttaatcaattggcactggttttaaacacttcacaaaacccctaggtctcattaaaacattctattagtcactccctcagtggcccaagactattaaattctgtgaggccaccaccttattatggcctaggtccaccacatgccttttattggaaaggatacctttaacggaccagttatgaatccttaaggccatggtgaggccccatcgtgggtaatagacactgcgggagactttcacaagggcgtggagataaaggccaacgtattaaaccggaaaaaatggaccctcttgtgatccataagggagattaaggcgccgcgtgcaagccaagcgtggtgcttcaagcgggggactacacccgcaggggggtacgacagaatctacaaacacacagcccccgcacggcagtag

SEQ ID NO: 608269 - DNA, 345 bp, Homo sapiens
  misc_feature (333)..(333): n is a, c, g, or t
  misc_feature (342)..(342): n is a, c, g, or t
aacaactgtttatatgcattcttaaggcttgaattaacaagtctcatcacatcatccacattgtttagtggctaagataatggactgtggcatctgtctgatgtgagtctgaatgccaactttgccatttactttgtgaccttgagaaaagtatttaacacataaagattatatgaggattcagtgagataacatgccatgtgtggccattctgttaatacttattgctgctattaccgttagtttattgggatgttgctgacaatactggaaatctgttgacaggcaaaccctcctgctacaaacatcaggcactctcctgcccccggagcngccgggggnggg

SEQ ID NO: 608270 - DNA, 930 bp, Homo sapiens
tttcagtggtgtactgcattccggggtgcccaggtttcggcccaccaagtggtgtgtgcccgcccgagccgcttggtgtggctccgcccgctgtgacccagaaagttccccgcgggccaggcctaatgcggccgcgttgatcatggcccccgttttgctgtggcgcccggggcgattctgattcgcacacggcgtgttctctcaacagccgggttcacgggcgacatagtcacaaccgttgtcgacgcgccgctttttccaatctgcgagtgacgtctgtccgccgcgcatatacgcgggtgctcctctgacaagaggttctttctcaccccgcaaacacgtcatatgatgaccgagcccccaccaaggcgtgtatcccccgcagccaaccttcgcggagtggcgaacccagggaaagggataggggaacgacttctccaaaattttggccatcgccaccctatatccctgcctggggcattggcggaataaatttaaaatcccccccaccaaggggctccgggctgtattaggagcaaagatcataagaagacacgactcaccaccaatcagttttgggggtccactcctcttccactccgtatataggcttcgtggcaaccccccgagtctgagaacttccccccactttcaaaaaccatgaggggctcttgctcggcgtactacaaccgaatgtgatattgcgaacacccccccgattcgcctagagttttgctggggcaccaactgaggagcacccaccccgtttggaccttccgcggttaatagcacccgccccctccttgtcggggccgccgacacaacctctcggcatactcccggcggggtgtggagcccccaccacacataactggtgctgtccccctctaacaaaaccccgaagcggggggattctttcaaaacaaaaca

SEQ ID NO: 608271 - DNA, 217 bp, Homo sapiens
gaaaggggcagaacagaaaaaagagacgaccaaactcatagcatcatgcaaagtaaacagcataacagaagtaaaataagaaggcaacgctagaaggaaagtacagagcatataggcggcgcacgccacattacgattcgcctgctagcttctcctgtacagtcgtttctttggaaggcagtggattattctcttgcatctcgtctcttctcttgta

SEQ ID NO: 608272 - DNA, 152 bp, Homo sapiens
gtcattttaccgacataaaacatggagccaaaaaaaacaataatgggactaataaaaactcctagggtttcctgtcagatttaattttacccagtggcaaaaaattttttcaattggggctttaaaaaaataattaaaaaaacatgtatata

SEQ ID NO: 608273 - DNA, 607 bp, Homo sapiens
atagataacgggctatgctgaaattaccattggatgactgtcctctatggcagtgatctcatggctcacttgcaggagatgctaaacacggtcaccaaccagcccgctcaatgcacaaaaactagaatctgaagactatgtgtcccaagctttgcttgaggctgtccgcgaggacaagcctcatgtcaaaccctatttctctaagaccattcgcgatttaaaaggagtggacggaagtgctgctagatttgactgctagattgaaggatacccagaccccgaggctgactggctcagagatgaccagccaatcaaggagttccgccacttacacatatactacgatgaggaccggaactgctctttaattattagagatgaccgcggcgatgacgatcccaagtacacctgcaaggctggaaacagtctaggagaagccactctgcacagcatagctcattgtggaaacgatggaagaacgtgaatgtgaaggggaagaggaagaagagtgaatcgcctccatagaacagcagtttctaagtcatattaaaatgactatttctctaaaactcaaaataaaacaaaaaaacggcctcgctggcctcaa

SEQ ID NO: 608274 - DNA, 198 bp, Homo sapiens
aacctggcacccactaatctactgtcttggtagactgctactcgggacatttcatataaacagaattacacagtatgtggcctgtggtgtctgatttctttcgttcagtgtaatgtttccaagactcatccatgtagcatatatcagtaccctgttcctttttatggccaaataatatttcagtgttggggataacat

SEQ ID NO: 608275 - DNA, 485 bp, Homo sapiens
  misc_feature (429)..(429): n is a, c, g, or t
tattagaaaagtaaggctccacagtagcctgatacatagaaaacctggtatagcagaagcagtttctggtgggcactgctgctctgactacaaacagagctcctgagatgttagagaaaaggaagtttacttttcttattttcagtgtaactgtatcctctagcagaatcagagtaagtcaagaatacttgggaagtacagattttgaccccaaggatggatggatatataaaacatttctaacaaagaagaagggagctaagagatgacagatattaatacttgtttctattttagcttaccaaaggtttgttcatttaatcaaatcacacaatacaaggcatatagaaataactttaattaaaaaaactatgtagaaggttataatatcagtcatgacaaagatttgaatttatttgctgggacaancttgtatttttctggcttttgttctttttctttaaaaataaatgtacagtaaaact

SEQ ID NO: 608276 - DNA, 1102 bp, Homo sapiens
ttgcctagtgtggcggctctcgtgggtcgcttggttcagatgctctgtcctccgttctcggggtgcggcttctcctggccgtattttgtatcatctctagtcgtatgtgtcctttgccttgcctctgctattgcgtgtgggcgttcagtctgcttatctgcttcagtgtgagttttcccccaatggtggctggttctccctgtgcagtcttcggctccgaatcctgtgtttggagttgcgtatattagtcttattgtagttaccttggagatacttctatgatgtttgtctctgggagggtctgtaatgccttatctttactgagatatggtgtccattgccattgaagtcaaatggtattctcaggcctctcagaagtagaactgaaatgatactcagcctgtgacgtgcaaactgcgatatctgatatcgaccgtgtgtgcattcacgcgagctatctctagatgtgaggagtgtgcccgacagttgtttgctttttgtgaaagtgtggttttgcgccctatcctcttctccatcagtagtttccttaattctgagacagtgaacgcatcgcacttagctaatcagcgtataaatccttgagtcatgtaagcagccgccctgtgcatatgatgtggatcaaacacggttctgtttatttcattgtgtttgccatgttacgtatgcgctcaagccctaggttgtgcatttgtggccgcagacgatggggccagtgctcacttcgctaccgctcaggagctgaaacttgcttcagcctgaaaagggttgggatgcagttgttcagtataaagggcattatttgctattcattgttactttccgtgcaaaagttttcgttcaaagcaacgaagtcactaggagcagcagcagaagcaaccgcaaaggctgtgttccctggagaaagcgtcatttcgttatcctaaagtatggaaaacacaagttcacaaagctggaaggtagcttatttatctatctaccgtggggagcatgtaacagagctctgtgtatacacagcttcacacccacctagattgttactaacagtgggttgggttttatacattacgtaattttgagagaa

SEQ ID NO: 608277 - DNA, 245 bp, Homo sapiens
aacatctaaaatacactgcgtacacgtgtgcgtgcacaacaacacacacacacacacacacacagctcttcatttatcctgcgccatgcagatttactctcattgtggaatctgtccccttcacacactgtatatgcacagagcacaagagaggctatctctagtcacttcaccagcgaggcttagactccgtattagaggccaccgtttcatacacagtgttgctaagccctcactattctgtt

SEQ ID NO: 608278 - DNA, 216 bp, Homo sapiens
taggaagtgcactgataatgtatttcttattacagtgtactatgggggtgggagatatgcgaaagaaatgtgtatttttgctagattgcctaccttctagagatagataagcacaatacttgcattggatccaataaccccagttaggtcatcatagattagtatttaagtttgctggtacattgtgtgtgttgtgtgctaagataaaagatccat

SEQ ID NO: 608279 - DNA, 595 bp, Homo sapiens
aggtgtaactccacagcgacaagttgtacagactccaaacacagttctctctactccattcaggactccttctaatggagctgaagggctgactccccggagtggaacaactcccaaaccagttattaactctactccgggtagaactcctcttcgagacaagttaaacattaatcccgaggatggaatggcagactatagtgatccctcttacgtgaagcagatggaaagagaatcccgagaacatctccgtttagggttggtgggccttcctgcccctaagaactgatttcggaaactggttctaccagaaaatggccgagaaggacgctgggaagaacgtgaacctagatgactacttacattttggcaacgatggctggcttgatggtggaatgctcgaaaagcaggccatacgagatgcagagcgtgtaccaggcacaatggaaacggaatgccataaagctggtccagaaaagatctgccaaggacccatcagaagtaaatggaaacctattctaaagaccctgtaaatgttagaaccggcctttaacagattttacagcaaaagtggaagaacttaatcacaaaaaga

SEQ ID NO: 608280 - DNA, 551 bp, Homo sapiens
caggctctctaccttgtgacatcatttctgggatgctgaggacagacacagggctggaggggggtgggccctgttgatggcaggaccctccctgggactaccccatgtccccacagggtgaacgtgggctgcgggccagccgaggagcgggtgctgctgaccggcctccatgctgtcgccgacatccactgcgagaacggcaagaccagttggggctggaaatatgtgagtcacccacctctgaccccaggctagccttggacctgaccttccaacacctcctccggacaagcggtcaccctatagcctttcagatggcataggccgagctcacacaagtcagcatccctgaccacattctctttatctggcacctggcggggggtgtagaacttttctctaaacccatcccttctctcccaggcgctgggatccccataagagagttaggatataatcagagtcaccatttagggaaggtttatgtgccttgcagggtggtgtgccgggggtctattatctcattcaatcattgcagggatcctctaggt

SEQ ID NO: 608281 - DNA, 393 bp, Homo sapiens
atcagattattaagggaataagccatgacgtcactagcagcccacggcatcacttcaagagtagagtggcttggtgaagatcttttaaaaaggcagtaggcccggtgtggtggctcacgcctattatcccagtcactttgggaggttgaagtgggtggatcaccagaggtcaggaggttcgagaccagcccagccaacatggcagaaccccatctttactaaagaatccacaatgacgcctaggcatggtggcacacgccgtgtatcccagctacacctgaggctgaggcaggataattgcttgaaccggggagacggaggttgcagtgagccgagtttgggccactgcactctagcctggcaacagagcaagactccgtctcaaaaaatggg

SEQ ID NO: 608282 - DNA, 222 bp, Homo sapiens
ctagttttcatgaaacctatacttgtcgggctgaaattttaacatgctaaatgttttaactagtcttaaagcaagtacgattgctgcttcaaaaacttttctttattcattaatcatttaatgtgtacccaaccccttcaaacacatccgtggtttataatgttacctgttttaaaatgattctaaaagggcttcctgttaaataaaataaaatccccctca

SEQ ID NO: 608283 - DNA, 183 bp, Homo sapiens
tctggctgtgctccccagtgacccccacgtgaggccgggtgtgactgcagctgcgtctactttttgtagttgccaaacgtggatggtcaggcggtcatgtgccgcattcggaaagtgggctggctgcaccgtccacagtagggcacgggagttgtcgaatgcggctgatgccgttgtagtagg

SEQ ID NO: 608284 - DNA, 155 bp, Homo sapiens
acactattattgtaaaagctgcattttacttctacggaactgggctgtcgtaaataactgaagtcattcaacaactactgactccctattaattgcaaggcaactatacatgctgatgtttgaagtccaaagaagcacagggaggttattggcat

SEQ ID NO: 608285 - DNA, 210 bp, Homo sapiens
cacgcctccaggtctgaagtgctgctgcagcacgggttctcatgctgtcacttctgtatgtgagcgaagtttcacgatagcttcatcttgccacctgctctggagttgccatgattttttcagtaaagggcatctcctttatcatcagcaagggtaaaagacagctggagcctggaggagtccctgaattttctggtcatccaactcttc

SEQ ID NO: 608286 - DNA, 1497 bp, Homo sapiens
tagtcatggctgcgtagctgttcatccagtgtaatcagacgcagagtatgatcatagtccttcctggtcctgtctggatggtgtgaggatggaggagattgtggagggctgcaccggagcactgcacatcctcgcccgggaccccatgaaccgcatggagatcttccggctcaacaccattcccctgtttgtgcagctcctgtactcgtcggtggagaacatccagcgcgtggctgccggggtgctgtgtgagctggcccaggacaaggaggcggccgacgccattgatgcagagggggcctcggccccactcatggagttgctgcactcccgcaacgagggcactgccacctacgctgctgccgtcctgttccgcatctccgaggacaagaacccagactaccggaagcgcgtgtccgtggagctcaccaactccctcttcaagcatgacccggctgcctgggaggctgcccagagcatgattcccatcaatgagccctatggagatgacttggatgccacctaccgccccatgtactccagcgatgtgccccttgacccgctggagatgcacatggacatggatggagactaccccatcgacacctacagcgacggcctcaggcccccgtaccccactgcagaccacatgctggcctaggcggcctggccccagtgcggttcctcatctgagaggctctccgtgcaggcgatggggcaagacagaaaagtgcctgagctggggaagccggggtgtaacttcctgctgcaccctgcgcctccagaggtcctccgtagggtctttcttgggatagtgttctgctcctgcttttctgtcctgggcatgggtccagggcctgacaccccctccccgcccctgtggccctggccactaaagcttcagactcaagtacccattctgttttcccccagcaacgcccctccaaacctccagcctccctgtctccagctgcctgggcccggaagggctttggttccttctctgggtctgattttctcactgaactccaccgaccaactgccctaagcccccagggcctccagggcccaggttcgagacccaaacccccaaaatccaaaacttctcttgaaaagttcagggaccgtccaggggagatggggaggagatatggagtgagtcacctgctccagaagatgccagcttctctctccagggtgcttagttggctttgcccacccctcactccccagggagctctggggacagcttcctcacacccctgtcccacccacacagctgccctagctgaccccgagaagtgctcttggctgacccctctggtgtgtggtgaggggctttctcttccccttcctgtttcagacccccccatttcccgcacatggtgtggggggctgggggaggtccaagcagagtgttttattattatcgctttatgtttttggttattggtttttttgtatagaccaaagcaaagaaaataaaaataacacaga

SEQ ID NO: 608287 - DNA, 1334 bp, Homo sapiens
cactttggcgaggcagtctccctgtttgtgcagctcctgtactcgtcggtggagaacatccagcgcgtggctgccggggtgctgtgtgagctggcccaggacaaggaggcggccgacgccattgatgcagagggggcctcggccccactcatggagttgctgcactcccgcaacgagggcactgccacctacgctgctgccgtcctgttccgcatctccgaggacaagaacccagactaccggaagcgcgtgtccgtggagctcaccaactccctcttcaagcatgacccggctgcctgggaggctgcccagagcatgattcccatcaatgagccctatggagatgacttggatgccacctaccgccccatgtactccagcgatgtgccccttgacccgctggagatgcacatggacatggatggagactaccccatcgacacctacagcgacggcctcaggcccccgtaccccactgcagaccacatgctggcctaggcggcctggccccagtgcggttcctcatctgagaggctctccgtgcaggcgatggggcaagacagaaaagtgcctgagctggggaagccggggtgtaacttcctgctgcaccctgcgcctccagaggtcctccgtagggtctttcttgggatagtgttctgctcctgcttttctgtcctgggcatgggtccagggcctgacaccccctccccgcccctgtggccctggccactaaagcttcagactcaagtacccattctgttttcccccagcaacgcccctccaaacctccagcctccctgtctccagctgcctgggcccggaagggctttggttccttctctgggtctgattttctcactgaactccaccgaccaactgccctaagcccccagggcctccagggcccaggttcgagacccaaacccccaaaatccaaaacttctcttgaaaagttcagggaccgtccaggggagatggggaggagatatggagtgagtcacctgctccagaagatgccagcttctctctccagggtgcttagttggctttgcccacccctcactccccagggagctctggggacagcttcctcacacccctgtcccacccacacagctgccctagctgaccccgagaagtgctcttggctgacccctctggtgtgtggtgaggggctttctcttccccttcctgtttcagacccccccatttcccgcacatggtgtggggggctgggggaggtccaagcagagtgttttattattatcgctttatgtttttggttattggtttttttgtatagaccaaagcaaagaaaataaaaataacacaga

SEQ ID NO: 608288 - DNA, 506 bp, Homo sapiens
ggtgctctaccggatctacagctactcaggaggcagccctctaggagtagcccagatttctggcttgggtggctgtgaggaaaggagtagccttttctttttttcttcttctttttttttggatggagttttcttgtggcccacactgaagtgcaatggtgtggtcttggctcactgcaatttctgcctcccgggttcaagcgatcctcctgcctcagcctcccaaggagctgggattacaggtgcctgccaccatgcccggctaatttttggtattttaagtagagacagggtttcaccatgttggccaggctggtctcaaactcctgacctcaggtgatccgcctgcctcggcctcctgagtagctgggattacaggagcccaccaccacgtctggctaatttttggtattttaagtagagatggggtttcactatgtgggcaggctggtctcaaactcctgacctcaggtgatccgccctcctcagcctcctgagtagctggg

SEQ ID NO: 608289 - DNA, 505 bp, Homo sapiens
gaaacaatatatgacgcattctcccttgaactctacacaatatatttgtcaaactgatgagcctacttctaacctcccttgtgtctgtatgtaattggatagcagacataccccgctcggattccgtcttagagattgaaactgcagtactatccttcacttagtgaacatagagacgttgccctagcgcgactgcacgccgtaggcatatgattatatatggatatggtcgtccgatagcccgatttgacaatctccaggcatggcccccgctcaatgactggcaacactaaacgatacaccccacataacaaagcaagacaagaaaagagacacacctgtctgtgtgggcgccgggcacgtcctgggccaagcaagcaaaagagtactccttgccagaggcagcccaaattggaatgtgtgcggctacgtgcctgagccccccccaggagggcacgcggccagcaggagtgccaagaaaaccaggggaccctcaaccgggaca

SEQ ID NO: 608290 - DNA, 3215 bp, Homo sapiens
aagctggtacggccggagatttaaggatcagagtcggagcagccgccgccgaccgcgccgagctcagttcgctgtccgcgccggctcccaccccggcccgaccccgacccggcccggtcaggccccatactcagtagccacgatggaggtgatgaacctgatggagcagcctatcaaggtgactgagtggcagcagacatacacctacgactcgggtatccactcgggcgccaacacctgcgtgccctccgtcagcagcaagggcatcatggaggaggatgaggcctgcgggcgccagtacacgctcaagaaaaccaccacttacacccagggggtgccccccagccaaggtgacctggagtaccagatgtccacaacagccagggccaaacgggtgcgggaggccatgtgccctggtgtgtcaggcgaggacagctcgcttctgctggccacccaggtggaggggcaggccaccaacctgcagcgactggccgagccgtcccagctgctcaagtcggccattgtgcatctcatcaactaccaggacgatgccgagctggccactcgcgccctgcccgagctcaccaaactgctcaacgacgaggacccggtggtggtgaccaaggcggccatgattgtgaaccagctgtcgaagaaggaggcgtcgcggcgggccctgatgggctcgccccagctggtggccgctgtcgtgcgtaccatgcagaataccagcgacctggacacagcccgctgcaccaccagcatcctgcacaacctctcccaccaccgggaggggctgctcgccatcttcaagtcgggtggcatccctgctctggtccgcatgctcagctcccctgtggagtcggtcctgttctatgccatcaccacgctgcacaacctgctcctgtaccaggagggcgccaagatggccgtgcgcctggccgacgggctgcaaaagatggtgcccctgctcaacaagaacaaccccaagttcctggccatcaccaccgactgcctgcagctcctggcctacggcaaccaggagagcaagctgatcatcctggccaatggtgggccccaggccctcgtgcagatcatgcgtaactacagttatgaaaagctgctctggaccaccagtcgtgtgctcaaggtgctatccgtgtgtcccagcaataagcctgccattgtggaggctggtgggatgcaggccctgggcaagcacctgaccagcaacagcccccgcctggtgcagaactgcctgtggaccctgcgcaacctctcagatgtggccaccaagcaggagggcctggagagtgtgctgaagattctggtgaatcagctgagtgtggatgacgtcaacgtcctcacctgtgccacgggcacactctccaacctgacatgcaacaacagcaagaacaagacgctggtgacacagaacagcggtgtggaggctctcatccatgccatcctgcgtgctggtgacaaggacgacatcacggagcctgccgtctgcgctctgcgccacctcactagccgccaccctgaggccgagatggcccagaactctgtgcgtctcaactatggcatcccagccatcgtgaagctgctcaaccagcccaaccagtggccactggtcaaggcaaccatcggcttgatcaggaatctggccctgtgcccagccaaccatgccccgctgcaggaggcagcggtcatcccccgcctcgtccaactgctggtgaaggcccaccaggatgcccagcgccacgtagctgcaggcacacagcagccctacacggatggtgtgaggatggaggagattgtggagggctgcaccggagcactgcacatcctcgcccgggaccccatgaaccgcatggagatcttccggctcaacaccattcccctgtttgtgcagctcctgtactcgtcggtggagaacatccagcgcgtggctgccggggtgctgtgtgagctggcccaggacaaggaggcggccgacgccattgatgcagagggggcctcggccccactcatggagttgctgcactcccgcaacgagggcactgccacctacgctgctgccgtcctgttccgcatctccgaggacaagaacccagactaccggaagcgcgtgtccgtggagctcaccaactccctcttcaagcatgacccggctgcctgggaggctgcccagagcatgattcccatcaatgagccctatggagatgacttggatgccacctaccgccccatgtactccagcgatgtgccccttgacccgctggagatgcacatggacatggatggagactaccccatcgacacctacagcgacggcctcaggcccccgtaccccactgcagaccacatgctggcctaggcggcctggccccagtgcggttcctcatctgagaggctctccgtgcaggcgatggggcaagacagaaaagtgcctgagctggggaagccggggtgtaacttcctgctgcaccctgcgcctccagaggtcctccgtagggtctttcttgggatagtgttctgctcctgcttttctgtcctgggcatgggtccagggcctgacaccccctccccgcccctgtggccctggccactaaagcttcagactcaagtacccattctgttttcccccagcaacgcccctccaaacctccagcctccctgtctccagctgcctgggcccggaagggctttggttccttctctgggtctgattttctcactgaactccaccgaccaactgccctaagcccccagggcctccagggcccaggttcgagacccaaacccccaaaatccaaaacttctcttgaaaagttcagggaccgtccaggggagatggggaggagatatggagtgagtcacctgctccagaagatgccagcttctctctccagggtgcttagttggctttgcccacccctcactccccagggagctctggggacagcttcctcacacccctgtcccacccacacagctgccctagctgaccccgagaagtgctcttggctgacccctctggtgtgtgaaaaaaaaaaaaaaaaaaaaatcctgtttcagacccccccatttcccgcacatggtgtggggggctgggggaggtccaagcagagtgttttattattatcgctttatgtttttggttattggtttttttgtatagaccaaagcaaagaaaataaaaataacacaga

SEQ ID NO: 608291 - DNA, 1166 bp, Homo sapiens
  misc_feature (525)..(525): n is a, c, g, or t
agcggaatcgtgagaaggaccggttccctccgtgctgcttcctccccgttgcagctgctgggtgtgcgtgtgcgagtgtgagtgcaagtgcgcgcgcgcacagggtgcggagtgtgtgtgagtgtgagcgtgtgtctgtgtgtgcgtgcgcgtgccgccctgcctctgcccgctccccgggcgcggacgccgcgggattctcatggggcgattgcaggcgatataccacaccacgccagatgcgatctggcgggcagcgcgtcgcgacagctggcgaagggagactcgctctatatcccgaatttcctcgtgaacgcacttggcggcggtcgcttgacgccgtaacttgcgtcagagaggggacgatggccgtatacgatggactgagtcgaagatccccagcgttacaggactgttgaaaaagcctcgaccctgggacgccaaccttggcacgcggaattagtaaccctggcagcgcacgaagatggtcatatccgtactagaaaccggtcgtattctcccctntaagacggcgaccaacgaaatcgcgcgatgatatacgcaatatcaatccaaacggtcgatctgaggacattagttagtagtagacaggcaccgaggcaacccaatcgtcttgtgacacgcggaagtccttcgtgaaaaaatccagcgcctgtggagccagtgattggcctgttttcacattcatggtcccgggctcgttgtcgtgggccaggcccagtgccgaatgtccgagaaaagcctggcagcgggaaccttcgccctgttccaactcaggcccccggctgtgaagagggaaaaacccttcctagttcaaagcggcgccctacccctagggaaacagtcgccctcccttttacaacacccacttggcacattccttaaccaaaaagatgggggctataaacacccacaataattttcccttttgtctccaataaaatatcgcgtaggcctatgtggccattaccaaccttgtggggggcccacattagagggcaaaggccatggcacaacaataggggcccattcccaaggaaagatcccatgggtttccgcccaaaaaaaggtccgacattaacggtagagatacacatggggctcccaagcgaacattcttggagggggtcacatcccctttataa

SEQ ID NO: 608292 - DNA, 3112 bp, Homo sapiens
  misc_feature (2673)..(2673): n is a, c, g, or t
aagctggtacggccggagatttaaggatcagagtcggagcagccgccgccgaccgcgccgagctcagttcgctgtccgcgccggctcccaccccggcccgaccccgacccggcccggtcaggccccatactcagtagccacgatggaggtgatgaacctgatggagcagcctatcaaggtgactgagtggcagcagacatacacctacgactcgggtatccactcgggcgccaacacctgcgtgccctccgtcagcagcaagggcatcatggaggaggatgaggcctgcgggcgccagtacacgctcaagaaaaccaccacttacacccagggggtgccccccagccaaggtgacctggagtaccagatgtccacaacagccagggccaaacgggtgcgggaggccatgtgccctggtgtgtcaggcgaggacagctcgcttctgctggccacccaggtggaggggcaggccaccaacctgcagcgactggccgagccgtcccagctgctcaagtcggccattgtgcatctcatcaactaccaggacgatgccgagctggccactcgcgccctgcccgagctcaccaaactgctcaacgacgaggacccggtggtggtgaccaaggcggccatgattgtgaaccagctgtcgaagaaggaggcgtcgcggcgggccctgatgggctcgccccagctggtggccgctgtcgtgcgtaccatgcagaataccagcgacctggacacagcccgctgcaccaccagcatcctgcacaacctctcccaccaccgggaggggctgctcgccatcttcaagtcgggtggcatccctgctctggtccgcatgctcagctcccctgtggagtcggtcctgttctatgccatcaccacgctgcacaacctgctcctgtaccaggagggcgccaagatggccgtgcgcctggccgacgggctgcaaaagatggtgcccctgctcaacaagaacaaccccaagttcctggccatcaccaccgactgcctgcagctcctggcctacggcaaccaggagagcaagctgatcatcctggccaatggtgggccccaggccctcgtgcagatcatgcgtaactacagttatgaaaagctgctctggaccaccagtcgtgtgctcaaggtgctatccgtgtgtcccagcaataagcctgccattgtggaggctggtgggatgcaggccctgggcaagcacctgaccagcaacagcccccgcctggtgcagaactgcctgtggaccctgcgcaacctctcagatgtggccaccaagcaggagggcctggagagtgtgctgaagattctggtgaatcagctgagtgtggatgacgtcaacgtcctcacctgtgccacgggcacactctccaacctgacatgcaacaacagcaagaacaagacgctggtgacacagaacagcggtgtggaggctctcatccatgccatcctgcgtgctggtgacaaggacgacatcacggagcctgccgtctgcgctctgcgccacctcactagccgccaccctgaggccgagatggcccagaactctgtgcgtctcaactatggcatcccagccatcgtgaagctgctcaaccagcccaaccagtggccactggtcaaggcaaccatcggcttgatcaggaatctggccctgtgcccagccaaccatgccccgctgcaggaggcagcggtcatcccccgcctcgtccaactgctggtgaaggcccaccaggatgcccagcgccacgtagctgcaggcacacagcagccctacacggatggtgtgaggatggaggagattgtggagggctgcaccggagcactgcacatcctcgcccgggaccccatgaaccgcatggagatcttccggctcaacaccattcccctgtttgtgcagctcctgtactcgtcggtggagaacatccagcgcgtggctgccggggtgctgtgtgagctggcccaggacaaggaggcggccgacgccattgatgcagagggggcctcggccccactcatggagttgctgcactcccgcaacgagggcactgccacctacgctgctgccgtcctgttccgcatctccgaggacaagaacccagactaccggaagcgcgtgtccgtggagctcaccaactccctcttcaagcatgacccggctgcctgggaggctgcccagagcatgattcccatcaatgagccctatggagatgacttggatgccacctaccgccccatgtactccagcgatgtgccccttgacccgctggagatgcacatggacatggatggagactaccccatcgacacctacagcgacggcctcaggcccccgtaccccactgcagaccacatgctggcctaggcggcctggccccagtgcggttcctcatctgagaggctctccgtgcaggcgatggggcaagacagaaaagtgcctgagctggggaagccggggtgtaacttcctgctgcaccctgcgcctccagaggtcctccgtagggtctttcttgggatagtgttctgctcctgcttttctgtcctgggcatgggtccagggcctgacaccccctccccgcccctgtggccctggccactaaagcttcagactcaagtacccattctgttttcccccagcaacgcccctccaaactcagnctccttgtcttcaggttcgagacccaaacccccaaaatccaaaacttctcttgaaaagttcagggaccgtccaggggagatggggaggagatatggagtgagtcacctgctccagaagatgccagcttctctctccagggtgcttagttggctttgcccacccctcactccccagggagctctggggacagcttcctcacacccctgtcccacccacacagctgccctagctgaccccgagaagtgctcttggctgacccctctggtgtgtggtgaggggctttctcttccccttcctgtttcagacccccccatttcccgcacatggtgtggggggctgggggaggtccaagcagagtgttttattattatcgctttatgtttttggttattggtttttttgtatagaccaaagcaaagaaaataaaaataacacaga

SEQ ID NO: 608293 - DNA, 420 bp, Homo sapiens
  misc_feature (14)..(14): n is a, c, g, or t
  misc_feature (42)..(42): n is a, c, g, or t
tccaaataagtaanttttaataaaactaattaaattacgttnatcctaattttccttttcctttccctatttgcaaaattgcttttcaaagaatcccaaaatctgtcccaggtgtggtggctcttgccctgtaattccagcactttgggaggtcaaggcaggcgaattgtttgagccccaggagttggagatcagcctgggcaacatggtgaaaccctgtctctactaaaaaaaaaaatacaaaaaattagccgggcacggtggagcatgcttgtggtcccagctactggggaggctgagatgggagaatcccctgagcccaggaactcaaggcagcagtgagccatgatctcatcaccactgcagtccacagtccagcctgggcgatgggagtgagaccctgtctccaaaaaaaaaaaa

SEQ ID NO: 608294 - DNA, 3104 bp, Homo sapiens
aagctggtacggccggagatttaaggatcagagtcggagcagccgccgccgaccgcgccgagctcagttcgctgtccgcgccggctcccaccccggcccgaccccgacccggcccggtcaggccccatactcagtagccacgatggaggtgatgaacctgatggagcagcctatcaaggtgactgagtggcagcagacatacacctacgactcgggtatccactcgggcgccaacacctgcgtgccctccgtcagcagcaagggcatcatggaggaggatgaggcctgcgggcgccagtacacgctcaagaaaaccaccacttacacccagggggtgccccccagccaaggtgacctggagtaccagatgtccacaacagccagggccaaacgggtgcgggaggccatgtgccctggtgtgtcaggcgaggacagctcgcttctgctggccacccaggtggaggggcaggccaccaacctgcagcgactggccgagccgtcccagctgctcaagtcggccattgtgcatctcatcaactaccaggacgatgccgagctggccactcgcgccctgcccgagctcaccaaactgctcaacgacgaggacccggtggtggtgaccaaggcggccatgattgtgaaccagctgtcgaagaaggaggcgtcgcggcgggccctgatgggctcgccccagctggtggccgctgtcgtgcgtaccatgcagaataccagcgacctggacacagcccgctgcaccaccagcatcctgcacaacctctcccaccaccgggaggggctgctcgccatcttcaagtcgggtggcatccctgctctggtccgcatgctcagctcccctgtggagtcggtcctgttctatgccatcaccacgctgcacaacctgctcctgtaccaggagggcgccaagatggccgtgcgcctggccgacgggctgcaaaagatggtgcccctgctcaacaagaacaaccccaagttcctggccatcaccaccgactgcctgcagctcctggcctacggcaaccaggagagcaagctgatcatcctggccaatggtgggccccaggccctcgtgcagatcatgcgtaactacagttatgaaaagctgctctggaccaccagtcgtgtgctcaaggtgctatccgtgtgtcccagcaataagcctgccattgtggaggctggtgggatgcaggccctgggcaagcacctgaccagcaacagcccccgcctggtgcagaactgcctgtggaccctgcgcaacctctcagatgtggccaccaagcaggagggcctggagagtgtgctgaagattctggtgaatcagctgagtgtggatgacgtcaacgtcctcacctgtgccacgggcacactctccaacctgacatgcaacaacagcaagaacaagacgctggtgacacagaacagcggtgtggaggctctcatccatgccatcctgcgtgctggtgacaaggacgacatcacggagcctgccgtctgcgctctgcgccacctcactagccgccaccctgaggccgagatggcccagaactctgtgcgtctcaactatggcatcccagccatcgtgaagctgctcaaccagcccaaccagtggccactggtcaaggcaaccatcggcttgatcaggaatctggccctgtgcccagccaaccatgccccgctgcaggaggcagcggtcatcccccgcctcgtccaactgctggtgaaggcccaccaggatgcccagcgccacgtagctgcaggcacacagcagccctacacggatggtgtgaggatggaggagattgtggagggctgcaccggagcactgcacatcctcgcccgggaccccatgaaccgcatggagatcttccggctcaacaccattcccctgtttgtgcagctcctgtactcgtcggtggagaacatccagcgcgtggctgccggggtgctgtgtgagctggcccaggacaaggaggcggccgacgccattgatgcagagggggcctcggccccactcatggagttgctgcactcccgcaacgagggcactgccacctacgctgctgccgtcctgttccgcatctccgaggacaagaacccagactaccggaagcgcgtgtccgtggagctcaccaactccctcttcaagcatgacccggctgcctgggaggctgcccagagcatgattcccatcaatgagccctatggagatgacttggatgccacctaccgccccatgtactccagcgatgtgccccttgacccgctggagatgcacatggacatggatggagactaccccatcgacacctacagcgacggcctcaggcccccgtaccccactgcagaccacatgctggcctaggcggcctggccccagtgcggttcctcatctgagaggctctccgtgcaggcgatggggcaagacagaaaagtgcctgagctggggaagccggggtgtaacttcctgctgcaccctgcgcctccagaggtcctccgtagggtctttcttgggatagtgttctgctcctgcttttctgtcctgggcatgggtccagggcctgacaccccctccccgcccctgtggccctggccactaaagcttcagactcaagtacccattctgttttcccccagcaacgcccctccaaacctccagcctccctgtctccagctgcctgggcccggaagggctttggttccttctctgggtctgattttctcactgaactccaccgaccaactgccctaagcccccagggcctccagggcccaggttcgagacccaaacccccaaaatccaaaacttctcttgaaaagttcagggagctctggggacagcttcctcacacccctgtcccacccacacagctgccctagctgaccccgagaagtgctcttggctgacccctctggtgtgtggtgaggggctttctcttccccttcctgtttcagacccccccatttcccgcacatggtgtggggggctgggggaggtccaagcagagtgttttattattatcgctttatgtttttggttattggtttttttgtatagaccaaagcaaagaaaataaaaataacacaga

SEQ ID NO: 608295 - DNA, 1333 bp, Homo sapiens
ggaggttctagagaggaggaaaagcctgcaaagagggggccgtactggggccaggccgcctaggccagcatgtggtctgcagtggggtacgggggcctgaggccgtcgccgtaggtgtcgatggggtagtctccatccatgtccatgtgcatctccagcgggtcaaggggcacatcgctggagtacatggggcggtaggtggcatccaagtcatctccgaggacaagaacccagactaccggaagcgcgtgtccgtggagctcaccaactccctcttcaagcatgacccggctgcctgggaggctgcccagagcatgattcccatcaatgagccctatggagatgacttggatgccacctaccgccccatgtactccagcgatgtgccccttgacccgctggagatgcacatggacatggatggagactaccccatcgacacctacagcgacggcctcaggcccccgtaccccactgcagaccacatgctggcctaggcggcctggccccagtgcggttcctcatctgagaggctctccgtgcaggcgatggggcaagacagaaaagtgcctgagctggggaagccggggtgtaacttcctgctgcaccctgcgcctccagaggtcctccgtagggtctttcttgggatagtgttctgctcctgcttttctgtcctgggcatgggtccagggcctgacaccccctccccgcccctgtggccctggccactaaagcttcagactcaagtacccattctgttttcccccagcaacgcccctccaaacctccagcctccctgtctccagctgcctgggcccggaagggctttggttccttctctgggtctgattttctcactgaactccaccgaccaactgccctaagcccccagggcctccagggcccaggttcgagacccaaacccccaaaatccaaaacttctcttgaaaagttcagggaccgtccaggggagatggggaggagatatggagtgagtcacctgctccagaagatgccagcttctctctccagggtgcttagttggctttgcccacccctcactccccagggagctctggggacagcttcctcacacccctgtcccacccacacagctgccctagctgaccccgagaagtgctcttggctgacccctctggtgtgtggtgaggggctttctcttccccttcctgtttcagacccccccatttcccgcacatggtgtggggggctgggggaggtccaagcagagtgttttattattatcgctttatgtttttggttattggtttttttgtatagaccaaagcaaagaaaataaaaataacacaga

SEQ ID NO: 608296 - DNA, 2694 bp, Homo sapiens
  misc_feature (2676)..(2676): n is a, c, g, or t
aagctggtacggccggagatttaaggatcagagtcggagcagccgccgccgaccgcgccgagctcagttcgctgtccgcgccggctcccaccccggcccgaccccgacccggcccggtcaggccccatactcagtagccacgatggaggtgatgaacctgatggagcagcctatcaaggtgactgagtggcagcagacatacacctacgactcgggtatccactcgggcgccaacacctgcgtgccctccgtcagcagcaagggcatcatggaggaggatgaggcctgcgggcgccagtacacgctcaagaaaaccaccacttacacccagggggtgccccccagccaaggtgacctggagtaccagatgtccacaacagccagggccaaacgggtgcgggaggccatgtgccctggtgtgtcaggcgaggacagctcgcttctgctggccacccaggtggaggggcaggccaccaacctgcagcgactggccgagccgtcccagctgctcaagtcggccattgtgcatctcatcaactaccaggacgatgccgagctggccactcgcgccctgcccgagctcaccaaactgctcaacgacgaggacccggtggtggtgaccaaggcggccatgattgtgaaccagctgtcgaagaaggaggcgtcgcggcgggccctgatgggctcgccccagctggtggccgctgtcgtgcgtaccatgcagaataccagcgacctggacacagcccgctgcaccaccagcatcctgcacaacctctcccaccaccgggaggggctgctcgccatcttcaagtcgggtggcatccctgctctggtccgcatgctcagctcccctgtggagtcggtcctgttctatgccatcaccacgctgcacaacctgctcctgtaccaggagggcgccaagatggccgtgcgcctggccgacgggctgcaaaagatggtgcccctgctcaacaagaacaaccccaagttcctggccatcaccaccgactgcctgcagctcctggcctacggcaaccaggagagcaagctgatcatcctggccaatggtgggccccaggccctcgtgcagatcatgcgtaactacagttatgaaaagctgctctggaccaccagtcgtgtgctcaaggtgctatccgtgtgtcccagcaataagcctgccattgtggaggctggtgggatgcaggccctgggcaagcacctgaccagcaacagcccccgcctggtgcagaactgcctgtggaccctgcgcaacctctcagatgtggccaccaagcaggagggcctggagagtgtgctgaagattctggtgaatcagctgagtgtggatgacgtcaacgtcctcacctgtgccacgggcacactctccaacctgacatgcaacaacagcaagaacaagacgctggtgacacagaacagcggtgtggaggctctcatccatgccatcctgcgtgctggtgacaaggacgacatcacggagcctgccgtctgcgctctgcgccacctcactagccgccaccctgaggccgagatggcccagaactctgtgcgtctcaactatggcatcccagccatcgtgaagctgctcaaccagcccaaccagtggccactggtcaaggcaaccatcggcttgatcaggaatctggccctgtgcccagccaaccatgccccgctgcaggaggcagcggtcatcccccgcctcgtccaactgctggtgaaggcccaccaggatgcccagcgccacgtagctgcaggcacacagcagccctacacggatggtgtgaggatggaggagattgtggagggctgcaccggagcactgcacatcctcgcccgggaccccatgaaccgcatggagatcttccggctcaacaccattcccctgtttgtgcagctcctgtactcgtcggtggagaacatccagcgcgtggctgccggggtgctgtgtgagctggcccaggacaaggaggcggccgacgccattgatgcagagggggcctcggccccactcatggagttgctgcactcccgcaacgagggcactgccacctacgctgctgccgtcctgttccgcatctccgaggacaagaacccagactaccggaagcgcgtgtccgtggagctcaccaactccctcttcaagcatgacccggctgcctgggaggctgcccagagcatgattcccatcaatgagccctatggagatgacttggatgccacctaccgccccatgtactccagcgatgtgccccttgacccgctggagatgcacatggacatggatggagactaccccatcgacacctacagcgacggcctcaggcccccgtaccccactgcagaccacatgctggcctaggcggcctggccccagtgcggttcctcatctgagaggctctccgtgcaggcgatggggcaagacagaaaagtgcctgagctggggaagccggggtgtaacttcctgctgcaccctgcgcctccagaggtcctccgtagggtctttcttgggatagtgttctgctcctgcttttctgtcctgggcatgggtccagggcctgacaccccctccccgcccctgtggccctggccactaaagcttcagactcaagtacccattctgttttcccccagcaacgcccctccttgtgcctctgnagtcctgtaatcagccac

SEQ ID NO: 608297 - DNA, 2707 bp, Homo sapiens
aagctggtacggccggagatttaaggatcagagtcggagcagccgccgccgaccgcgccgagctcagttcgctgtccgcgccggctcccaccccggcccgaccccgacccggcccggtcaggccccatactcagtagccacgatggaggtgatgaacctgatggagcagcctatcaaggtgactgagtggcagcagacatacacctacgactcgggtatccactcgggcgccaacacctgcgtgccctccgtcagcagcaagggcatcatggaggaggatgaggcctgcgggcgccagtacacgctcaagaaaaccaccacttacacccagggggtgccccccagccaaggtgacctggagtaccagatgtccacaacagccagggccaaacgggtgcgggaggccatgtgccctggtgtgtcaggcgaggacagctcgcttctgctggccacccaggtggaggggcaggccaccaacctgcagcgactggccgagccgtcccagctgctcaagtcggccattgtgcatctcatcaactaccaggacgatgccgagctggccactcgcgccctgcccgagctcaccaaactgctcaacgacgaggacccggtggtggtgaccaaggcggccatgattgtgaaccagctgtcgaagaaggaggcgtcgcggcgggccctgatgggctcgccccagctggtggccgctgtcgtgcgtaccatgcagaataccagcgacctggacacagcccgctgcaccaccagcatcctgcacaacctctcccaccaccgggaggggctgctcgccatcttcaagtcgggtggcatccctgctctggtccgcatgctcagctcccctgtggagtcggtcctgttctatgccatcaccacgctgcacaacctgctcctgtaccaggagggcgccaagatggccgtgcgcctggccgacgggctgcaaaagatggtgcccctgctcaacaagaacaaccccaagttcctggccatcaccaccgactgcctgcagctcctggcctacggcaaccaggagagcaagctgatcatcctggccaatggtgggccccaggccctcgtgcagatcatgcgtaactacagttatgaaaagctgctctggaccaccagtcgtgtgctcaaggtgctatccgtgtgtcccagcaataagcctgccattgtggaggctggtgggatgcaggccctgggcaagcacctgaccagcaacagcccccgcctggtgcagaactgcctgtggaccctgcgcaacctctcagatgtggccaccaagcaggagggcctggagagtgtgctgaagattctggtgaatcagctgagtgtggatgacgtcaacgtcctcacctgtgccacgggcacactctccaacctgacatgcaacaacagcaagaacaagacgctggtgacacagaacagcggtgtggaggctctcatccatgccatcctgcgtgctggtgacaaggacgacatcacggagcctgccgtctgcgctctgcgccacctcactagccgccaccctgaggccgagatggcccagaactctgtgcgtctcaactatggcatcccagccatcgtgaagctgctcaaccagcccaaccagtggccactggtcaaggcaaccatcggcttgatcaggaatctggccctgtgcccagccaaccatgccccgctgcaggaggcagcggtcatcccccgcctcgtccaactgctggtgaaggcccaccaggatgcccagcgccacgtagctgcaggcacacagcagccctacacggatggtgtgaggatggaggagattgtggagggctgcaccggagcactgcacatcctcgcccgggaccccatgaaccgcatggagatcttccggctcaacaccattcccctgtttgtgcagctcctgtactcgtcggtggagaacatccagcgcgtggctgccggggtgctgtgtgagctggcccaggacaaggaggcggccgacgccattgatgcagagggggcctcggccccactcatggagttgctgcactcccgcaacgagggcactgccacctacgctgctgccgtcctgttccgcatctccgaggacaagaacccagactaccggaagcgcgtgtccgtggagctcaccaactccctcttcaagcatgacccggctgcctgggaggctgcccagagcatgattcccatcaatgagccctatggagatgacttggatgccacctaccgccccatgtactccagcgatgtgccccttgacccgctggagatgcacatggacatggatggagactaccccatcgacacctacagcgacggcctcaggcccccgtaccccactgcagaccacatgctggcctaggcggcctggccccagtgcggttcctcatctgagaggctctccgtgcaggcgatggggcaagacagaaaagtgcctgagctggggaagccggggtgtaacttcctgctgcaccctgcgcctccagaggtcctccgtagggtctttcttgggatagtgttctgctcctgcttttctgtcctgggcatgggtccagggcctgacaccccctccccgcccctgtggccctggccactaaagcttcagactcaagtacccattctgttttcccccagcaacgcccctccaaacctccagcacaagaagggatccgtctagagcaccacacac

SEQ ID NO: 608298 - DNA, 2893 bp, Homo sapiens
aagctggtacggccggagatttaaggatcagagtcggagcagccgccgccgaccgcgccgagctcagttcgctgtccgcgccggctcccaccccggcccgaccccgacccggcccggtcaggccccatactcagtagccacgatggaggtgatgaacctgatggagcagcctatcaaggtgactgagtggcagcagacatacacctacgactcgggtatccactcgggcgccaacacctgcgtgccctccgtcagcagcaagggcatcatggaggaggatgaggcctgcgggcgccagtacacgctcaagaaaaccaccacttacacccagggggtgccccccagccaaggtgacctggagtaccagatgtccacaacagccagggccaaacgggtgcgggaggccatgtgccctggtgtgtcaggcgaggacagctcgcttctgctggccacccaggtggaggggcaggccaccaacctgcagcgactggccgagccgtcccagctgctcaagtcggccattgtgcatctcatcaactaccaggacgatgccgagctggccactcgcgccctgcccgagctcaccaaactgctcaacgacgaggacccggtggtggtgaccaaggcggccatgattgtgaaccagctgtcgaagaaggaggcgtcgcggcgggccctgatgggctcgccccagctggtggccgctgtcgtgcgtaccatgcagaataccagcgacctggacacagcccgctgcaccaccagcatcctgcacaacctctcccaccaccgggaggggctgctcgccatcttcaagtcgggtggcatccctgctctggtccgcatgctcagctcccctgtggagtcggtcctgttctatgccatcaccacgctgcacaacctgctcctgtaccaggagggcgccaagatggccgtgcgcctggccgacgggctgcaaaagatggtgcccctgctcaacaagaacaaccccaagttcctggccatcaccaccgactgcctgcagctcctggcctacggcaaccaggagagcaagctgatcatcctggccaatggtgggccccaggccctcgtgcagatcatgcgtaactacagttatgaaaagctgctctggaccaccagtcgtgtgctcaaggtgctatccgtgtgtcccagcaataagcctgccattgtggaggctggtgggatgcaggccctgggcaagcacctgaccagcaacagcccccgcctggtgcagaactgcctgtggaccctgcgcaacctctcagatgtggccaccaagcaggagggcctggagagtgtgctgaagattctggtgaatcagctgagtgtggatgacgtcaacgtcctcacctgtgccacgggcacactctccaacctgacatgcaacaacagcaagaacaagacgctggtgacacagaacagcggtgtggaggctctcatccatgccatcctgcgtgctggtgacaaggacgacatcacggagcctgccgtctgcgctctgcgccacctcactagccgccaccctgaggccgagatggcccagaactctgtgcgtctcaactatggcatcccagccatcgtgaagctgctcaaccagcccaaccagtggccactggtcaaggcaaccatcggcttgatcaggaatctggccctgtgcccagccaaccatgccccgctgcaggaggcagcggtcatcccccgcctcgtccaactgctggtgaaggcccaccaggatgcccagcgccacgtagctgcaggcacacagcagccctacacggatggtgtgaggatggaggagattgtggagggctgcaccggagcactgcacatcctcgcccgggaccccatgaaccgcatggagatcttccggctcaacaccattcccctgtttgtgcagctcctgtactcgtcggtggagaacatccagcgcgtggctgccggggtgctgtgtgagctggcccaggacaaggaggcggccgacgccattgatgcagagggggcctcggccccactcatggagttgctgcactcccgcaacgagggcactgccacctacgctgctgccgtcctgttccgcatctccgaggacaagaacccagactaccggaagcgcgtgtccgtggagctcaccaactccctcttcaagcatgacccggctgcctgggaggctgcccagagcatgattcccatcaatgagccctatggagatgacttggatgccacctaccgccccatgtactccagcgatgtgccccttgacccgctggagatgcacatggacatggatggagactaccccatcgacacctacagcgacggcctcaggcccccgtaccccactgcagaccacatgctggcctaggcggcctggccccagtacggccccctctttgcaggcttttcctcctctctagaacctccttctgttggaggccctcccatctccccgctgaaacctgcgctccttttttggggggatcctttgctgctgagcttccccaagcacggtgtgccctggcctgccttcttcttgtgtctttggtggggatggggaggcctattcctgctggccccttctgggggtggcgggcaggtgacacggagtggcttgggagctctggggacagcttcctcacacccctgtcccacccacacagctgccctagctgaccccgagaagtgctcttggctgacccctctggtgtgtggtgaggggctttctcttccccttcctgtttcagacccccccatttcccgcacatggtgtggggggctgggggaggtccaagcagagtgttttattattatcgctttatgtttttggttattggtttttttgtatagaccaaagcaaagaaaataaaaataacacaga

SEQ ID NO: 608299 - DNA, 366 bp, Homo sapiens
caagatatgtatactggctgggtgtggtgactttattgcccataatcccagcactttggaaggcagaggtgggtgaatcacttgagtccaggacaccagcccaggcaacatggcaaaaccctatctctacaaaaaatacaaaaatcagcctcccaagtagctgggattacaggagtgcaccaccatgcccagctaatttttgtttttaatagagatgggttttcaccatgttggccaagctggtctcaaactcctgacccaaggtgatccgcctgcctcggcctcccaaagtgctgggattacaggcatgagccaccaaacccagccattgaaaaacatcttgataaaatgtctagtcatgataaa

SEQ ID NO: 608300 - DNA, 2606 bp, Homo sapiens
aagctggtacggccggagatttaaggatcagagtcggagcagccgccgccgaccgcgccgagctcagttcgctgtccgcgccggctcccaccccggcccgaccccgacccggcccggtcaggccccatactcagtagccacgatggaggtgatgaacctgatggagcagcctatcaaggtgactgagtggcagcagacatacacctacgactcgggtatccactcgggcgccaacacctgcgtgccctccgtcagcagcaagggcatcatggaggaggatgaggcctgcgggcgccagtacacgctcaagaaaaccaccacttacacccagggggtgccccccagccaaggtgacctggagtaccagatgtccacaacagccagggccaaacgggtgcgggaggccatgtgccctggtgtgtcaggcgaggacagctcgcttctgctggccacccaggtggaggggcaggccaccaacctgcagcgactggccgagccgtcccagctgctcaagtcggccattgtgcatctcatcaactaccaggacgatgccgagctggccactcgcgccctgcccgagctcaccaaactgctcaacgacgaggacccggtggtggtgaccaaggcggccatgattgtgaaccagctgtcgaagaaggaggcgtcgcggcgggccctgatgggctcgccccagctggtggccgctgtcgtgcgtaccatgcagaataccagcgacctggacacagcccgctgcaccaccagcatcctgcacaacctctcccaccaccgggaggggctgctcgccatcttcaagtcgggtggcatccctgctctggtccgcatgctcagctcccctgtggagtcggtcctgttctatgccatcaccacgctgcacaacctgctcctgtaccaggagggcgccaagatggccgtgcgcctggccgacgggctgcaaaagatggtgcccctgctcaacaagaacaaccccaagttcctggccatcaccaccgactgcctgcagctcctggcctacggcaaccaggagagcaagctgatcatcctggccaatggtgggccccaggccctcgtgcagatcatgcgtaactacagttatgaaaagctgctctggaccaccagtcgtgtgctcaaggtgctatccgtgtgtcccagcaataagcctgccattgtggaggctggtgggatgcaggccctgggcaagcacctgaccagcaacagcccccgcctggtgcagaactgcctgtggaccctgcgcaacctctcagatgtggccaccaagcaggagggcctggagagtgtgctgaagattctggtgaatcagctgagtgtggatgacgtcaacgtcctcacctgtgccacgggcacactctccaacctgacatgcaacaacagcaagaacaagacgctggtgacacagaacagcggtgtggaggctctcatccatgccatcctgcgtgctggtgacaaggacgacatcacggagcctgccgtctgcgctctgcgccacctcactagccgccaccctgaggccgagatggcccagaactctgtgcgtctcaactatggcatcccagccatcgtgaagctgctcaaccagcccaaccagtggccactggtcaaggcaaccatcggcttgatcaggaatctggccctgtgcccagccaaccatgccccgctgcaggaggcagcggtcatcccccgcctcgtccaactgctggtgaaggcccaccaggatgcccagcgccacgtagctgcaggcacacagcagccctacacggatggtgtgaggatggaggagattgtggagggctgcaccggagcactgcacatcctcgcccgggaccccatgaaccgcatggagatcttccggctcaacaccattcccctgtttgtgcagctcctgtactcgtcggtggagaacatccagcgcgtggctgccggggtgctgtgtgagctggcccaggacaaggaggcggccgacgccattgatgcagagggggcctcggccccactcatggagttgctgcactcccgcaacgagggcactgccacctacgctgctgccgtcctgttccgcatctccgaggacaagaacccagactaccggaagcgcgtgtccgtggagctcaccaactccctcttcaagcatgacccggctgcctgggaggctgcccagagcatgattcccatcaatgagccctatggagatgacttggatgccacctaccgccccatgtactccagcgatgtgccccttgacccgctggagatgcacatggacatggatggagactaccccatcgacacctacagcgacggcctcaggcccccgtaccccactgcagaccacatgctggcctaggcggcctggccccagtgcggttcctcatctgagaggctctccgtgcaggcgatggggcaagacagaaaagtgcctgagctggggaagccggggtgtaacttcctgctgcaccctgcgcctccagaggtcctccgtagggtctttttgggaatgtttctcccctcttttttgcccgggagggcccggctaaaacccccccccctttggccgctaaaagctaaaatag

SEQ ID NO: 608301 - DNA, 152 bp, Homo sapiens
ccaagacgcaaacctctttttcctggccacgggggcccccagcctctctctccgcctgcaaccccggctctaccttaatagtcccaatcccaagctatctgactccaaaaattctcggccttcttccaaccaccaccgcttgtagggactcc

SEQ ID NO: 608302 - DNA, 1006 bp, Homo sapiens
cggacgcgtgggtcgatcttcccgtctcaaaatggacatgactggatccacggatgtacacgcagagagccaggaggtccaaccgccgtagacggaggaaggaattaaagatgtcttccaggacaagttttacttatatggagacaggtggaaaccataagttcgagctataatccagtaagatgaaggtgacagacaataagtcaaccgtcaggtgacaagaagtcaagtggagaagaggaagaccgccgaaagaacatctgaggaaactaagcatgaaagaacgtgagcacggagaaagaggagaggcaggtgtcagaggcagaggaaaatgggacatggatatgacagaaatacactagctacatggacaaatgtgtgtcaaggtgcgcaagcgtgcggcgggggcagaggactactacagatgcagagatcaccccttctgcaagaaagcctctttgcagaccgaggttcagaagtggctggctagtgtgagcactcgtcattcttgaggatgtgccctaatttggacctacctcatagacgtgatgctttaataaaacgggatgggccacgcagcacctccgtccaagtcaactaacattctataattgataactccctgaggcctcaagacattcttccgagatgtctgtgctcacgcccctttcaaccctccagtctcgaccatcaggcggaatgatgatcatccagaaacctggcggagtggttgtctaatccccattccatgctcaggcggatgataatctcaagaaacgtccgagatgtttggttcatccgcttcaagctcaggatccacctcagggatgataatctcaagaacacttccggagtgtgttgttcattccctttcactcaacgggaggatattcccagaactaggggatactcaagtgtttaacaaaaaaggggcggggaaaatccggaggcaatctcgcccggttttaaaaggccaaagggaaaaagggggtaaagaggaagtatg

SEQ ID NO: 608303 - DNA, 141 bp, Homo sapiens
gttttggctttttaaacttcaaatttgggtaggttaacctgccaacgtggttcagtgtgaatagtgcttaagttgaaaatattgtaaaaaaattatattttttccagaatatttaaaaaaattaatgatagtgggcctgta

SEQ ID NO: 608304 - DNA, 409 bp, Homo sapiens
ttgctgaaaagccgtatacaagaggtagtttctcgattctgaccctcctcccgctctccaccctcaggcaggccctggtgtctatagtttgcttctttgggtccatgtgtactcaatatttagctcccacttataagtgagaacatgcagtatttggtttgctgtgcctgtattggttcttttaggataagtgacctccatctccgtccatgttgctacaaaggatgtgatcttgttcttttttatagctgaatagtattccatggtgtatatgtaccacattttctttatccagtccaccattgatggacatttaggttgtttccatattttttgctattgtaaatagtgctatgatgaacatacacgtgtatgtgtctttatggtacttgggtactacgcttgggca

SEQ ID NO: 608305 - DNA, 841 bp, Homo sapiens
ggaccatcttggagagtttgttccgtgtgccgtgcttattgctcgatgtgtgcctgcctgagtctgaagaagctgcctggttggcatcagtgacgctgatctgcgtgctatgtactggctgtattgtctctagaggtgggtagttgttagtctattattattcctgcatgcatcggagggtggtattctgatggagttagagtcgattttgatgaagtaaatctagtggattacgtcggtatttagctcctgctctattgaagtttatcaatagtgtttgtaatctagatgcctcataagatatagtaaaattgtcgagacagatgaaattgtagatgaaggcagtctacgtctgaacagaaagattatgctagattggatacaagacagctggaagacgtttttaggacgattcgtgatcttgaggatatcatctttcgtatggttcatctgatagagtagtacgaatttgctctaccagcatgtatttatatatgcctgtctgggaccttattgtttcatgctcgacattgattgtgtgcaagttggacattattcttgttgagattatctcgattcaaatatatctcgtatattctacaactatagaaatgtaatgaaagtgattaattgtatattagtacccaatctgtaacaatttattggggggatagaacatttcttgactagatatgaagtgtatgttgatattcctgaaggctagattctcgtactttctgaggaactctggatcagtgtgatctccgttgacctattgtgtgctttgccgtttgaactacgagttgtgtgatggttgatttatgggaagtatggttggtga

SEQ ID NO: 608306 - DNA, 141 bp, Homo sapiens
ttaattcctttttggggggggcccccccaaggccccctttacccggtttggcccccggttttttgttgccccttgtttttggcccctgttttgggtttttttgaataattgaattttcctgccgggggcccttaaaagcca

SEQ ID NO: 608307 - DNA, 793 bp, Homo sapiens
ggaccaagcggacctaatagacatctacagaactctccagcccaaatcgacagaatacacattcttctcagcaccacattgcacttattccaaaattgacagcataattggaagtaaaacactcctcagcaaatgtgaaagaacagaaattataacagactgtctctcagaccacagtgcaatcaaactagaactcaggattaggaaactcgctcagaactgcacaactacatggaaactgaacaacctgctcctgaatgactactgggtaaataacgaaatgaaggcagaaataaagatgttctttgaaaccaatgagaacaaagacataacgtaccagaatctccgggacacatttgaagcagtgtgtagagggaaatttatatcactaaatgcctacaagagaaagcaggaaagatctaaaatcgacaccctaacatcacaaaagaactagagaagcaagagcaaacaaattcaaaagctagcagaagacaagaaataactaagagcagaactgaaggagatagagacacaacaaaaacacttaaaaccacaaatcaatgaatccaaggagctagttttggaaaagataacacaatagatcactagccagactactcaagactcacagagcagcaagaatcaacatagatgcgataaaccaccgataaaggggatgtcaccactgatcccacagaacatacaacgtaccatcagagaatgctataaacacctcttcattaataaacctagaaaatcttagcaagaacctggcttaactcctgaacccata

SEQ ID NO: 608308 - DNA, 116 bp, Homo sapiens
acgaaggggggatggacacacgaaagggggatggacacacgaaaggggggatggacacacgaaggggggatggacacacgaaggggggatggacacacgaaggggggcatggacac

SEQ ID NO: 608309 - DNA, 233 bp, Homo sapiens
ggcctctgtctgctcaggaataagccaggcctgggagggggaggctgcatcctgtgtgcctccagagcctcctctctgccccctgggattcacatgaaggagcagcagctggagcgcttctgcgtgtaatcccagtactttgggaggccgaggccggcaggttgcttgagctcaggaattcaagaccagcctgggcaacatggcgaaaccctgtgtctacaaaaaatacaaaa

SEQ ID NO: 608310 - DNA, 780 bp, Homo sapiens
ggcttcgggtgcatggggactcctcggggcctgcagaccgactgcgaggcgctgctcagccgcttccaggagacggacagtgtacgcttcgaggacttcacggagctctggagaaacatgaagttcgggactatcttctgtggcagaatgagaaatttagaaaagaacaactgttgacacaagaagctttagcttgggcttggcgatattttatacctccatacaccttcctgatcagagtggtgcttgtatctgctatatggattatataataccccaagtgtgtcgaacgcaaaataaaagatcgagagttgccgtgaaggattgggatgaagtttgaaaattgtcagcaagatgttagtaaatgcacagattttgatgcagcattatattttgtaggaagctaggactagacagagcatttctctttacagggaaatgccagaattgggtgtcatagtaggatgaaggaaaatgaattccccgagcgtgaaagttacagaagaatttaaggaaccaagtgatcgtgtgagtgaaacttatcacttctgatgtatgagaggaaatgcgtgaatgttcatgatcatgatcagaacaatgaatggaatgtaaatataaagtcgataaggtccaagacagactaaaagcatatcaagagttgatgaaggggatgaatgatagtgacaatattgaagaagataggttttgggagcattcagcagggggaccaagagacagaagaggaatacatacctatagaggtcacaagaactgtgtgac

SEQ ID NO: 608311 - DNA, 311 bp, Homo sapiens
aattgaagacccccaaaaaaagtgaaccagccagttcttgccttaattgatgaggttcccccattgtgatttgttggtgcccccccccaattgtttttttgcccttgggacattttttttttggaggagtttcaggagttcccccccgagccccttgtgaccccgggcccgggccagcaaaagaaaaccccctttaattttccactacctacccaaatcctataaaattgccccccccctttttccctttgttgacccctttttgggattcagcccacttgcacccaagtgaataaacagccttgttgtta

SEQ ID NO: 608312 - DNA, 248 bp, Homo sapiens
atcatggatttgctggtgcagtacaactaggcttaatagggacatggtgaaaacctgtctctactaaaaatacaaaaattagctgggcgtggtggtgcagacctgtaatcccagctactcaggaggctgaggcaggagaatcgcttgaacctgggaggtggaggttgcagtcaagcctgcattgcaccacgggactctaagcctgggcgacaagagccaagactctgtctcaaaaaagacaaaaagga

SEQ ID NO: 608313 - DNA, 495 bp, Homo sapiens
  misc_feature (456)..(456): n is a, c, g, or t
  misc_feature (466)..(466): n is a, c, g, or t
  misc_feature (469)..(469): n is a, c, g, or t
  misc_feature (471)..(471): n is a, c, g, or t
  misc_feature (474)..(474): n is a, c, g, or t
tcgaccatgcctgagagctctttaggataaacctagcagtggaattgctatgtagtacgggatattgcatagttttgtcagtttagacattcaccagtaacacatgtgttacctgatttgcacagtctcatttggtattgtcagccttttaattttttcaatttgatgtacgtgaagtattgtcttactttaatttgcatttccctgattataaactactataatgagatgggtcatctttttatattttcattattattcagattttttattggactttgtcttagatttattgacttgaactcactcttctatattaaaatactcatctaagtcactggcctaacattgaaagcctaagatagaaatatatgaccaactgcaatttaaacccaggcatcctgtaattaaataccttgtttaccatttgttcacatttaataagtagtattgccnattgtattanaananatnttccaggacaattgttaaaaa

SEQ ID NO: 608314 - DNA, 414 bp, Homo sapiens
  misc_feature (27)..(27): n is a, c, g, or t
  misc_feature (67)..(67): n is a, c, g, or t
  misc_feature (188)..(188): n is a, c, g, or t
  misc_feature (217)..(217): n is a, c, g, or t
  misc_feature (332)..(332): n is a, c, g, or t
  misc_feature (335)..(335): n is a, c, g, or t
  misc_feature (344)..(344): n is a, c, g, or t
  misc_feature (346)..(346): n is a, c, g, or t
  misc_feature (385)..(385): n is a, c, g, or t
  misc_feature (409)..(409): n is a, c, g, or t
  misc_feature (411)..(411): n is a, c, g, or t
tggccaatggaattcgcgggggaaagnccatgtccctttctccccctcagccccttccccgttcccngtttacatctcaaggggaaaagcgcacgcggggtctcccagcaccgtcaccaccgctgtgctgtcagcccaggcgcttgcagcggcgccctttcggccctggggcagttcctgagacttcnctccgctggcttggggatgcgggggtgcnaccgggcccggccaccggcggcggacgcgcgtggcggggcggggcagaggttgagaaccgctgactgcgaagtccgggtgcggggaagggaagggagcgaggtgcgggggaggcnagnaggccggcnanccctaggcggctactccttgtcgtccacgaggtcggcgnagctcctggagcactcgcaggcgngncgc

SEQ ID NO: 608315 - DNA, 306 bp, Homo sapiens
caggcgcactgacccactcctgtaatcccagcactttgggaagctgaggctcgtttctcctcactgctttcctgtcttgagcacaggagttcgagaccagcctgggcaacacagtgagatcctgtctctatttaaaaatatacatatatatatttttaaaaaccaggtgcagtgacgcatgcctttagttgcagctacttgagaagctgaggcagggggatcgctcgagcccaggagttggaggctgcagtgagctgtggtcacaccactgcactccagcctggggaacagagcaggaccctatct

SEQ ID NO: 608316 - DNA, 215 bp, Homo sapiens
ctcctgattgtgtggtgtatgaatattaagctagcttatgaagtggggatgatttgtatctgaatgattggttgataaatagattaccattgggctatggattctgtcacataacttgcatattgacaacagtgtctatagatagatcttacaaggaagggtagccaaaccgaatggattctttaaggtctattgatccataacaccacacaatt

SEQ ID NO: 608317 - DNA, 2098 bp, Homo sapiens
aagctggtacggccggagatttaaggatcagagtcggagcagccgccgccgaccgcgccgagctcagttcgctgtccgcgccggctcccaccccggcccgaccccgacccggcccggtcaggccccatactcagtagccacgatggaggtgatgaacctgatggagcagcctatcaaggtgactgagtggcagcagacatacacctacgactcgggtatccactcgggcgccaacacctgcgtgccctccgtcagcagcaagggcatcatggaggaggatgaggcctgcgggcgccagtacacgctcaagaaaaccaccacttacacccagggggtgccccccagccaaggtgacctggagtaccagatgtccacaacagccagggccaaacgggtgcgggaggccatgtgccctggtgtgtcaggcgaggacagctcgcttctgctggccacccaggtggaggggcaggccaccaacctgcagcgactggccgagccgtcccagctgctcaagtcggccattgtgcatctcatcaactaccaggacgatgccgagctggccactcgcgccctgcccgagctcaccaaactgctcaacgacgaggacccggtggtggtgaccaaggcggccatgattgtgaaccagctgtcgaagaaggaggcgtcgcggcgggccctgatgggctcgccccagctggtggccgctgtcgtgcgtaccatgcagaataccagcgacctggacacagcccgctgcaccaccagcatcctgcacaacctctcccaccaccgggaggggctgctcgccatcttcaagtcgggtggcatccctgctctggtccgcatgctcagctcccctgtggagtcggtcctgttctatgccatcaccacgctgcacaacctgctcctgtaccaggagggcgccaagatggccgtgcgcctggccgacgggctgcaaaagatggtgcccctgctcaacaagaacaaccccaagttcctggccatcaccaccgactgcctgcagctcctggcctacggcaaccaggagagcaagctgatcatcctggccaatggtgggccccaggccctcgtgcagatcatgcgtaactacagttatgaaaagctgctctggaccaccagtcgtgtgctcaaggtgctatccgtgtgtcccagcaataagcctgccattgtggaggctggtgggatgcaggccctgggcaagcacctgaccagcaacagcccccgcctggtgcagaactgcctgtggaccctgcgcaacctctcagatgtggccaccaagcaggagggcctggagagtgtgctgaagattctggtgaatcagctgagtgtggatgacgtcaacgtcctcacctgtgccacgggcacactctccaacctgacatgcaacaacagcaagaacaagacgctggtgacacagaacagcggtgtggaggctctcatccatgccatcctgcgtgctggtgacaaggacgacatcacggagcctgccgtctgcgctctgcgccacctcactagccgccaccctgaggccgagatggcccagaactctgtgcgtctcaactatggcatcccagccatcgtgaagctgctcaaccagcccaaccagtggccactggtcaaggcaaccatcggcttgatcaggaatctggccctgtgcccagccaaccatgccccgctgcaggaggcagcggtcatcccccgcctcgtccaactgctggtgaaggcccaccaggatgcccagcgccacgtagctgcaggcacacagcagccctacacggatggtgtgaggatggaggagattgtggagggctgcaccggagcactgcacatcctcgcccgggaccccatgaaccgcatggagatcttccggctcaacaccattcccctgtttgtgcagctcctgtactcgtcggtggagaacatccagcgcgtggctgccggggtgctgtgtgagctggcccaggacaaggaggcggccgacgccattgatgcagagggggcctcggccccactcatggagttgctgcactcccccaaacgaggcactcccgagtccgctcattggtaccgacacgattca

SEQ ID NO: 608318 - DNA, 1213 bp, Homo sapiens
aagctggtacggccggagatttaaggatcagagtcggagcagccgccgccgaccgcgccgagctcagttcgctgtccgcgccggctcccaccccggcccgaccccgacccggcccggtcaggccccatactcagtagccacgatggaggtgatgaacctgatggagcagcctatcaaggtgactgagtggcagcagacatacacctacgactcgggtatccactcgggcgccaacacctgcgtgccctccgtcagcagcaagggcatcatggaggaggatgaggcctgcgggcgccagtacacgctcaagaaaaccaccacttacacccagggggtgccccccagccaaggtgacctggagtaccagatgtccacaacagccagggccaaacgggtgcgggaggccatgtgccctggtgtgtcaggcgaggacagctcgcttctgctggccacccaggtggaggggcaggccaccaacctgcagcgactggccgagccgtcccagctgctcaagtcggccattgtgcatctcatcaactaccaggacgatgccgagctggccactcgcgccctgcccgagctcaccaaactgctcaacgacgaggacccggtggtggtgaccaaggcggccatgattgtgaaccagctgtcgaagaaggaggcgtcgcggcgggccctgatgggctcgccccagctggtggccgctgtcgtgcgtaccatgcagaataccagcgacctggacacagcccgctgcaccaccagcatcctgcacaacctctcccaccaccgggaggggctgctcgccatcttcaagtcgggtggcatccctgctctggtccgcatgctcagctcccctgtggagtcggtcctgttctatgccatcaccacgctgcacaacctgctcctgtaccaggagggcgccaagatggccgtgcgcctggccgacgggctgcaaaagatggtgcccctgctcaacaagaacaaccccaagttcctggccatcaccaccgactgcctgcagctcctggcctacggcaaccaggagagcaagctgatcatcctggccaatggtgggccccaggccctcgtgcagatcatgcgtaactacagttatgaaaagctgctctggaccaccaggcgggggctgttgctggtcaggtgcttgcccagggcctgcatcccaccagcctccacaatggctggcttattgctg

SEQ ID NO: 608319 - DNA, 148 bp, Homo sapiens
acgcagttaatacagactcaggcgtttgtgtataatatagtttgcggtttcgatgatgtggtcttatggagtagaaacctgtgaggaaaggtatatcctgctaatgcctagtgctgccaatggtagagggaggttagaagtgaagcgg

SEQ ID NO: 608320 - DNA, 1334 bp, Homo sapiens
gagaaataagttaggataaaggaaatttgaatctcaaaaatatcaaaagtaaaaatgtattctcaaaactttaaatttatgaagaatgatgacagtagaagccttcctcttcccttgtcaccttgagataaaaattctttaggcaggaaaagaaatggaagtcagaaaaacattagaataagacaataatgtgggtgtctgaaaaggaacaaatacttattcctcacatagggttagtgacaatgggaaaagggacgggagtagaagccacagacatatctaggagccctgaatagaggcgcagtctgcctcacctcctgaatgaagctgtactagataaccatgtagctttccctgtgccactctggcatgaaggagacagtatagtgaatatggctacaggatgtttcttggaaacatgccaatatcttcagaaatccccagccctttcccctaacccctcctgactaaggaaagcatgagcttatgagagaaaccctaggaagaacaacacagttgagacaatgtagcagcagcagtgggtgctgtgtcctccactggattcgccatctccgaggagaaactctcacagaggaaatgggtcagcagcgacctcatggctctaaacagctatgacatccatgaggatatttctaaccatgctacctgcatcagtgagtttaaattttaattggagaaacaatacaaaacattaacgcaataattgatacagtatagtttggtgcaaagaaccctaaatccaaatccaggactcagtactttgaagctagtatttgaaactttataacatgtgtgaagtatctaacatttctggccttactttactcatccacaatgtaggagtaataatactttccttgcagagttattgataaacatttgaataatcttgatattagtccatgccttacaccattgtaacatgaaccacttacgaacacattggggtcatattatcactgcatcaattaaacaaaatggccaccacatcaaatgaaaagcacattggattccacacaccccactacgaataagcgatcacgtgaaaacatgaggacatacgaccacacacaaaccgaggaaaaacaatagacggaacacacagaggcaatgactgggacggaaacttaacagaacaaagaagaatgaaagctaaaaactcaacaagaataccccagtgactcaaaatgacacagcacactaacacactctcagaacgacaaaaatatcggtaatacgaaaagagcacgaaagaacaaacaccacgacaaacaacaaaagaaagaccacagcaaccagaggcacgcagcaaa

SEQ ID NO: 608321 - DNA, 123 bp, Homo sapiens
agcggagtcgggcctgatggccctgaggcagttcggatgtgtcccaggaagtgcccatgtgtggtccgccgtccattccacacaacatacgagcatgtttgatctacgttacgataatgcgta

SEQ ID NO: 608322 - DNA, 440 bp, Homo sapiens
tatctatgggaagggggtgtatgatgaagatggacctttagtttaatggggaaagatggattatttaggaaatcttacctaaagcaggatccctacatcatccctgtacattcattccaccaaataaatcctagttggctttattgaattgaatgtaacaagggaagccgtgaaagttctagaaggaaataggtaagtgttttcaaagtcttaggctaggaaaagccttgttaagtacgacacaaaaaacagaagcataaaaaaaggacttctaaattttgactatgttaatgaaaattagtgtttatcacagcattgtttatttgaaacagcacgtctgttaatataaatgtatgtctgtggggaaatggttaagtagattatgataaatgtgtacagccacccattctgtatataaaaataaaataaactaccacttt

SEQ ID NO: 608323 - DNA, 1358 bp, Homo sapiens
atcccagcactttgggcaggcagaggccaggtggatcacctgcaggtctggcagtttgcagacccaacatggcccaaccatggtgcaaaccgctgtctctcacttaacacaataccaaagacattcatcttgggcatggtgtgtggggcgcctgtaatcccagctcacttgtggaggccgcaggccggagcacatcgacttgaaccacatggagtcatcccatgctacttgggccagccgcaggccaggagcacatcgctgtgaaaccaacggagtgcggacggttgcacgtcaaggccacagcatccatggctattctcacacgcactgggcagagcacagagcaacaacctctgtctgcagcccaaacaccaccacacaacacagtggtctacacatcatgcagcattgtgcagcacacgaagcacagacttgtccctgcattacaatacttgttcaccgctcgtttttgccaacaactagttcgcgtatcccaacgtacaacagtatacgctacttattcccctatgactgacaccgcaattttattacagaacagacgagattagccttcagagatagggatgacacaataacgaggctcagcatgcagatcatacatacgctactatggttgtaacagccacacgtcattacgcaacgctaagaaggttcagaccatggagagggttagactccagtgcataccgcttgagcgcttgcacagtgttgcaaatatacaccgtgactctactaccactaccgttgagaacagagtaagtaccctcttagttgaaataagaactcatacccagtgagttgaaagagctccacgtcaccccacagcccaggaccgcgatccacagctaacaaacatgcaatggaccctacaccacaagaggacagaggcaacacgaacaaggggaaatatagcacaaaaccaaggccgaaacacgcaagaatgtaacaacgggaaagcacacggacaaccacgtcacaactagcacagagatcaacacaccaccacaaactaccacgacatacacagcaacacaaacacaaccaacacgagcgcgcacacatcaaaacagtcagagcataggacgaaccgacatacagccgagacaacgcaaaaaacgctaacagcgaggacgatgaacgagcaaccaacagaggttcagagacacagaacaccaggctgaatggacaccacagccagcaggagcaaaaacataagacgcaacagcgcaccgagccagacacaacgacgcacggacaacacaaggagaagcaaagcccgacacagctccagcacacaacacgaacaaaagaaactggaagagtcctgcaacgactac

SEQ ID NO: 608324 - DNA, 300 bp, Homo sapiens
ggtcaacattctgaggaggtcagcagtctcatcagtggccttcttctctcccctcctacggcatcccaaagcccacctcactgtgccctctaaaggagatcttagagctccactgacagctatatcattcagggcaattgtttaccgcatttggtaaactagttaacactggctactgatagaagggagcttggcaattactgctcggggaaaactgcaaattgctgacagttctgacagtaatcaaagggtactttaaactctgtttcctgattggccctagagagtgacgttcctcat

SEQ ID NO: 608325 - DNA, 826 bp, Homo sapiens
atggctgaaggggatactcaccggcatgaaggccgactgtgattccccctaccccctcaaggcgatttagagccccctgtagggctgcatctagtaggactcaggccccgaagtctgtcccatggatggtccccgttgcatcccaccaccttaagctgtgcctcatgtgaagtctgatgtttagacggccctgacctgaggctggcgctgcatgctgagagacctggggtgccaggacctgctttactcctcattccaggcaccctgtgcatcggatgattgtacggagtcgtgccagcggatgattcgcgttggtatttttggtccccgcagaacgcgttggcggttagtgcaacatgaagattgcacatatgcaatgattcctcttgacctcagtctattctgcggacgatcgcctgtgcgctcgatggactgctccgacatggcatgcagacgacacgggttcacatgatgcttcatccatgggtgctgacaacaagccatatcggccagtgttttaaacttgggtccttaagtgtgaggccagggcctggggatccggggctcatggggttcaacgtctatgacagtgattgccttcaattggtggtgtttcatccttgcactgataatgctgcttgccgtggatgtgctgggtgctgagcaaggctgggagctcaggctctcaatacattttggacctgcctgcttaagccctccaggccgcccactgcccgtttgacttcgtgcttcgtcaacgttctgtggccttggagctctgtgtcacggcctttgaggcccagaagccagaccccaaaagcgcctg

SEQ ID NO: 608326 - DNA, 407 bp, Homo sapiens
gtgcggcgtgggggaaaaacgtcgctctacggggccttgagaactgtcagcaaactaaaggctccgagtgacacccaggacaacacagaggtttatacctaagtcgctaggaaagactatatcattattattaagatctcacactggtgtggtacacctactagaatgtgaaccaatagcaatacatgattagtaactaaagtctatggtttacattagggtccacccctggttccgtatattctgtgggtcttgacaaatacatcatgagcaacatatatccattacagtgtcatttacttaaccacataacaaattcagacttagcaaaagggcagccagagagaaaggtcgggttaccctcaaagggaagcccatcagactcacagcggatctcctggcagaaa

SEQ ID NO: 608327 - DNA, 861 bp, Homo sapiens
gcatctttgtgctgcggctcttcatgaccccagtggccatggtgcatgtcttcctcagtatcaacctcctgctggccagcgctggggctggggttaagctgcttcttcagcgatggacagtctctgtgaagatgaatgtgctgctcttcggccctgggttactgtttcttctcctcacagcagttaggcttccgtggggccctccccaagtctgggaatctgtgctggcctacagagtggtgctggggctgcccttcctgctggagaaccccagtggctacctgtgccgggtcccgtttgaacttggtcgacagtttctgttccactggacagtgaactggcgcttcctcccagaggcgctcttcctgcatcgagccgttccacctggccctgttgatctgaccacctcacgctgctcctgctgttttgcctctgcaggtggcacaggacaggggaaagtatcttgtcagctgctgagggatccctccaaaaggaaggttccaccccaggcccttaacccaagccatgatcgtttctagcctcttcagcctccaagttcattggcactctagcttcaggcgctccctcccactaccaagttctacgtcgtggtatatccacacagtgcctaacctctgtggggcatgcctgcaggctggtcacacacctgctcaggtcgagtggtgcttggggctcatcgagcgtctcctggaacacaatacccttctcacattcctgaagtctgttgcctgcacatattgccatgccgtcatctggtgcagtcttgggctgggcccggactttcccaagagcacccaaacagaagaaggccactgaagtccaccccttttcctcaggact

SEQ ID NO: 608328 - DNA, 416 bp, Homo sapiens
gggggatggagcaaaaccgtctttgaatattgcacccggagggctgttggactccccattgtagaaattgccccctataccattgggggtcctgatcaaaaatttggggggggggggggcccggttggttttttaaaaccccaccttttttgggatccccccaaaaaaaattttaccccaaagggggtccttttgttttaattttggccacccggggagggggccgcccaaattcccggtttttttttcccaaagggttgggacccggaaaatttggccaagaaaaaagaaacttttttttttttgggggtccccccaaaaccattcaaagggtttttggtttttttttttccccattcccatttccaaagggttccaggggggtataaaaaataaacttcccccctttttttgga

SEQ ID NO: 608329 - DNA, 449 bp, Homo sapiens
ggtgttcgccctcttataatatgatacggggtaaatattgtaataaggggaacacacatcgtttgtgaagagagaagtaaatatattaccctcctctgcttgtcgtgttgtttttttgtgtctctctgtgtttaaactaatatataggggggggcacgacctccaatgcatcttctttgtgcttgtgtcgccgcccgagcgccgccctctcaatacatccgcaatgttcgctctttttgtgtggtggggaataacgtttttatagaaaaagagggggtaatattatttgttttattgtataggaaagggtggttgttggaaaatatcctctttgtataagaggggagatgcgagttgtatattgtttgttgatataagagaggagggttttttttttgtttcccccgggggggggttttacttttggggaaaaaaaaaattttattata

SEQ ID NO: 608330 - DNA, 934 bp, Homo sapiens
gcaagaggagaacacaagctacaatagtcagcctaacgaaggatgaagaggtggcagaaggaagaagataagccatacgtaagagagccggagtaaaaaagaggggaagaaaggaatgttgaatctaaaaaggaaatagtttagcttaaacaggggttacttcaaccatccgagttctgagagaagaaggacgatgatctagaaggtgacaagaatataactggtgggaggaactttcagtagtgcctcacagtaatggaattttctgaaaggtcaatcgattgagaatagaatgcagtagatcgaataactgcatagcaagtaggacacaaatggaaacctgaggcgaccagaagaacatgtaaatctaccagtaagtggaacccacatatatctcagttttgggctcaaagcaggttaatccagttactgaaaagagaatacaagttggagcaaacaagaggatgaagatcttgatacagactcattggacttgaatttcccccttggccccattggatggaagaatgttccagattctaaattgaggacttcattattcaatggcattactgttgttctgcattaacgaattttccctgtaagggtacacattaaatactaagggtccggcattcattccctgtttgagataggaaattatggcaaaaacgcgagagtttaatatcgagccttgtggttcaacggactactagaccgaaaatgagggggggaccatattatcctaaaaattttaactccatgtgggtggagaccccgtttttaacgcggggataaggattattcccggaaagaggggccccctgtatgaaaacaccgtggtggtaatcattctccaacactctaaaggttttacccaggaagaataaacggaacacgctgacagacatgtacgccatttataagcttttaa

SEQ ID NO: 608331 - DNA, 200 bp, Homo sapiens
  misc_feature (46)..(46): n is a, c, g, or t
  misc_feature (99)..(99): n is a, c, g, or t
  misc_feature (107)..(107): n is a, c, g, or t
  misc_feature (185)..(186): n is a, c, g, or t
tgtatgatagatgcactcatcagacaacagactatactgctcatcnaaatgcacagatacttgggaagcatgagttaaaaaagaaaacaaatccactgntgattatntctacttgggcttatcataaagtaggaataaagacttcactctatccatgaatactatcacagagaaaccgtcgaatnncgaggggtacgagc

SEQ ID NO: 608332 - DNA, 344 bp, Homo sapiens
  misc_feature (200)..(200): n is a, c, g, or t
aaataccccataaaaaaagaacttgttgagagtatttctttaaaatggttacttgctgcccaggcaccatggctcactcctgtaatcccagcaccttgggaggccgaggcgggcagatcacgaggtcaagagattgagaccatcctgcccaacatgggggaaaccccgtctctactaaaaataaaaaaattagctggganaggtggcacgtgcctgtagtcctagctacttgggaggctaaggcaggagaatagcctgaacccgggaggtggaggttgcaggttgcagtgagccgagatcatgccactgcactccagcctggcaacagagcgagactctgtctc

SEQ ID NO: 608333 - DNA, 105 bp, Homo sapiens
gtgttctcgccagggggtgcgaggaacccacctaaagcttttaagcaggcaagaagctgtgaagtaccagggtcctgggactttcagacacattgaaaacatgat

SEQ ID NO: 608334 - DNA, 135 bp, Homo sapiens
taaaagagcaggtgttcgtgagagagtaaggaaagcatttggacaatggacagcattgcaaggactgcaggcaggaaagagaacgggcctttgaaggaaacatggctgaaggcaaatgatggggagagtggtatg

SEQ ID NO: 608335 - DNA, 279 bp, Homo sapiens
taagcagttaatacagactcaggaacagcagcagcctccggtgtcggcccagtgatccgggaggctcagagtgtaggtacctgacggcttgattcgtccccaggaacaagggcctgtgagttgggagaggggcactctagagtgtgcgaatcttgtagacgagtgtgtgtagtgtctagggcacgagtgtagtatagcggtgtgtgtagcatgtaatatatcacggtgtggtaaaggggtagtgacatgtgtgtagtctagtagggtactagggcacat

SEQ ID NO: 608336 - DNA, 933 bp, Homo sapiens
  misc_feature (2)..(2): n is a, c, g, or t
  misc_feature (24)..(24): n is a, c, g, or t
gngcagtacaaaactcagataagngtccttaaattagcttaaaatgtccctgtcctcaacagggacatttttgtttttgtttaaaaaacagggatggttggccactgcacccagccctctactttgttttttgtgcctttctcttccatagtgtccataatgatcatgcattaattactttcatagcttaaaaaaaagttgaatgggaaaaatgggtcactgtgtatttgagaacagtactggatgcttcgtgtttggatgtgtgggtggatctgcttctttcttccatatgctctgctgtgtgctccctggctgccctgctttaattttattttgttttacaccctgcatatcttgatgtctgcttttttcctcaggtctggagcccggcactgtggtcataacagagcaggcagtggatacctgcttcaaggcagagtttgagcagattgtcctggggaagcgggtcatccggaaaacggaccttaacaagaagctggtgcaggagctgttgctgtgttctgcagagctgagcgagttcaccacagtggtggggaacaccatgtgcaccttggacttctatgaagggcaaggccgtctggatggggctctctgctcctacacggagaaggacaagcaggcgtatctggaggcagcctatgcagccggcgtccgcaatatcgagatggagtcctcggtgtttgccgccatgtgcagcgcctgcggcctccaagcggccgtggtgtgtgtcaccctcctgaaccgcctggaaggggaccagatcagcagccctcgcaatgtgctcagcgagtaccagcagaggccgcagcggctggtgagctacttcatcaagaagaaactgagcaaggcctgagcgctgccctgcacctccgcagacctgctgtgatgacttgccattaaaagcattgtcca

SEQ ID NO: 608337 - DNA, 771 bp, Homo sapiens
gctatttctcacacaattcacacacttacatcaggtgtgtaaggaattccacttcattgcactgactttctacatattagtggggctctgcacgatcttggtttctactgagtggattcactccattctgtgattttttttccttacgggtcctgcctcagttggcggaatggcggccacgggagccaatgcagagaaagctgaaagtcacaaaggtctggagcccggcactgtggtcataacagagcaggcagtggatacctgcttcaaggcagagtttgagcagattgtcctggggaagcgggtcatccggaaaacggaccttaacaagaagctggtgcaggagctgttgctgtgttctgcagagctgagcgagttcaccacagtggtggggaacaccatgtgcaccttggacttctatgaagggcaaggccgtctggatggggctctctgctcctacacggagaaggacaagcaggcgtatctggaggcagcctatgcagccggcgtccgcaatatcgagatggagtcctcggtgtttgccgccatgtgcagcgcctgcggcctccaagcggccgtggtgtgtgtcaccctcctgaaccgcctggaaggggaccagatcagcagccctcgcaatgtgctcagcgagtaccagcagaggccgcagcggctggtgagctacttcatcaagaagaaactgagcaaggcctgagcgctgccctgcacctccgcagacctgctgtgatgacttgccattaaaagcattgtcca

SEQ ID NO: 608338 - DNA, 655 bp, Homo sapiens
cagttgacgtgggttttcctttcacctaaaataaccattacaagtaagatactaagtaaaaaacatactcatttctacttggtatatgaaaataatatatgtttgatgtattcagtgaaattccagttaactcataactctttgaggccatggatggagaggtggcattattagtctctacctccagtgcctcacacaattcctgggcacagaaagagacatacaattcatgttgggtcaatcaaagaatgattgatcattggcacctcctgattctatttggtggtcagagaaagtggcaggacttaagttattttacatataaacatttcttgcaaaatttggagaggatgttttgatggcttgagatcttttaatttctttgagttactttcattgtccttcccaccccttccctctctccactctgaactgcatagggcctgcctgtagtgaactactcacttcttctgactccaaggaaggccatatcatgtgttttaagtaccccataaaatttatcttcaaagtaaagcttcctttgccaagctcacaaatgatggatttttgttttccttcggcctgagggtcaaaagaatgggcacttttgtatgtacagtcttcggggccatttcctccctcctatctactgcct

SEQ ID NO: 608339 - DNA, 159 bp, Homo sapiens
ggggagtttcccggcccgatgtctgatcaaaccgtggtgaactgtgtttttacacggtatttttcccacgaacacccccagccggggtaacattccataatgattattctcggcatcgacccgggcctgcgcacgacgggatacggcggggatcctcta

SEQ ID NO: 608340 - DNA, 390 bp, Homo sapiens
tcttccgagcccctggaccagcgcctttccctcccgcactccatcctccggccccgcctgactgcatgggcagcctggtttcctgaggaggcagagaggctgctcctcagagctcgtgggttcttcatcccgtccctgtgaaatgttagacccccggcaccttgccttgatgtggtctttgtcctttgcagcggccgtggtgtgtgtcaccctcctgaaccgcctggaaggggaccagatcagcagccctcgcaatgtgctcagcgagtaccagcagaggccgcagcggctggtgagctacttcatcaagaagaaactgagcaaggcctgagcgctgccctgcacctccgcagacctgctgtgatgacttgccattaaaagcattgtcca

SEQ ID NO: 608341 - DNA, 675 bp, Homo sapiens
  misc_feature (398)..(401): n is a, c, g, or t
tcttccgagcccctggaccagcgcctttccctcccgcactccatcctccggccccgcctgactgcatgggcagcctggtttcctgaggaggcagagaggctgctcctcagagctcgtgggttcttcatcccgtccctgtgaaatgttagacccccggcaccttgccttgatgtggtctttgtcctttgcagcggccgtggtgtgtgtcaccctcctgaaccgcctggaaggggaccagatcagcagccctcgcaatgtgctcagcgagtaccagcagaggccgcagcggctggtgagctacttcatcaagaagaaactgagcaaggcctgagcgctgccctgcacctccgcagacctgctgtgatgacttgccattaaaagcattgtccaaaatccannnntgtgtggactttgagcacactttacacaagaatctagaaaatcagatcgcgattaagagacagagaatcttggattaaccgcatgggagatgttcttccttttgaagtttcattggagcattttcaatgatgttagcctgatttggggtttcttcaagaacattctaccaaatttttgtactatttctagggaaatttttcaggactttaaaattctaatggtagtcagatttcatgtcactaaacagaaatctgacataggacaagcaaccat

SEQ ID NO: 608342 - DNA, 1377 bp, Homo sapiens
  misc_feature (25)..(25): n is a, c, g, or t
  misc_feature (36)..(36): n is a, c, g, or t
  misc_feature (53)..(53): n is a, c, g, or t
  misc_feature (73)..(73): n is a, c, g, or t
  misc_feature (100)..(100): n is a, c, g, or t
  misc_feature (112)..(112): n is a, c, g, or t
  misc_feature (120)..(120): n is a, c, g, or t
  misc_feature (125)..(125): n is a, c, g, or t
  misc_feature (181)..(181): n is a, c, g, or t
gacctcgcaagtggttccctcattngagtgctccgngcgcacagacccgcgcnccgcgcgtccgcgagcctcnccgagagccgtcccttcgtccggcccntggagcattgcngtttgtcngccgngtgtcgcagtgcgaggatggcgccgcggggtgtagctggtctctctgcgcaggccngagtgggcccagaagaagcgaggaactccgcagctcgtcgacacgtctcgtctcctgtcccaattcagggcttggtgaggtgactcgcggtcgcgggtgactcgccggcaggacactgcctggaacgcctggagcgcctcccactgcagacgtctgtccgcctccagccgctctcctctgacgggtcctgcctcagttggcggaatggcggccacgggagccaatgcagagaaagctgaaagtcacaatgattgccccgtcagacttttaaatccaaacatagcaaaaatgaaagaagatattctctatcatttcaatctcaccactagcagacacaatttcccagccttgtttggagatgtgaagtttgtgtgtgttggtggaagcccctcccggatgaaagccttcatcaggtgcgttggtgcagagctgggccttgactgcccaggtagagactatcccaacatctgtgcgggaactgaccgctatgccatgtataaagtaggaccggtgctgtctgtcagtcatggtatgggcattccttctatctcaatcatgttgcatgagctcataaagctgctgtactatgcccggtgctccaacgtcactatcatccgcattggcacttctggtgggataggtctggagcccggcactgtggtcataacagagcaggcagtggatacctgcttcaaggcagagtttgagcagattgtcctggggaagcgggtcatccggaaaacggaccttaacaagaagctggtgcaggagctgttgctgtgttctgcagagctgagcgagttcaccacagtggtggggaacaccatgtgcaccttggacttctatgaagggcaaggccgtctggatggggctctctgctcctacacggagaaggacaagcaggcgtatctggaggcagcctatgcagccggcgtccgcaatatcgagatggagtcctcggtgtttgccgccatgtgcagcgcctgcggcctccaagcggccgtggtgtgtgtcaccctcctgaaccgcctggaaggggaccagatcagcagccctcgcaatgtgctcagcgagtaccagcagaggccgcagcggctggtgagctacttcatcaagaagaaactgagcaaggcctgagcgctgccctgcacctccgcagacctgctgtgatgacttgccattaaaagcattgtcca

SEQ ID NO: 608343 - DNA, 1019 bp, Homo sapiens
ccactcaccagggggccttgttaaagcagattcctgggccccttagattcagcaggtcctggtgaggccagtgaacttatatttttagcaagttcattggtaatactgatgttgctggtctaggggccccacttgaggacctctgctatagacagtgcactaatgggggtctctcttctctggctgcagtttgtgtgtgttggtggaagcccctcccggatgaaagccttcatcaggtgcgttggtgcagagctgggccttgactgcccaggtagagactatcccaacatctgtgcgggaactgaccgctatgccatgtataaagtaggaccggtgctgtctgtcagtcatggtatgggcattccttctatctcaatcatgttgcatgagctcataaagctgctgtactatgcccggtgctccaacgtcactatcatccgcattggcacttctggtgggataggtctggagcccggcactgtggtcataacagagcaggcagtggatacctgcttcaaggcagagtttgagcagattgtcctggggaagcgggtcatccggaaaacggaccttaacaagaagctggtgcaggagctgttgctgtgttctgcagagctgagcgagttcaccacagtggtggggaacaccatgtgcaccttggacttctatgaagggcaaggccgtctggatggggctctctgctcctacacggagaaggacaagcaggcgtatctggaggcagcctatgcagccggcgtccgcaatatcgagatggagtcctcggtgtttgccgccatgtgcagcgcctgcggcctccaagcggccgtggtgtgtgtcaccctcctgaaccgcctggaaggggaccagatcagcagccctcgcaatgtgctcagcgagtaccagcagaggccgcagcggctggtgagctacttcatcaagaagaaactgagcaaggcctgagcgctgccctgcacctccgcagacctgctgtgatgacttgccattaaaagcattgtcca

SEQ ID NO: 608344 - DNA, 1662 bp, Homo sapiens
  misc_feature (25)..(25): n is a, c, g, or t
  misc_feature (36)..(36): n is a, c, g, or t
  misc_feature (53)..(53): n is a, c, g, or t
  misc_feature (73)..(73): n is a, c, g, or t
  misc_feature (100)..(100): n is a, c, g, or t
  misc_feature (112)..(112): n is a, c, g, or t
  misc_feature (120)..(120): n is a, c, g, or t
  misc_feature (125)..(125): n is a, c, g, or t
  misc_feature (181)..(181): n is a, c, g, or t
  misc_feature (1385)..(1388): n is a, c, g, or t
gacctcgcaagtggttccctcattngagtgctccgngcgcacagacccgcgcnccgcgcgtccgcgagcctcnccgagagccgtcccttcgtccggcccntggagcattgcngtttgtcngccgngtgtcgcagtgcgaggatggcgccgcggggtgtagctggtctctctgcgcaggccngagtgggcccagaagaagcgaggaactccgcagctcgtcgacacgtctcgtctcctgtcccaattcagggcttggtgaggtgactcgcggtcgcgggtgactcgccggcaggacactgcctggaacgcctggagcgcctcccactgcagacgtctgtccgcctccagccgctctcctctgacgggtcctgcctcagttggcggaatggcggccacgggagccaatgcagagaaagctgaaagtcacaatgattgccccgtcagacttttaaatccaaacatagcaaaaatgaaagaagatattctctatcatttcaatctcaccactagcagacacaatttcccagccttgtttggagatgtgaagtttgtgtgtgttggtggaagcccctcccggatgaaagccttcatcaggtgcgttggtgcagagctgggccttgactgcccaggtagagactatcccaacatctgtgcgggaactgaccgctatgccatgtataaagtaggaccggtgctgtctgtcagtcatggtatgggcattccttctatctcaatcatgttgcatgagctcataaagctgctgtactatgcccggtgctccaacgtcactatcatccgcattggcacttctggtgggataggtctggagcccggcactgtggtcataacagagcaggcagtggatacctgcttcaaggcagagtttgagcagattgtcctggggaagcgggtcatccggaaaacggaccttaacaagaagctggtgcaggagctgttgctgtgttctgcagagctgagcgagttcaccacagtggtggggaacaccatgtgcaccttggacttctatgaagggcaaggccgtctggatggggctctctgctcctacacggagaaggacaagcaggcgtatctggaggcagcctatgcagccggcgtccgcaatatcgagatggagtcctcggtgtttgccgccatgtgcagcgcctgcggcctccaagcggccgtggtgtgtgtcaccctcctgaaccgcctggaaggggaccagatcagcagccctcgcaatgtgctcagcgagtaccagcagaggccgcagcggctggtgagctacttcatcaagaagaaactgagcaaggcctgagcgctgccctgcacctccgcagacctgctgtgatgacttgccattaaaagcattgtccaaaatccannnntgtgtggactttgagcacactttacacaagaatctagaaaatcagatcgcgattaagagacagagaatcttggattaaccgcatgggagatgttcttccttttgaagtttcattggagcattttcaatgatgttagcctgatttggggtttcttcaagaacattctaccaaatttttgtactatttctagggaaatttttcaggactttaaaattctaatggtagtcagatttcatgtcactaaacagaaatctgacataggacaagcaaccat

SEQ ID NO: 608345 - DNA, 987 bp, Homo sapiens
  misc_feature (25)..(25): n is a, c, g, or t
  misc_feature (36)..(36): n is a, c, g, or t
  misc_feature (53)..(53): n is a, c, g, or t
  misc_feature (73)..(73): n is a, c, g, or t
  misc_feature (100)..(100): n is a, c, g, or t
  misc_feature (112)..(112): n is a, c, g, or t
  misc_feature (120)..(120): n is a, c, g, or t
  misc_feature (125)..(125): n is a, c, g, or t
  misc_feature (181)..(181): n is a, c, g, or t
gacctcgcaagtggttccctcattngagtgctccgngcgcacagacccgcgcnccgcgcgtccgcgagcctcnccgagagccgtcccttcgtccggcccntggagcattgcngtttgtcngccgngtgtcgcagtgcgaggatggcgccgcggggtgtagctggtctctctgcgcaggccngagtgggcccagaagaagcgaggaactccgcagctcgtcgacacgtctcgtctcctgtcccaattcagggcttggtgaggtgactcgcggtcgcgggtgactcgccggcaggacactgcctggaacgcctggagcgcctcccactgcagacgtctgtccgcctccagccgctctcctctgacgggtcctgcctcagttggcggaatggcggccacgggagccaatgcagagaaagctgaaagtcacaaaggtctggagcccggcactgtggtcataacagagcaggcagtggatacctgcttcaaggcagagtttgagcagattgtcctggggaagcgggtcatccggaaaacggaccttaacaagaagctggtgcaggagctgttgctgtgttctgcagagctgagcgagttcaccacagtggtggggaacaccatgtgcaccttggacttctatgaagggcaaggccgtctggatggggctctctgctcctacacggagaaggacaagcaggcgtatctggaggcagcctatgcagccggcgtccgcaatatcgagatggagtcctcggtgtttgccgccatgtgcagcgcctgcggcctccaagcggccgtggtgtgtgtcaccctcctgaaccgcctggaaggggaccagatcagcagccctcgcaatgtgctcagcgagtaccagcagaggccgcagcggctggtgagctacttcatcaagaagaaactgagcaaggcctgagcgctgccctgcacctccgcagacctgctgtgatgacttgccattaaaagcattgtcca

SEQ ID NO: 608346 - DNA, 1267 bp, Homo sapiens
  misc_feature (25)..(25): n is a, c, g, or t
  misc_feature (36)..(36): n is a, c, g, or t
  misc_feature (53)..(53): n is a, c, g, or t
  misc_feature (73)..(73): n is a, c, g, or t
  misc_feature (100)..(100): n is a, c, g, or t
  misc_feature (112)..(112): n is a, c, g, or t
  misc_feature (120)..(120): n is a, c, g, or t
  misc_feature (125)..(125): n is a, c, g, or t
  misc_feature (181)..(181): n is a, c, g, or t
gacctcgcaagtggttccctcattngagtgctccgngcgcacagacccgcgcnccgcgcgtccgcgagcctcnccgagagccgtcccttcgtccggcccntggagcattgcngtttgtcngccgngtgtcgcagtgcgaggatggcgccgcggggtgtagctggtctctctgcgcaggccngagtgggcccagaagaagcgaggaactccgcagctcgtcgacacgtctcgtctcctgtcccaattcagggcttggtgaggtgactcgcggtcgcgggtgactcgccggcaggacactgcctggaacgcctggagcgcctcccactgcagacgtctgtccgcctccagccgctctcctctgacgggtcctgcctcagttggcggaatggcggccacgggagccaatgcagagaaagctgaaagtcacaatgattgccccgtcagacttttaaatccaaacatagcaaaaatgaaagaagatattctctatcatttcaatctcaccactagcagacacaatttcccagccttgtttggagatgtgaagtttgtgtgtgttggtggaagcccctcccggatgaaagccttcatcaggtgcgttggtgcagagctgggccttgactgcccaggtagagactatcccaacatctgtgcgggaactgaccgctatgccatgtataaagtaggaccggtgctgtctgtcagtcataggtctggagcccggcactgtggtcataacagagcaggcagtggatacctgcttcaaggcagagtttgagcagattgtcctggggaagcgggtcatccggaaaacggaccttaacaagaagctggtgcaggagctgttgctgtgttctgcagagctgagcgagttcaccacagtggtggggaacaccatgtgcaccttggacttctatgaagggcaaggccgtctggatggggctctctgctcctacacggagaaggacaagcaggcgtatctggaggcagcctatgcagccggcgtccgcaatatcgagatggagtcctcggtgtttgccgccatgtgcagcgcctgcggcctccaagcggccgtggtgtgtgtcaccctcctgaaccgcctggaaggggaccagatcagcagccctcgcaatgtgctcagcgagtaccagcagaggccgcagcggctggtgagctacttcatcaagaagaaactgagcaaggcctgagcgctgccctgcacctccgcagacctgctgtgatgacttgccattaaaagcattgtcca

SEQ ID NO: 608347 - DNA, 939 bp, Homo sapiens
  misc_feature (6)..(6): n is a, c, g, or t
  misc_feature (133)..(133): n is a, c, g, or t
agtganaaagcagtgtacgtcgcatccgctcgcgacaacgcccgctcgcgactccaactcctctcgccgacatgctttccgttccaggcgaggatggcgccgcggggtgtagctggtctctctgcgcaggccngagtgggcccagaagaagcgaggaactccgcagctcgtcgacacgtctcgtctcctgtcccaattcagggcttggtgaggtgactcgcggtcgcgggtgactcgccggcaggacactgcctggaacgcctggagcgcctcccactgcagacgtctgtccgcctccagccgctctcctctgacgggtcctgcctcagttggcggaatggcggccacgggagccaatgcagagaaagctgaaagtcacaaaggtctggagcccggcactgtggtcataacagagcaggcagtggatacctgcttcaaggcagagtttgagcagattgtcctggggaagcgggtcatccggaaaacggaccttaacaagaagctggtgcaggagctgttgctgtgttctgcagagctgagcgagttcaccacagtggtggggaacaccatgtgcaccttggacttctatgaagggcaaggccgtctggatggggctctctgctcctacacggagaaggacaagcaggcgtatctggaggcagcctatgcagccggcgtccgcaatatcgagatggagtcctcggtgtttgccgccatgtgcagcgcctgcggcctccaagcggccgtggtgtgtgtcaccctcctgaaccgcctggaaggggaccagatcagcagccctcgcaatgtgctcagcgagtaccagcagaggccgcagcggctggtgagctacttcatcaagaagaaactgagcaaggcctgagcgctgccctgcacctccgcagacctgctgtgatgacttgccattaaaagcattgtcca

SEQ ID NO: 608348 - DNA, 886 bp, Homo sapiens
ggagtctttctctgttgcccaggctggagtgcagtggtgcaatcttgaatcactgcaacctccgcctcgcgaattcaaatgattatcctgcctcagcctcctgagtagctgggattacaggggcgtgccactatgtccaactcagttttttttttttttttttccccgaaacggaatctcactctgtggccaggctggagtgcagtggcgcaatctcggctcactgcaacctctgcctcccaagttcaagcaattctcctgcctcagcctgctgagtagctgggactacaggtgtgcaccaccacgcccagttaattttggtatttcagtagagacggggtttcaccatgttggccaggatggtctcgatctcttgaccttgtgatccgccctcggcctcccaaagtgctgggcattacaggtgtgacccaccgtgcctggcctaaattgggctttcttacgtccagacgaggtttcaccatgttggccaggctggtctcgagctcctgacctcaagtgatctgcccgcctcggcctctcaaagtgctgggatcacaggctgatccatctgtgccggcctgcttgctcttttttaaccctttactcttgtcacccgtgcagattctggccagtgcaccacgcagcggcgcttccattttgtttgggcgcgtctgctccccagcgttcccggcggacgactgtggtcttgacgcgcatacatggcgccccctacgggctgtgaacccccgggccacggctgtgcgactccttcccggccgtgggtctttcgggccgtgccggccccccccggcgcgtcgttgacggtcccccagtgtcgaggcgctgttggctctgctcgtgcctgtgcccggtccgcgcccggcct

SEQ ID NO: 608349 - DNA, 377 bp, Homo sapiens
  misc_feature (58)..(58): n is a, c, g, or t
cctggactgcctggggccctgccatttgcttcccctgctgtcacctggctccccctgntggggggtgggtttccatttttccctcccccccccctcagcagcatttgctttccatgccctccccatcacctcactgcccccaggccttttgccctttgtgggtgttgagctccccgcccccccccaggccctcatgggaaaaggctttccttttgggatggcggcgggtggtaaacccctttgctttttctagccctcctgggctggggttgggcccaaatccccaggcaggctttggagttgtttccctggtgatggggcccaatgtatagtattcagtatatattttgtaaataaaatgttttgtggctagggga

SEQ ID NO: 608350 - DNA, 1056 bp, Homo sapiens
  misc_feature (1016)..(1016): n is a, c, g, or t
tccactaaacctgggggggctgttggagatatggggtatatggcagggggttctaatattcgactaatggtggtagactagaattggatggcccctaaaataaagagaaacacctgctaggtgtaaggaaaaaatggttaggttctacggaggccccagggttggcgagttagttcccctgtgactacgggcgacgggtaacacttgttcaacctgtgtcccttgcctccggccttccacttattagcagatgcacagcaggattaggagaagcagggaggtaaggagctcaaaaagctatatgttggctaatagtgcgggcgaaaagggcccaatatgcggggagaccccgaattattaaggggcgcaacctaagatacaggtgtgccaaaaggccctccgaaatataatgcagtggagctaataacctaagtgaaagaaaagaactttaattaacacacaaacgtgacatgtgagagcgtgatgccacatcaatacagcgtgtttctgaatcaaaattttgttcgtactccaaggtacaccctataaaaaaaaggtgatttagcctaatgagcatttagggcccacaaagttttatccagagctatcgaaaaataaacaagagagatcgtctataaacaacagcatatgtgacgcacatagaaaaaactctatacccaagagatcatacattgtagcgggccccgaggacaaataaccaactcagggcgaattacattaagacgctgtatcacccccaaacagatgtgctatcaataaatgaagaggaagcgaatattgttgagaagagaaaagagacaaaattgaagaccacacgcacgcgagaatcgacggacaccagaatttcccccaccgacctctacataaccctcaccatcgagaaacaaacaaaaagcccgtttgataaggcgcacacaaaacgaacaattttattacccccccccacaatacatacaacaggatcaaatcaagaggacgaaagacaagacaaccantttggaaaccacccgtagttggcacccaacacacgaaact

SEQ ID NO: 608351 - DNA, 338 bp, Homo sapiens
ttacaacccacgatcacagatctatctgagcaagctgtaccagtacactttacagtcttaaaaatggaggttatatactcagaggcaatataatttgtccatattatatattttatctgtgcgtcatagcgtttattaccatgtgtttatattcacacatagtcgtgtgttaatatgctaggggggtcttttacatggttgttgggcggcaggttgtgacacaccatctgacacagaatatctgatatgaaatttagggatctcttaagtattttgggtgttgatgtatattttcctaatatttatgctgtctttatgatactctccagatttttaaa

SEQ ID NO: 608352 - DNA, 203 bp, Homo sapiens
tcttgctgtatatattttcccataaggaatcacctcgtttggttaaaaaataggtaatgtgttaggaagttccaaagatattaaaaatggcaatttttcaaaataattttttaagtgcactgatgacaaatgggaactaagcagtaagccagatgaggcataagttagaaaaatatggtgttgtttttctgtatcgtcgacgc

SEQ ID NO: 608353 - DNA, 197 bp, Homo sapiens
catagtcagttcagtgtaaatcatctgacgcaggcttatgcaggaggagaatgtatacatgttaacttatcactaacattagttctactatagggtgcatagataggtccaattgggtgtgaggcagtcagtcatatgtttgggcattcttcaggtagtgggtgttgcgcttgaacgctttcttacttggtggctgc

SEQ ID NO: 608354 - DNA, 917 bp, Homo sapiens
tggcattttgcgccgggtctgtgctggtcgcgacgcctggcgctccacgctgagcctctccgtgcagtgattaacccggcgggtcagggcggatgtgaaccagacatccagtagagcaactctgtgtcggagatgacagttctgccccgagcctcgagaggtttcgtgcgactcgtccgaaccagggaccacagcaggaaccttgcaggtatccatcaccggttgtaccacgttcagtgtcgctgtgtacctatggtgaattgtacgtgaagtgagctcagcatcggcatgatgtatggcgttttgtatatcgtagccagcaggacccatatgagacttataacagctcggagcatgaaccaagtaggggagaaatgaacatagctggtaagtgacagtgggtagaagtaccgatatagtgcaatagagtgagtatacgaggtctaagagatacgtgtagggagtggacgaattgatgtacattggggatgtttgaaggaccatatggagaaggaattactgaagagtaccgtggagaaaacgaagatcaggatctaggattccgcaaacgaaaaagctcgaggatgctacggaaaggtccaactacatcgtagaggtagcaaatacccatttggtcactagcaaggcaagagaatttgttaacaaccgtcaagcatatggagcgttcattgaccgcacaggtgaacgttaatagtacaaaaaaatgggagtgaacaccggtaaaattgtacaaagggaaaacaaaagtggagatacattcgctttgacttgtggggtttgtgaacaaatagttgtgtaattagtaaagattggtggattggggatatatgaaaaaggtatgcatataaatgtatgtgtataaaatttaaatataagagacgcaaaatataaatgat

SEQ ID NO: 608355 - DNA, 314 bp, Homo sapiens
gatgggctcatgtcaggaaacagtttccatcatatctgcaaatactctacatcacacactctagttaaaggcaacgcacataggtaaagctgatcacacgtccagagttctcagcttacggaatctagcttctggattttatgttaatttctgaaaatcagaaatgtcatctccaaaaaatgttacgagggttgtaaaaaataatcactttatttgatattatagttgtagatatggaatatattttaatgaaaaactcaaaacagcaaaatgccactcaccatcatgggtatagcaataggccgcatccaaag

SEQ ID NO: 608356 - DNA, 122 bp, Homo sapiens
cgtgtacgatgggcacacacacacacacacacacacacacacacacacaccctatctcctagcccctgtcagtgtagcattttctcagtccactaggtcgtgacactcgctcatattcctac

SEQ ID NO: 608357 - DNA, 127 bp, Homo sapiens
ggcctgacgattgaagagctgaatatcccctctattttgagtaggaatagatattgaatactccgccatacaattggaaacgcatcatctagtactagcaggcattatgattacccggtttgatatc

SEQ ID NO: 608358 - DNA, 540 bp, Homo sapiens
  misc_feature (178)..(178): n is a, c, g, or t
  misc_feature (181)..(181): n is a, c, g, or t
tcaaaaggagatgttgtttgctactatggaaaccggggggagcctgagcctattgtcttgacaccaggctgaccttcttcctataggaacctatgggctaagcaatgccctgctggagacgccctggaagaagctgtgctttggcaaacaactcttcatggaagcagtggagcagagntanactccctaaggacgtccttgtcactcagctcctagatgtcctcaacaatgaggaggcacagctgccagacccagccattgaggaccagggccaggagtatgtacagccaattctgaacaagtatgcagctgtgtgtgtccgctgtgccacctatggcaccagaaccaacaccatcatccttgtggatgcaaatggccacgtgaccttcactgaacggagcatgctggacaaagacactctcgctgggagaccaacaccctatgagttcacactacagagttagcccctgccaggttccaaggatgctgttctgaagggcaacgtggacaggaactttcacgggcactctgcaagtcttg

SEQ ID NO: 608359 - DNA, 470 bp, Homo sapiens
  misc_feature (4)..(4): n is a, c, g, or t
  misc_feature (339)..(339): n is a, c, g, or t
  misc_feature (346)..(346): n is a, c, g, or t
  misc_feature (386)..(386): n is a, c, g, or t
  misc_feature (445)..(445): n is a, c, g, or t
  misc_feature (460)..(460): n is a, c, g, or t
gtgngagggagaaggagaaggagaaggggggggggaggagaaggggggagggggattgtaggggggggaggggggggggaggaggagaaggaggagggtgggggggggggttgggttggggtgggtgaggagttggggggggggggagggggggaagggggattgatgtggaggtggggggtgtggaagaaaggtggggtgtgggggggtgatggaaaggggggttgtaagtggtggggtggggattgggtgttgtgggaagtggggtgggtgggaaggaagggaatggggaagaaggggagtgaaggagagatagaggagggggtttagtggggggangtgtatntgttgggggatgagggaatgaagggggtggagagatggantgtggtggtatgaggggtggggggggtgggggtggagatgggtaaaaagatgatggttngtggggtgaaaggtnttagggtaga

SEQ ID NO: 608360 - DNA, 818 bp, Homo sapiens
atcgagcacgagggctgactcaggatgatatggggcacccagagataggagatgctattgcccggctcaaggaggtcctggagtacttctgccatatggaggcaagtataaccggggtttgacaggttggatagtagcattaccgggagctggtggagccaaggaaacaggatgctgatagatctcccagcggagacctggacatgatgaggctggatgatgtgtgaacatgctgcaaagcaatttcattccatggatggcaagatgacaacatcatgagtaattcagtcaccttaaccacgaccggggacaagaatctagctgtgatattcagcaagcacgaggcgatggagtttggagtgcacaatcacatgaatgctaacactcacatggaaagcatgtatctaccagactgactgaagctctattgacgggagacagaaccatatatacacttgaaccatgaatcgagctctatccatgcagagattaccatatcaagacttgagaatagggcagaacccatggaaccgtccatacaaaagacgccccagggcaaatgttggatcatagatacagaataacactgaacaacagcaggtacaacatctaatatggtacaaggtacgaagaacagattaagaataaatcactttcctaacactgtacctgatagaatagtaaagacatggttacaattggaaagggaatataggatggagggaagaagggagaacaacaaatgagaaaagaaagaaacctagatgagaaaatgggaagaaaaaataacaaaataaggatgaatgaataggaaatta

SEQ ID NO: 608361 - DNA, 309 bp, Homo sapiens
taaatacattggctggatctgcttctgcatgtccgccattccggcaatacgacctgcgcatacctggtcatttcgtcggtgctgccagatggccaagggagatcgatacgaaagatctcatagccatcgtcagcgccaccacagaatacgtgtatgggtaggctaatcccacatccaatagacccatgtattctgggaaacgagaccatgtgcctctgccttgggatcaggccaactgagcttcgcgtagacgaggagggcatggacgtgatttggcctagccagtcaccgtaagcgaggcaatcgaat

SEQ ID NO: 608362 - DNA, 838 bp, Homo sapiens
agcggggactcgtggctgcggcgtcagccttcttcggggcctcggcagcggtagctggctcgctcgcctcagccccagcgcccctctggctaccctctgtgcccagtgcccgcaagctgcctgccctgccctctggcctgcccctgacgccgtgcctggtgcctgctggcctgcagcccctgtggctcgcgtatcgcgcctgacctgctccctggccctgccccctatgggcccccggctagatggtgcgcctgcccgcccgccggcccgcgagaggcccccgatgctggccccggacggaaagccggtgctggccggcgcatcaccaatcaagccctacacaagtctggcagagggcccaataaccactagccagcagagggccgccataccgaggacaaaaccttgggtgggacctgcacgaacagaaagccctggacaggaagcctgcgacagccgtatgaccgaggcagccagcacacgaaccgcgggatgagaacagccctttcatcaaacccaagaaaacagcccaaaggatcgggccacaaccatacaagaggaccgaagtgcaccgatcgcacacgggattcatcaggaaggccatggagcggccggggcccaaacggcgcaggcgaggatggaggtaacgaacacaaaaacagtccaaagaataaaaaaacacacccactacggagagaccaaaccaatcaagttcggaccccagcagaaaagcccagacacaccgagcccacaagcgaacgaaccaaaagaccgaggaacatacacgacgaagcaccaagaatcaagtccgcggcagaccagatgcaggaaccaagaa

SEQ ID NO: 608363 - DNA, 304 bp, Homo sapiens
  misc_feature (17)..(17): n is a, c, g, or t
  misc_feature (105)..(105): n is a, c, g, or t
  misc_feature (199)..(199): n is a, c, g, or t
  misc_feature (229)..(229): n is a, c, g, or t
  misc_feature (293)..(293): n is a, c, g, or t
aggaaaccacagaagancaagacaaagcacaagacaccaacggcaacagggaaacctggaggggccagcaagaagagtgtaggaggcccaagcaaaccagagagnccaagaccatagccaaaagggcctttggaacctggacaaagctaggccgccggcaacatataaatccagcagagggctgagaagcatctgtctnccatcccacaagcctgtcccaagatatggnccaaaatttaaaaatttgttgtaaactgcatgttttagaaaataaaaataaaagatcgtttgtnagtcatcccaa

SEQ ID NO: 608364 - DNA, 183 bp, Homo sapiens
  misc_feature (30)..(31): n is a, c, g, or t
tcaataatagttttgatgcatttgccacgnnatcccaccatcattcggatttgttcaacccaatgctgcttcaaaaaaatggtggaatattgataggtagtatgagctatgatttcaccgtccggcgatattaatgtggatttatttccgcttgtcccaagatcaatgaccaacaatttattg

SEQ ID NO: 608365 - DNA, 175 bp, Homo sapiens
gtgaaactgaagctcagaaatgtcagcaagcattcccgataaacagtaaatgtataaggtaggactaggcttactaaagaccatagtcatattaaagcagcagcacactacggtgctacaagataaaatacagccatagggccaatggcaattgttgtatgaaacattgtaactt

SEQ ID NO: 608366 - DNA, 116 bp, Homo sapiens
  misc_feature (74)..(74): n is a, c, g, or t
tagtggtcaactgtatcattgtttggatgcagagagtcacagatcgctgttttttgagtcgaaggttgtcaatncagaaagtcatctttaattgtaccattcagattactggagag

SEQ ID NO: 608367 - DNA, 243 bp, Homo sapiens
tgggcttgattcaggattaaaaaactggaccggtgaaggtgacagcagtcggttggagcgagcatcccccaaagttcacaatgtggccgagaacttgtgatggcacatggtggttttttaaatagtcatcccaaatatgagatgcgtggtaacaggaagtcccttgccatcctaaaagccaccccatttctctctaaggagaatggcccagtcctctacaactgtacctgtgtagaaatagaa

SEQ ID NO: 608368 - DNA, 409 bp, Homo sapiens
acaatttacaaatgagttagtaagtaacataagtaaagaaagaatatcaagtagcaacagagataactcaaacagttacaaaagagattaggttcccaatcagtatcacaaaagctaattaaaagaatgtagcttaactacagtactgaggttgtcacacacttaactatacgagatactcttgcttatatattcatatctgaggttcactgtttcaactaggatacattccgcccacacccacaccttggtccccacatcaagcagctcctcacagcaggaagacatccgctatacagacatggttttctagaagttagtgcttaggatttcacaggaggaaaaattcagaggttctaatagccttcggtaactgaggtagaatatggagctcccaagaatatcttcc

SEQ ID NO: 608369 - DNA, 460 bp, Homo sapiens
cccacacaagtcctgaaccacatcttatgcccagccccataaataatattgaaaggttgctcatagacacttggtgctttctcatacaccatgaaaatcgaacctccccctctacgcagttacaccatcaatccccattacaacctctgacagctgccgccgtagctggatccctaggagtctgggtacaagacaccacttttagtactctttctcatcttttcactttgcatttccagttttgccttgcacaaggtctcttatcgctctgtggctcctctacctacatgtgtttacctgctaaatggacaggcacatgcacactagttttccttactcccaaaattcaatttgcaaatgagaccaaacagcttcctgttctcctcatgacacgaacacttcactactagttttgtttttcttattattaatatagaaaggcaggaataggcctcaactt

SEQ ID NO: 608370 - DNA, 194 bp, Homo sapiens
ggtgcacacctgtagtctcagctacttgggaggctgaaatgtgagggtcacttgagcccaagagatcgaggctgcagtgagccttgatcacaccactgcactccagcctgggtgacagagcaaaaccctgtttaaaaaaaaaaaagttgaaaaaatcacttgaataaaataaaaatcaagtaaacatgttagac

SEQ ID NO: 608371 - DNA, 222 bp, Homo sapiens
ggacaaaggtaaagctgccagcacatagttaggggatgaatgagtgtatctccttaaaaaggctgggacatttagttaaccttttgttaaaggttttttattcagttaacagcttaaattgaaacacttttgcttttcagttccctgtggaaagtttggctttattgtagtttaaggcttagagaaatttaaaggaaaaacacccaaccatctatgggcagg

SEQ ID NO: 608372 - DNA, 458 bp, Homo sapiens
atcgggatccctgccttctcatctccctcagatggacgtccttgcccccaactcaaaagcatcagggtttgcagaaggctctggagcagcccgctcacctggcggccacctcccaaccagctcagaggcgcctctcgcagttcagagggagcagcacacagactggaactgcgttacgaggagcagctactgagctgggcaaacgttcaaaatggtttagagaagagaaacctcctcagaaccaactccaggtttgccccatctgctgacagcacgaagcacttccggtggggccgtctgtctctcgttctctgttgctctcccctctcctctccccagtgcctgccagtgcggccgtcactccctgggggccctaaagccgcctccagagaggccctttgctcacagtttgcaccttttatctcttggcccctaaggggtctgagccgcacagccca

SEQ ID NO: 608373 - DNA, 217 bp, Homo sapiens
cacgaggatcatctttacttccccattgaagaggtatttgttttgcacatttgggaccattaagacgagtttatcccccactaaagataactcacacccccaaactcaccagtctaagggaaccttcacagggggaaactaggaggctccagcactgtcaggtcacactcctttctacactatgcaaccctctagggcttcttccagggctgttgca

SEQ ID NO: 608374 - DNA, 972 bp, Homo sapiens
tgttttttcgtggtcattttaacaacaaaggaacaaagtttgattacgaaactagttggtataaaacagggttatacatattttggtaagcttggtaataaaaacagtaacgaaaaaaaaaggcagtaactagaaactctccaaaaggcaacctactcaaaaccaacggggctgccactttgagcttgtggacagtagctgcataaactctggctccttcttgaaacagctattctaagtaagcatcatcaatacattaacacacatttctataaagtaagacacatgggtgctgaagtacaacctgggggcctctggatctcacctatgaggagaagtctctttacaaaaccacatagggcaaaattgcagcttgtaaggtgaactacacatctaacaactatgccagaggctaactagcattacagtgttcaaagctatcacgactataccccattttaaaccatctgggtacaaaacttctataacattttccctctctcttgctctcttagtgtacaaaaaatactctttaactatactcccccgaaacgtgggtcagcgactacgcatacaaattacgattccctaactacagtacaaacaactcccccaacaaagcatgggcaaagccattcctatacactgaccaacacgggtcacaacaaacaacccgtgctgcacaggaacacgcccagggcgggctctgcgccagcacactcgcggcccccctggcacggcacacacaagcccccgcacgctccaccaacacgcgcgccccgcagcaacatctagccccaatagccttctcccccgggcctaacagccccacagacgtggctccttaaccagggcttctaaatcgcgagagaacggagggccctacccgccccaaccgaacacgaaaccccaaaacccggcctacctaagaaggcgcctccacaaacacccggcgcccctcacaccgcaccg

SEQ ID NO: 608375 - DNA, 193 bp, Homo sapiens
gtcaaaggtgataaaatcaaagaacttcgagagaacactcataaacacacatacaagacttttacaggaatgactgtaactcattaacactgaacagagttgttacttattggaggaaaaacccgatagttgttgagagtgacataaagatacataacttgatacttatatactgagtactaccatacagagg

SEQ ID NO: 608376 - DNA, 178 bp, Homo sapiens
ggcccgggtgaaccaggtattctttttttaaaacaaggacctgggtttttggggggggccggtttaatcccataaaaaaaaaggggcccttaaggtaaagccaaacctttttttcctgattaaatggtagatgtagcctttccaatataattcaataataaaaagtaattaccctcta

SEQ ID NO: 608377 - DNA, 411 bp, Homo sapiens
  misc_feature (272)..(272): n is a, c, g, or t
gagaaagcagaatagtgaccaattcaccatgatacagaataaagggatttagctttatatttttagtcattgtataatagtatattagaacacatttcaaagacttatttcatgcccttctgataaatacagaagagtaagacacaactattcaaacagaggaattttatacaatgagtggttgaattccagcttagatcaaatgaattgtatcaatgtatcttgagacaatgctatgtatcaagaagcatttcaattgcagaatatatganttaaaagctcatttttctttgttgggtgcagtggttcaggcctgtaatcccaggattttgggaggccaaagtaagcagatcacttgaaccctggagttttgagaccagcttgggcaacatggcaaaacccaatctctac

SEQ ID NO: 608378 - DNA, 818 bp, Homo sapiens
gcaggcaggagctagggccggatgaggcagggcagagcagactgatgagtcgttggaacaaaatgactccttttttttttctcttggtttttccaagacacagtctcgctctgttgcccagtctggagtgcagtggcgcagtctcggttcactgcaacctctgcctctcgggttcaggccattcgtcgtgcatcagcctcctgagagctgggactgcaggcgcctgccaccacatccggttgatttttgtatttttagtagagatggggttttgccgtgttggccaggactggtcttgaagtcctgagctcaggtgatctgcacaacctcgagcactcccaaagttactgggataacaggcgtagagaccacggtgccaagactggttcctgatattaagagacagggtaacacccgtgtatcccaggtgggagtatagtggtgcacgatcaatgacgtgtactcgcagacttgaactactttggttccgagcagatcctccccactcagcccgtctctcactacctagggtgctccaggcgatgactcaccgtgaccagactatcgttatttcaaaagtgtcgcgtcaggagaggaatctctcttgtgtaagacacaggctgtaacttgaaactcatgaaaatcaaagtagaacgcatccggacaaacaccacaaccgcaaaagtgcgggggcataacagcacgtgagcaacaacgatccacatggaccaaacggaaaacacgggaaccaagtaccagggaaagaggcaacacgaaacagaaaaagagacggctgcacaagagaaccagaatacaga

SEQ ID NO: 608379 - DNA, 623 bp, Homo sapiens
  misc_feature (13)..(13): n is a, c, g, or t
  misc_feature (273)..(273): n is a, c, g, or t
  misc_feature (306)..(306): n is a, c, g, or t
  misc_feature (402)..(402): n is a, c, g, or t
  misc_feature (413)..(413): n is a, c, g, or t
gggagccgtgtgnttttgtaatgttctgccagtccccgggagtctgagctgtatcagaaggaggtatcccattctgaatgccctgtgaggagcgcttctcgcagcctcgtggacgctagtgccgagcggctgcctagtggcatgcgctgctactgaggtgacggtcgaatcctgcaaccatgtccggtgacatgcccctagtcgttcgtacagtagcagctaatgaagtctgcagtgacaggaccttgcgatagatccacgcgatgcgatgcntgcctgcggcgcgcatttcagtgaacccccccngtggcggaaacctccctatttttggggaaaaaaaggggggggggggccccccccccccttttttggaggggggggggaatttttgggaaaccccgnttttaggccancaagcgaaatcctccacattgggagtgctccgagggagctcggcgaccgatcgaggaagaagcttaataaagcttctggactctttgctgaaaagataaaatcaaagaacaaagggagagagagcgccaagaggcagcggcgaacgggagtatccgcgaggcggagaggcaggcgggaagcgcagagcagccgggagcgggagcaattgc

SEQ ID NO: 608380 - DNA, 432 bp, Homo sapiens
tctgtacaatcccttaaaccaaagccactttctttaatcctatgaaggctgagaaaggtgaggaagctacagaagaaaattctaaagctgacaaaggttggttcatgaaatgtaaggaaggatgccatttccgtaacgtaaagtgcaaggtgaagcagcaagggctgatgtggaagcttcagcaagatctaccaagatattgatgaaggtggctactctgaacacagatttttcaatgtagatgaaacatccgtctattggaaggagatgccatctaggattttcatagccagaaagaagtcagccacttatggtagctcgcacctctcattccaggattttgggaggctgaggcaggcagatagcttgagcccaagagttcaagagcagcctgggcaacatggcaaaaaatacaaaaattagctaggcatg

SEQ ID NO: 608381 - DNA, 408 bp, Homo sapiens
taacaacctttctttcagagatcaatccagggatctaatccacatgcccatggatactagtaggggttgttacagctgagccacaataggaattcgctgtttattattctttaatcaagaggacagtacctgccttctgcaaccacctctctatctactaacaccctcaccctgttcctgaatgatgtttttatcctttggaaagaacaaggctctgatgcagcaacttttgtttgtgtttcctgtgtgtctcttgtcacaagtgtatttgaggacattggatgcattcattttctgtaataaagtttctaaatcaatcttccaaaaaagtaaaaagaaaaaagaagacagaagcaaaacagaaaacataaaaacaaaaacattcctgctacttgggacatatgtatc

SEQ ID NO: 608382 - DNA, 168 bp, Homo sapiens
ctagaggactccgaaaatgacatagaggcaggttgggagcagcgggaaaacggtggttctgacatcagtgggtaaagacgtgtcatgtgggcctttaggcccgggggacaagtgaaatataaagatggggtgacatgcatcacactcagacctgcctctagtcatttt

SEQ ID NO: 608383 - DNA, 277 bp, Homo sapiens
ttggtagggtcccagggtccctaggcctccacttttgagggcagcccctttggtgccaagagctctcctccaactcagggttggctgtgtttctttttttctctgaagacagggtcctggctccagttggaacactttcctgaaatgcacttacttttcagcttttgggatcagattatcatcaccccccccctccaaagaatttttacgcaagaagagccaaattgactttttaaatttggtgtatgggtattaaataaaattcattttcaaggct

SEQ ID NO: 608384 - DNA, 1235 bp, Homo sapiens
cggctactctctctgtggcccctctactgtcccccgtgtttcttggggggtcttcttgagccgtttgctcttagacactgcagccccggcttggggagccgcttctgttctttggtcgctccctcctctctcccttgattgggccgttcccctggggccccccgggtccgtcaaagcccccgcgctcttggtgggccggcccaatgctcccctgggaatttctctgtctgtttgtgtgtttccccgcgcccaagtttaggggccccacccctttcttcatgggggaagtatccccaaccaaagggcccccttttttggggattaaccacccttgcggcgaaggttcaaaccctttctgttaggggtcttttgggatccagggggcttttcggggcgcccctgtcctgcgcccgaccacatgttccccagatttcttgggccccccataaagccccggggccttgttgtggtggaccctcgttgtgttaggggtgtccccaccgcgctctcctgtcccttccccccccagggatcccacggaagcccctctggcgctctcccccctcttcttatgacagcgctttttccccctcgagggcgcacagtctctctcggagatatctctgtgggccccccaccttcggggcgctctctgggggggacacacaggcgcccctcgcgctcttgtctcccacagcgccctctggcgctttacccgggcggaagcggagagacgccctctgagggctctctccgctccacaggcgccccactcttgccacttcttcttggccacatgctccttcggccgcgtgtggtatttccaaggcacgttttgtgaagcaccctcgtgaaaattggggaagaaagggagattggtggcccctctcgggccacaggagagggagaagggcactttgtgggaaagggccacggaagggaaagaagctgtccacatgcacaccacacgcccactggccacaggttggcctctttcttcacagcctctccacggtcgcccttgagagcccctctttgcaagggcggctgcttccctgaggcctagtttttttaacgtgaatttttgtaacacattcacatttttttgtaccacgaataacacacggagtttctgagctaatccaaagctggtaatttccccgcacatgtcttaattcttgcccttccccccacccgtttgttaatccaaccataaaaacatgttttttttttta

SEQ ID NO: 608385 - DNA, 315 bp, Homo sapiens
aggggggggggggggggcccaaattcttttccaaatttttttggggtttttccaagccctttggaatttttagggccccccggccccccattgcccctggtttttttgcccccagggggggggttaaatgttcccccccgggggtttttttaaccagggcccctttggggggcagggggtcccttcccccggcctggcccttttcccttttttctttggggtttttaattaaacaagggggttcccgggggccggggggcttttccccccccccccccccgtgggggttaagggggggggttttttggcccctta

SEQ ID NO: 608386 - DNA, 274 bp, Homo sapiens
actcactgtctgggtacaacgcgagactcttctcatagaataaaaaaaaaaagatcccgttttcctgcaaaggaaaaaatcctgtgtcctctgaatcagaagttggtgcctggtccatctcatgcctattggattgtccccagtttttcatgagtttttttttcttcttaaattcaaaatcctaggagattgccctcttttcttctctggacctatcagtcttcagcttgtccccatttatcacgaccttcttcagacaggtgcagcgtaaaat

SEQ ID NO: 608387 - DNA, 907 bp, Homo sapiens
gagggctttctgattcggtgtctcctcattttcttctcttgctggctgctatgtacgaacgtgcctttcgctcacccattgtgcatgctgagtgcttccccagccatgtgtaactgtgattggtcaaagcgaaagtcaccagtattctccagaattactcaaatactggttgctctctatctgagcctccctcttcatacagcctctgttttcctgtcggccgaagttagcctgtgctgagtggtaaagagcgggcaactcgggagaggaaggttatcgtctctgtgcgagtggccattaatgacacgctcctcgtgttgtgtgccgtctctctctccatctgtctactagaagagatctctaagatgtccttaggcaacatttacttggagggtccaagggctctccgtgtgtcacgtgactgccatcggtgtccccgtgatactgctttacacctctcgggcctgttaccacctgtcatccggtcgtttctcggaacaagagcgtccatgcctttgattatgactgctccacatgtatcagacccaggcgattgcagaatcagctgggagatgctggatagtattattgggcggcgtgtcctcgttgggacgttgttactttcccccttagcggtaagattggtccgacgttgaagtcctacaggcattaccaaccagtgaatggctcggccctggtcggccgatttttgtttgaacgccgagatgttaagtcgtatgacctgcctgaggatgcccaggacacggaggttgtcgcaaatctctcttggggcacaaacgccttcacggttagcgaatttgttgtcaacacctggagtatgttgtgcggcacccacacccggggtggcgttcaaagggtggcgggacacatcacacatgctcctgac

SEQ ID NO: 608388 - DNA, 756 bp, Homo sapiens
cttctctggtgtcttcttcacgatctggggttcgctctggcacctgtgttaggtgttgagatgctcgtgacactctcgtggcattagatactgctgtccttgtgatcgtgttccgctcttgacctgttttcttccccctttgattcccgcgttgtttggagctattccgttgccgtcttcctgctccagtagggccttttccctagcccagcctcctgttggccaggcctaaggctggtacaagagctggcaactctcactagatgtgtctgctatggccgagagaggtgccggaataggcagaggtatagcaccgttccccctatgaagagacgcgggaaaggcctacagtggcccacataattgcctgactcacacttcagactacctcttaatgcctgttggaagggactggagctagcatggactcccagtcgctggtggatgtaggaggccacagtgagcaggtggccccagctgggctttcccaggtcaggaatgtggagccccaggcaaaggtgcagcctattgcatcacaagctccaatccaatgtctaggaccttcaggccagtctgcgagatgaggttcccgtacgcttttacttctcttcattgaccaaatcaaccaatcactacagctgctctggttctgctttccaaagtagcccaggtcctgggccagatgccgggaggtgctatccatgagtgaacggcagtgtcttcctcacctggatgggtcccacacttgtgacctca

SEQ ID NO: 608389 - DNA, 615 bp, Homo sapiens
tcgtgtcaaagaacatctcccatcgaagggtcgacgattcagagtcatatcccttgaatattcaccaatccaactgtctgggcattgtttctctgtagccttggttctttgtaaagctttaaatctttgtctgcttctgaatcctctacatgttgattgcaaaaggataatttttttcctttgttcttggtacctttcactttcactgaaggctttccatcttgcttgtatgcaaatagcagccatgtgcctgcgcctatagtaatctctccatttctgctggataacgatggctgcagcccgtaactccaagtaccgctgcctctctaagtgagcacgccaggaagcttggagaagagcagctgcactagccataacaaaagcatccttctgcacagctgcatctctgacttgcttctgatttaggtaattcctccagaatctctggataataacagatgcttgtctcagatggaggaaatgctgcctacacagcaagaccctgaaccatcgctgcaacaatatgattctgcggagcacctcttggtgaagcagatcttgtaagtgctgtcgttcctgctcctttagaaagaccatggtttttccaacttgata

SEQ ID NO: 608390 - DNA, 846 bp, Homo sapiens
  misc_feature (134)..(134): n is a, c, g, or t
  misc_feature (475)..(475): n is a, c, g, or t
  misc_feature (481)..(481): n is a, c, g, or t
  misc_feature (532)..(532): n is a, c, g, or t
  misc_feature (536)..(536): n is a, c, g, or t
  misc_feature (540)..(540): n is a, c, g, or t
  misc_feature (562)..(562): n is a, c, g, or t
  misc_feature (579)..(580): n is a, c, g, or t
gctgactctctccccactattaccctattgtcctgccacatctccctctccgagagggtagagataatgatcaataaatactgagggaactcagagactggggccggcgtgagtcctcagtatgctgagcgccngtcccctgggccacttttctttctctatactttgtctctgtgtctctttcttttctcagtttctcatcccacccgacaagaaacacccacaggtgtggaggggcaggccacccttcatgtggcttcttgcttttgaccctgcaaagggaagaggcagggctggggattgaaccagactcaaagtttagggagacatcgagatctgatttttctagttgaagcataagccctataattcttacagttcaacatcgtcacactgagcacatgctggagattctttattaatgagagggtcaaaatcttcttctctttcttccattgacagtttcatagaaacnactatntttttgcacccaaatttcactggataatatgatctttaatggataatttcnttanaatnacaagtacatcctgtataaatngttgcgggaagtcaggnnccccaaacggagggaccggctgaagccatggcagaagaacgtggattgtgaagatttcatggacatttattagttctccaaattaatacttttataatttcttatgccagtctttactgcaatctctaaacataagttgtgaagatttcatggacacttatcactttcccaatcaatacccttgtgatttcctatgcctggctttactttaatctccttaatcctgtcagctgaggaggatgtctgtcgcctcaggaccctgtgat

SEQ ID NO: 608391 - DNA, 669 bp, Homo sapiens
  misc_feature (218)..(218): n is a, c, g, or t
cgacaaggtggtggtagatgaaggccaagaccgagaggtgccagaagagaacaaacctccatccagacacgcgggcggaaaggctccaggggtccagggccagatggcgccgcctctgcccgactcagaaagagagaaacaagagccggagcagggagaggttgggaagaggcctggacaggcccaggccttgtgatggatggctgggtgatcttccntgaagatcccctagaaatgtttccatgaacagcatggatgtgtcattgccatgctgtccatgccttgctataatgtgagtgaccttgggtgccagtgagacatgtggtgccttgcatcctctgtgccccagtgcatgtgcttgtcttgatgcagcatgaactgtgccctgggctggttggggttggatgtgggtgaaaatgggccaaggggtgtgacctgcctgccagtgcaacgcctgccctggggggacaacatggggcaatgccctgcagaggacatgctgaccacgggtgggaatgcctccccatcccagcaggagaagcctggctccaggggccttggggcttgcctgccctgagcctctgcgagcatgagggacgtggagcgatgcgggtggaaaccaggcggtcagccagcctggaggaagcctggccagggcggaagatgctg

SEQ ID NO: 608392 - DNA, 892 bp, Homo sapiens
  misc_feature (211)..(211): n is a, c, g, or t
  misc_feature (229)..(229): n is a, c, g, or t
  misc_feature (238)..(238): n is a, c, g, or t
  misc_feature (257)..(257): n is a, c, g, or t
  misc_feature (260)..(260): n is a, c, g, or t
  misc_feature (291)..(291): n is a, c, g, or t
  misc_feature (325)..(325): n is a, c, g, or t
  misc_feature (328)..(328): n is a, c, g, or t
  misc_feature (340)..(340): n is a, c, g, or t
  misc_feature (348)..(348): n is a, c, g, or t
  misc_feature (359)..(359): n is a, c, g, or t
  misc_feature (362)..(363): n is a, c, g, or t
  misc_feature (371)..(371): n is a, c, g, or t
  misc_feature (374)..(374): n is a, c, g, or t
  misc_feature (385)..(385): n is a, c, g, or t
  misc_feature (396)..(397): n is a, c, g, or t
  misc_feature (399)..(400): n is a, c, g, or t
  misc_feature (402)..(402): n is a, c, g, or t
  misc_feature (404)..(404): n is a, c, g, or t
  misc_feature (417)..(417): n is a, c, g, or t
  misc_feature (435)..(435): n is a, c, g, or t
  misc_feature (471)..(471): n is a, c, g, or t
  misc_feature (477)..(478): n is a, c, g, or t
  misc_feature (501)..(501): n is a, c, g, or t
  misc_feature (545)..(545): n is a, c, g, or t
  misc_feature (565)..(565): n is a, c, g, or t
  misc_feature (567)..(567): n is a, c, g, or t
  misc_feature (569)..(569): n is a, c, g, or t
  misc_feature (579)..(580): n is a, c, g, or t
  misc_feature (582)..(582): n is a, c, g, or t
agcttgacttctattttctgtgtagtgaaaacaatgtcatttatttggtttttcacctcagccctctcataggagcatagaatgttagggtctttactccctaatgatgtctgattggcacatcaagagttaactctgccttctgggccaaattcgaaataaccagtccatttttccttttttttttttttttttaaaatgggggaatgtntctcagcacagttgcggnttcctaaanccctgaaagcatctggtgnttnattatactcggggtgtcactcactggttgantgtctgcacctacgtttccacctcctccccctcnttnagccagcctatngataaccntaaagattatnaanngtgggttnggnatctcgttaanagacagaatgnntnncntngtagtatttctgntagcattcagcgctgctngtgggctaacaccactggtgttttgttccatcatgngctctnnaggtcaaaagcctcatttaattnggggggattggattttttttttttaaagagaagaaaaaaaaatngggcgcgtgaaataaagggngngntttaaacagnngnggctcttagcttttttcccaattaggccatttcacagggtcctggtttgacacgggccacggagggtctcgggttaaaatttaaataggttgcattgagaacattttataccccattgggtggggttggaaattggtttttcaaaggcattatggtataaaactgggaattggggcatataactccccggttgatacagaaaggggtcattttctcaataggttattttgactgggggcccgggaaatttggaagtgttaggtgggttctgggagcaatttttttgaaagaatttggggctaaggggata

SEQ ID NO: 608393 - DNA, 664 bp, Homo sapiens
  misc_feature (135)..(135): n is a, c, g, or t
gactgtgggtaggctgcgtgctagcttcggcgcggatccctgggcgtccgtacgtcggagtccttcgtcctccagggtcccgtgttctttgcgccggagcgggaagccagctatctctgcactcgctggggtttngttgacatggctggctttcctcaaaatgagtgttagtgtcaatttgcttcagacctttcagcaggtttttggtgccatttacccttcataggaagagaaataacttaacaatttgcagagatacagtgtcttccgaaaataccagctgttgacttatcctaaaaagtgagagtacacccccttgtctgaagagctagagtgggataacgtggaaaactaccagtgagaatctagtgtgcgagaagaatgtgtttcagcaatctcaagcagtaaggatgaagatccggtcgtagctgccagcagagagtgcatggagatgtggacgatggttggcagagaagtagcagagcacatcactgaatgaagagctcaaaaccttgatggaatgtgtttctaacacaggaaatataaattatttaaaatattatatggcgaaggaaaaagtgaaaaaggtaggcaaataacaaggaattgacacggggtgtcagggacgaagcgaaaatatcaagcctgctagaaacagggggag

SEQ ID NO: 608394 - DNA, 460 bp, Homo sapiens
tgactgttgtggacgtctctagcaggatccccgacggtctgtacccttacttttatgcaaagatacaggcaagtaagtctgacagcccggcagattactgttcctcagatttccagtacaactaatttagtcttatattacaattcaaagaccggtatttccattataattattattagagaatgaaccaattatatttttcttgtttagccaactacattgtatgttagtgtaatgtgaaaaatagattactgaaagttttccaatctttattcttactgacttttggtttccagaaaagcttagacctgtaaatactacgccccaaaaattctttactaactgcggtaacagaagatcttcaataatcttaaagggctttcttcagcagccggattactatgaatcgtatcctgacggtgggtctattcccctatatgtataccgtaatatatctgta

SEQ ID NO: 608395 - DNA, 100 bp, Homo sapiens
ctggagtgatccccgggctccctgccatgtactgtgcccttcaacgtgtatcaggcacggtggtgcatgctttcaacacgaaaccatctccttgtaaatc

SEQ ID NO: 608396 - DNA, 165 bp, Homo sapiens
  misc_feature (9)..(9): n is a, c, g, or t
  misc_feature (15)..(15): n is a, c, g, or t
cagaggacncagctnacgaggatataataaacaagctcgaggtccccttcagatctaagaagtgttaatattctaaactgtcagaattataatctttcttttatataaagtttaaataagtaatattttggcagtgcctcgtaagcttggaatcctcagagcacc

SEQ ID NO: 608397 - DNA, 233 bp, Homo sapiens
gtactgggtgttacgtctgtgaaacatgaagtcgtatttaaggactgcttctccctggatccacatgagctttccccatcttagttgttttctaaaagataaaaaccacatagccacgttgtagttagacctagtaagtatccgtgcttgcttaacaagacaatttcagtttggctggctcaacttcaatatacgtgaattatgtcataagtaatcttttgaaacaaggtaat

SEQ ID NO: 608398 - DNA, 918 bp, Homo sapiens
cggacggagccgtgcgagttctctaccctgcttcgcgagcgggcgagcagaacgcgagtcccaggatccccggcattccagttctcttccactgcattcccccggcgcgtgtgggaccgaggtggacatggatccgcagaggtcccccctattggaagtaaaggggaacatagaactgaagagacctctgattaaggccccttcccagctgcggctctctcaggaagcaagacgtcaagaggaggcctgaccagatggaagatggccgggagcctgagaagaaacggaccatgaggccatgggtgcgacgagcaaaattaccacatcccacccaaagagtgccatccctcactacagtgccacagcacacagagggcagaccacagctcacaaggtttccaagaaggacaaggaccccggtgtaccacagcgtagttgccacagggcttgaggagccagaagccaggtcctgctgtccctgtccagaagtctggcacatgatggtgtgcctcccatggcaggagggcaagaacacccaggcaaacgttcagcctgggacttacagggtcagccatgtgacctagatgcagcaactaaaacggtgccgcgagaggactctagggtggaccaggacggaaccagcagctgtcaggaccagctcaggagatgcccagcagccaggtcaggcccggaggagcagagcgcacaccacctgcaggggtcctgcagccaaggttacgggccaaggccgaccacggcacacaggagctgaaagacctgccggctggtccggaacggaacacggggacccgccagaaggcctgcgccccacccagacacgcgactcgcgaacggcacatgttcaacacaacaagaagaggcaacaccacacacgacaccccaccgggcccccaaaac

SEQ ID NO: 608399 - DNA, 1583 bp, Homo sapiens
ggctgattgagtgagcgcgcccaggagtctacatgcctactctgtgtcgactctggctctagcaatgctcctggcagtagagcacaattttcccagacaaccactggtgcagtgatggacaggtgcatgggtgcaattagtggcgtacgctactgtgcgtgacgcatccgtgactgcgtacgaggatagctagtaagtgaagcattgacgtccccattcacggttgggagcgtacacagtgaccttgcttggtcgagttagcgtcggaaaaagagcgtgctagaccaagtccccctagcgattagtacccatggtctcatgctcaacctccagacgagacttataggccgcattcacaagtcctcattccactgaacaagacttgcatgacaaacttaccgcacatcctagttagtgagttggacaaaactaaatcctggcaatttccccgccactaggagttgggatcgctacccagatcctaatccgcgaggaagccttgacctattggggaaactgtttgagttaaggccattgaacgattgccatggccaggcgggtcatggggttggaacacctatttactttgtaatcgaacccatcctttctattgttcctcgtggacaataccaatttaccagacacctcgaagctttttggaagggggcacctttggtcccccattgccctttgttgcaaaccattacaaaattgggccccttactatagaatttggcacatggctggaatcaaatgtgggaccgctctttcctaagcgccttgtgaaacttgtagagcgcaaacgccaaaccatggggaaatagacgcccgaatatgcaacggtctagggcgcacgaaggccgttttgtcaatggcaaatggcctaagggctccctccaaggttggacgccccaagcgaagaaaaagtccccccccgagttgcctctgttcggacacaggtggcttccacctgattggaaagttccttggtcggtgagtcaacttacttccccgttgggtgattggggggtcgctttaatcatggtgtgcgcgatctaggttgcccacggtcctggttcccccttaacctcgtcaaagtaccctaggtgttaggacctccctttcccacgcaaagggcgaagaggggaattggacccccttgtgtgttaaccaaaacccaatgggttcttgtgtgcagacgcccttattatccccctgtaagatatcggttatggcgcttttccgcgaaggaaatccgcgcgcatgggtttttgccccccaaaataccctcagagaggaaaaatgcttctggaaaggaggagttgcctaccgtggacgagccggctggtcacgttgcgccatgtttttcaccgagagggtatgccaaattgccaaggcctccgtgtgtgccaatttctagtcggacaccccgaccccccctgttgaagagggacaacctctcgccatttggacttgtggttgagccctcgtgttgtgagaatatccaaccgcccagattatcacgtggggggccaacctcccaagtggtgtggcgtccccattgacacgacggctttcgcata

SEQ ID NO: 608400 - DNA, 852 bp, Homo sapiens
cgcaatgagtacgttgctgtggtcgcggcacagacgagcatgtggtagatgtcaattcaaagtcttgattcatatagagagctggaacatcaaatatatatgtttatctatcattatgctacgccagtcagtgctataaatttctgtatgcaaagaaatgttcgttaaggtgtcattcatgtttcctcagagtgacgctttattggtatgttgtataataccatatgtagtgaagactcggcatcattattccatgaaccagttctaatgcaaacctatgtatgtccattagaaatggaagttattttttaatcaacaatgaggcctattataaatttatcagatgaatctagatagctttatagcatataaaatatgtcaattgtgttagcaggtgcacatttcaccactgaaattagaaatatttgacagtctgttctgcataccattctgagtctacttttctgtctttagaagaatcgtaaatttcagtgtcctttatttgactcaggggatatagctgtataagtaatagggcccaagatgtgcagtagagtctgttaatggcatttcactgttcattccctttacaccggttataacaactttccttaatgtaattatcagtgcacggctatgtattctcatgctaaactccggggttaaatagtttccctacaggatcctcctggaggtggggatttgcgatactagaacgggtacgtcttttccacccctggagcgatacatggccccgcaacctctcgcactacacctgtcgccttccattcggtcccgccctttcccaaccgggctcgcgccaagggcggtctcacacgcgccctcaaaccc

SEQ ID NO: 608401 - DNA, 826 bp, Homo sapiens
tccggcaatcagagctgcccactactgtgctttgtgccagtgccccctgtgtgctgctgttcctgggagctcagtgcctgctggctgctgggaggaagcactgcgtggcacaacaatgtatgggtgtgtgtgtgcacagcggcaccagggtgtcatgtgggcctgccaggctggcgtggcggcgtgggctgcggctcttacctgcctgaggaggctgcctggctctgcgtgttgctggagttgcgcctggacttcccagcttggccagtggctccgcaggctgccggctccacccctcagattcatttggattcaaggtttggctctcaacagtgccagctgcactgtcatcctaaagtacttctgtggaagagaacatggtggtgtcactgttgtaccagtgatgacacaaaatcccagatctacctgacgggcctgcgaggcgttgaagattgtgaagcaatagcctaagggactggctggcttcgagcagggcatcggaaccaggcctcctggcactggcctgggtagagccaggccgagcaccagatgacccccagtggaaccctgtgacagtcctgccagggcccaggccatcccaaccgacttccatctcatggaccctccagcggagaagcctgggagaggctggcgggactggagatcaaacccaagttgctgaaagtcacgcacaggcgagttctccctggagtccatcctggctacctgaaagctgcgtggactgggaactggctgacctgggctgcctgggagagtgcctgggcctggagtggctggcacctatcaggcaacgcgcacaccaaca

SEQ ID NO: 608402 - DNA, 125 bp, Homo sapiens
ctgcgagttgttggtctgcgggttccaattacagtttgcgcagccagggagacctcagccagagggggtgcctgagggtgggagcgtctgctggccctggtctctgaggcaggcatgtgtctgcc

SEQ ID NO: 608403 - DNA, 1315 bp, Homo sapiens
  misc_feature (117)..(117): n is a, c, g, or t
  misc_feature (274)..(274): n is a, c, g, or t
  misc_feature (304)..(304): n is a, c, g, or t
  misc_feature (323)..(323): n is a, c, g, or t
tagtacccaatactaacttggaaaggctattactaatgcttagcgacctgaaacataggctgatcgtaaggataccagattatcagcgacaggtctcaactaacggatggtgaggcncaccgtacaggggcatgagctaacacattccttatcggtcaagagcagccaataataacactcatctgcaacctacagatgcagcacgccctaatagaccctcgtgctacatacattactttattaccacttgctaaataaccaccagccactcagnaccgggtatgagctcttggaccaactccgncatctagtcttcacctcantgaaatcacactccgcgtgccccccactgacactcaatggccgctcttcagcctcgaacattaaaacacatagtgacacgcctcttcatggaacatcttcttaacgctccacccttccttcatgcccttaacgtcccgtgcttccgtccaatacgtcgcttcatgaagttccggggaggggtcgcagggcaagtcaagggaaaatccagagatcttgaacagccacgctcgtaatccgcgtcgccatttaggcgaaggggaaatcatgaactcacacaacacactgtgccagttcacttgccacaggttcagaaaccccttaagaccccaatccctatctttctccatttaactacacatcaagtccagcgttagattctatactgccttgcgtactctttttagaggaggggctctaatcaaatttctttcataatctaacaaaacaaaatgtgaataccacaatccattcaaggaactctcaccctgtggtgaaataaaccactgaaatcacctaaagagcgcactcacatcattgccagttcttaggcaatccctgtcccttaaaatccaacaaggacccagtactctgaacattccgcctcaatcttagatactctctcgcctttgtataaatgaggtaaattcaagtcctttcatgtacttcaagaaggctttaccagagcgatccgaaaataacggggccagacaagggcccccctatatcgggacccataatatcctttccaagtaaggcgccgaaaacataaccagcggaagaggcgggttgacgtgcattacaaataaaacaccaagccctttaggagggaggcgttaaacacaactcatatccaccataggggaaacccaacccaattatagaactcggccacactacatgcggcgctggcaaaattatagaagacgagagcgcttaattattaagggcagcccgaagaaaacctgtaccgttgttaaaaacatcccccggg

SEQ ID NO: 608404 - DNA, 256 bp, Homo sapiens
gttgagactgcaatgagccatgttccattctgggtgacagagggagaccctgtctcaaaaaaagaaaagaaaagaaacatactcttcttgtgttgactggagattttttccacctctgttactttttttatgttccagttttccatagttggtagaatacattagaataagcgctatctagtcatatatgaaggtatgtatatatctagtttacatgaagctatctagtttataagcaccagagaatcacagatat

SEQ ID NO: 608405 - DNA, 343 bp, Homo sapiens
gattcaatcagatgcatgaacacttgaagtactttgtcataaatgtgaggattaggccaaaattcacttctttttgcataagggtgtccacatgttccagtacccattgctgaaaagctatactttctcactgaacggactttttcacttagtcaaacatcacttggcatttttgtcgggcactatttctggactttctcaccacgtgtccaagctctctgtcagggtaacttgtaaaaacaccaggctcaactcacacatctgaatcaatgaaccagtggttgggtacctggtttattccgtgatcataggttgcagaatgtgtacaccaggctacaccaaa

SEQ ID NO: 608406 - DNA, 219 bp, Homo sapiens
  misc_feature (1)..(1): n is a, c, g, or t
naagctggatccgagccgcgtcttcgacctacaccacagctcacggcaacgccagatccttaacccactgagcgaggccagggattgaacccgcaaccacatggttcctagtcagattcgctaaccactgcgccatgacgggaactccatcaatttgcttatattttgttaaggattttcacatctgtattcacaccgcttttgtggtgatcctctaga

SEQ ID NO: 608407 - DNA, 1206 bp, Homo sapiens
ggccacgttcacccatggcgtaggaccgccaaacagctactcatgctgcttaagctggcccagcaatgtacagaccagagacaaagcaagagaagaagcagagactgttggcccgggtccgagaagaaggctgctggcaaaggggacgtcccaacgaatgagaccacctgtccttcgagcatggatgttaacaccgtcaccaccttggtggatgaacacacgaaagctcagctggctggtgattgcacacgacgtggactcccatcgcagctggttgtcttcttgcctgcgcctgctgtcgtatagaatggagtggatccctctagctgctattcatcaacgggaagaaggcaagacgtggagaccgttctatgtccacagtgaagatccttgcatccatctgatcgaccgttcagcacaggatgcaaacatccgtgcaagacgataagcgcgctttgtgcttagagcctggctgtgataggctatcagcgaccatattacatagtgtacagcatacgagtgagatccgccgatcaactgtgggtggcaattgtcctgggttcctaaggtctgtggactcgatatcgccaagcctcgtaaaaggcaaaggctaaagcaacttaccacttcaactggtgttaaatgttacactgtgtgagcttaactgtaccagtagaaatttagctctgaaatctacattccgaattttgtccttccggaatctcgagcatcaataacccccccgagggcccttcaaatgttcggcagcgcgggaaaaaacgaaggcgaagcgccttgcggccctcgtgtggcagttaacccatgttccctgggaagcccagctccctctcttggtctccaaaacggggggtaaaattctagacagggatctccccgtaataagagaagactcgctacaacgacgcagaaaaagccccagggttaccccttggcttatggaaaacgacgacaacgcagaaaggcccctcacagaaggtaagagccccaacggtacccactcaacccgacaggaccgctaacaaagagcgcaacaagcaccaaaagtggatggcacaaactggacaagcaacatggaagaggaccacaaagcaagtcacgatcactaacacgggggcccacgcgaccaagaaaccaatcgaaaccgacatcgccccgtacccggcagcccgccgacaccaaccacac

SEQ ID NO: 608408 - DNA, 982 bp, Homo sapiens
tctcgggtgtgggcgcatctctgacggttgtgggttcccccagaggcgttctagggcgtccagttgcccgggcccccggatggttgccgccctgttgtgtgacccagggcgttccgagggccttttagtgggattccttgttggggttcacgaagagattctctcgcccgggttgaaatgttggaggctgtgggtccctgagtgtgccttttccccagcggggtattctcccctttggggcgcgaattttttgagataattacgggtctgtttttcgtgtctcgctccagttccgggcaatcctttcccccgggagagaggtgccctctttgaattccaacctttgggtggctccaaggtgatgataaccccccattaaggtcaccaatgtccccactaaagagggccacaacctgttttatgattcccccggttttaaatttttataaacatgaaattggtgtccaatctataaaagcgccgcaagtttaccagagacacaatacacatttctccaaattttttgttatgggtagacagataaatgtagtttctgacaaccgtgtaatagaattttggggtacaaaagtttgtctccaattcctttccccctttcccattggaggcacacaaagctcttatttcttcaccacatgacaacatacaatgtttgttgtgacacccatgttactctccctggcaccacctctttttccaaccgtaagagtttcccataccaagaacagtttaaaaacaccctggggattttattctgcgtgcgaacacccatcatatggtttttcaccacttttttcaatcaatttatattcattgtggttatatttaaaatattttccccgcttttttttttttaaaccttttttatccaaaagagctaaaggttttttttaccaattttaaatttttacccctaaaaaatggaggtttacccctatccatacatccctttgtaaaattttta

SEQ ID NO: 608409 - DNA, 117 bp, Homo sapiens
atgtctctcgccaacattgtgcctccaatgcaggcatggcactggacattcatgtagtcaccgagagcaagcagccccttctgggatcgtgacagccaactctcttgtttgggagcc

SEQ ID NO: 608410 - DNA, 1159 bp, Homo sapiens
  misc_feature (515)..(515): n is a, c, g, or t
  misc_feature (1159)..(1159): n is a, c, g, or t
gtagtgtgggtgatatgttgtggagagagatgggctgggctgtcagtaatagtccgcggggcgatggtcgcgtcgttccagttccattggtccatccgatttctggatcacttcacctagcatactaaggcctaccactacataggttgtcgtgcacagttaccaaggctcgtgatacgccccagtgttacactctagttgctcactaccattgactcatactatggtggtaatatggcttgagtaccgctaacacttgcagtcaagaagcgggagttggctgtgcacatcatgttgtaattggacgaccttaaacaagtgaatttccattgggggggtcgggagttagtggtgtgtggcatacacacagcttttggtgaacctgccatagggtggagtcagctcaggggtaaaagtctcagtaagcagcacatagttcggagcttgttcgcttagagagtgattttgagcaattgcatttagcagcactttacggtcacacccactcagggagntgtgagcgctgggagaggccaccgatactccttgacttttcattcgagacaatgcggggaaactcctggacgcgaaggaactcacatgggatttgtcttaactacacagggacacctggaattgaatagtgcttaccaaagagcacatcccgcgtcacaaggtggatagcaggttaccgagtaccacatacatccatgttagcttgtcggggtactctgcaaagcacacgtttgggagtgacaaaggcgcgtaaacaagacatcgtctacagtatggaggtttagagtaggagcaggacgatcggtggatctagttggtagacacatggaaatatcgcctcccgaaacaggtcggataacttctgcgcctcagacaaacatgtgttcgcctaagggggcacgaaggaccttggttatggacttttgtatcaggcacactgtttggcaactttaccaatttcggttggaactccgcctaagttcttgtggcagacagtgtgcgtgggaagatacatttagtcagcaaaacgttctatcaatagcgtatagagacaactacattacttggcacacaggaagcacattcaacggaggacgttcgccccagaggcacagagggaacaatgattacggtatagcacggn

SEQ ID NO: 608411 - DNA, 203 bp, Homo sapiens
tgctgtgacatcatcaccgtctgtgtgatgccatcgccgcgtacgcgtgacattcactatgtgtgacgtcgacatggcccgtgacgtcgtcgctgcatctcggcgtgacgtcatgccaagttccccatgtctgtgtgcgacgtgcagcatctgcacgacgccatcgctatatctcttcggtgacgtcacatggccactcaata

SEQ ID NO: 608412 - DNA, 234 bp, Homo sapiens
cctgtactgagattgtctaagctgtagatctgcttactgtaggtctgtctgcactgtaggtctgtctgagctgtaggtctgtctgaccttatggtctgtctgcacctgtatggttgctctgacctgtagatctgctctgcagctgtagatctgctccaccaactaagaactggcattgagcaccacccactgtgaatctgatgaaagagctgatctacatgggtggtacctgat

SEQ ID NO: 608413 - DNA, 196 bp, Homo sapiens
caatgctactctaatatttcctctgtctccagctgtttcatgactccatccctgccatgtgtgtgccttaccatctttttaagcagagcacaggcctgggcagtggctcatgcatgtaatcccaggctttgagaggattgcatgaggtcaggagttcaagactaacctgggcaacatagcaagaccccatgtctac

SEQ ID NO: 608414 - DNA, 470 bp, Homo sapiens
  misc_feature (432)..(432): n is a, c, g, or t
cagagttggtgcacagctctctctctgagatcagagtctgatcagcagctctctcctcaggaccagaagcctgagcttatcccatggagctctgccggtccctggcctgctggggggctcctgggcctgatgtctgctgatgctttgagcaccgattctggtgagctgtgggtcccacccactcagctactcgggcctctggcaacagggcatggggacatcatatcaggctacatccagtgactcagacttcagcatatggctgtctggggcccgtgtcgtgagcttcctggtcctgtctgcttcgcccctcactgttccccccaggccacggcccgcttgtctcaaccaccgcagcctttgctgcagccatctccatggtggtggccatggcggtgtacaccatgcgagcggtggtgaccatgcctccancacccccatgattccagacgcttcttctttcctgtgtc

SEQ ID NO: 608415 - DNA, 897 bp, Homo sapiens
  misc_feature (37)..(37): n is a, c, g, or t
  misc_feature (41)..(41): n is a, c, g, or t
  misc_feature (89)..(89): n is a, c, g, or t
  misc_feature (92)..(92): n is a, c, g, or t
  misc_feature (107)..(107): n is a, c, g, or t
  misc_feature (128)..(128): n is a, c, g, or t
  misc_feature (140)..(140): n is a, c, g, or t
  misc_feature (143)..(143): n is a, c, g, or t
  misc_feature (148)..(148): n is a, c, g, or t
  misc_feature (152)..(152): n is a, c, g, or t
  misc_feature (160)..(160): n is a, c, g, or t
  misc_feature (169)..(169): n is a, c, g, or t
  misc_feature (188)..(188): n is a, c, g, or t
  misc_feature (198)..(198): n is a, c, g, or t
  misc_feature (207)..(207): n is a, c, g, or t
  misc_feature (217)..(217): n is a, c, g, or t
  misc_feature (224)..(224): n is a, c, g, or t
  misc_feature (243)..(244): n is a, c, g, or t
  misc_feature (252)..(252): n is a, c, g, or t
  misc_feature (254)..(254): n is a, c, g, or t
  misc_feature (256)..(256): n is a, c, g, or t
  misc_feature (259)..(259): n is a, c, g, or t
  misc_feature (266)..(266): n is a, c, g, or t
  misc_feature (268)..(268): n is a, c, g, or t
  misc_feature (271)..(271): n is a, c, g, or t
  misc_feature (280)..(280): n is a, c, g, or t
  misc_feature (284)..(284): n is a, c, g, or t
  misc_feature (301)..(301): n is a, c, g, or t
  misc_feature (316)..(316): n is a, c, g, or t
  misc_feature (324)..(324): n is a, c, g, or t
  misc_feature (328)..(328): n is a, c, g, or t
  misc_feature (339)..(339): n is a, c, g, or t
  misc_feature (350)..(350): n is a, c, g, or t
  misc_feature (369)..(369): n is a, c, g, or t
  misc_feature (371)..(371): n is a, c, g, or t
  misc_feature (403)..(404): n is a, c, g, or t
  misc_feature (434)..(434): n is a, c, g, or t
  misc_feature (438)..(438): n is a, c, g, or t
  misc_feature (444)..(444): n is a, c, g, or t
  misc_feature (460)..(460): n is a, c, g, or t
  misc_feature (464)..(464): n is a, c, g, or t
  misc_feature (529)..(529): n is a, c, g, or t
  misc_feature (535)..(535): n is a, c, g, or t
  misc_feature (597)..(597): n is a, c, g, or t
  misc_feature (610)..(610): n is a, c, g, or t
  misc_feature (615)..(615): n is a, c, g, or t
  misc_feature (634)..(634): n is a, c, g, or t
  misc_feature (657)..(657): n is a, c, g, or t
  misc_feature (798)..(798): n is a, c, g, or t
  misc_feature (889)..(889): n is a, c, g, or t
tttatctctggcggccttgtagtcgtctccgagactncccncccctccttccctcttgaccccctaggtttcattgccctttccccganacnactatcatgaccccnaggctgccggtgttgtctccncctcggtggccncgnctgtncctnctttcgcngctcctgcngggggcggttcctggcccnccccggagcngcgctttcnacctccccgncctcccncccgtcaacttctgccacnnagaaaaananancgncgagctncnacnccgaaatanaacnatttgtcaacacacttnattcactggaatcanttcttccntatnaatacacagcntttgatttttnccaaccatcacaaggaaancncccatctcaaaatcttggtcaggtactattcnnggaaagaattgaaccttcaccatataactntacntttaanaacaaggagacctgtnagcntcgtcttcgtacaaaaacataccatacacagaaagctcgaagacaaacaaaacttacaattcttnccaaanaccatgttattgaattatcaacatcactggattctcggataatatccctctcacgtcgtgtnaccatcgcttgangcatngctcaccagcgttctgctnatcctgggatttcctattgggcnggtcacattacagataaaggccatgcaaaagatgcctgtgttattagttcagatttccatgaaagagatacattttacatcttcaaccatgttgacatcaaaatatactatcatgttgttgaaactgggtccatgggagcnagattagtggctgctaaacttgaaccgaaaagcttcaaacatacccatatagataaaccagactgctcagggcccccatggacataagtanaaggatct

SEQ ID NO: 608416 - DNA, 293 bp, Homo sapiens
tcgcgaaacgtgttatcccacatatttcagaatgaaaaaaattaaaatatagactataacaatgaacggccatatttctttaataagcacgaatcatctttcaaacattattctgctgataagacttagtttttacttccctgaatttcactgccaccaataatagcacagtcttttccattttttcacttcaatttcagttctgcaatggtccatcatattccatatggcgttcaatcattttcaacaggtacacaaagggtcacacatttatccacattttcaacacgtgt

SEQ ID NO: 608417 - DNA, 227 bp, Homo sapiens
tagtgaaccaccattttaagtgtaccctataagtcggcaggccaactcgcgcccttgggaaaaatcactggtccataacagaaaccatgtgttacaaaacgccccaaaccagcccaaacaccaaccaaaaaacccaaccactcaccccggcccgccacccgccaccgccacccaccccccacaaccacatagcagaaacacaacaaacgagaaaacacaacaacaag

SEQ ID NO: 608418 - DNA, 116 bp, Homo sapiens
tgtaccgactgagaccagagagagagggacacggagacagagggagacagtgcacaaagagacgcagagagaacgggacctcaatggtccccttttcctggcgatactccagtggt

SEQ ID NO: 608419 - DNA, 436 bp, Homo sapiens
agaggagccccacctcgcacctccttcacagtccccttggccccctttgctgcgcagccccgcattggcccagccctaggggaggtgatgctctctagtaaaaaggagacaagagccgccaacaatagaaagacaaaaaggttcatctataccagctccagcaaacaagcacgagcgaaatcttacaatagtagaacagcagcaattcaatcaaagtacaagacacacataagggacaaagtattacacaaaatacaacacagaatcacacataatattacactccattaattcttcaactaaaacagagactaaagactaataaaatcaaaccaaacaacaagaccacagacgacaccacacagtaactacaatctcgacaacaagatacagccaacccagacacaaaccacgacacaaacataacaccacacag

SEQ ID NO: 608420 - DNA, 235 bp, Homo sapiens
  misc_feature (3)..(3): n is a, c, g, or t
gancaagagctgacgcagtgaatatctttgtcacctgggtctttggtagagtgttgaattcgccccaattccacgttttgacgggctcggaccaattttgactgtgaattccagtcggagggtctaccctcggcgtagggccggccgacagaacagggaaatcctccagcagatgctgacctggcggaatccgatcggactggtcgcctgaaccgcgaccgttgaaaactctggt

SEQ ID NO: 608421 - DNA, 130 bp, Homo sapiens
tttttttttggcggggggggggaaaagttttacaacggttttttatgaagcccggtttttaaatgaaaaaagacaaatgtgttttgtgggggcaaaataaaccaataaatgtttttttttttccctttta

SEQ ID NO: 608422 - DNA, 193 bp, Homo sapiens
aggatccccccggatatgtaatactgtattttggacaggggcaggttgtgcggcagactataaaacataaatcacgtacagttacagcttttatggcaccctattgtgtgccttataaatgttgcaatccatatcacgctgcagtggttcagagctattggaaatcaggggaaaaaatctattcaaaagtttt

SEQ ID NO: 608423 - DNA, 413 bp, Homo sapiens
  misc_feature (413)..(413): n is a, c, g, or t
ggaactactctgccgtaggtggcacacgcatcagccacgtcacagcagtgcggcattcattaactaccttgacttagagtatggtaatcccttcatggtcattagcctgtagtagctctctattccgtactgtccggacacgctcataagctgacccatgtataccttcatgtgccgaccattggtttgcccaccattgtggcttgcacccatagtattatgtggatgaatgctgctcttactgaagccgatatcagaatggggttattactgccataacactctatccgagcttggatatcgactgacagcttgacccaacgcacgctttagggactaccggagacgcgcaggatgacgctgtgatcatagtacaccagacatagcttcagcggatggtccatatatctccn

SEQ ID NO: 608424 - DNA, 682 bp, Homo sapiens
agcggaatgcctcggctcctggcgggagtgccggtggcgccccgcagtccgcttgtccggtacttccctctctgactactcctaacccggagcctgtctctgcagaggtcacggggaggcagggagggcccaagcacgacgtcccacagtggacagcgggagcggcagcgtactgggttcgcggagcccccgagcccccaagggctagaggagcgctcgggagaccaaagaaagctccgcgagcggctgcgcgcccatcaataggtgcggggctcggagccgacggcagaccgtgcgccgtcggctgcgcctaaggtgcgatacagcccgagcgtacggagagtaccgtgtgcccacgagtcacccctgagaaccgccaacggcgcagatcaccctgctggctgatggcctaacgtctggccacgaaacgggttcacaccgcaaaatgcacgcacggcccccgcaagagaacaaggcgaaccagcgcgaggtccccacagtcctccaacacgggcgctgcgtacagaaggcgcaagacctcctcgcagaagcgaagacccacgcatacacaacgaaacgaacccgccaaggccgcacggggcccctcccacgactacagcaattgtacacaccaacactctgaggcggatgcttgccctggctgcacccagacccctgaggg

SEQ ID NO: 608425 - DNA, 114 bp, Homo sapiens
tcaaaagggccctggtcaaataagtggatctcagtttttaagagtcacgctcttgtttcgtgtttagtccgtaagttaccatgctaatgaggtgctgcacgatgaggtgatctt

SEQ ID NO: 608426 - DNA, 281 bp, Homo sapiens
tgaccatatactctcgcccctgagaaaggattgcacatttctcaaaaatcaggaatgcttatatgtgtggcactatttctgggttcttcataatgttccagtgacctatgtgtctatccttgtgataaagccaatcagtctcttgcttaggttatgatgagtccttacattgaatagactgattcctctccctctagtcttcttttatcaaaagtgctttgactgaactagaaccttgtctttcttgctgtgtgcaattgttaaacccgtctatatctcca

SEQ ID NO: 608427 - DNA, 114 bp, Homo sapiens
gtgctctcgaggatccccctcctatctgaatccagatcgccatgactgacaaaaatgagacggatggccttgtactttgtcgcaatcactggcgatctggattcagataggagg

SEQ ID NO: 608428 - DNA, 729 bp, Homo sapiens
taggaggagaagagaactacaacacgaacaagacggcggggggggaggcgagcgccccgtggtgcggtcccgcgctctttacaagaggtgctaggtaggcccgcaaggggtgtgcccagtctgtggcctctccgccgccttccgagtgctctacacccaaccgttgacctgaaaaccggcaattcgatggttgagatctaaaccgaagccaattagggcagggttggttggaattacaaaggaggaaacccctggatattataggaacccagagagtttgggttaaccaaaatggcaaagggcaaatggaagggcctataataatacaccagaagcccaccctttcgacacggattttgaccccccccccttgggccgccaaaaattaataaaaggggcaaaaatatggcctttttttataaaaaccgcctttgtggaaatggccaagcacaccctcgtatattgtctcctcaccccccatctcctcccacttatgaggaacaatgtgtctcaaaagaaactcctcccgagatgggtgaactccacagagttatagagtattatttatgccagaccttctcagaaatttgccctcccccgccctctataccactttctcccccaaagaaatcacctgggccttaaggggcccaatcggtttcccttttaacccccccccccaaatcttttaacccttttaaaagaaaaaaaaatgggtttcaaaaaaaa

SEQ ID NO: 608429 - DNA, 81 bp, Homo sapiens
gccgtgtattactgtgcgagaagggatatctctggggcccttgactactggggccagggaacgctggtcaccgtctcctca

SEQ ID NO: 608430 - DNA, 150 bp, Homo sapiens
agagcaggtggtcggtggcatctacggggttatgaacaggaagcggggtccacgtgttcgaggagtcccaggtcgccggcacccccatgttagtggtcaaggcctatctgctcgtaaacgagtcctttgggttcaccggttacctgaggt

SEQ ID NO: 608431 - DNA, 403 bp, Homo sapiens
ttcccaaattcaaactgatgtaaacaacagcagtctgaggaatagggctagttttttccaaggctttaaaggtgtttagcaatcatcatcatagttaaacgcttacaacgtaatagctaccattcattgaacatgtatcatataatggcccactggataagttcactatgtccagtgtttcctgtaatatagctatcttgtcaggcaaatgatataatgcccatttaacagatgaggataactgagactcagaaaggttagccgtaaccatgttctcagtgtctcaatagataagcaaagtttgaactctagtctatctgcccacattgagccacttccctcctatataatgtatccatatacacagcatgctttagctaagagcctgctaggtatttcaaat

SEQ ID NO: 608432 - DNA, 733 bp, Homo sapiens
  misc_feature (85)..(85): n is a, c, g, or t
  misc_feature (201)..(201): n is a, c, g, or t
gattgttgttccccgaatgaattataagcatcggaaagcggtgggtagaggtgttaccggtaagcgcgggcgacaagggctgttncccgacagctagcatgatgcggtgcgcactactatagatcattgctagtcgtaatgcattcagtaacaagcattggtcaacgatcttgataatcaagcgctcaaggtggttaccanacaagaataacggtagaaccgcgtcattggagcataggaagacatcaacgatataccttttagatacatgacaggggatgctgggagtccacggagggcatatgccttgtggcttgtcatgtagggactcctttgaaacggcatgctaagcaaagtggtattccaggacattctccaaggcgactcaaacgagtgtatcactaaagtccgaatgcagtttgattgtggggactagccaattcgtgtccgcaataagtctcttggggattgtggtcgcgacaaggtagtagacgctgtcaagggagcaaggcgaaaggccagtgcgatagaaagcaagccagccagggacactgcatgcctaaaatgggaacaaagtggatgatgtcttacaatgagaatgtctggatccatggaccaaacttccattcgcgcgcaaattttactgcaccggcgggcaattcttcacaaattatccacatccagctaccaatggtgggccctatcacaagcggattggggggctaaaaagtgc

SEQ ID NO: 608433 - DNA, 666 bp, Homo sapiens
ggttttctgaaagtaaaacaatttatgcgaacctatgtctaaattcactgttgttactatgtatgtttttttccaatgcttcttataagactaaatgattagaagtacctaatagtttgaacagatatgtttttatttaaaagagtagaataacgctttcagaattactgagttttttattccagttgtagcaaagatttcaaaagattgtgttcccagttaagtggtagtaatttcctttagttattctgtatccttaatggtgttctctctcctctctctcatctcgtctctcatctctcgtctcctccactcgcggttcccacactcgttctcatttctccttttgctcttttcttctcttttcatatattatatgcgtgccatagttctaggaggaaacgggttcaacaacattgtttaacactatgatctgtgaaaatattgaagaatgtgttttaggtagagtggtcagtgtgaaccttacagtaaagtatagaaatatatttagtgtggaatgtcaatgccaggatctctcattaacaatattttatctcaactgtggtccctgtgatacatctctgagtgggcaattccagaaatcttagtagcccatgttaagcttctattttaacttgttcgcggggagaaataagaattagacct

SEQ ID NO: 608434 - DNA, 190 bp, Homo sapiens
gcaagaattccattttatggaagctatacagaaatggatcctgtcatcattgcttctgaaggagtagagaaatttaaaatgaaaatttgaattattattgttgatacacgtggccgccacaacaggaggctctctgtttgagaaatgctcagtgctatgctatccacctgatacatgttatgtgatggat

SEQ ID NO: 608435 - DNA, 170 bp, Homo sapiens
ctaatctagaggatcgcttagaggcacaaggaggctgctgcggatatgggtacggcccggcgcgagatttacaccctctccgcagcaggcctcttggtgcctctgccgtccttggtgcctctggcttccttggtgcctctgggtgcctctggcctccttgaggcctctgg

SEQ ID NO: 608436 - DNA, 1002 bp, Homo sapiens
taacaacccccgtgttcctgtgggtgggtgtgggtttaatactaagtttgaaatgatttctttatacggggaaaggcccttgtggtaagtataggcctttattttctctcttgttcctttcgtccagggaggaatttgtgaagttaaattagaacccgaccgtgatttacctccggttcgtgaactcaaatctcccgttaggacttaatctcgtgtgaacacaaaccaaaccctttaattagccgggtgtgccccatctcgggattgttccgtgattccaaccattcgaggtctcgataaaccccttattgtgtttgatttgtgagcctctctaaaattagggatttgcgcccggtttatctcccttaggggtataacgttgttcccgttgtgggctccaagtttatttggggactccattgtggagttattagttagtgtccgctttgggacgtgggtgtgaagctctttgccatttgttccgtgctctcggaggttggggggtctctgactcccggaggttcgccccccaaaccccgaaattttttataagtgccaggttttgcggaagtttattagagaccctggtgggttttggataacggataccgggtttgggcttaaattaaattttaaagccctccaataggggatccttcttcgttctttgctggtgttcttgcaccgccttcttctcaggggccaggttcaacttcccccgtggttttacaccgttctgagcaaccgttttacccccctcgtgtggaccccattctctacggttccccctatttttaagggacccacggtgtattattccaaacccttttccccaggttaaggttcaccggggcccgttaaacatttttgtccctgtggggcagcgaggtgccccataatacctgggcactccctaaaagagtcacgtttatggggaaacacaggcggggataaaatatgtcagaatgctctacaaattttgtaaacactttcctaaataga

SEQ ID NO: 608437 - DNA, 524 bp, Homo sapiens
gattatagaggatccccacctggtatctcagacagtatcgacgagggcaggcaggaggatcccttgaacccaggactttgatatcagcctgagcaacatagtgagactcatctctacgaaaaataagaaataagctgggtggggtggctcacaccgtgtaatcccagcactttgggaggccaaggtgggcggatcacctgaggtcaggagttcgagatcagcctgaccaacatggtgaaaccctgtctctactttaaaaatacaaaaattaggccaggagcagtggctcacacctgtaatcccagcactttgggaggccaaggcaggtggatcacctgagatcaggagttcgagaccagcctgaccaacatggagaaaccccatctctactaaaaatacaaaattaatcgggtgtggtggcccatgcctgtaatccctgctactcaggaggctgaggcaggagaatcgcttgaacctgggaggtggcagttgtggtgagccgagatcgtgccattgcattccag

SEQ ID NO: 608438 - DNA, 262 bp, Homo sapiens
cggtcctatagggcttggagggtaggctgctctgcaagaaagggtactgaggggtacgacggatgacacgatgggctggggatggctgcccgacgtcacgatgcgtgggttgctctgaagcatgggggcaaacaccggctgtgagcggtagtgggccatggggctgcaatcagtggctggctggcctgggacacctgctgacgggtcagtacggggatgtacggaagaactagggcgtggcatccacgcagaggccgggccc

SEQ ID NO: 608439 - DNA, 427 bp, Homo sapiens
  misc_feature (283)..(283): n is a, c, g, or t
tggccgcgtccgtgctgagcgccgcgctgctggcccccggcggctcttcggggcgcgatgcccaggccgcgccgccacgagacttagacaaaaaaagacatgcagagctgaagatggatcaggctttgctactcatccataatgaacttctctggaccaacttgaccgtctactggaaatctgaatgctgttatcactgcataaccctcttgctggaccagagaaggaaggagtgagacaccagggtattctccaggggccagcagagtggtgcaagttgagngagtggcagttattccaggccctgcctccctgatgataacaaatgcattttctctgaaggttttactcctattctagaccttgttgctttttaaggacaaggctattctttcatgtaaaataaaatattctactatgcaaccat

SEQ ID NO: 608440 - DNA, 431 bp, Homo sapiens
  misc_feature (251)..(251): n is a, c, g, or t
tggccgcgtccgtgctgagcgccgcgctgctggcccccggcggctcttcggggcgcgatgcccaggccgcgccgccacgagacttagacaaaaaaagacatgcagagctgaagatggatcaggctttgctactcatccataatgaacttctctggaccaacttgaccgtctactggaaatctgaatgctgttatcacgtatgtatcagttcacactcagttctgtttgctttggggcttgtttgatatganccttaatgctctcatgtctaaagcccttcacaagttaatttcagttttgcagctaaagaaacaaagaagctatataaagagtcggaagaaatacagtcaggggaggatgcctaggaatgcacagctatctaatttttgtcttttcatactactacatccttttaaaagggccagtttctc

SEQ ID NO: 608441 - DNA, 341 bp, Homo sapiens
  misc_feature (266)..(266): n is a, c, g, or t
ggaaaacccggtagacgatgagactcagacaggaccaagggacggccccacagacaacggtagccctggccagacggttgttttgtcttattggtttttatgactgtgggatatccctactgctgcctaggcctgagcttgacacctcctgggctccaagcgagtctcacccacgcttagcctccgtgtgtagcatgggattcatagcattgggagcctacaatgccctagttccagcagggttgtgctccttagcactggcaccntgcatcagtctcaagatgggtggggaggtcctgccccaactggggcagtcaccttgcccagatccctagaaggac

SEQ ID NO: 608442 - DNA, 155 bp, Homo sapiens
cggtaggatggcgattttggtctggtgactcggtgtgtggtacacgccgagacaccaaactgcacacgccgagtgcccagacccatgaggtcaaagtcgccgatctgaagcatcggcgataacggactgctcagtatggggattcggcgtgtgca

SEQ ID NO: 608443 - DNA, 228 bp, Homo sapiens
tgctcccagcgtggagacgacggcattatccagtcccttctcacacttgccttcggcgctggtgggcacagcgtcaatgagggacacggggatctcatcattttgcaggctgctgcctttctccttgtcctcggggaaggaagctgcctggctctgagagtcctcttcatctgaactgtctctaaagccaggtggaggtgcggcaatggccatgttcaaggaacgaca

SEQ ID NO: 608444 - DNA, 269 bp, Homo sapiens
gaaaacggcatgtgcatgcgagaccaagctccccaccctgcggagataggaggctcgcgcggagaacgtgtgtgttaggagaactcggtgagtgaactgttctttctcgttagtattaatgtggaatccccgcctatcacattgtgcacactttatgggtgtgcaaatgacacaaaagatatccacatgccctacctgtgaataggtgtgtatatccacatacccagcgcgtcatgccacgtggtccataaaccgatgatgcttgagga

SEQ ID NO: 608445 - DNA, 591 bp, Homo sapiens
attacagatcaatattatagtactgaatatgaaaaaacttcccagcttgagggtacaacaaataataaggcattgcaaactctagaatcatgattttcatgtgagcttaatgcagaattacggccattaaacataaacacttgcattacatttcttcgtgattagaacaataaaatattcgactgttaccagttctcctttaacaatatattgttaagtgctcatattggaaccatattgctgatgctgccgtatataccctcaaaaccaaaacacaacacatactgtataaaatttataagcaaacaatgagttgtgacattgatattcaactgaaggtgttaacggatttttacctttgcagacacccaaaagaaaaagaaaatacatatttgtgtgactgttcctgacttaaatgacggatacagggataaacacggaaggaagccttgccaagttaatcactgccaattgccaatgatgactgctaacaacaaacagatgtgtttttcttttaaaggaaaccatagagcagatcttgagacacatatattgctagttctgcacaggataattacaagcagaagacaa

SEQ ID NO: 608446 - DNA, 367 bp, Homo sapiens
cgccccaagacgctgagattacaggtgcccaccaccaggcccggctaatattttgcatgtggtggagtcagggtttccccatgttgatcagactgggctcagactcctgacttcaggtgatccacctgcctcagcctcccaaggcgctgggattacaggtatgagccaccacgcctgccaatttgcatgctttttacaaggagttcggtgtctcctgcccagcccactgccactggactgccctgtattgcaagtcccctcaataaaccttatgtctcagttgctggttctacggctcttcttcagcctctcgaacatggtgccatccctactgaagtcaatgtggtctgacatgacttgtggcgct

SEQ ID NO: 608447 - DNA, 485 bp, Homo sapiens
tcaagcggaagatccgggatgagagcctctgccccccaacaccatgagccctcagccttttctgttatgaggaccaggaggctgtatgcttgatatgtgcaatttcccacacccaccgggcccacaccgttgtgccactggacgatgctacacaggagtacaaggtggggaacgcccaccacccacccatctcactgtgggtaaacaggcagaaccggcagaggatgacatactccctagctcacacatcctaacctcctactactcactttgtattctcagagctgcatatgcaggggcacacagtatgtgtgatcagttgtcctctagcctgaaaaagagcaatggtgagaagtgccccaaaatttctctctgactctcgcaatacatgtgagccctacgggcgaatatcggtatgcgtggtcatatttttcataaatgaatgaaaccacatggaaaagattaaacttaggaagaactgaaaa

SEQ ID NO: 608448 - DNA, 368 bp, Homo sapiens
ggggggccccccccttttttttaaaaaaatgggccggcctttaaggttgggccccccccggggatgccctttttttaagggccggggtccggtttttctggttttttcccggtaattgggcccccaaggggttaaaggcccttttgaagggccctaaaattttgccttgtttaaacccagttgggtttgggggccggttttttttggttaaaaattaaaaatttttggggggttttaaatggggtttctgggcccgggggggccctttttcccgtggcccgtgggccccttggattttggggttattggttattatggccccccccccttttttgcccggtttttttttttaggggggggtgttttta

SEQ ID NO: 608449 - DNA, 703 bp, Homo sapiens
agggccttagcaacccatgcccccaccccggaatggcatggtcttgaacgccacttcccaccaaggactggcacggcgcgtggccacgtggttcaacccgccggcccgttagatccccagacgttagccccgcatccaggcgcccgcattgccccgcgccccgctcgggtcccctccggcccctcgtgcgctgccccccggttcggtaccccccgaaggtgcgccccggccccggcttcacgcctggagggaagctcagggtggccggcaatcaccagaaggtggcccggaccatcggcatattctgtggataccgaggaggcgggaccaagtccccggagtccctgccagacccacgtgcagcggctgaaggagtaccgctcccaaacatctatcctcttcccccggaagccctctggccccccagaagggagaccagttcttgctgaagaactgaaactggcccaccccagctgaccggacccggtcatgcccgtccgggacgtcctataagaaggagaaagctcgagtcatcaactgaggaagagaagaatttccaagccttcgctagtctccgtatggcccgtgcccacgcccggcttttcggcatacgggccaaaagagcccaggagagcccccagaccggatgttgaaaagaaaaaataaagccctcctggggacttgggatccgtcggccagtcca

SEQ ID NO: 608450 - DNA, 111 bp, Homo sapiens
  misc_feature (40)..(40): n is a, c, g, or t
  misc_feature (45)..(45): n is a, c, g, or t
gcaggaaatagaaacagtctgaactatccagcccgccatnatccnagtccgaatcgacctccatcctacgatcctttacatacagacgaggtcaacgatccctccttacca

SEQ ID NO: 608451 - DNA, 694 bp, Homo sapiens
atgaaagtctactcctgcatcgtgtttgatctagtatcacagatgggatgctggatcttcgtgaaccatctcctgattgctacgtaacattcgacacgtcagatgtgcttgacacgacctattatcagtcgtgcaatgcacgcggcgaatgatccctggacaatgggaagtgcatccgcatccaatgcgcgagaccatagtgtgtgagtcatttctgcttgtgtgtggcacatctggtatgattgagctgacagccttgtgagatgatttaggtccagaaggaagtccagctaggtgaccttgtctgggcctgcatactagaggcttgtaatgcccccctacatacgtggagggatgccctcacaaggtaaaaactcggtcattgcctccaagtatgtgagtccatcttggcacccattgtcgggcctggtcaaggcgcaagggataccaatcaggcataggatgtgcctctcgtctagagctccgcggactgtaacgacttgctagcgagtcatgagccgtcccgacagtattggcagctcgtgttccctgacgtacggtgtctctagacacagagttgcaacttgatcgcataagcgggcggcgggcataagggttgcgactctagatttgtcagtaaagacccctacatgaagacaaacacctttgtaagtggaccccgcagtatcagaat

SEQ ID NO: 608452 - DNA, 231 bp, Homo sapiens
aacatgtttggaattagctggaacagaagactaaaacatggttataggaaatgaaaactcagtgtactgcctggttctgcaggcctactaccaggcaaaggtcttttatccttaccttggctgccttgccttgaaccattgtcacatcagctacaggtagttggtagaatggccaagcctgtttacaaaaaagcaagactaataggaggaacaacactatgaagtcgacgc

SEQ ID NO: 608453 - DNA, 1302 bp, Homo sapiens
tttgtttgtttgtggttgtgtgtctgctgtttttgttggtgttttggttttttctcttattttctgtgtgcttggcgttgtttttttgtttttcgtttgttgagctcgatgatttgcgtcttcgggttgttttgtttttttttagtgcggcttggctcttcgtgttgtgtggcgttgtttgtgcatcgtcgttttttgtgtgtggtgttggcgctcatgcggttgctgttttctgtcgtttccttattgtcgcgagtgcggtgatgtccgtcgcttttgttctgttgttgttgtctgttgttggtttgtttgcatgttagttgtgtgcctggtggtcgctcttttgtgctgttccgtttgttctgtcttttcccgtccttttgtgtcttcaatgctgtgtgtttctgcctttgttgctcctctgtgcctttggctcctctttggtggttcttctaggcagccactatgggggtcgcttgtgttgcggtgtgttctgcattgtgtggggctaggttttgtatgcctttgccctcctttctgctgtgggtttttccttccttcctctaggtgtttgctgtcttgtttctccatatgaggtcctttgttcgtgtagggtgtctgtatcgtggggtcccgtattgggctgccgcatggggtccgtcccgtgtgtcggtagttggcccgcgcgttgcttgcgtgtgtcgtattgtgcgtggagttaagtttcagggcgctgggctcattggcgctttgttgtggctgttgttggttttgtggagtgcagttgttgcttagctggctgtttgtgcttgtgtcgtgcttgtgcgtatcagcatctgttcgtcgtgctgatggaatatgtagggagtgaagtggaatagagagttaatttgtggtaagggagatagtcgcgaaggctagcccaggtccgctgtgagccctagcacagttggccgacgccgtgtcactgccctggctgtcgcttgcttctcgtgtgctctactgatagggtgtagccatggcctgtgtcttccctcagctccctgggcctggtcactacactagtggaaaacatgactatagcggccccttccccaatatcccaagagtgtcttgctgcttggtgggtgctcatcgcaatgttctgaaggctcctagggccactgttgtttgtaagtatgatctgggcctcataaataccatagtagctgcttgataaaattcgtaaaaatatctggttctctattatgtaaacactattacagtcaccagtgtgtgaagactcataagtctgggtgctag

SEQ ID NO: 608454 - DNA, 182 bp, Homo sapiens
ggtcatatgctactaagataccagctgtctgaagtgtactgggaacaatacacactccatgcgttttgatacatctccggaacgaggtacgagacttgagtccacacatggatgctataccaagtacttgagggccacaggctgtgttgtgtaacatgcacagataaggtcctccctaggtc

SEQ ID NO: 608455 - DNA, 978 bp, Homo sapiens
actgtttgagtttatgtattgctttattttaatcaggatcttctgatagtggaaatttttagtacataatagaacttattgatggagttagaaattgtagtgtctatccaggattgatttccatttgatcacatctcacagtaattaatatttgcaagttttttttttattaccagctctgtgctagtttttatgttgactgtgtaagcctcatcccaaatataaagcttagtgaagtacaattaacttaatgtacttgacctgaatagaacttgctactgtttcattttttctatctatttttggaaacagaatttgggcccttcatggcccagcgcgggagtgcggggggggcaatttcagttcaccaaaacctcgtgcctcgtggggtcaaaggaatctttccggcacttgagctccgcccgttatagtcgtggaataacgggcaccgcaccacaatatgcccggacaaatgtcggattttctcagaagcacatgggggtctccccatgttgggacaggctgggtctcaaatctccccactcttacagtggatcgggcgaacctggggctcctgaggtgcgagatacacggcgcgtgacccatttgtcccaagtttgctaattctcacagaatttggctgggcattttttcactttgtaaaacgggtggcccgcggatagaacccctttaatttttttcggacccccagatctggggctcggctataaacaacgtcgcttaacaagggagaaaacctttcctaacgccgtgtcgtgggaaaagcggaccgccaaaatcgttgcctctctcacgagtaaaaaattggcgcgaccagggtcgcccgaaatctctctgggagcacagaggttttggcccattaagcgttacaaagcagggctccattgaaacaccggggtgattttccccgaatgaaactgtaggaggacttctcgaggcgccaattttacgtgaggg

SEQ ID NO: 608456 - DNA, 725 bp, Homo sapiens
ttccccctccttctcgtatgcggggttcttccctgtgggatggcttagattcctctccgcttatggcgcgtctttgcttgtgtgtgcccctctggtggggcgccccctctatactggggcttttcggccccatcttctgtggcactttgtatcggatccggaacctgtggaccaccgcgtggtcttctggtgaggggtccccttttcttgggccgggtcattccctctttggggtcctcaagggctctttatctggttttccccccccagtctgtgcagacagacattgatacgctgctgggactgaattcgcgatccgaacagcagcgattggccgcggtcacttactcggagtccttggcgcccgcatgtgtaccctttgattgcgctcatgacgagtcctccgagtgacggatgctacctcatgagacgtcgcctcgagctcggtgaccttgctaggcccagcagcccactccaatctcggtagagagggataagccctatattgcctagccacccatgctgtgatcccaaaaccgcctagctgctgcttcttcctcagccagccatcgcccatcccctttgaggtctcagcccctttccctatgtagctcctcccctggagggggaatggcagccaggggttggggaaacagcatctccaagcagcatctagagttggccatatttacctcagcctgggcgctggtcctttcttccggccc

SEQ ID NO: 608457 - DNA, 231 bp, Homo sapiens
agctgggtacccaggtagactaacatatggtaacatatacatcaatatgtgctcccctgcacatctattcacaagtgacgttccaaatgacgacagctgagatatttaggcatgtgctaaaagttatcttagttgagatatgaaaaatgcttcagatggattcagattctcgagtatgttggattagtcatagctgaatcctgttgtgataagatggttaggtctacctgg

SEQ ID NO: 608458 - DNA, 349 bp, Homo sapiens
ccccaaccgctcgctgaccggcacccgcgccaacagttgagcgccgtcagtctcgacttgaggtttaccgagatcggcatccgccagcgtatcgaagaacagcgcgggctgctgccagccggcggcgcgttcggcggcaatctgcaactcgccgttgcggtaaccggccttgacgctctccgccaccccggcggcgatcggcacctgccccatcgcctgcgcgaagtcgtggttaaactgcggatcgttcggcgtcgtcagatccagactgaacgggtagtcggtcagaatgcagacgttgctgcaggtggacagcgtcagggtgcccgccagcgggccggataccggg

SEQ ID NO: 608459 - DNA, 836 bp, Homo sapiens
ggggtggcgcgggtccgggcatgaagctgggccgggccgtgctgtggacctgctaggtgctggtagccgtacctgtggtgcaggcggtggagcccatcatgccttgggacctgtgccctggccggcgtcctcaccggctacagtcttacccgcgtcgtctactgctctcttcgccgagatgctgcgggcagaagcggagccttagccgggaaggctctgcagaaggatctggacgataacctcgtttggacagcatcttgtcaatagtaaacatcattcttaaatgccgtgctttggatttcactaaagcagacccaatgagcccagagaaacctcttcacgactctccctgcaagcgggctggacaggcaccggctaaaatctcgtcagcaatgatcatcgcagagaactatttacggagggtggatctgacacaggtgactatagtccacctgttgagtggccacagttgcacttttccacgatgcttcaaagatcatccttgtacaaggcaaggatggaagtttggaatccctttctggatgtcatcgggattggggtctcttcgtaagtgggatgagatctggagaagttctatgttgaaattgattgaagcgccggtacacacgggatcatgttctcagggttccctctttgggcaaagggtcgtagcaagcttacagaccttttgcacatcgcggttagacgcgaagtttacttacccagtggccaagcatttggtgcgtggggtatactgacgaatcggatccagtagaggtatgtacaggccctggggagccagagaaggtgggacatgctcaatatccatctttaag

SEQ ID NO: 608460 - DNA, 926 bp, Homo sapiens
  misc_feature (324)..(324): n is a, c, g, or t
  misc_feature (332)..(332): n is a, c, g, or t
  misc_feature (339)..(339): n is a, c, g, or t
  misc_feature (342)..(342): n is a, c, g, or t
ccccgctaggggctcctccgccgcgcgcgcacatattggccaaaggaccccccaaggccggatgcccccccgcggaaagccccccgtgtcaagaccccccctggggccgacgcaacccctcggactatgcccccgggcgccggcctaaacgtgccgcggaaatgccattcgcgccggggacgtcccgggaaacgccaaggcgcaagtggcgggtccaacgcccactcccaagtaggccgcctaaggtgaagcgctcctgcccagcaagcaagggccggggtcaaagcgctctggctgtccggcaggcctccgtagggtcccccncgctgcancttcgcngtnttcagacaggatcagctcagggttggcggtgtccgggtccaaggtcacgtcccctcgaaaccttccgcaagtgtctctaccaagtcccgggaccctgcaacacggtcctcagctccataggcaacaacttctgggggctgcagcttcacatcctggaccctgcgcagggcgtccttgatgtcctgcagcagccccagagcaggcagctggcagcggccctcgagctcggcgatgagctcagctaggtgggcgctctgctggccctaaggtgtgcgccctcccgcagccggggcagcacctccagctcctcctcctccagcctcttgagcagctgctgctcctcctctgccagcaaacggcgaagacgctcgaactcacccagcacgttctgcgctggctctccaccatcttctgccacaagacgcaggtctcatccgcctgggcttggaacagcaacgcatcctgcatctgcttccggagatgctccagtgacttctcccagtcgccttgaggtcttcgccgcgtcctgcagcgccgcaccggtgcgcccagtgctccccagagcgctcgcagccgcacacagg

SEQ ID NO: 608461 - DNA, 530 bp, Homo sapiens
cttagcgtgctcacgaattctgttggcagatgctatggttatccgggatgccaccctgacgggtccctagcctcctccatacccaccgtctgcccctggaatccctctctgtgaatcccttggctcctggcatggttggaccagcagtgataataaacaacaagatgcagaaaaaaacgaagaaagcacataaaaagatggacaagcaccaaaagcaccacaagtaccactaagcatggcaagcatacctcctcttcctcctcctcttccagcagagattctgactgaatacaggccctggacccttccctcaagtctacaccagtactgctctcccatcaagcttcagaatgccatgttgtactgggggaatgtagcccttgtgctccccagcccctacctccacctgagcctcaccctgctgttgagccctgagtggctcggggaaatgggaagaggattgccatggcctggccatcttgttgctgcttgggtagatcatatagctactgacttagggcaggggagct

SEQ ID NO: 608462 - DNA, 1965 bp, Homo sapiens
ggggctctccctcttgtttttcgtagtggtgtttgtgttgtttactatccagccgccccgtcgtgtgtttatgtagttctgcgtctgggtcgctccttagtacgctctgctccgtactgttcttttggggggggggccaactactacgcatcagtgtttggatgtgtgttctgcttgctgtcgtttggttttcactaagatgtgggctcgctctagattttgttctttgtcgtcatagtatgttctgtctccatctgggggggtggtgtattagtactccttctcctccctttttgtgtggtggtggcatcgtttggtcgtctgtcgctgccctcccatactttgtgttatgtgggtggttactttattgtgtgcgcttttttactacacgagtggttggtgtgatatctttttgtgtgtaggaatcacacacataggtgctcgttcgctttttgtgttggtgggtgctccgccgctgttgttgtctctctccttttttggtttggctcgagatagttgtgctcctgcttgtcttcgacccacaggcgtgtggtttgtttgttgttagtgacttctcacctcgctcctctctcattcagtctagccgtctcgtcggttgtggttcttcctctcatgtgatgggggtaggggcgtcacccacccttactagtgtgtgtgggagatcattgtctgttcttcttctcgcttgcgtgctgtttgcctgtccatctgtattatgagtaagttggtgttcggtgttctgtcctcctccttcggtgttgagtcattccatcttcgtcctcttctgcggcgggtggatgatatatgatgttggtgtttgttgtcgccctcctcgtcggtctcctcctccttcttggggtgtagaacttccacttaccaccgcgtctctactttagttttgttgtgtcctccatcatgtttgttttcctcccagtggtggtgtttatacacgcttcgtctcttcgtgtcttcttctcttctatgagcggtgtgggggggtgttctctcctcgcgcggtgttttttacaactccgcgcagtttggtagtagtcttttttcacacatctgtgagtagaagacagcatcagagatcctccgcttctggggggagcagcagctattttgtacaacgaattgtcgtccccctcccaccagcacattagtgttgggggtgttctcctcctatcatttattatttcacaaccacaccagcagcagagtacatccttctcgtcttcagtagatggccccccctcgcgcagtagtagtagtggggtatttctctcttctcacgccactctctctctctgtgggtagtgatgagagacctctctatctctctctcactgtgggtgtaataagacacctctctcctcatcacagagtagacagctctctcatagacatcttatgtgctctcagagtgtgtgtgagaggcgtctccccatcacttctgttctgtgtgtgtctctcatcagaggagagagctgctgtgttggagacccgcggggcgcagcatgctctatagtagactacaacacgcgtgagagctctcgtgcccacactctctgtctgcgagtgctcaccgcgagagagatctctctgtatagctcgcggtgacgcctcgttggagagagccacacaagagagagtctctctagagagagagagatctctctcaagaggcccgccacgctctctctgggtgtgtgaaaatacacacaaaacaggtctccagcaggagaacacccccttctctccaagttctcccgcgagagtttcctcccagatgccacccgggcgcctgttgttgtggagagaatcaccttaatatttttgttcttttgaggcccctatgctcattaacacgggggacctgttctccccctattttcactccccacgattttaaaaaactaaaagtggagattttttgggctttta

SEQ ID NO: 608463 - DNA, 501 bp, Homo sapiens
agaaatggactattttgctctcatgtgtaatgttttctatttaaatctttcttaaatataccagctgttctctttccctgaactctcccacaggttctaggacaaatttaataacatgtaattctcctcaaatacttttgtatgtctcagtgttggtgttttcctccctaaaactaacattagggctgtgccacgggcatgactttatttttgttgggcttttttttccctgcttaaggagaggtgtcttttttggatatgagctatttattttgtgaaatgaaaacttgttcacccaaaatgattctctctataaacatattgtgtaacatgtcactatattacattagtcgtttgcacatcaatttgttagaaatattctatttctgaactcaactcccttatcattgacgacaagaccttgcaatgttattgatgtcacatttcttcacaaggccctgcgctcacgtctaagttccccaataaagtggtgcagacaca

SEQ ID NO: 608464 - DNA, 1687 bp, Homo sapiens
  misc_feature (1642)..(1642): n is a, c, g, or t
  misc_feature (1687)..(1687): n is a, c, g, or t
cggcagcggcacagcgaggtcggcatctggcacagcgaggtcggcagcgtgcagcgaggtcggcaggcggcacagcgaggtcggcagctggcagctgaggtctggcagctggcagcgatggtctgtgcagctgtgctgcgctgcttgttgctacttccgctggacttctgaagtacatgtgcgaccactggccaacgattggcagacctctgggcttcggctgcgaaagcgggcttgcttcagaagcagcgcaagcacttagactaaacagtcggccattcggatgcaccgagctgcaggccaggttgccatttgtagaccccgcaactgtttccggagacccaattgtgggcccttagccggggaagggcaccctttgctttgcttgctggggctcatttctttcaccggctttatcacgggggtcttcagcggaaacagagaccctacatttcgcacgcgagattcacagatgccacccctgcaaggcgcacattcccaacatgccgagggcgattccgattccggacgcaggggcggcaacgcgagcatgttgtccgattccgggccgacgcaggatcctgtccgaaggtcccgcggcgccgccagaatgtgcgcaccacacgacgactgaatgcccccacaccgttatttcacatgttacaaataccttcagaaggggtaccctttcacgcgaatgggttcagttcaccccgcgggggaatcaaattatccgcacggcggtgttccccgcgttcgcgaagagacctttacaccaagtgccttcattacggacgcttcctatattggggcgtcgaaccaccccgaacgcacacatggcacaggcacagggttatcgggcgcgttctgttttcgcccacggcaattacccccacgggcaccaggctgcggcgcggcctatcgcctttttatggcgtccccttacgggcgtgttagcaaccctttaacaccactttatggcagcatttcacgttacccgcagaagttttgcccccacaatttagaccgcccttatgtccccacctatatatgtggctgacacggtgctgcgcacacccccgacgaacgtttgggctattgcgtcggccgcgggaaagtggggccaccccctattttacaacgggtcggcaacaacgcgcgcttctgtggtgcacacattattaacgcggagggtgagaccccaacgacgaccacattagcgatatattgggtcttccgcgcgcgcgtgcgtggtggcccacaactactatcccaccgcagcggtggtgcgcgctgtgcataatggatatctcccactacggacccgcctcagcattgcgacaattatcgcggcttaccggcccacagtcacagacagcgccccgcctttaagacgtgagggacaccaccacgtggtatttgccgtttaacatttacgcccggcaaccacttattggttctaggtggcgctacatgctgtgggcgcgaactattagacacagagggcgcctttggcactattgcaacaaccccttgtgtctttcgcacacgcttattaaccacgagcgggcgttcttactccagccacgactgtgcaatgtcccgacaggacaaatacattacacgcgcgccacgccgtgtnattcatcttacagcacggggtgtgctttacgccgccctatgtacn

SEQ ID NO: 608465 - DNA, 183 bp, Homo sapiens
gagctcggtacccttgtgctgggtgaagagggggagtgagagttggaaaaggagagttcagtgacacctgtgtccccagctccccattgcctggttgcagcagccctcaatttctcattcttcttccctttttcccaaccaatgtggattctcttaaatctaacttgatgcattcaagctttg

SEQ ID NO: 608466 - DNA, 822 bp, Homo sapiens
  misc_feature (150)..(150): n is a, c, g, or t
gtaccaagattacgcatatatctccttctaccagcactgctcagtctcccctactatgaacatcccccacttagagtgggtacatgttgtgtacaatcgtatagaacattgtattagagtacatcagttatcgatcgaaaagtccatagnatgatactaggattcactctgggtgttgcacatgattatgggtatggacatagtgttctaatgatcctgtattcaccattatggaatcatagtaggagatattgtcagctgtcctgaaagtctccttgtgtgctataacacaatcgctggtgagcagtggtactcttagtggagtccatagtatcgccttttacccaggataatcacaaggtcggaatcacatagtatgtagctctgtgcagattggttgtgatcacttattaataggtatagtcacgatcgctaagaccgtgctgtccattgcgtcgtccggagcccagtaagaagacagttcttagatatgcaatcctatgtgtcgatactcttcttggttctcataaataataaacatgaaagttaacaatcctatggtttgcaaaccattttaggacctcagagcactgttatcttccgtcctgaaccgtccacatagaacgtgactacgacgtatcacactacattccagcttgacattagcaaacggaatgggaaagactctggcaagctcgggattcgtagatcctcgggaatcggacttccattacctgtctggacaatctcgacatcaataagaggacacacgtctataataccttatcttatgcacttaaggtttacatgggttcttggaaa

SEQ ID NO: 608467 - DNA, 335 bp, Homo sapiens
ccaaaataaatttgttaatgatcccttccaaaaatagattgccaccagcctgattagtataaattttgttggtaattaaccccttccgggcataaaaagtttttttcaaaaaaaattgtagaggctggctttttgttttttccatccaggccaaattattgaaaatcctcccgggatataggccaaggggtaaattttttttttttttttttaaaaatatgttttatcctgagggcggtatttattacttttttcctttggttcctgttgggctcttgtaaaaaaaaaaaatattttcctgaaaaataaaataaatatagggcccttggggggca

SEQ ID NO: 608468 - DNA, 916 bp, Homo sapiens
gccacgcaccacttcaaagccgttcatctcagtcacagtccagagcagtactgagtctgcccaggacacctacctggacagccaggaccacaatgagcgaggtgactatgccagtcgggcctgatgcaactcgatcggacagcctggacagcagtacccgaccgcccagcgtgacacggggtggagtcgccccagcccctgaggccccagagccacccccaaaacatgcaggctctgacaagtgacacaacgggacagctgaccagctctgagtcccactcccgaggtgcggccccaacatatggtaatagctgtcatcgataggaatacaagtggactgctttcagaccagtgccaaaagaggagcccagctccacgttaccagaatttccatgtccagtcggggttcaccgtagaggacgactgtgcgtaaggcagtcgtcctcgctctcacagtatgtcctcccgagcgggacacagactcggatacccaggatgccgatgactcatagctgtgaagtcatctgataggagcctcccggactgtacccctcagcccaactccatcagcatcgatgccggtccccggaaggcccccaagattggccagtatcaagcgcaacgtctgctatggagacaacagcagacctgtccctagaggcgtcctcagctgccccacccgagcccctggctcgagacctcctccagctccccagcagagccggcacagccaggggcctgccgcgagacggctactggttcctaaagctactgcaggcagaaaacagaagcggcttgcaaaggctggtgcctgccagatggacaaggagaccccaagagaacagactctctggaagaagtcttagcgaaaagtcctcagatgctgtgggcaagtgccccagtactgattgtccca

SEQ ID NO: 608469 - DNA, 316 bp, Homo sapiens
  misc_feature (82)..(82): n is a, c, g, or t
atggtatagatatatgggctaggcagagagggcatgacctgtcctgggacagcagccacttaagccttttagtgcagtgctnccttccacagcaccacactggattctggagtctttccagccagggcagaggaagctgcaacagtccacgataagagcttctgggcttctcgtacctaccctctcagactgctggtcctagggtcattaagggctgctgcacgttgactgaagtcatggggttggttgggagcaggttcttttttggaggccatggctggggattggggctgatggctgggaagattccaggcct

SEQ ID NO: 608470 - DNA, 554 bp, Homo sapiens
  misc_feature (18)..(18): n is a, c, g, or t
  misc_feature (30)..(30): n is a, c, g, or t
  misc_feature (32)..(32): n is a, c, g, or t
  misc_feature (38)..(38): n is a, c, g, or t
  misc_feature (41)..(41): n is a, c, g, or t
  misc_feature (43)..(43): n is a, c, g, or t
  misc_feature (56)..(56): n is a, c, g, or t
  misc_feature (62)..(62): n is a, c, g, or t
  misc_feature (69)..(69): n is a, c, g, or t
  misc_feature (73)..(75): n is a, c, g, or t
  misc_feature (77)..(77): n is a, c, g, or t
  misc_feature (87)..(87): n is a, c, g, or t
  misc_feature (91)..(91): n is a, c, g, or t
  misc_feature (96)..(96): n is a, c, g, or t
  misc_feature (104)..(104): n is a, c, g, or t
  misc_feature (112)..(112): n is a, c, g, or t
  misc_feature (114)..(114): n is a, c, g, or t
  misc_feature (118)..(118): n is a, c, g, or t
  misc_feature (122)..(123): n is a, c, g, or t
  misc_feature (132)..(134): n is a, c, g, or t
  misc_feature (136)..(136): n is a, c, g, or t
  misc_feature (143)..(143): n is a, c, g, or t
  misc_feature (164)..(164): n is a, c, g, or t
  misc_feature (218)..(218): n is a, c, g, or t
  misc_feature (283)..(283): n is a, c, g, or t
taaagttataagttattnatttaagccatntnctgccncangnaaagggatggganaccagnataccantcannntnggatacaagnaaanaaggngagcttangggcccananactntttnnggtccatgnnngngagtaanggtccaaaccagtgctgtggnccctggtgcccgggtagtggtccagattctctttattcatcttcgtagccagtnggaagtggattcacatgagggttatggaatagagtatggttaccatctccccagggaaacggctnggtcctgatgcggagatgggggtaggcgatgaactcgggtctctcgtgtgctcctccggtgggtgcgacttcgggtacacatttcagcattgctgactggccaccccggggagcgcgacgaagaagggtgagagttcttccacattgcgagcttgagcccttcttcgccaggggcgccatctcgacttaggccgccccagttgtgtggtgcgggacccgacccagaagccgagaaaaccggggacaccccaattaccgccatttgtgggag

SEQ ID NO: 608471 - DNA, 87 bp, Homo sapiens
gagagagatgaagggtcttactactgtgcctgtgacaccgtagatcctacgggggatctctactcctgggacacccgacagatgttt

SEQ ID NO: 608472 - DNA, 426 bp, Homo sapiens
  misc_feature (17)..(17): n is a, c, g, or t
  misc_feature (23)..(23): n is a, c, g, or t
  misc_feature (25)..(25): n is a, c, g, or t
  misc_feature (33)..(33): n is a, c, g, or t
  misc_feature (50)..(50): n is a, c, g, or t
  misc_feature (57)..(57): n is a, c, g, or t
  misc_feature (91)..(91): n is a, c, g, or t
  misc_feature (164)..(164): n is a, c, g, or t
  misc_feature (323)..(323): n is a, c, g, or t
  misc_feature (415)..(415): n is a, c, g, or t
caaaaacagtttgcagnacctgnancagatttncccccagatgccatatncaaatgntaagcattcaccccaccataaaaactagagaggncaaaagtactgtatcaattcccatttgttccatttgttcccttcaaataaatgagttctaactctgtcccagncccccacgtgtgcaatgatgagtaaaagtatacttctctgccactgggcagagcccaggactgggaggagtctataaaatcaaataatggctaatcttttaaactgaaggctgaggtgctttgaggaggcatatgataggcagggatttgtcctggggnacagaccactgagttgatatttgaagggttggggctaatcctagggaagagagcaaagagtttgttgtgtgcaaggcccaggggtagcaggngaacggcaagt

SEQ ID NO: 608473 - DNA, 213 bp, Homo sapiens
gctttccgttcctgggcctgccttactctgcgggccggcgagcctcgagctgtttagacccaacggcgacaccgccaaggaggcccatcatcggattattaatcgcaaaaatgccggtaataaaggtcaatggaaaactattgggagggtcctattattcctgcgtcctatgtaaagtaccttgggagtctccaaggtccgagaattttacca

SEQ ID NO: 608474 - DNA, 460 bp, Homo sapiens
gatctagcaggatccgtgccgtacggacgccatgacgctctcggtggcaagtaactcactgtggcgagcgagcttgctcgctgctgggcctggtagcggccccatcaagaacactgcgtttattcagtcggaacaccttggcaggtttcagggccgcttcgcagcccagcgggagcaatctctagccacacgatcaggcggcgttttcgaccaaacgatgccacaacgcgtaatacacccgcccggacttctgctcccggtgcaggcgccagccacttggcaggccgagcgtggacggcgcggtctcgctctcagtgtagatccaggcatccggtgccagccactggcgtccttccagcagtgtgcagacggtcggcagcaggttctggttgaacggtgggtcgaggaacactacgtcgtattcagtcgctgcctgcgtccgtagcggccgggtaccgag

SEQ ID NO: 608475 - DNA, 397 bp, Homo sapiens
atgataaagccaagaatattctagtcctgacagtaatgaacgaaattaaatatcagttctgttgactatctctgaggagtgattctagctcctcttgcaaagagctgagttgctccttttctcggtctaccttttgtttgagctcatccagtacagcctgaaatctgttcttgagagccagattttccactttcatgatgagatcctcttgtcgttatgccctgtcctgggtctcttggagcttgcctttcatgtggtcaatctggttctgaattcccataaccagctgattggttccttcattttcctggtgctgtacatctgattcatttagcttgtcctgtagctgtctctccagatcttcctccgtgtcaatgatgtttatatcttcttcatc

SEQ ID NO: 608476 - DNA, 195 bp, Homo sapiens
gctctagaggatctcctgtgctttgggtcggcgcagatgagcatcatgcatccactacccaagtcctactactctggggactttgcaggaggtgagctgcctaacctatacatcagccccagtgcttaagtatactcccccagaggtaagaatgaggaggtcccccaatgaggttccatggtcaaggcagcaagt

SEQ ID NO: 608477 - DNA, 125 bp, Homo sapiens
gaaggatccccgtgtggagacggggttcatcatatggggcaggcgggtctgatactcctgaccttgtgatctggccgtgaccttgtgatctggcccaccttggtctcccaaaggtgctggggatt

SEQ ID NO: 608478 - DNA, 113 bp, Homo sapiens
ggacacaggtgcctactaccacgcccggctcattttagtattttcagtacgagatggggtatcagatgttggccagggtggcctcaaatgcctgagctgacgtgatctgccca

SEQ ID NO: 608479 - DNA, 430 bp, Homo sapiens
aaattcggccttaatggccggccaaaatggtgaagggttttaccatggacctttggttaaggcaattagaataaggtttggcaggattgactaattaaatcctggattattaaaaaaaaaaaaaaaaaaaaaaaaaaaaaaaaaaaaaaaaaaaaaaaaaggaaaaaaaaaaaaaaaaaaaaaaaaaaaaacatgggggcccccttggcccaatcgattttaaaattgggcaagcttatgcatggggcccaaatttgggctaaattggccaatttgccctattgggaggcgtttaaaattaaatggccggcgttttaaaaagttgggattgggaaaacctgggggttcccaaattaaaacgcctttgaaaaaaatccccttttgccaagtgggggaataaccaaaaggcccgaaccgaacggcctttcca

SEQ ID NO: 608480 - DNA, 136 bp, Homo sapiens
ctcgtggtagccaaagtagagcatcaactcctcgctttttctggtatgcctttcattactgtatgacgttcaagatcaacgaacggaggcaccttgaaacccaaatgacagacgcaaacctgagggcacaatttag

SEQ ID NO: 608481 - DNA, 154 bp, Homo sapiens
ttctattagaggatccccccgactagcccgacagcacaccaaggcctcttggatgcagcggggccgccgccttgggggccaagagaccagcccctgagaagtacagagcctcctccagcggtggcagtggtggctggcagtgggggccgcgtgc

SEQ ID NO: 608482 - DNA, 1388 bp, Homo sapiens
cttgttcgttcgtggttgtctttttgttgtttgttttctctcctcggttgtgttttctactcctgtgttggcttcttgtgtggtgtctttccttgttgttagctttcgtgcctggcgctttactctatctcgtttctttactagtgtgtttttgtgtttttgctcttgttcccttgcttttgtgtttctatgtgttctcccttttttatgtgttctgtcgggtgttctgcgggtcgcttttggttttctttcgcttggttttctgttgtcttctctcttttgttctctttttgttttccttttcccttgtgttggcttgctgttttatgtgtattggtcttccgtgtcttgtgtttttgcttttttgtgcttgcttgtgtccccgttgtgctttgtttgttttttgttcttgttcttttgttttcttttttttttgttctgaccagtttggtgttcttgcttgtacttgtcttttttttgtgtttgctccattgcctttggctccttttctgtgttgttcttctctttcccttggatggctgcctttggctatgggtgttctctccttctctttttcctggtttctctgtcgtttctccgctagttttttccattgtagtggttctttttccgttctctggtgtcctcggtgctctcatctgttgttttcttgtgtgtttgtcgagtttctgtgtttttgttttttcgttgttacctttgggcatttgtgttctatttttctatgggttttctatctcgtattgtttctttcttctatttcttgttttctttttgtatttccttctcgttgtgtgcccctttccttgcagccctagtcttctcaggcttcttttgtgttttttgggcatctcttgggtatggtcatctctcgtctctttttcgtatctttctgcttctttgtttctctaatggatttcctggttctcgtggtattttctctttccgtgtttcctgtttttcttcggtgagtttcgtcctgactgctcacttcggtgttcccgtttctcgtcactttgtgttgtagctcgtcaagttgttctttgtgtctttggtgtcattcttttttatgctcctatgtgtattctttttttcgcttcgcctcctcgcactttcattgtaggtacgatgaggcctgtgtgttctcggctccatgtcgcgacacttcctcgtgtgagcatcggtgcaatcttacgattcaagttcctctctggtagcgcctccctgtccgccatcgcggtgcgtgtcgggcggcgctgggggcgctgtgtttcccccccggtttctttttttgtaaattttttataaagtaagggaaggtttaatttttgtattctttaaagagaaaattttattattataaaagaaca

SEQ ID NO: 608483 - DNA, 966 bp, Homo sapiens
atctcacagaataccaactaaaactaagtgcattgagatctgagatgggtaaacccagattcatttaccacagctgtaattaagtttttagaaactattctcttttgggggaaatccatggaagttaatttctgttatcttattagaagaaaatgatgttgatatgtgtttcagattttccatttgaaatcttataattaattggatttatttactggtaagtaggaggtataaatgacactcttaactgggagcgaggggtgtaaagtgtctgtacaggtcaaaattagtgattctattttaatcaaaagtttaatcctgaagtttcaggaccactcttccttaataaacttgttaactgggaaagcgagctttatgaacatttaacaacactgtggctgctgctatgtggcttaccacgaaagtggccaagagagacttctaaggggaaaatataggggttaattttccaaaaatggctgaaatattgttggccatttttaaaaaagtctcaggtattaccatcgtgcattacatatcgtatgcctgcatattaaacaatccggtgcatgtacttatgcgagaacatctaatagggaacagatacgctacaagcaatatacacagtaaccttgagacattgcatttccctcacatgatcgaaatagcctccactaggtaagaaatggcacatggtgcgaaagcgtaacacaacattggcatcttcacggaggaactaaaggccttcagggagcatgagcaagaaaatgtaccgcaaggaaacctgggaccattaatacaaatgggcggagaatagggaccaaacagggtcccaaaaagcgaggacaaacaacaccgcacaaaaggggaaagcccacataccgcagcaaaaccgacagaccggagaacacacaccgccgcgaacaagggacacaaaaaagggaccaccaacagacaagcgcacag

SEQ ID NO: 608484 - DNA, 80 bp, Homo sapiens
  misc_feature (53)..(53): n is a, c, g, or t
acgtttcagaaaaaaacaaaaagttttaaaaaaattgttgagtcaaaaagtcnaacaataaagaaattaagatttcttgg

SEQ ID NO: 608485 - DNA, 944 bp, Homo sapiens
gagaagatgaaaaaggaaacacagagcacggaacattagaaacaaacccactgtaaacttcagccccgagtcagaccgtatagatgaaatggaatttgagattaaattgcttcgagaagcttgcaaagccagcaggctggtgtcagccaaactacccagatcaatcgagaagggagtcctgatacaaataggattcattctcttgaggagcaagtagctcagcttcaaggagaatgtctgggttaccagtgtcgtgtagaacgaagcctttaccttcctggttgacctaaacagatactgtcagactaaacgaaaagcagcaacacaaactgcaggacgtggtttaacatgatccaagaggtcaggaaggctgtcctcacctcatttcgaggaatcggaggcactgcaagtctggaagaaggaccacagcatcttacagttctccagctgaagagagagcttaagaaatgccagtgtgtgcttgctgctgatgaagtactatttaatcagaaggaactggaggtgacgcgaactgacagaactccaagtgccagactgatggcacacggaacccccaacgggcatgccgtatctagacagaacggcgccaacacacgtgacctagaccgcaacatgaccacactcactaaacaaccaacactagcggctcacatgactgaagaactaccacacctaaccgccacggctcccacagcacccaacccgcgccaatggccgatccacagacccgaaagcagaccaacacggacaccgacaccaatggcgcacaaaataacccatgacaccgactcagcacgaccaccaacccgacaacaccacgaacgacaagcccacacaaacaaccaacacaggacacaaagacaaaggacacagcacccacaaccacaacacgcacaccacaatacacaacaacaaacacacac

SEQ ID NO: 608486 - DNA, 210 bp, Homo sapiens
cattttgcccctgaaattttggggtgggtgagttaaacaagccctctccattcagaccaggtgggcaggagtgtttgaccctaaaaaaatttataaggtcggtggagcagtcctgcctttggccccagggaattcatgttcagcccgattttgatggggaccaaaggggcctcctaaaacccaagggggccctggaggcctggggaggag

SEQ ID NO: 608487 - DNA, 714 bp, Homo sapiens
tctggaaagacaggtctggctctgtcacccaggcacagtttacgggagccttgaactccggggatcaatcagtcctccggcctaagcctcccgagtagttaagaattaccaggtttgtcccaccaggcctgggttaatgggtgtaaattttttggggcagagatgggtgtctcactggtggttggcccagggttggatctcaaatctctgtgggcctacaaggcagatctctccaatctcagcctcccaaagtggctggggataacaagacctcgagccaccacactctggggcaacagatgtgaaacctggtccctggtttacctggcgtctatacctctcacctcggaggcctacctctggcctgggaaagagattacaggggaaatcccagggcacgccctggtcaatgtggtgttaatggaattcttaacctggttccctttataaagacaagggaactctggagggcccaaaatgttcctaatgttggttggggcaaagtgggaggtctcctaccctcagtctccggcaaggacctggggggacccccaggtccagaaagccacatgattctggcagcagacggggacctagagcacatcgggatctcagcccaccctgggaaaccggcggctagagaatcccaagatgacagactaagtaggattcggcattagaatactcctggaatcgcgggcgtagcgtaaagtg

SEQ ID NO: 608488 - DNA, 159 bp, Homo sapiens
cggatgtttgcccaacacagtggcaggctgtttcacagtcattttgatatgggttactggttatttcagattgcctgactatccttatcaagaaatctgagtggaatttagacaggaaaagagatttcttaattctggactccagtgttggggataaca

SEQ ID NO: 608489 - DNA, 436 bp, Homo sapiens
  misc_feature (88)..(88): n is a, c, g, or t
aagcctgggcgtgcctcgcaccggctgtgaccaaggacttccgatgtggctgtgattctgaccccataagtccttaactgatgatccntctcagaactgtgggtcacagggaacagaccagatcagaagagaatgggagaatttaaacctacttgctgtgttggatgtggagtttgaacatggttaaataatctgtcataagaaccaaaaattagaaaatggaacacttaaaattatttataattttctttgtacatcgttttgcacttagattttccttgtcttgtaaaaataatgaaattggcttgaaaatatatattactacaaaatgttttaaagtgtgaagtacctatattcatatgtgtaatttagattttatgactcaaacatcaataattttgaaatttaaaataaaattgcagtaatttcaaaaaaa

SEQ ID NO: 608490 - DNA, 169 bp, Homo sapiens
tccccctcttcactgtcgctctgcttctctcgcgccttcctccttctctcggtgctcgctcccgcatcctattcattctcttctgctcttcgcgtctccccccttccccgttctcctaccctctctctccttcgcccggccgtttcccctccctcagccaccccccccc

SEQ ID NO: 608491 - DNA, 477 bp, Homo sapiens
  misc_feature (42)..(42): n is a, c, g, or t
ctgctcagctcaaagcagtccacgggttcaactctcagtgcnccaggaaggggaaacccacttcacttgggtcaagtgttcattttccatcctccctgtctccaccccaatcagcaaaggctagtggctggtggtaaaaggaaggctagtggctgggggtaaaaggccaccagcagagggggctctccagaggcaggcccatccccagctcctcccgagtaagtgccaatcacccagaggtggatcctctttcagggccctgacttgcaaagctgaggaccagcttcctgtcagtggtaaccctcagtgagggccttgtctgagcagccagcagcctctgagacatttccacatgggcactggctaacttaaaaaagataagtattcacccttcccaggaggtactgatgtcaggaatagccaagagtgcagtcttggtctgtaaggaggtggcccttccactccatacggcccttc

SEQ ID NO: 608492 - DNA, 436 bp, Homo sapiens
gaacatttcgttgttagcatatagatcggatgtatgtaagaacttgtaaagtgcctgaggtatcttgaaaaatgatgattctgtgactaaaatgtgctcataagactgaaaataaatgtttaaaacaccatatcttatccacctataaataaagaatttacaaagcaaaagtaaatgtccacccacctcatgaacaaatgatcgaaagatgctaaatctattgaagtcccaaattaatgagatattaccatgtgcgcataaataacttaaagaataaaatatgcgtgatccttctctcatatgggcatttgagctaatgaaccaggatcctatttacactatcagtccccaaagtaattgcttattagaagaagatctgtcttatgaggtttcagatgattaaatctatatgcattgtatgcacacatttgaaatt

SEQ ID NO: 608493 - DNA, 146 bp, Homo sapiens
  misc_feature (44)..(44): n is a, c, g, or t
ggcgcagtgcagctgcatcctgcaggctgacctagagtaccccntgtcatatgcaagtcctaagcaggttgtgtaaggccgcggacatgtgctggaattgatgagacgaggcgaaatagtgccctctgcgccttgcccatatgcgc

SEQ ID NO: 608494 - DNA, 621 bp, Homo sapiens
tcacgatgcctggagctatacagtagcgtgctcttccttcttgtgcttctgagttcacactatgcacaatatcttttggccagacactgcaagcagacttacctggcctcaggtgtacacagggtcttgctagatgtgctggtactacctggacgaaatgctctgagtcgacgcgcggcgcaatgctgttacagcttgcgctccagagtttcgaaccagcgatgcgtagcagacagtgaatagaactcatgactagcacacattactctagggtgaccaagctggaaggtgtaacgcctatgagtgtctcagtacagtccctctctttgacgctctgggctgggttgatacgtgcgaggtcatcttggagactcaatgtgttgagtgcgtgtggttaagcccccagttccttgggctgtgcctgggtccaggtccataagatgtcccgcttggagcacggcgtagcgtgaggtcggaaatctcctttcccccgggcggaaaatcaggaaagcccactgacacgtcacacgcacacagacgaaggtctatctagcttagactttcaccgttttctttctgcggaagacgtgaagttgcccatgcgcagttactgactacgtg

SEQ ID NO: 608495 - DNA, 210 bp, Homo sapiens
cacctctgacgacattccacgagggtttccccaatgttttctagtagtagtttcatagttagaggtctataggtttacgctcttcaatccatttgcattagatatttgtatatgtgagagataggaatctagttttattcttctgcctatggatagccagttttccccaagcacccatttcattgaagcagcatcagtttatctcccaat

SEQ ID NO: 608496 - DNA, 476 bp, Homo sapiens
  misc_feature (174)..(174): n is a, c, g, or t
  misc_feature (250)..(250): n is a, c, g, or t
  misc_feature (282)..(282): n is a, c, g, or t
  misc_feature (356)..(356): n is a, c, g, or t
  misc_feature (376)..(376): n is a, c, g, or t
  misc_feature (419)..(419): n is a, c, g, or t
  misc_feature (455)..(455): n is a, c, g, or t
gagacaggggtagtgcgaggccgggcacagccttcctgtgtggttttaccgcccagagagcgtcatggacctgggtgagtgagcctcttcatgtgagaaggaacagtaccagggtcttggacacccagactgaccctgtggaatgggggtggaggatgcgggtggaacgcatangggtgcttcctggagaaatcagttctgattggtgggcattggagctacttccagagaatgccccctgctgtcccangaagggtgcactgcccttcagacctggagaangggtcagccttttgtgccatggggacaaaggaagggccgagatcatgtctttctaaaacagcaaggacatgaanattgcgggcttgggcttgtngtctggcagaactgttctcatcatgaggtgataggttaagccnctgggactctgggacaggtttcaacagagaattctnccctacctaagactttcctct

SEQ ID NO: 608497 - DNA, 188 bp, Homo sapiens
ctaacagtatgtacctaaggagatgggggaaatccattcagataattaaattctctttcaactcaaaaaggtcacagggataaatacatgaacagaatagctgcaaagataaatgtggagaaagtgctaagcattagttaacacttctcagttttttatttcttctcctcagttgcacatgcggattc

SEQ ID NO: 608498 - DNA, 378 bp, Homo sapiens
gaccgtcgttcacactggacaggtatcctcattaataggccgacgtcggaaattactagtgattgccttctatcgtgggattgctcccactctctgcactgagcatttattgctttctgtttgttttttaatcctcccacctcagcctcccgaatagctgggactgcaggagcgggccaaccatgcccggctaatatggtttacttatatttgtagagatggtgtcttgttatgttgcccatgctggtcttgaactcctgagctcaagcgatctgcccaccttggcctcccaaagtgctgggattccaggcgtgagccaccacactgggccttgctgcagaaaaacaacacaatgcggatgaagtagccgatcctaga

SEQ ID NO: 608499 - DNA, 345 bp, Homo sapiens
gagatggtcacttagagggggtggttcctctggtaaaagtggaggtaagattttaggttcgtacagccatttggggaggtccaccccggatatgtggtagtccacatgatctctgcccattgggaacatatctatcaatttggggtgtaatggtacccatgccatgagcaagatgcagggtcagtggtttttgtagagggccagaggtatttttctaaagtcgagatttgtttttctctctgttcgtcctcagcaaggtgtaacaagacatgaatcaaaggtaatgatctggggtgaatttgacctagttacattgataacaatgtggtcatcatttgactgaga

SEQ ID NO: 608500 - DNA, 607 bp, Homo sapiens
gggtgtctagaggatcccacgtaatatgtaaccatactcttacacacattgttttgtatattggagatctttactagaaaagcagaagttaaaagaagtgtggggcacatgtagccccagctactcgggagacttgagatgggaggatcgttgagccaggagttgaggctgagtgagcatgaccttgctgtgactagcactacactaaggcctggggcgacacgcgaagaaacaccgcttaaaaaacgaaacggaagaaaagaacttgtggaattccagttatctataatgcttccagctcctcagcctcttaactctcgccaaaccctcagcctttgcttttcaaaatactgcatttgctatctactgtctcacagaaatgcagaccttttgcctgaatttcacacttgctgttctctccattacaacttggcagtcatattaggctaatctggattctggcttcattaatacaggccctttcctccctctcctctcctccttgtatctctctaccatgatttgtttcctttggcaacacctttttctctgccacacaaacgtggctgtcacactccgtgtgagctgaggcaatgagaagacactg

SEQ ID NO: 608501 - DNA, 392 bp, Homo sapiens
  misc_feature (257)..(257): n is a, c, g, or t
  misc_feature (313)..(313): n is a, c, g, or t
  misc_feature (350)..(350): n is a, c, g, or t
tctagagtgtatcctaaaccctgggactgctttgattcttggactctgaaggaaaaacaccttataggcctctacacaaaggtttggccaaattatgatttacaagaaggactagcttggcttcagggaggcactgttcattttgataccatccagcagttggaccttttttggaaacgtgaaggcagatggtctgaggccccacctgtgcaggctttctttaccttgccgggcaacccagacctttgctgacagtntaggattgatacagccctcctgtttgccgtctcaggagaggctgcaagaggcaatnccagggaacttaaatcccagaggcatccccagcaganagccagttccttcagcctgttctccagttcacctgactccct

SEQ ID NO: 608502 - DNA, 794 bp, Homo sapiens
tccagtttgcctcctgctatatccattggaagagagaagtttgtgacttgtggcccccaaggttttgagagaactgggctttcggcgcgtgggtgacatgaggatggctcgctgtggtgagctttccccatggagcttaccctagcctgcacgaagatactcagtccagacccagtcgatgacgccctgcctctataggcttggggactccctgtagatgaccgccggagatggacggctagcagaatggtcgtcacgacagctggtgtgctccgtacagtctcgtttccctaggcaaccccttgagtcgctgtgaatcctgaaaccggattgccaagtgttatcctctccacagggcatgagcagctccctgaaagcacttccacacactctcacgcaactcgtgcagcgagggaacgatggttgtctaagctcgtgccggcgcagcctagatgtccctggtccatccacccagctcgcagcaacagggaggagctggagcattctgaaggagcacttttgcggaaaggtgaccaacctcgtcaacaagtctagacgagcgcgggttcaaccaccgtcatctgggcctccggctcttggagacgatcgagactgttcgctgtcttggctggagttggagtgcgaagccccacatactggcaaaagagcgaaagacccccctgtcgttgagcagacaccaggcgggcaccagcacattggtgggggctgcgcctgtaaccgttacttgcaaatacaacactccatgcatcgcacttgcggggacccacatcgta

SEQ ID NO: 608503 - DNA, 943 bp, Homo sapiens
ctacacggggtctgtcaatgtgtgcccccgtttagtggcgccacctctctgggcggcccccctgctgccggcgtggtcccgctgctctcgccctttccccggtatctctctcccggcgcccccctcctcgggcgtcccagagacccctctctgggtccttgcgctgcggggcctctcttcccaaaagcgctcgcttgggcggtgtctatcccctcggggccgcctctgatgtgctcctgtgtcttttctccgcagttatgctcctcgtggccaggtctcacccttggtccaactccatgttggtgcgccacgccgaacgccccgccgatgggttccccgtacgtttccccggtcgcccccaggcaatgcctcttcttcctcgccgttggcggctcccccctccctgccttgcaacccgcgggggtgtgatggtccccttcttttggagtcggaccccttggctgccttacatgggccgccccggcgtggcttataacaccagacgggttggttctttcccccccccccccccctgacccacgcgggggtttgtctccttcacgatcaattttgcgccccaggaccgccccgtcagccttgcccacggggggcagtatccgcaaccccacgggctcccccccccgccataattgcatcccacggcgcgttgctttcatgccctcatggatgtgtgccgcggcgcccccggaggcgccctggcttatgtatggggccgagtgaccccccaccgtctgttaatgtctcccgccactatctcctcccccgcccagtgtttgtgcgggccccctgggctggttcatatgggtgccggggtgcgggcggcgcttaacaaggcttctttggcgtaccaagtccggtttggcccctctccgcgcttcaataagcaaccaatacaaaaagataaaaacaaaaaacataaaca

SEQ ID NO: 608504 - DNA, 359 bp, Homo sapiens
acctctaccccacgatcgaagtcttttgcagatcttaatttaattaagttttccttcgtttttttttttggttggtttggtttccttaaataggatttcctgaattccttggtacctaaaatcgatattggtgtgggaaacaatattaacggatttttccagtatattttctttatttaacttattttttatatgtattggtggtgattttatacctcagtatgtggcctatgttgtaccttgtaactttcatgattattttataattactttttacaagataacttctattcaatttataatgtctgttttataatcttccttcccagattttacctgtttaaaaaaaaaccactttt

SEQ ID NO: 608505 - DNA, 537 bp, Homo sapiens
tagggtgaggatgtttgtggcctagttttgtggaggggaatgaggcagagtggtagaatagaaaggagtgcagttcgggaggtatgaaaagaaatatattgagaaaaatgctaactcttatgtgatatgtatttcctcaaatcactttctaaatgaaatagttgattggaggaagagagcagtaaacatgtccatataccatatgtagtaatctgatataaagagattaaatcttttgcctaattatatctcttccttcagatccctttagaagtacattttcagtcaaaaggatggtttgaattgtttccaagcttaggcttatatttaaaactgtagggttgacttgagaataatctgaacttcatggaaactgaaatttcagaattgcaactaccaattgagaaacaagtgacatgcttatggtgattatcttaattgtaactgctggactaatatataaactaagaatgtaaatcttttagtttgattcttcttatccttgaaggaaaattagcttatggtataacacgtaaa

SEQ ID NO: 608506 - DNA, 628 bp, Homo sapiens
agatgaccgccgtgtggtaacgtgatgaaccccgaccctgtatgaacgtgagatgaccagcgtgtggtaaacctgatgaaccccgagcctcatgaacatgagatgagcgacgtgtggtaaacgtgattgaacccctgagccctgattcaagcattgagtgatgacgcggcctgtgtgtcgtaacactgatgaacctccggagcgctgattgaagcattgacgattgacgcggctccgtggtggtatacagcttgatgaacctccggaggccgtgtatcatacattgagcgatcgaccgcgctctcggtgtcgcgttacacacgttggattgagaccgcactgtaggcccgttgatcctaagcattggagcgattgacgctgctcaggttgttgtgttaagacgttgattgaaaccgcatgtacgccgattttcacgggcgttattggaggcgttatcgagcgactcgttcgctcgcagcaaccgtttaaaggttctccgtcgtttaaccgttaccgcagttgttccgtcgtttaacattccccttacggcgcgggtctgccaagggggaagccaccctggggccccggcgggaccgcggtttcccaagttacggacggttgcacttcg

SEQ ID NO: 608507 - DNA, 568 bp, Homo sapiens
acgagagtaccagggagagcaggatcatatggagggcctattggatatacggggtacaaggacggtgctatctactctatagtatctcccacataccatactaacttgccaaaattatttctatctacctggattagattattatcacattggcaggctttatatgaggatataaatgaggtcatagatatatgtaaaatgtgtgacataaaataggctcgcaaaaagatagctattgttttgaaaaaatagaaatacaagtggcctatgagcccagatgtgatattcctttaaattagatattagacttactcacatttctaaatgtagacattctgagaatccatttgagtacctgacttgagagtactgacagtctaagaatttagaaaatactgatgttcttcaataattaataattgctttagaggcttgataagacattcagatatacctagatacatataggtgttaattaaagtccataaaataaagcttcatggtttgaagtcatacacggaatttgaacaatatgcatacacagtctatgctgcctgtggattagaca

SEQ ID NO: 608508 - DNA, 380 bp, Homo sapiens
  misc_feature (73)..(74): n is a, c, g, or t
ctcacatcatccagaggatgtatggctgcgacctggggccgacgcgcctcctccgcgggcatgaccagtccgnntacgacggcaaggattacatcgccctgaccgaggacctgagctcctggaccgcggcggaaaccgggcttaagataccagcgaagtggaaggcggcccgtgtggcgacagctgagagcctacctggaggcctgtccgtgagtgctcgagatacctgagacgggaggagacgctcagcgcggacccccaagcacacgtaccacacccgtctttacatagcacctagtctggcctgctctacctcgagataaatactgcagcgatgcgagacaactagacatagctgtgagcagcacagagtggactca

SEQ ID NO: 608509 - DNA, 170 bp, Homo sapiens
tctgtttaagagaattaaaatagagtgatgtgatgtagggtagctgggaagtcaggttggattaaatagtcaggcaggcctggttctggaagaaaccagccattcaaaatgatccagagcaggatgggaaaagggcagaagaactaaggcaagactgaggttgacatatt

SEQ ID NO: 608510 - DNA, 266 bp, Homo sapiens
  misc_feature (103)..(103): n is a, c, g, or t
  misc_feature (105)..(105): n is a, c, g, or t
  misc_feature (162)..(162): n is a, c, g, or t
  misc_feature (171)..(171): n is a, c, g, or t
  misc_feature (174)..(174): n is a, c, g, or t
ctatcttctgtcccagggccgccgtcaccatgggccgcgagtttgggaacctggcgcggatacggcacgtgatctcctacagcttgtcgccctttgagcagcngncttcccaagctatttcagcaaaggcatccccaacgtgctgcgccgcactcgcgagcnattcctgcngtnggcgcgccgtttgtagtggtctacctgatctacacatggggcaaccaggagtttgagcaagtcgaaaaggaaagaatccagccatgtatgaa

SEQ ID NO: 608511 - DNA, 730 bp, Homo sapiens
tcctagggtttatcgtgttgagcacaccgatatatttacagtaggaatagacgtagtacacaccgatgcatatttcacctccgcgtaccataatcatcgcgtatccccaccggcgtctaaagtattatagctgactcgccgaacactccacggaagcaatatgaaatgatctgctgcagtgctctgagaccctagagattcatctttcttttcaccgttagtgtggcctgactggcattgtattagcaaactcatcactatatcgatcggtactacagcgacacgtactacggttgtaggccacttccactatgtcctatctaataggagctgtatttgccatcatagtgaggcttcattcactgatttcccctattctcaggcctacaccctagaccaaacctacgccaaaatccatttcactatcatattcatcggcgtaaagtctaactttcttcccagcaacactgtgcctcgaggctatccggagatgccccgacgttactcggactatcccgatggatacaccacatgaaacatcctatcatctgtaggcgtcattcattgctctaagagcagtaatattagtaatattcatgatttgagaagccttcgcttcgaatcgaaaagtctaatagtagaagaacgctccataactcttggagtgactatattttatgccctctagcctagcaagacattgcgaagaagccgtatacataaaatctag

SEQ ID NO: 608512 - DNA, 203 bp, Homo sapiens
gtaaggaccgccacacgcccggctaatttttttgtgtgttttagtagaggtggggtttcaccatcttggccaggctggtcttgaactcctgacctcgtgatccacccgcctaggcctcccaaagtgttgggattacaggcgtgagccactgtgcccagccaaaagagaaatttctacatgaacaaggcaatttcagtgtctta

SEQ ID NO: 608513 - DNA, 134 bp, Homo sapiens
ctcaactccatgagataagacctagaagtgaggagcagaggcctccagccaaaagccatgtgagggagccatcttggaagcaattctccaggcccaaacttcagatgactgtgtgtcccagccaatgcatcagt

SEQ ID NO: 608514 - DNA, 4998 bp, Homo sapiens
caaaagtattttgccatggatatagaagatgaagaaaacatgagttccagcagcactgatgtgaaggaaaaccgcaatctggacaacgtgtcccccaaggatgcgagcacacctgggcctggcgagggctctcagctctccaatgggggtggtggtggccccggcagaaagcggcccctggaggagggcagcaatggccactccaagtaccgcctgaagaaaaggaggaaaacaccagggcccgtcctccccaagaacgccctaatgcagctgaatgagatcaagcctggtttgcagtacacactcctgtcccagactgggcccgtgcacgcgcctttgtttgtcatgtctgtggaggtaaatggccaggtttttgagggctccggtcccacaaagaaaaaggcaaaactccatgctgctgagaaggccttgaggtctttcgttcagtttcctaatgcctctgaggcccacctggccatggggaggaccctgtctgtcaacacggacttcacatctgaccaggcggacttccctgacacgctcttcaatggttttgaaactcctgacaaggcggagcctcccttttacgtgggctccaatggggatgactccttcagttccagcggggacctcagcttgtctgcttccccggtgcctgccagcctagcccagcctcctctccctgtcttaccaccattcccacccccgagtgggaagaatcccgtgatgatcttgaacgaactgcgcccaggactcaagtatgacttcctctccgagagcggggagagccatgccaagagcttcgtcatgtctgtggtcgtggatggtcagttctttgaaggctcggggagaaacaagaagcttgccaaggcccgggctgcacagtctgccctggccgccatttttaacttgcacttggatcagacgccatctcgccagcctattcccagtgagggtcttcagctgcatttaccgcaggttttagctgacgctgtctcacgcctggtcctgggtaagtttggtgacctgaccgacaacttctcctcccctcacgctcgcagaaaagtgctggctggagtcgtcatgacaacaggcacagatgttaaagatgccaaggtgataagtgtttctacaggaacaaaatgtattaatggtgaatacatgagtgatcgtggccttgcattaaatgactgccatgcagaaataatatctcggagatccttgctcagatttctttatacacaacttgagctttacttaaataacaaagatgatcaaaaagaatccatctttcagaaatcagagcgaggggggtttaggctgaaggagaatgtccagtttcatctgtacatcagcacctctccctgtggagatgccagaatcttctcaccacatgagccaatcctggaagggtctcgctcttacacccaggctggattgcagtggtgcaatcatggctcactgcagcctcgacctcctgggctcttaagcgatccttccacctcaaccttccaaggagctgggactacagaaccagcagatagacacccaaatcgtaaagcaagaggacagctacggaccaaaatagagtctggtgaggggacaattccagtgcgctccaatgcgagcatccaaacgtgggacggggtgctgcaaggggagcggctgctcaccatgtcctgcagtgacaagattgcacgctggaacgtggtgggcatccagggatccctgctcagcattttcgtggagcccatttacttctcgagcatcatcctgggcagcctttaccacggggaccacctttccagggccatgtaccagcggatctccaacatagaggacctgccacctctctacaccctcaacaagcctttgctcagtggcatcagcaatgcagaagcacggcagccagggaaggcccccaacttcagtgtcaactggacggtaggcgactccgctattgaggtcatcaacgccacaactgggaaggatgagctgggccgcgcgtcccgcctgtgtaagcacgcgttgtactgtcgctggatgcgtgtgcacggcaaggttccctcccacttactacgctccaagattaccaagcccaacgtgtaccatgagtccaagctggcggcaaaggagtaccaggccgccaaggcgcgtctgttcacagccttcatcaaggcggggctgggggcctgggtggagaagcccaccgagcaggaccagttctcactcacgccctgacccgggcagacatgatggggggtgcagggggctgtgggcatccagcgtcatcctccagaacctcacatctgaactgggggcaggtgcataccttggggagggagtagggggacacgggggaccaccaggtgtccacggttgtccccagcatctcacatcagacctggggcaggtgcgcagtgtggggaggggatggggtgcgtcagggcccagcatcgccgcctggcatctcctcgccgcagcatttccccttctgaaccgtccagtgactgctttcaatctcggtttacgtttagaaattgagttctactgagtagggcttccttaagtttaggaaaatagaaattactttgtgtgaaattcttgaataaataatttattcagagctaggaatgtggtttataaaataggaagtaattgtgtcaggtcacttttatgccacattattttaattgcaaaaaagcatctatatatggaggagggtgggaaaatagaggtaggaaatagtagcctaaaggaaatcgccacacgtctgtctaaacttaggtctcttttctccgtaggtacctccctgggtagttccacacactaggttgtaacagtctctccctgaggagcagactcccagcatggtgtagcgtggccctgtcatgcacatggggtcccgcagcagtgactgtgtgtcctgcagaggcgtgacccaggcccctgtagccctcagcctcctctagaagcttctgtactccttgtaggatcagatcatggaaaacttttctcagtttacttctaagtaatcacagataatacatggccagtaatcccaggctggccattcattcaggttttttaaaggatatttaacttttatggactagaaggaatcacgagggctactgcacaatacatggcctaagttccctctgttccttcctctgaatcgaatggatgtgggtgaccgcccgaaggccttcacaggatggaagtagaatgatttcagtagatactcattcttggaaaatgccatagttttaaattattgtttccagctttatcaaagacatgtttgaaaaataaaaagcatccaagtgagagctggtgagaccacgtgctgctggcgtagtgtaggccagacattgacagtcctgacgggagctcagggctgcccagcgcccagcgtgcacgggacggccccacgacagagggagtcagcccgggaggtcaggagcgcggcgggcgagggccctgtgtggaccacctccaccaagctcagagatttgcaccaggtgccttgttgcctccgctcaggatgaaagaggagctgagagaagtgctctgcctgccagtgcagtgcccagctccaaggctctagagggtgttcaggtgggtctcctggggccatggggagagattggtgcagaccttaccccacagcatacacctgccacagcgaaatccagggtgttggcacctgtgtgtccgtgatgagcctaggaaaccagagcaggggcagaggggcgtcatcctcccaccggacgctgggagctcagaccccaaaactgaaacaccgtggcttcggcggggggtgtgcctcctgatgtcaggagccccatccacgtgtgtccacacagatctcgtcgcagcacggcaggaaggggtgctgcttagggctcattgttggggacatgaccgggttcagcggctaaaacatctgccccacagcagcctcctcctccaccgaaaagggtagttgtctccctgaagcagtcacagcaggcgtctctgccgctccgtcaccacagtggggttttgttcaggcaaatcgcgctggggttctgcacctgcaaaaggagaggggtctgttgtcgctggctttcccccaagcaggctcttgcacactctagaaaaaacaccttgtaagtctgtgcatttttattgtcttgataaattgtatttttttctaatggggattgggagatggacttcgtttttaaaaatatgtggattttggttaccaagtttagtgttaatatattccatatacatacaaaactacccggtatgtctggcttttcccttctgtcaggtaatagctaaagtcagcatgattgctccctgtaccaccccaaataagtgagtgcctcaccttgtggggcctgagcagctaccttgagaccatgtgaggtggcacctttccggggtggactcgtgcggccttgaggacaggcacagggcaccctatcccaagccgtccaggcaggaggaaggcagccaaggcaactgggttctgggagccctgggtggggcagctgtggggaggaactgggttcggggcagccctgggcagggcggctgtggggcaagaactgggttcggggagccctgtccggcggggggctgtggggcggggagctgggttcggggagccctgggcggggtggctgttggggggaactgggttcggggagccctgggcggggtggcttttggggggaactgggttcggggagccctgtgcggggtggctgttgaggaggacttgggttcagggagccctgggcggggtggctgtcagggggaactggtttccgggagccctgggccggggcagggggcggctgtaggaaggaactggtttcggggagccctgggcggggcggctgtggggaggaaggtgacgtgcaggggaccagaggctctgcactgctcctaggacagctcatctgtaatcagaaaaaaaataaacaaaatacagaacgc

SEQ ID NO: 608515 - DNA, 495 bp, Homo sapiens
cacgaggcgtggaagcgctgcgcagcgcattgatgcggcagccgatcaggtagagctcgccatcacggatcagcacgtagccgtcggtcagctgcacctggccggcgcggatcgccttgatctcccagccggacagcacgacgccggcctcgaactgttcctcgatgtggtagtcgtagcgggcgcggcggttctcggcgatagacatggacggaaatgtgggggctcatgcccttcttacaatcccggcattctatgaagcaggtcaagaagtccgtgctgctctggcacacgccgcacgagatgtatgagttggtgacccaggtggagcgctatccggagttcctgccgtggtgcaacaaggtcgaggtgctggcccgtgaaggcgattcggtcaccgcgcggctgcacctggcctatgccggcgtcaagcacgccttcaccacgcgcaaccgcaacgaggccgatcgcagcgtgcgcatggagctggtcgac

SEQ ID NO: 608516 - DNA, 884 bp, Homo sapiens
tgccactctgtgtcataatgccctggtgggccgctgtgactacctcggggttgcttactattcgcggtcccgtaacaacacccgttccttgtcctccattagtgccttctgcttacgcgggattattactgcatgtccttgttaccgcccgcaagatcggtttgtgttctctcgccaggagttgtttcttgaacccgttgcatacaatgacaggcgatgtgcgcttcctgccccccattatgtggctggtgctcagtgcccccacaaacgtggactaccccccgcgctggacattccccgttcgtgagtgtcccctccgcggattgacaacacttcctctcttttgaatcctccccacaggggttctactatctcccctggcgcctccccccttaatttttaaaatggactcccacccgctcacccctaatatatgtctcaacccgccttcgtttactcaccaacaatgttcagcaaggggcgttatactttttcgcacctcccttcaaattccctcctaagatacattatgagatacgtcccctgtacacccaacatgtccgccggcatattaccggctccacacaacatttgttgtttcagcccatacgtttccccggccttctcgcctactcattgtgttggcgcctacccagttctcacctactgaatcttggtttgatcgccgccgcctattagatagttgtgtcccttgtaactccacccaacatcaccttcctggggggtcaggatacgcgccgcgcccttgtgaagctcgccctgtttattgaaaacaggtgtgtctaggatattttctgaatattggacaccaccaactagtgatagttgggaggggtctattaaacagaacataaccaaaaaca

SEQ ID NO: 608517 - DNA, 417 bp, Homo sapiens
tacagacaggggttggcggtgcccaggcggggtctcgagacacctggggtgcacgccactcacacgcgcacagagctcccaaagagcggggataaccagcatgagccactgcgctcgggcaatgtgcccagagacctgagcacagaaactgtgaaatcataactgtgtgttattctatgccgctcaatagtggatatttattacacactagacagatatcagaaggagaggaggtctgaggtgactcctgttctcacagggggagatatctctgtgagctgaggggggtcccagagacctgtacgcgcacacacttccccgcctgtctgttcagaaccccaccctattccagcttagctctgctcgggtctgggcaaaggtccttgcagagctcgcctgcctgagcgtgcagtattg

SEQ ID NO: 608518 - DNA, 328 bp, Homo sapiens
aaaaagcccccccccccccttgggggcaaagggcccggcccttttttttaatcctggccctttaaaaccacccctttttttccaaaaccccccccagcctttttcggggctttttgaaggaccccctgaaaatttttttttggttggttgttttaaaccaacccgggggggggggaccggaggccccccccccaattgtggggtttgggaaagccagccttttttaatttgggaattgggttttttttttaaggggggaaccccgttttttttttttccatggggcccggggcccttttgttttttaaaaaaaccggtttccttccca

SEQ ID NO: 608519 - DNA, 264 bp, Homo sapiens
gaatagaatcttagttcaactttaaatatgcccacagaaccctctaaatccccttgtaacctttatctgttagtccgaaagagcaacaactcttatgtctattaggaataaaaccttgatctatgagagtaaaataataaatcacccatccattggtctaactagcagccaccaattattgaaagcgttcacgctcaccacccacatatcctaaaaatccccaaaatttttactgaatttcttcaacacaagctgctgaagagg

SEQ ID NO: 608520 - DNA, 135 bp, Homo sapiens
agaggatcccagcgctgagcattatattaattacataaaaatagtttccggagtagcagagtaagcatcatactggtctgttagcagcagcgtggggcacggggcagggcgcgggggtctggggtggatggttaa

SEQ ID NO: 608521 - DNA, 339 bp, Homo sapiens
ggcgctctagacggatccccggtcgggcccctggtggatgctgttgattccttgagtcctcgtatcttccatgagagattgcttccactggactccatgtcgtttgcctcagctcattccaggatgatccctagaaggatagtgggagcaaataagaagctgatgtcttctagctcatgtcctttggctagcatagaagattttttttagatattgtcctagtgcgggctgctattgagacaccagtggctaaaactgggtcacatgtctatttttaatcaactgcttaaaaaggacttagtctccctgattgacttaagtaaataatcatccatttcc

SEQ ID NO: 608522 - DNA, 741 bp, Homo sapiens
  misc_feature (64)..(64): n is a, c, g, or t
  misc_feature (386)..(386): n is a, c, g, or t
  misc_feature (671)..(671): n is a, c, g, or t
  misc_feature (735)..(735): n is a, c, g, or t
ataacgtgctggtctgcgttaatcgcaccagcgcgcagcaaccgttgcaggtatatgatttttngtgcgatgcgggagtcgaattcatccagtttattccggtggtcgagcgcctggctgatgaaacaactgcccgcgatggacttaagttacatgcgcctggtgatattcagggtgagctaacggaatggtcggtgcgccccgaggagttcggtgagtttctggtggcgatattcgaccactggatcaaacgcgacgtcggcaagattttcgtgatgaatatcgaatgggcgtttgccaattttgtcggtgcgccgggtgcggtttgccatcatcagccaacctgtgggcgctcggtgattgttgagcacaacggcgacgtttangcctgtgatcactatgtttatccgcaatatcggctggggaatatgcaccagcaaacaatgtgcagaaatgatcgattccccgcaacagcaggcgtttggtgaagataaatttaagcagttaccggcgcagtgtcgcagttgtaacgtgttaaaagcgtgctggggaggctgccgaaacaccgttcatgctcgatgccagcggcaaaccgggactgaattatttgtgtgccgggtatcagcgttatttccgcatctaccggcatatcttaaagcaatggctgattntgctggcgcacggtcgcccggccagcgacattatgcatgcgcattgtggtggtgagtaagtagnaatcgg

SEQ ID NO: 608523 - DNA, 561 bp, Homo sapiens
gcggccgcctactactactactaaattcgcggccgcgtcgacatcaaatggctggaatccactgcactgaaaactataaaatcaactgctgaaaggaaaggaaaggaaaggaaaggaaaggaaaggaaaggaaaggaaaggaaaggaacggaacggaaaggaaaggaaaggaaaggaaaggaaagaaaaaagatcaattagcggaggtctctaggagatactcgtcactagatgagctcaggaagccagttcttagtagctctgaagcagatgaagaattctcctctgaggaaacagactgggaggaagaagcagctcattaccagacagctaattggtcaagaaaaaagccaaaagcggctggcgaaagccagcatactgttcagcctccgggcagtcggcttcaaggtccgacctatgcggagcccccgccctacgtagtgcatcagccatgcgcagagagacaatgcgcagagaggcaatgcgcagagagacaatgcgcagagaggcaatgcgcagagaggcaatgcgcagagagacaatgcgcagagaggcaatgcg

SEQ ID NO: 608524 - DNA, 434 bp, Homo sapiens
tgtctgttttgacaatcggcgccgcgctgtcgctgacggcgggcgtcgcactggccggcagcgacacccggtccggctgcccagatcctcaatgcgctgaagccgaagtccgccacccgcggcctctcggctggcccccaggtcgacccggccgcctccgccaaggaagcgagcttcctcaacaccgttcgcaaccggcagagccgctcgctatcacttggcgaacgccaggagatcgccgacatcgcggccagcaagccgaagatcgatctggagattcacttcgactacaactcggccgatatcagcaagggctcgacccaggcggtgcaggagctcggcaaggcgctgtccgataccagcatgaagggctcgaccttcgtgctcgccggccacaccgacgcgatcggcggcgaagcctataaccaggccgc

SEQ ID NO: 608525 - DNA, 382 bp, Homo sapiens
  misc_feature (22)..(22): n is a, c, g, or t
  misc_feature (309)..(309): n is a, c, g, or t
  misc_feature (331)..(331): n is a, c, g, or t
  misc_feature (349)..(349): n is a, c, g, or t
gagacggagatttcctcttgtngcccaggctggtggctcccctccattgtgcaatgatgcaatctcggctcactacaaccttcacctctaggcttcaagcaattctcctgcctcagcctcctaagtggctgggattacaggtgtgtgccaccacgtctagctttttgtattttcagtagagatagggtttcaccatgttggccaggctagtcttgaactcctgacttcaggtgatccacccacctcaggctcccaaagtgctgggattataggcatgagccaccgcacccaatcccagctaattttggnattttttgtagagacccggttnttccaagtttgtccaggnttggtctttgaaattcctgggggttgaagcgat

SEQ ID NO: 608526 - DNA, 131 bp, Homo sapiens
catcacacggatcacaaccttcgtacgatgacatcgaccctgacggtcgtgaaaaatcggtttccagctcaatttccgtgtaacgccgaacaaattcctgccaccaccggattcaacaggcctgcccacca

SEQ ID NO: 608527 - DNA, 159 bp, Homo sapiens
tgtggagtctggctctgtcaccaggctggtgtgcatgggctcgtgatctctgcctcacggcaacctccacctgcaggtttcgattcccctttttcagcctccctagtagtctgggactacgggtgtgagccaccacgcccagccggggacggtgcgttg

SEQ ID NO: 608528 - DNA, 330 bp, Homo sapiens
  misc_feature (330)..(330): n is a, c, g, or t
ggcccttctcaagtcactgcttacactgcatacatggccaaagccaatatcctgactacacataaccagtacctttaagggggtgtgacctgaagatcctgatgaacatgcactttgacctgaagctcaccaaatggtgcctatacaggatgcaggccacgagtgccgacgacatgactgcactataccgaggatatcaaggtccttgtatagcccaaggaggttcaatgccatatcccatggtacagcaagtcgaatgctagatcgatttgccgacattggaccccgagcttgtgcgtgctcgagcccgtattgccatggagctcggcn

SEQ ID NO: 608529 - DNA, 162 bp, Homo sapiens
gttttctgggagagcactagagatgagagaaaggagtctgaggagttactcagttaagagagagctccggcggtctgactgggatgtgacaacatagtacatgtacgctgccccagatggacgcggcctctgacggctgtatggcagaggtttcccgcctca

SEQ ID NO: 608530 - DNA, 194 bp, Homo sapiens
agctttggtttaattcagcttcaagactaggcacagtatcttggggaggctgtacacacagtgagaaggtgagagggaagggaaactaggcgaagctgttgcctccctccagaaactatgccccatgttgctcttctgttctattctcagagcatttggcttggttggaagggggtgtcctcattacatgcaat

SEQ ID NO: 608531 - DNA, 912 bp, Homo sapiens
cgtacttcgctttggtatgtagcacaaggcttccatttctggaacggtttcttgtgcttaaacaaggtcagccaggtaccagattctaaaagaacaagattgtcccccacccctcaagtggacttctgatctgcacgagaatgtgctactaccgctctgtagtctcccctaatcacgagaggtctagtgaaattgatggaggaagtgcaaggcttgcttcccctcaggccttaaagcttaaagcagtggtaagattcctcagtccagcacactacagtcccagtgcccagcagcaccggaagttgtatactggcctcttatcttgtcttcaaatgtgcaggaaatttgaaactgtcatctggaactaggttccatctcttatgtgtgttagatcaaaccaagagaatgcccccagctcatgcccaaatgctgcgttcaaaagcctgccttccagtccttacaaaaacttgcaggattccacatgtgttaacttttttattttgtacagtttctaagtgacttttgctagtgatgttaaggatgaacttaagtttatttgaggggtgtgagcacctcctccatttaaataactggtgactttccttttattttttaaaagtggaaacccgttgatgtgccctctcgatttcaagggttgctgatgacatgattcttaagacgcagcatggatcctttatataccgaaatatatgtccctttgtgtgtttatggctatttcagaagaaaatgaaaccttttacttgtgctctacccagtaaactgcgctggtacatagacgcaactgaggcaaaccaactttttgttaacccacctctgactaacctttgtagtatcccagtgacgcacttttggaaatattcggatcctagttgctaaagtattttaagctgc

SEQ ID NO: 608532 - DNA, 209 bp, Homo sapiens
  misc_feature (7)..(7): n is a, c, g, or t
  misc_feature (120)..(120): n is a, c, g, or t
acttctngtctttttatcacaggcatgaggatgtggcctgcatgctgcctgatcttgcctagaaccggctgcacctgctgttctcttgtttatgcaaactggctgcacctgctattcctntgcttatgcccctacccctggctatcctaattccctgttctcctgcctcactattactgtattctctacttctaaataaaaataaaaca

SEQ ID NO: 608533 - DNA, 417 bp, Homo sapiens
gcaccatggacaggatagttgactgaagaggtcattcatattccgtagggatggttgcaagagtatgagaattgaattcccgtgatctctaattgcttttgtcccagttgcactttctactcagggtagtcacttgctgaaggtaactgattggctcctcttggcctcggactttcagtgccgctctcagagcatttaagtcaatcagtttattcagtgtgtatcgtaacagtatcgtctagtatcatcatccattctgactgaaccttcacggacatttgcaacgtatccggatgtgtattccatagtagggaatgtcgtaccttctctcaataacagggcgaccgagtcaataatatccttttcccgctatgtatccgcttccgcataaggctcgagctagtgccgaattcctgc

SEQ ID NO: 608534 - DNA, 92 bp, Homo sapiens
aagcagccccaaaactgtaacctcaaggaaaccataaagcttggagggccttaatttttaaccagtttccaataaaacggttttctacctga

SEQ ID NO: 608535 - DNA, 304 bp, Homo sapiens
atcccccttccttcgctggattgacagatctcattcctttacttgctctttgagcatgtgatcctgccagcatgagtaggttcacgatttgaggtcgtgctgagtgctgtgtcacgcttgtatcccggcattttggtggccgcggtgcgctctgcataccgtcctcaaattcatactctcttcctagctattccagtgctgtatccactaaaaaatacaaaaaaattagccaggcatggtggcggacgcctgtagtcccagctactttggaggctgaggcaggagaatggtgtgaacccaggag

SEQ ID NO: 608536 - DNA, 341 bp, Homo sapiens
tttttgagatggagtcttgctctgtcgcccaggctggagtgcagtggtgcaatctccgctcactgcaagctccgcctcctgggttcacgccattctcctgcctcagcctcccgagtagctgggattacatgcgcgcacgaccaggcctggctaatgttttgtatgtttagtagagacagggtttcaccacgttggccagggtggtctcgaactcctgacctcaggtgatctgcccgccttggccacccaaagtgctgggattacaggcgtgacagccatcactcggccagagaaaaagagttcttaatgtatgttttcagttatttaaaattctaggaaat

SEQ ID NO: 608537 - DNA, 385 bp, Homo sapiens
ggggggaaaaaggggggggaaattttttttttttaaaaaaccccccccaatttttccccgggggggtttttcccttttctttccccccccccaaaaaaaagggggttccccggcttttttgccggggaaaggggggggccccggttttttttttcccggtttcccccaagggggattaaaagggggttttttttgtggggcttccccccagggggaaaaaggtttaaccaggtttttggggggtttttccccccccccagttttttttggggggagggggtggggggccccccgccccctttttaattgggggggtttttcccccggggggtttggggtttttttttttttttttttttagggcccctcccccgggggttgggca

SEQ ID NO: 608538 - DNA, 538 bp, Homo sapiens
ataggggtcctctgagacatatactgctaacaaatctaagtgaggacattaaaagaaagaaatcttagtttcagcatcaaaacacagtcaagaacatagtgaatgcaggctagggcacagtcggctcacggcctgtaagttccagctattctgagacggctgagtgcaggcaaattcacttggagctcagtgagttcagcgaccacgcctgggacaacatggttgaaagtccgtgtctctacaaataaatataacataattagctgaggtgtggcagacatgcaccgtgtagtcccagtctacttggtgagcctgagtgtgggaagactcgcttgacgcccaagaatggggcaggctgcctgcgcgtgagctctgatttgtgccactgcactccaacctgcacgatggagcaagaccctgtctcaaaacaacgaagtaaactatcttaaacctattttttatcaagtggtcaactgttaacaatcaagatttatacacacttggccaggcagagtggaccacacctgtaatcccagta

SEQ ID NO: 608539 - DNA, 189 bp, Homo sapiens
ccgacagctcacggaacgttgaccttcactatattgttcgtaactggcagctcccgtgatctctgtgctagttgcttcccctgtgtgtaccttatgtcatagcttctgggtggtgttcctttactaggctgttactcgcgagaatatgcaataacttaagtccagtcggcgagatttatcgcattttta

SEQ ID NO: 608540 - DNA, 426 bp, Homo sapiens
aggaatttctccaaacatcgtttttacgacgttatggataagcttgtattacagtgggaacatgtctccggaagaagatatttttcaccaaagttcctacatgaacactttgagttcttatcaatcaataggtgatccttgatgatccttctgtggattttatttgattctttagatgagtttaacatgaaaatgatgtaggactttaccacttttctacgaattgtttccaaactggctgatatgaattatgaatatcaacttccattgtcatcaaattcacaggtaaggaatgtgaagactctcaattggtattcaatttgatgagctgctaggctaggaatagtattactcgcaccatatgcttggctgtctgggctttgatgatgatctgcttttactagtatctccccttgttactctgcg

SEQ ID NO: 608541 - DNA, 442 bp, Homo sapiens
  misc_feature (265)..(266): n is a, c, g, or t
  misc_feature (268)..(268): n is a, c, g, or t
  misc_feature (271)..(271): n is a, c, g, or t
  misc_feature (276)..(276): n is a, c, g, or t
acaccctctgcacacagcatagccctctctctctccagggctgttggttctttctcctgactcctgtggttttgctaatggcactttacagactccatggagatgtcaggtggaccatcttctagggcccagcaggagtagggaatgtgccaacagactgcccaggttgccgtggccttccccaccccccagatctcctgagtcatcatgctgtgctaatgaaagggatcatatcatcctctctggggatggtgggtgggggtgnnantangcggnagctcccttaccccaactcaatgactagggcggtaagttctcatccttttgatgcctgcctctaccttcacttatacgggttcagactatgcatactcggaacttaaggattgagggttaacctagttgacgcattggtacccaacctacgtgacctggaactctg

SEQ ID NO: 608542 - DNA, 139 bp, Homo sapiens
aaccacacgaagtgctgggataacaggtggtagagccactgtgcccagcctgagataaatctatagagtttacaactgtgaacaatagaggatgtagtacatatattgtaacaccctgtaccccaccacacagcaacct

SEQ ID NO: 608543 - DNA, 201 bp, Homo sapiens
gtgacatggttttgatttgcttctctctgatgattagtgatgttgaacatctccctcatatccttgttgccacctgtatgtcttctctgaaagtgtctgttcatgtctcttgtctatcgccgctaatgagatgtatttggcttggcctcctgctaatgaataaggtcccaatagatctgatatagaccctgttgatgcaag

SEQ ID NO: 608544 - DNA, 421 bp, Homo sapiens
accccaaatggatctacttcatccatgtgattgagaataatagttttgtttttttttaaggccaggagtggtggctcacgcctgtggtcccagctctgggaggccaaggccagtggattgcttgagcccaggagtttgagaccagcctggacaacgtggaggagccccatctctactaaaaatacaaaaacaacaaaacaaaaacaaaaaacacctcagctgggtgtggtggtgcaggcctgtggtctcggctgctccggaggctgaggcatgagaatcccttgaaccacagatgcagaggttgcagtgaactgagatcgtgccactgcactccatcctgggcaacagagtgagactcggtctcaagagggaaaataaggcatttttctcatttaaataataaataggattccattggggg

SEQ ID NO: 608545 - DNA, 394 bp, Homo sapiens
agttaggaatggcaggcccccctggcatttggggttcaaggtggctcctgtggcaggaacaggtgtccatgaccctaattacctggatttcccaggttttgggaaagcaataagggcctgctgtggctattccaacatttttggtcagggcctggaagtaccttaggacacatggggttggggtcaggactgcattttcagggaccagtggaaagccctggaccaaataaaatggagtttaggcctcttttgtgactgggacttgtgggacgtgggaggcctgttaaatccaggactaaaaattattctgtttcctaatgggcaaatatgtaagtaggtaagtgggatccccaggtaaacgggatccaaaaataaaaactgtgttttttcctta

SEQ ID NO: 608546 - DNA, 418 bp, Homo sapiens
gaattaaaaaacttttatctgaaaaatgcaagtccttttagttatcaaactcagagacgttaaaataaaagtgcaattatgtctttctcctccctttgaattctgtattcatcttttgagactgttcactattgccaacaggaagctataaattgaactaataatgctacattggacactatatcccataccctaaactataatgatatgtatctaatcaataatcaatgttatttttgtaaataaatagaaatttctgacaaacaattttgcccactctgtgtttctcttattgtctttacaaatcttcttgtaaatgctgctactcaaagtgtagattccaggcaactttaatctttgctcgcaggttatatataatctgtaaactttacccaaataaacagtaatacttatattc

SEQ ID NO: 608547 - DNA, 296 bp, Homo sapiens
  misc_feature (152)..(152): n is a, c, g, or t
tgagccgagatcccgccactgccctccagcctgggtgggcgacagagtgagactctgtctcagaaaaacaaacaaacaaacaaaaagaaagatcagactgttactgtgtctatgtagaaaggaaggtaagaaactccattgtgatctgatgntgaccactgttttgccttgagatgctgttaagctgtaactgtagccccaacactgtgctcacagaaacatgtgctgtgtcttgttaacaataggtttgcaggcagcatgcttggtaaaagtcatcgccattctccattctctat

SEQ ID NO: 608548 - DNA, 274 bp, Homo sapiens
tcccagactgtctaccaggtgtcaggttaggagttggaagcgcatatgtgcctcatctgctgttcgttagtctttctctcttatttccatcatctgcctcactgacctttctacatcatctctcgcttccttgtgctccctatgccttttaggtgtggcccatcgacaattagggacaagtcgcctaactcgcccccgcctgatatttcctccaggcttctggccttcaccccctcccaaatagggggattcttcttcattctgcgtggtggcc

SEQ ID NO: 608549 - DNA, 140 bp, Homo sapiens
tgcggtccctctccacatatcacaccttggttcatatcctggtccacacaccatagccctctctactactataaccaggaccaccgccatagttgccaccatcacctccaaatccattatatccaccatcacctcctcca

SEQ ID NO: 608550 - DNA, 388 bp, Homo sapiens
  misc_feature (310)..(310): n is a, c, g, or t
gctctagaggatctttcgggttgtgcatctgagaaggagttgcaggctgaaaggaggcaggtaattctaaacagaggcggcaacaaatataaaagcatggaggtgtgtgaaagagatgatcagggcacagttgagaatgcaaactcaaatgcctacagggaccaagcaggtaacataaatgagtgaaacacatcagttacaagaaaataaatgacaatgactcttgacctcaattacgggaagactggagagagctgagaatagcagcaaataggtgactgcaaggccctcacagcacagaatatagttngtccataccatccgctctcacattctgcctttagtaagaagtgggttttaactattcacatggccacgtagatgagga

SEQ ID NO: 608551 - DNA, 138 bp, Homo sapiens
ttcacaagccagactacaaggtggacaagacatgttgagcgcaaatgttgtgtcgagtgcccacctgtgcccagcaccagctgtgtgcagtgaccgtcagtcttcctcttccccccaaaacccaaggacatcctcagg

SEQ ID NO: 608552 - DNA, 424 bp, Homo sapiens
  misc_feature (3)..(3): n is a, c, g, or t
gcnctagcggatccttaatatgctgtctcaccattctagcatgccagtagaacatacatgattcatgggaggtagaaatattaacattgacaaggtgtatggaagaagtttattccaaccctcatggataactttgaggggtttaagacttcagtggaggaaatcccacagatgtggtgaaaacagaaagagaactagaattggaagtagagcctgaagatgtgactggattgctgtaatctcatgacacaacttgaaaagatgaggagtagcttcttatgggtgagcagagagagtgatttcctgagatccaatttgctcctggcgaagacgctgtgaacactgttgaaatgacaactaaagatctagaatattacatcaacttagctgataaagcagtaacaggatccgagacagcatatca

SEQ ID NO: 608553 - DNA, 153 bp, Homo sapiens
tacatggcatatctgcagcacattcggcttctcgcacattcgacggtttctcccatgttggtccaggctggcctcgcacactctcgcacctctaggtgcatctgccgtgccttgagccttcccaacagtgctgggcatcacaggcgtgcagcc

SEQ ID NO: 608554 - DNA, 248 bp, Homo sapiens
ctgccacgactattgatctctaccagtcgcactgggatgatccgaaacgcgttgagatgttctcggcacctatcaggagcgatcaaggccggtaaagtccgtgcaatcggcgcatccaatctgacaccggaacgtctgacagaatcgcttgatgttgcgaagaagcatggcctgccgcgctatgaaaccttgcagccgctttacaatctctacgacagatcggcttttgaggatggacttgaagcgat

SEQ ID NO: 608555 - DNA, 420 bp, Homo sapiens
gcacgagtctacacaacgttttcaactttctagtggttgattcgcccaaggggagcactgcagagcagtataacgaggcgtgcttattaaagggtgacattggagaccgtgctttaccactacaaagatctttacaagttgtctgctaaggagctgtccaagtgtttggaactatctccggatgaagtagcatgtctgaccaaacgccataaggactacgtagagcatatagctgactctcgtctcgccaaagggtacgtacaaagggtccggtatagccacagtgggtggcgggaagttctcccttatggcatttttgatcattaagactttaaggaatatggggaccacgttacctgtggaagccctgatcccttctggtgatgaaggtgaaactgagttttgtgacaagattctgcc

SEQ ID NO: 608556 - DNA, 399 bp, Homo sapiens
  misc_feature (17)..(17): n is a, c, g, or t
  misc_feature (290)..(290): n is a, c, g, or t
  misc_feature (312)..(312): n is a, c, g, or t
  misc_feature (322)..(322): n is a, c, g, or t
  misc_feature (327)..(327): n is a, c, g, or t
  misc_feature (341)..(341): n is a, c, g, or t
  misc_feature (352)..(352): n is a, c, g, or t
  misc_feature (369)..(369): n is a, c, g, or t
  misc_feature (371)..(371): n is a, c, g, or t
  misc_feature (379)..(380): n is a, c, g, or t
  misc_feature (383)..(383): n is a, c, g, or t
  misc_feature (385)..(385): n is a, c, g, or t
  misc_feature (387)..(389): n is a, c, g, or t
  misc_feature (394)..(394): n is a, c, g, or t
  misc_feature (396)..(396): n is a, c, g, or t
  misc_feature (398)..(399): n is a, c, g, or t
atataactacaatttantttcacgttgacaaaacacagtgaaaagacaactttgtgaagatctaattacaataataaataaaataatttatacaagggtttttttttcttgacttttctataggggtcatattcattaaaaagcccaaaaggctacctttgccttaacccttctgtagtacaggaatgattcttagattttgtttccttttgttatagaagcaaatatttgtttttttaaaatagccttgagatgagaggttatatttggaccccaccagcgaacacacnaaggtggaggacaaacgaggcncgcgggaagntaganggcgaaacatctangaaatgggcangggagcggggggggggngnagtggggnngtncncnnnggggntngnn

SEQ ID NO: 608557 - DNA, 223 bp, Homo sapiens
  misc_feature (116)..(116): n is a, c, g, or t
  misc_feature (118)..(119): n is a, c, g, or t
caggggacccgttcctcttgaaccagtcatccctttggcaaatgtgtgtatgagaatttggggggtgggagcggggccctgatgtggagtagacagtgcgcacctcaggcccacancnnaccccccctggggccttgagcgcaggcctcatctttctgtgcaccgggactccgcacctacctcacagggttgttgtgaggctcaaataaaacatcactcagca

SEQ ID NO: 608558 - DNA, 968 bp, Homo sapiens
tagtggaagccgccgccgcgctcgctacgatcgcaggcgccgcgtagccgtcgccaacgccggcagcccgtgcgccctcggtgtgtacccgccgcgctcccatccccgtcgccggccagggtgcgcgctctggacgcccccgtgacagatgatcccgctgcggctccgcgttggatggccacgcaatgatcgacaaagaggcttgccgggagacgggcgtacaacctggtgcgcgacgacgagcttcggccggtccaatcttggcttgacttttaacatatgaacggctcgcaccatcgtccccccgggcgagcagggtaaccggaggtaccagcacttcaattccaggcagtgccgcattatgactgtcccgcgtttgtgagcccgtttcgtggcgcttcaccagccgtaggtaatgcccatgagcaaggaggtcacagacggcttttgccccttcggtacaacgtgtggctcgggttgagaaacgtccgagcgtggcctgctaagcgagagcccaggaacgcggcgacggggaacaaacgactcctgggtgaaagggagggccgtaccggaacttttcgctaacgaggcgttgggagatccaggtgattcggaacggcttggagggaacgactctcattcaacgagccgagctgaaacaaaggcgggggggcgccacattacgacgcccaaagacgggaaaaagcacagcacccggcaaacaacccctgacagtgtcatctgctgctccccggggaggagggccgcagccaggtatatcccacagcttccaggagaaatgacctggatatccgcgcaccgggttcaatgtcaactttcgtcctaaacgcgggcaataaggcggactattagatctatacagccatcttgtaagaagtatggcggtcgcgcaaacgtctgggcttatattacacggatcaaacgcagtaagggacaagtttacggcc

SEQ ID NO: 608559 - DNA, 124 bp, Homo sapiens
tccccccccccccccccttaaaccgtaggttttgggcccaagggccggggggggggggggctgggaataccccccttggggggtgctttccccccttgtgtttttttttaaaggggccgaggga

SEQ ID NO: 608560 - DNA, 657 bp, Homo sapiens
ggacggagcgccccggtgccgagattcgccagccaggccgcggtagctttaggattgttatagtatacttggacgtcagttgaaacatggcttcccggccgaggacgagttccccgacctgagcgcccacaaaaccacatggccaatggtgctgacccccgagctgtacgcggagctgctgcgccaagagcactgccagagctgtgcttcactgcgtggactgactgtcatccatgacatggctgtggacaaccctggtgccaccctgtacatcatgacctgtggtgctagctgtgtgctgtgtgctgactgatgtgagtcctactgaagttgttcaatggatcgtcttcgaccccaagtcatctgatggaccggtgcactggctggctacaatgcccagctgaatgatgcacaagaccgacctcaaccccgacaacctgcagtggctgtgcgacgacctgtgaccccaactacgtgcttgagctcgcgggtgcgcacgggccgcagcatcctgtggcttctgcctccccccgcactgcgagccgcggggagctgccgagccatcgagaagctctgcggttggaagcccttgtccagcctgtacgtgcgactggcgggccgatactacggcgctcaagaggcatgacgggaggcgga

SEQ ID NO: 608561 - DNA, 2829 bp, Homo sapiens
  misc_feature (370)..(370): n is a, c, g, or t
  misc_feature (409)..(409): n is a, c, g, or t
  misc_feature (413)..(413): n is a, c, g, or t
  misc_feature (438)..(438): n is a, c, g, or t
  misc_feature (579)..(579): n is a, c, g, or t
  misc_feature (587)..(587): n is a, c, g, or t
ttacaaacttaccatctcttcagaagagaaggtatttgaagcagtaatagcatgggtgaaccatgacaaggatgtgaggcaagagtttatggcccgactgatggaacatgtacggttacctttgcttcctcgggaatatttagttcagagggttgaagaggaagcattggtcaagaatagcagtgcttgcaaggattacctcattgaagcaatgaagtaccatttgctgccaacagagcagcgtatattaatgaagagtgtccggacccggctgaggacacccatgaaccttcccaaattgatggtggtggttgggggccaagcaccaaaggctatccggagtgtggaatgctatgactttaaagaaganaggtggcccaagtagcagagttgccttccaggaggtgcngggnaggcatggtctacatggctggactngtttttgctgttggtggctttaatggctcattaagagttcgcactgtagattcctacgaccctgtgaaggaccagtggaccagcgttgctaacatgagagaccggagaagcactttgggagctgctgtgttaaatggattnttatacgntgtgggaggctttgatgggagtacaggtttgtcatctgtggaagcatacaacataaagtctaatgagtggtttcatgtagctcccatgaatacaaggaggagcagtgttggtgtgggtgttgttggaggtttgctctatgctgtaggaggttatgatggagcatcacgtcagtgtcttagcacagtagaatgctataatgctacaacaaatgagtggacctatatagcagaaatgagcaccaggcggagtggagcaggtgttggtgtgttaaacaatttattgtatgctgtaggaggtcatgatggccctttagtacgaaaaagtgttgaagtatatgatcccaccactaacgcatggagacaggttgcagatatgaacatgtgcagaagaaatgcaggagtttgtgcagttaatggtctgttatatgttgttggaggggatgatggttcctgtaacttggcgtcagtagaatattataacccaacaaccgataaatggacagttgtgtcatcgtgtatgagcacagggagaagttatgcaggggtcacagttattgataaaccattatgagcctgaaggacattttcagcatatttatacatgagaaacagccttcaacaagtatttgtgaagtgactgagaatctagcacttctccacttgtagctgcactttaagtctcagcagaagatacgatcgtctgcctttataggcctcagatactgaagattatttttggtagaagcaccgtgtaggctttttctgcaatgagcagcagctgactgaattttcataagaaacttggactgcaggacttaatctgtagtctttagacaacagttgctttcataaagactagttcttatcaaccttgaatgactacagattattttgtgaaggaggatgaagtaatgtgtgttcttgtaaaattaaattttatctttatttcttctaaaaatctgtataccaggaactgaaaatctttgaacagatattaaaatctacgtaagtatacaaactagttgagggatacactgtttgcttttataaaataactttgattacatgaatataataaattatgtgcatataaatgtgtgtctatatgctttcctttaaatatgtttgaaaagatgtttgaaacttgattatactatttataattggcacagtactttgaattatgccagtactacattgtaaaacagagttgtattttttgatatttaacaatgcttaacactttaaatgccacttctgaggaatggacctggtgtaacacacttgaatatgtgtggatgccaaactttctcacacatacaatataaattatgcttatttattatacttcttctagctatcaatcttggtcatgttattcggtgctgtattttccaacttcttcttctcttaccacttaacactttggcatgaacattactgcaggtagcttcgcatgaatataatgcaatgtactggacacttcacattgacatttgcatgggtctatcgcgcaatttttatgccttgttgctgctatcagccactctccagcttgcctaattaaacagaacgacgaggaacttacctggtgagtaagcccatgatgttgttcgactcaagattacaagtatgacactcgacaattccttcacgattaatcctcaccgtttgcaacgcaagtggaaccccaaaaagaagcagtgatgcttatcccgttggcaaagttgtcaaaccttcccggcagagtcaacaggaggcttgccgggtcattagttccaagaaggagcgcgaaggacaaaccgcgacagacgaaccgaccaccgcaaagaagcaggcgagccgcgatcggcgccgcgcacactcagcgaaacaacaccagtcgcacgaggagccgcaggcaggctacggtgagggacaacaggggagtagcccgaaagggagggactacggagagcatagaagcaatgcgcgcaaaaacagcgcgcgggtcaagccagaaagaggaaagaacggagggcccagaagcaacagagggggtggaggaaaactaacacaaacacaacaaaaaaaaaagacaccccgagaggaaaaagaacggaggggaaggagagaagaaacaaaaacgcagaaaaggaacgaaaaactaagagggcacaaacaggagagaaaacaaacaaccgacagaagaagcacaaaacagcagcacgacagagaagaaagccacgagggcgacgaggta

SEQ ID NO: 608562 - DNA, 2173 bp, Homo sapiens
  misc_feature (449)..(449): n is a, c, g, or t
gttaattgactgtatcagtaaggcgtttggtcaactgtaagctattagtaattaaattatgcgggagtaaaaaattatacatgggtttttgactgcgtggagggtcagcacccctgacccccatgtcggttcaagggtcaactgtatatttaaactatataattttattacttttgacagagtatatacccatgaaaccatcaccacaatcaagataatgaacatatccatcatgctcaaaagtttctgtgttcccttttgagtatattttccaaattgtaactacaaagaggagagttttcactgtcatttagattcaaatgataatactactaaagtttaagaaagagattctgaaacatgatttgtacagttcctcctgccttcgtattataatgaagaattgagtgttttctcagagatacagagtgctgcctgtgacttctttnttctctcttcatttctttgctcaggggtcacagttattgataaaccattatgagcctgaaggacattttcagcatatttatacatgagaaacagccttcaacaagtatttgtgaagtgactgagaatctagcacttctccacttgtagctgcactttaagtctcagcagaagatacgatcgtctgcctttataggcctcagatactgaagattatttttggtagaagcaccgtgtaggctttttctgcaatgagcagcagctgactgaattttcataagaaacttggactgcaggacttaatctgtagtctttagacaacagttgctttcataaagactagttcttatcaaccttgaatgactacagattattttgtgaaggaggatgaagtaatgtgtgttcttgtaaaattaaattttatctttatttcttctaaaaatctgtataccaggaactgaaaatctttgaacagatattaaaatctacgtaagtatacaaactagttgagggatacactgtttgcttttataaaataactttgattacatgaatataataaattatgtgcatataaatgtgtgtctatatgctttcctttaaatatgtttgaaaagatgtttgaaacttgattatactatttataattggcacagtactttgaattatgccagtactacattgtaaaacagagttgtattttttgatatttaacaatgcttaacactttaaatgccacttctgaggaatggacctggtgtaacacacttgaatatgtgtggatgccaaactttctcacacatacaatataaattatgcttatttattatacttcttctagctatcaatcttggtcatgttattcggtgctgtattttccaacttcttcttctcttaccacttaacactttggcatgaacattactgcaggtagcttcgcatgaatataatgcaatgtactggacacttcacattgacatttgcatgggtctatcgcgcaatttttatgccttgttgctgctatcagccactctccagcttgcctaattaaacagaacgacgaggaacttacctggtgagtaagcccatgatgttgttcgactcaagattacaagtatgacactcgacaattccttcacgattaatcctcaccgtttgcaacgcaagtggaaccccaaaaagaagcagtgatgcttatcccgttggcaaagttgtcaaaccttcccggcagagtcaacaggaggcttgccgggtcattagttccaagaaggagcgcgaaggacaaaccgcgacagacgaaccgaccaccgcaaagaagcaggcgagccgcgatcggcgccgcgcacactcagcgaaacaacaccagtcgcacgaggagccgcaggcaggctacggtgagggacaacaggggagtagcccgaaagggagggactacggagagcatagaagcaatgcgcgcaaaaacagcgcgcgggtcaagccagaaagaggaaagaacggagggcccagaagcaacagagggggtggaggaaaactaacacaaacacaacaaaaaaaaaagacaccccgagaggaaaaagaacggaggggaaggagagaagaaacaaaaacgcagaaaaggaacgaaaaactaagagggcacaaacaggagagaaaacaaacaaccgacagaagaagcacaaaacagcagcacgacagagaagaaagccacgagggcgacgaggta

SEQ ID NO: 608563 - DNA, 201 bp, Homo sapiens
catccagcggaagcttctccgtaaccttgtcttttgagcacactacacatgaaaacatatctaagggtcgggcatatcagttctttccgagatatactcccctttcctgttgtctgaccctataaaccacacatctctcgcaacctctcttcactgatggttttcagggtctcaacccaagctgcagaggagtgtcccgaa

SEQ ID NO: 608564 - DNA, 178 bp, Homo sapiens
agtggactccacgacgtactcagtgccagcatcgccccacttgtattttggagggatctcgctcctgtttgatggggatggtattaccattgatgacaagcttcccgttctcagccttgacggtgccatggaatttgccatgggtggaatcatattggaacatgtctaaatgcaatca

SEQ ID NO: 608565 - DNA, 260 bp, Homo sapiens
ggggttttcccttttaaaaaaaaccccggggggggggggggatttttttaaacccaaaaaaagggcattttttttcccccctttggggttaaaaaaatttttttggcccaaatttttaccacccaaaagtggcgggccccgggaggggtttttttccctcaaaaattttttcagggggaatccccgggccccccccctttttttttttggggaaaagattttaaaaaaccttttttttgaaaaaacccttttggggggga

SEQ ID NO: 608566 - DNA, 415 bp, Homo sapiens
  misc_feature (356)..(356): n is a, c, g, or t
gacctagaggacgtcacactgggtcgagtctcggcttcatactgtcaaaaggagtcaagggcaatgagtgccgccacctccacactcatgcactgtgcagaggacttacacagaccatctacaacatagctgaatttcctgacatgttctatactacctctttcttaaagttattttactctaggatagggaatttactatacaggattcctccacatataaaattactctttctttatatccttccttgcaaaacaaacaaaaaatacattttctattcataatattctttacatctctcttttctactcactgggttcactcatgttttgaacctcccatttagtaacttccgngattagacaaaaaattttttctaaataaagaatacatttctttagcacattttatggaa

SEQ ID NO: 608567 - DNA, 690 bp, Homo sapiens
tacagaaccgcggacacagtgagtattggaggcatagctcctggtaggcatgtgtgagaacatgctggagtccatagtcgactaatcagtgccttgtgtggcacaggggtatggagtaacaggtcgacacgcgtcaaagcgaattgagctaggttgcactacgttgagtacatcactaacagacttggcgtttggaggcactccggtggaacatagcaatcccatacgcaaccaaaatctcggatcacaggcatgaccagagtgcactatggcggacacaagcgcgtctcccgagggaattgtctgaacaagaagttcgggggagtaatctgggtgactagtctcgcatgtttgggacctgaaggtgagtagaactaagtgggtttctccaacaattcggggggaattggttgggagcacgcatttagcagccacagatcagaagagtttaatcaaacggggataggtcacaacatgctagttcaggaagatggtcagcctagtgaaaaggactttgggaagtagaaaggggtacttattcctcggggggatggaaatggtggcgtgttccaaggagtcgaaagacaattggtgggtctggtcgagggggaatgtcgagacaggtgggaaacaggtaagctgggtgagaagggaacaagaagaagcaaatgcaatgggaagaggcaggat

SEQ ID NO: 608568 - DNA, 725 bp, Homo sapiens
  misc_feature (137)..(137): n is a, c, g, or t
  misc_feature (346)..(346): n is a, c, g, or t
  misc_feature (481)..(481): n is a, c, g, or t
  misc_feature (606)..(606): n is a, c, g, or t
  misc_feature (618)..(618): n is a, c, g, or t
  misc_feature (641)..(641): n is a, c, g, or t
  misc_feature (657)..(658): n is a, c, g, or t
  misc_feature (667)..(667): n is a, c, g, or t
  misc_feature (670)..(670): n is a, c, g, or t
  misc_feature (673)..(673): n is a, c, g, or t
  misc_feature (676)..(676): n is a, c, g, or t
  misc_feature (678)..(679): n is a, c, g, or t
  misc_feature (696)..(696): n is a, c, g, or t
agcggagtgagctgagatctcgccactgcgctccagcctgggcaacagagtgagatccatctcaaaaataaataaataaataaataaatgaaattcaacgttccttttatgataaaagccctcggcagattgggcantgaaggaacatacctcaaaatagtaaaactatctatgacaaacccacagtcgccatcgaactgaacagcaaaggctggaaccacacccctggagaactgagacacgacacggatgcccacttttaccacttctgttcagcatggcactgaaggtcctagtgagagcagacaggcaggagagggaggcaaaagccatccaaataggacanagaaattaaacaatctctctttgccgatgctgtgattctacacatggaaaaccctaaagtttccatcagaaggctctttgaactgacaagtgaattcagtagagtttcaggaacataaaaacattgtaggacaantaagtagcatttttatgaaccaaaatcattgcagctgataaccgggtcgggaacacaatccagtttacaatggccacaaagaaacgtgaacatacctagcgaattcatccaaccaaggggggtcnaaagaccactanaaggcgcaagtgaggacactgtngagggagatccagagnntgacacatnaantgncanannatccatgctcatggctnggcacaaatcacatgtcggcgtgggctct

SEQ ID NO: 608569 - DNA, 781 bp, Homo sapiens
gtgtggagctgtcgcccagtagaccccgccgcagtaccaggaggtacctctggacgaggctgtgactctgcgggtgcctgatatgccagtgcaggcacctggccagcttcatttagtgctaacccatccatgcattcgggccacaacgttcacgaagccagccatccatgacccgtgcaggatccaaggtgaagacagcgggctgcgatgtgacagcctgtccagtcacagccctagatccacgactcttgtgactagcctaagggctggagccgcattcaacggtgcttccagtgtcacacaccgagcgcgaacctcatcagcctgaccaaccgtgactagtggctcacagaatgcccagactatccgagctagtcaccgcttgaaacgtgtgctgagctttcctattgggttggcacgttaagtgcgttcgggaagaaataaggcacattgcggtgggcggcagataacgcgggtctacttctcaccgcaggcttccgtgttcaagcgttggctcgctcgaacaagagccttcgagccacacgtagtagtgcaacacgaagggcgcgacggaccgcgtccgtgagggaaaactggccatgggatgcttcaggaaggcgggaaaacacttcaagaacggccccatttgatcccccgatgattggaattcagagggccatggcagcgcagcctgcgtaacacagtacaagaggagccacgtgcaagatggcatgtgcgccgccagaggactgcttcacccgttgcgtcatgtgtaaaactg

SEQ ID NO: 608570 - DNA, 786 bp, Homo sapiens
cttgtgccaaatattatattcaaatggtatgccaatagccattgctgccagatgcccttctttcactatggctcatcatgctctctgatccctcaggttctgtcataagcctcatgtttgtatgaccggtgctggttctcagctgaactcaccctgcccctgtgcacgtgtctcaatggttggttcacctgaattccccagatttcaatgccaggatccccatggtgcacttgacctcttggtgtaagcattcagcatctgaatattcattgggattcccgtcaagcatttctaactgtgatggaacaagaattatcgaatgacaaagctcgatagcaaaataggcaccgtgtgtccttccccctccctcttattttatagcataacacagagagtatgggctgagcatggtgggcaatggctgggcatgatggttcatacttgtaatccagcacttcgggagggtgaggcagctggatcacctgaggtgccaggagttcaagaccagccatgtgcaacatggtgaaatcgtcatctctactatagattacgataatacagtgtaccatcatgtctattgacaactacctttttgcggtggctgcgaacgccctaaaaaccattcatttgaacatatgggtggggcggcagatacctttatttgttgttgacgcatgctaaactacttgggatcccgaagaacagccggggtccaagataataggatagatttgttcccgaatgagatccgccgggggtaccacgagggtgtcttgaaattctcac

SEQ ID NO: 608571 - DNA, 535 bp, Homo sapiens
ctccatactgagagcgggtgggagagatctgttcccaaaggaaaagcagggggctgttaccaaagaattggaaacaaacactgagcaggcaaaactgcagcagtcctcaacaccacccttgaaattccctgaagataacaaatctcacttgtgtccttctgtgaaatttaattattatttcttttgacagggagattcacattttaaggaggctagtggcacatccaaattgctattataaccaaatctctttagaaagaagctatggtagtggtgtcaccaaggggtgttctgcaccatagcaattgcccatgtcagcatgctgcggtaggctgagtaacggctcctctagagatgcccaccctctaagcccccagacctgtcaaagtcacctcacacagcaatagggaccttgctaaggtgatcaaaatgagagattttgagatgggagattactctggactatccgggcaggcccagtggaatcacacaggtcattataagagagacagaggaggaggccaggtatggtggg

SEQ ID NO: 608572 - DNA, 254 bp, Homo sapiens
ggcagctggagacagtggcactgatgtcctgtcatctgcttgaacgttccagatcaagcacagcactgataccagtatgagagcacggtgtacacctgaaaatgaagggtgatcactaccgctccttagcagaggtcgcttcaggggagaagaacaacagtgtggtcgaagctcactgaagctgcctacagggaagcctttgaaatcagcaaagagcagatgcaaaccacgcatcccatccggctgccattggg

SEQ ID NO: 608573 - DNA, 199 bp, Homo sapiens
cgcccagacataacaacatttaaaagatacacttaaatttcttgaaggtaggcttattgcttgcaaaattaggttttaaaattaaacaatttgtacaggtattcatttattgcttgacattccacgtcctagaccaaggctttgttggccaccagcattgacgttcttgccatcagaggagcgtacagatacagcttta

SEQ ID NO: 608574 - DNA, 289 bp, Homo sapiens
cggtgactctagcaggatcttagctcatttcagttcggctgatcttgcggtggcaaggccttcgcggctgacttgcaaattgggtgatatgggtggcgtccactgccaattgggtgaggatcaggtcatgcagcatgcgtgggaaatggcggctgccggtgctggcgatgaccttgcctatctgtgggaacaggtgtgagttcatcaattcgtccatgagtttcgtgcaggtattggggccttatagcgacgggggttaagaaggtaactaatgtgaataacctgcagt

SEQ ID NO: 608575 - DNA, 733 bp, Homo sapiens
  misc_feature (546)..(546): n is a, c, g, or t
atgatatcatgtatgagtctgtcttttcctagaggctactgatgccttaaagaggcctgattagtgcattcacacagctggcttacatggctctaacatcctggacaggacgataacctagtacaccgcagtgctgtggcgagataaagagtctaccatagccagactatgacaccagttcgtgtctcttctctctacgtgagaggtgcttgatctggcaaactaagcatcataaagcctcctctaatgagcgcgctatgtaacatctttccatatgtgagatgggaactgagccttcagttgatatattgctgtctacgacgagacggtcatctccacatcctttgagatgttcctctgcattgagactatcagactaacccagactgcttcactactaatggatactactgcattgttacaatcctcatcctatacagaaactgacctatggtcatcaatagatgagcctatatatcatacacagatacgaagcgaagtgacaacacttaactaatgcgatatttttctacaatgggtaaagtncctatttgaatactgctcgtcatgacgagacttacctcgatgcatagtgtggctaccgttgatcagcccattatagacagtagtagaggccctgaggtgtcatatggtatgatcttaagcagacgatcaagtccctctcgaatcttttcatagatcatacactttgctctattgagccaggttactg

SEQ ID NO: 608576 - DNA, 230 bp, Homo sapiens
cccgactagcccgacaggtgctgaggggagtgaggcagtgaggatgcatggggcctgtgtggaaccagagagaagctggggtcagaggtaggagctgacgctgtcgggctagtcggggactgtcgggctagtcggggactgtcgggctagtcggggactgtcgggctagtcggggacttgtcgggctagtcggggactgtcggactagtcgggggggtacctgagctcga

SEQ ID NO: 608577 - DNA, 205 bp, Homo sapiens
atatctcgcgccacccaccccccacattctcacgagaacacgagaagggtgtggagaagaccacgagagccgccctgtccacatgccccaacgccacgtctcccaccacgcatataacacgggtctctcttggcacgctgtaatttctggaggtctggaatgttgctcttctaaagagccctttaaataaaattttgtaccaaga

SEQ ID NO: 608578 - DNA, 693 bp, Homo sapiens
ctatcatatagtaaaacccagcccatgacccctaacaggggccctctcagtcctcctaatgacctccggcctagccatgtgatttcaagcttccactccataacgctcctcatactaggcgtactaaaccaataacactaaccagtataccaatgatggcgcgaatgtaacaatctgagaaagcacattaccaaggtccagcataacaacccatcctgtccaacaaaggccttcgatacgggagtaatccgtatttattacctcaggaagttttctttcttccgcaggatttttctgagtccacttttaaccagctccagtcgctagtcacctctagcctccacaattaagtgaggggacactggctcggcacaaacaggcatacacctcagctataatctccgctagaaggtcctatttcctaatacaatattcgtattgacttcgtactgaggagtatcaatcagactgagactcagcatagtcgtattagaaaaaaatccgaaaccataagtcattcgaaagctacgtggttatttactaaattttaatggggtctgatagttttacccgtgcgtaaagtctctagagtatctgtcgagtgtcctcttcaaccatcatccgaaaggcattgtaaaggtcaatcatatttaggaagggcaaaggtgccagggacttcacgtcattatgggc

SEQ ID NO: 608579 - DNA, 208 bp, Homo sapiens
tcaactgaccaaacaggcatattatcacgtgtctatagcccatggatacggtcaaaaggaaagagtggagcagtagacaccctaggaattattgcttcacaattaggggcatggtgaactgcaggggaaaggaaatgcagctttatttcctttaatctctttatttctgtccctgagtaacccaaatgtcttcagactcaccagtctg

SEQ ID NO: 608580 - DNA, 2946 bp, Homo sapiens
ggcacgaggtactttgggagaccaagcagggaggattacttgagaccaggagtttgagactaccatggacaacatagcaagaccccatctttacaaaaaatttaaaaattagccagacacctatagtaccagctacttaggagtctaaagtgggagaattgcttgagcctgggaggttgaagcagcagtgagctttgatcatgccactgcattccagcctgggtaacaagagtgagactgtctcaaaaaacaaaacaaaacaaaaaaatgggtttttttgttgttgtttttgtcttttacttaggacacctgctctagaggctagataaaaatagattgtaatggccgggtgcagtggctcacacttgtaatcccagcactgtggaggctgaggtgggcggatcacttgaggtcaggagtacgaagaccagtctggccaacatggtgaaaccccatctctactaaaaatcaaaaaattagttgggcgtggtgatgcgcacctgtaattctagctacttgggagcctaaggcaggagaattgcttgaacctgggagatggagattgcagtgagctgagatcgtacccactgcacttgcatctgggtgacaaagcaagactctgtcttcaaaaaccaaccaacaaccaactttttgaaattgaattgcaatatgtctgtctttggcttgggctggacagttatctaataagcaggcagcttcttgtgtgctatggtaataagccttcttaacaggctaagcttccctcataagaactgtggtgtttctctttttttttttttgttttggtttgttttggttttttggttttgttttgttttgttttttaaatcagtatccaatgttttataggggccaaaggttaactttgcactattccctgtcagttaaaggccactgatatttttctaagttagcaaggctcacttgcttgctttcttgcctcccttgcctccatccctctcccttcctaccttctctatttacctatttctctccctccctctcttctcctctctttttttttcccccgcatatgccagctttttcgattggaccttgattttatcgagactgcttagttccagcaagattgggagtcaggcatggagcaggcatctcaggcttccagaaagaattggtcacctagactttcaggcaggcgggctcgtttgcattgtcctgcagtcaattagttgataaatagttcccccttcatcccttaagttttgtttttgtttttgtttttaatataggtaagtgggactctacctaaaattttgcatcatacttatgggtaatatctttttcatatattatttatcaaagtatgaagttgagtattttgcttgtaccatttcaattctgcattatagtagttcattgtataactgaaagaaatgatttcttcataagtgacattaaatatgaacattcatccaattgaatttacaaaatctttccaaaattataagggagaaaaatcgggtttacttcaatctttaaaaatctggcacctcttagtaactttcagtatttctaaattgctctaaaattttataataaatagattagggttttgcaatagtcttaatttttaagccaaaggttttctgagaccttaggttttgtagtctaaccagcttatgtggttatttaaaagaatattctttgtgtttttaaattgctatttttaaaaaagctttttattacccattttataaaatgttatactcatatttgtctgaatttttccagtattcctacatgaaattgtatgtattaaaaactcaatattagtggcaaatattaatactattaaaatggattttggtgctatattcttgtagctaaagcctagtagaattctcaagaataggtgaaatacactttcaaagttgcctgtcatttaaaagaccaaataagcatttggtattaaataaattagcagaagggttagagacttcaaggagagttagcttggtcatttaaatgcgacttcatgttatttgattgaaataacccacatccttgctttgtataagatattcgctctggagaagttacatgtaaatagaattctataaattgttttccagttgaccgagtatctgttgtgtttttgtttaaaaagaggattccatgacataataaaaattattttaaaaaatgttttgagccaccacactcagccttattcttatattttaatttggtcattcttagatctacagattgaacatccctaattgaaaactttttgagtactaacatagtgttcaaaggaaatgcttattggagcatttagaattcagattagggatgctgaactggtgtaatgcccagtattccaaaatccaaaataatttgaaatctgaaacacttaatggtcccagcatgttggataagggatactcaacctgtattgatttttctccactataattcagttctataagttcttccctataaaaaatgaatgaattagaaatttgataataaaacgatattttattaattttaaactctatcttgcagtctgatcattcagaaaggtcaacctagaaaaaagacatggctaagtaaactattttaagccataactaagtatttggaaagccttcattaacacataaagaattttggccaagtactgtggcttatgcctgtaatcctagcactttggaaagccgaggccgacggatcacttgagctcaggagtttgagaccaacctgcgtaacatggtgaaaccccatatctacaaaaagtacaaaaattagctgggtgcggtggcgcatgcctgtagtcccatctactcggaagactgaggcagcagaaccgcttgagcctaggaggtggaggttgcagtaagatgagatcatgctgctgtactctagcctgggcaatgagagtgaaactcttatctc

SEQ ID NO: 608581 - DNA, 641 bp, Homo sapiens
aagatgtgtagttttaggtatattttaatcaaaatagtgtatacggcaaaatgaatgcagaagcattaatggaatccaggctgtcttctattaaactacatattaaagagatttacaaaaaatgtaaaacagggcatgggcatgccagcccctgcttctcagcctgtactcccagcacttagggaggccaaggcagtcggatcacctgaggtcaggagttcaagaccagcctggccaacatggcgaaaccctgtctctactaaaaatacaaaaattatctgggcaatggtggtatgcacctgtagttccagctacttgggaggctgaggcaggagaatcacttgaacccgagaggcagaggttgcagtgagcctagattgtgccactgcactccagcctgggcgacaagagtgagactccatctcaaaaaaaagcaaacaacaaaaaaaatatcaaatagaaggagtatctcaatatgccctagaaatttcactgaggtagaaggccccgtggagtttgtttcggatttattctccactttctgtcatgcaactatcttaccaatgtctacagtaggtactatttctctctcactaaatccaatcaccataatctcattgatgtcatggaccagtgtgata

SEQ ID NO: 608582 - DNA, 760 bp, Homo sapiens
ttcatgatggataaacaagcagggccccctacaggaattgattcttggagaggggatttacctgatggggggagaaaccacaccccctcggattcttggaaaagcagagacttttacccgatgttcctattacaactgctgtgcccctcgcagatggcactggtccttttctgaaacttgcgtatatcatagtgctgccgacgggaaggcgtggaaaagaggaaccaatgccacccccgacatcccagctggtcccatcaccgtgctattccagaaatcttcccaggagcttcgagacatgtcccagatagagagatagcctggcccccgtcaacgcttcctgtgtgtcccccccgtgactgggggaatcatacctcccgttacaccccgaccactatgatagccccacatgcccttgatgccacgcagcaggacttgccacatcagactcagattcccccacagccgactacaggtaaatggtatccctgaagaaaggaaactgactgaagccatggatttataatcagaccatatagccggtacatcacagttcttttctcttcccataatgcatgagcttttctggcatatgttatgcatgttggcagtattaagtgtatacccaataataccacataactttcattttactaaagtatttttttgtacttaaagcctttttgaccatttgtaaaaccttgatgactttatatttgttaccataaaagttgatctttaaatcaatattattaatgga

SEQ ID NO: 608583 - DNA, 287 bp, Homo sapiens
atgacaggcgcccgcacagcccaccaaaggggggccggcctagccatgcgatccactcgccacaccagaacgctcctcagacgaggacgacaaaccaacacacaaaccatataccaatgatggcgcgatgtaacacgagaacgcacataccaaggccaccacacaccacctgtacagagaaggcttcgacacgggataatcatatttataaactcagaagtatataacttcgcaggatatttctgagcctttaaccactccagcctagcccctaccccccaattagg

SEQ ID NO: 608584 - DNA, 168 bp, Homo sapiens
tacaaatgtgaagaatgtggcaaagcttttagccggtcctcaaaccttactaaacataagaaaattcacattgaaaagaaaccctacaaatgtgaagaatgtggcaaagcttttaagtggtcctcaaagcttactgaacataagataactcatactggagagaaaccc

SEQ ID NO: 608585 - DNA, 141 bp, Homo sapiens
  misc_feature (45)..(45): n is a, c, g, or t
  misc_feature (123)..(123): n is a, c, g, or t
ccatttttggcggctgggcctggcaaggcagaacaaaaagcgtgntaaggcggcagacggttcgggagatgaaggtgcgcatcctctccgagcggagaagcctctggacattgactacatggnggaggaacagctccggga

SEQ ID NO: 608586 - DNA, 899 bp, Homo sapiens
ttgggagtgtccattagtttgagtctaccattttgccgaaagtggtacacaagtccagtaggatgtcaaatgtggggaattagcatttgtgggtgagcgagactgggaatgaaaaattcacgtgtatcgctataactttctatgagttattgactagccatgaaacttcaaataagttaagaggagcacctagatcagagttcagcctttcagttcattggatagtctcccaacttggttgtgggactctgataataagtctaccagggtcatggtacgggatggtgaataacttgatgctccttttgtccacttattgaagataatatccctgacctaaaccgtgttttgtagcttgtacattgtaaagattctctatagtgaagacatactttgtcgcctgctcatttgtttgcttctaagtatatgcaactgacacaataacaagtcccttgctgaagactgaactagtagcctggcttcattatcttgatattacaaatagctaaaacaagtaaatatagccacatccttatctgggaatactgtaaagtgatagacagtgtagacaaagtagactgggaaagacagtgtagctctcgacatctagaattaaattgctgtgagtctcagcagtgtttttgggagtcaagtcaaatagttgttattattgttcttttttgcttgaaggcattatgtaaacaaagctctgctctttcaagaagataggagtcctgaatttgagaccttgacagtgattaataacatcattttgagcaaatagttgtcaagaagatcccaaataaagtggcgagatagtctgagagatcacccgcctgatggttaaagtcaagctttgcgacacattggaggaagtcaataaataaatatttgttgca

SEQ ID NO: 608587 - DNA, 382 bp, Homo sapiens
ctgtggcatgaggaagctggggcatcttctccacagggttcgcgctgcagctaggcagcatctccgcaggtccaggtagtgtaagccctcacatgccacgtcccctgggaccatcggcatgcagcgcctttctggccagatccaatcaccctcccgcgaaggtggctttcgcatgcgcttctgctccccagcgatctgaggagtgaacaggaccccacggacgaggtatctgccgggtgtggccctgctctggtcaccatcctggcgctccccaggggccggagccggggacgcccagcactgggggcggggtggttaggggcggccgttgcgatgtatgtggcaaggtgttcagccatacgcagcaactctgctgaggcac

SEQ ID NO: 608588 - DNA, 227 bp, Homo sapiens
  misc_feature (52)..(52): n is a, c, g, or t
tgaaggctactgacaactcatcctggccaggagaagacggatgatctgttanaaacaaggaaaaatatattcacatggtgaaaagacattaatatcttttgcacatgtatggcatattactaccagaagcacctgaaacagacacatcaccttcactttgggatgtgcatttcgctaagcagttagccacagtaaatgaacaaccccttcagaatggatctgaagaa

SEQ ID NO: 608589 - DNA, 98 bp, Homo sapiens
gggctccgtaaccgaaccctgagccgcctgcgcggatcggcgtccgcagcgggcggctgctgagctgccttgaggtgcacgtgttggggatccagagc

SEQ ID NO: 608590 - DNA, 224 bp, Homo sapiens
  misc_feature (115)..(115): n is a, c, g, or t
atcctgttaacgacccaaggagaactggagaaagaaagagacaaactcagttcgtggttgcattgtggatgcaactctgagctgttctcaccttgtgttatatgtaaaaaaaggnagagaatggatataccatggacttgactgcatactacagttgcctcgcctgcctggtgccccaaacagagcagcagtgaggaattcctgcggggtaccgagactcgaac

SEQ ID NO: 608591 - DNA, 260 bp, Homo sapiens
ccaacactagataaaatccattaacactgacatacaattgaccagctagttatagaagccattctttgtatcacctgaaagagctgaaaatgggggaaaaagaaaaaaaacagactggctagaatacacagctcctctagtggcattcctgttaaaacaacctcataggtcagagatgccactgatcactcctagatttcagtaaatatataataacattaatcattaatgtctgaacttgggtgttggggataacatca

SEQ ID NO: 608592 - DNA, 532 bp, Homo sapiens
  misc_feature (265)..(265): n is a, c, g, or t
  misc_feature (324)..(324): n is a, c, g, or t
  misc_feature (379)..(379): n is a, c, g, or t
  misc_feature (525)..(526): n is a, c, g, or t
cccattgagcaatgcctgccttcacttgaaaactccaagtactgccgtttcaaccaggacccagaagcaggtatgtttggagctgagctcagctggaaatcattggctttgtttttatgatccatgtgtgtgtggctgtggctcttaacagggtccaggtagctttgtatattatagagtatgctgtgcatgagtgtgtgtgtgtgtgtgtgtaagatagaggaagactttgcacatgcacacaaactcacacagtttggcacanaattaagaaacctcacgtgcttgtgccacttactgacctagcttctcccatagattagntttatatgccttgaggggcctgaatcaatatccatatttttccaactatcacggngcctaaaattggctgctagatggattattagtcaatggagagaagatgaaatattgaccacttgacccgaataagtggagggatggttcatgaagcaaacaggctggatggattttgggcccaaacttttttacttttaactggannctgggg

SEQ ID NO: 608593 - DNA, 460 bp, Homo sapiens
gggaaactggtgttgacggatctctactaataaatacagaaatctaactgtgatggcagttgtgagcagttgatagtcccagctactcaggagggctgaggatgggaagatcacctgaaccgtgggaaggtttgaggctgcagtgagccatgattgaaccattgcgctgaagcttgggtgacagactgagactctgtatcaaaaagaaaaaaagaaaaaattagccaaatgtggtggtgcgcatctctggccccagatacttgggaggctaaggtaggagggttgcttagagcccaggagctggaagctatagtgagccatgattgtaccactgcattccagtctgggcagcaaagtgagaccctgtctcaaaaatgaataaatacattaaatataatagtcctcaggttgggtcagttgggtgtatcctcatgatttcaggctatgcattctatggttg

SEQ ID NO: 608594 - DNA, 162 bp, Homo sapiens
cggcacgagggtgaccgagaactcgccctccagggtcttgatctgcacctgttctgctcccattcttgtgcccgggtcgggccccgccgcccgccgcgccggccccgccgtgaggtaatcttcttgccgctcttcttgccgccgcccttcttgacgcggccg

SEQ ID NO: 608595 - DNA, 891 bp, Homo sapiens
tccttgttaagtttccttctttgagtacaggaagatttgcacgtaatggttaccactttccttcggcattactgggtaaccatcctctcaatggtgtcactatttgtgcggacagatgagtacagcttgtgtgcaatactggttgatcccgtacaagttcttattttacgtttacgtttatgacgtatacccttaagagaagatggcaagatcgatcctcaaccttcgttcaggactgtgtacaaggctagtgcaataacctttctggtcacgcattcctgactgctgcaatcctggattaggtctatccaatgctgtgctggcaacgagtatagctcaacggcataccaaggatttatgaacgagaagtcttaaagacttaccttgtctagcatcacagtttaccttttgtcaatatgcatttactcccttctcatgctgatggtgtgctgattcgtttgcatgttatagtagcatgcctgtgaacttcgaagaccactagccattctgggaagcgaaccttacacaatggtatagaatcacggctgcatgtaacaagattctttaaattgtgttgctgataccaagttctgtactgttttgtataccgaatacaggaagatatgactatgtggaactatacgcataaattcgtgcacctcgggagggtgtaatactatcacagaagactcaagctaacgcatactttctgggtctacaaaagatactatggaatatagaggtccttgacgtagaacctaaggatcttttgaagggaagggaagtgtaagttatgcattacttatatcatccagattacattatgagaagccaatctagcatgtgaggggactaagtgttctcagagtgatgtttaatccagtccgataa

SEQ ID NO: 608596 - DNA, 456 bp, Homo sapiens
taattcagaaacaggaaagtcaacaatgcaatacaccttcctagagaatgcttagagtcatacgcacgcacgcaaggaaatcttctgattaatactactccaacaaacatcatccaaggaaacttacaccattttatccttaacgggtcaagtcctgtcttatatcataacccgacaactacccccacaacacatctccccattacctaacaaagcattgtatgcacaataagcactcacatatataaatgtgacatatgcacagcaaaccttaaacaaaaagccgaacagagcaagaatcgaaatatacaacagcaaagcaaacaccagcagcaagcaatcgcaatatatggttttctacagtgccagctgtcataaaagaggctcagcaataacaagtaacaaataacatgcacaggaacacacatgatggccaggatgccagcagctctccat

SEQ ID NO: 608597 - DNA, 378 bp, Homo sapiens
actactactaaattcgcgccggtcgacccaggtttgaccatctacatagtcttatttaacagaattactaccaatatgctcagccaaaaaggtgtgttatatggccaagcatctcctttgtatctggacataggtaacacataaagggggactaaaaaattatccttgcctcaaaaagttattttaacaataatcttcaagtggatttaataatgtcacccaatattagccaaacattgtggcacgcacctgtagtcccagcgactcggaaggctgcggcgagagtatcactttaagcccaggagtccaaggttgcagtgagctatgatcctaccactgcactgcagcctgggtgacagagtgagaacgtcgacgcgg

SEQ ID NO: 608598 - DNA, 248 bp, Homo sapiens
  misc_feature (223)..(223): n is a, c, g, or t
catttatctctttgtgatagtttaagcccctgcacctggaactgtgtatttttctgtaactatctctgtaaccattaattttttttaactttttgcgtgttctgcttctgtaaaaattgcttcagctaggctccccctgccctatttagaccacggtataaaaagaaatctatccccttcttcggggctgagagaattttgagctctagccatctctcggtcnctgacaatacaagaactcctgaatt

SEQ ID NO: 608599 - DNA, 119 bp, Homo sapiens
ttttcacagtgtggccctggttgtggtatctggtggactgtactaccatctagtctttggggctgtcctgcatccctacaccttggcctgcctgaccttgtgactgacctcccgtcgct

SEQ ID NO: 608600 - DNA, 327 bp, Homo sapiens
gatgagtcgctcccatcaggcgcacttctggactccagcctgggactagatgacgactctgtctcaaaaaaaaaaaaaacaaaaaaaaaccaaaacacaaaacatacgctccaaacttcgaatacaggaaataatgagcactggcccccccaacactgttttctctaaatatcactgcccactaacttgacaaattagggagaaatggatacacacgtgtcatagagaaagattcatcacattctctcagataactaaattaaattaagcagaataataattccagctaggaataccacacaaaatttgtgaccattcaaaatttaa

SEQ ID NO: 608601 - DNA, 119 bp, Homo sapiens
  misc_feature (65)..(65): n is a, c, g, or t
  misc_feature (76)..(76): n is a, c, g, or t
  misc_feature (94)..(94): n is a, c, g, or t
aaacaccttttctctttctctccctccttctctctctctcaccccaaccaagaagttgtttccangaatttataanagaatacttataattcangtagtaagaaaaccgagtaaaacag

SEQ ID NO: 608602 - DNA, 870 bp, Homo sapiens
  misc_feature (4)..(5): n is a, c, g, or t
tatnngtctcgtctagcagagtaatacacgaacagagacgcaagcagacagtgtcggtatatattacgaacattgggcctccaggtccgtttatccctttacacgctcccaacgcggctttttctgggacccatcgcactccctctctaaacagtgtcgttgtccacaataaatggtttcctgtctccaatgcgcggtctaataccccatgcaaccacgaagtttctcaaccacacagaaaccgtgggtctaccacagccgcccttctgtatcgtgtaatgcgccccccccctgctaagtacaagtctggcaaaagtcctttatggacaatctcatttgcaaggcgtccttacttctcaaacaccatgtgtttcttgatctgcgagaatatgggtcccaactgtttggaccactataattcccctcctgagcggcaaaattgtttccccacgcccacgggcccaagcacatcccaacagtgcgagcggcgtgctagttatgaaatacccacctttttaaaagctcttatgcgttacatgtaatgcatgattttgaaattattcactttgggctttggtggggacaaaaaaactttttccccaccccagttcttgaaagcaaacagtcggtccccccccaccatacaaagtcaagccgaaaataaaagggccgctcgcccccccgtcggcgcacaacaaatacatagtccttgtttcttcaaacacaaacattgaggaaataaagcgtttttcaacgtcgcaaccattttgacccacaacccttgcaccacttctaaccgctaacccccaaaatatatgggcacccctgggccccccgtctgccaaaaaaagccaatttcccaccaaaaca

SEQ ID NO: 608603 - DNA, 255 bp, Homo sapiens
  misc_feature (38)..(38): n is a, c, g, or t
  misc_feature (40)..(40): n is a, c, g, or t
  misc_feature (52)..(52): n is a, c, g, or t
  misc_feature (91)..(92): n is a, c, g, or t
ttcgattggcgggcacttacctacaccacagccacagnantgcaggatccgngctgtgtctgcaaactacaccacagctcatggcaacgcnngatccttaacccactgagcaaggccagggattgaacccgcaacctcatgtttcctagttggattcgttaaccactgagccacgatgggaactccacaggagcatgtgtcttttgagtgaaagttttgtctgggtagatgccaggtgtggatctaagttgcccg

SEQ ID NO: 608604 - DNA, 407 bp, Homo sapiens
gacgagagtgtctgtggatgactccagaacaccacctgtgaagagactcgaagtcgacacatctgtgtataggaagcgcgtgttggattttctcagaagcccttacacagctgttgggactggagggaggccacaccttagaacgagcgcactggatttcttctgtgagagtggagactctttttccaagaggtgtttgtgccctgcgtttcccactgtgggctataccgcgggttttggattgtggttctatggccgaggatctgtgaacccacagaggggccggcccttggaaccctgtttcagaccgaatgaacggatatgtttggcatgtgccttgatgccaccggcccctgtggacggcctttggccattcattcgcttgtgggatgtgaccgcgctgtttc

SEQ ID NO: 608605 - DNA, 118 bp, Homo sapiens
gacccttacccccagagaaacactgaatcaacttttgacagcccttggggtaagtagtagtacatcctttaaatgcactctttcttgaatggcaatagaggggggatatgcacacaca

SEQ ID NO: 608606 - DNA, 279 bp, Homo sapiens
gcacgagaattcaatagtttttgtgtatttacagtgttatgaaacctcattagagtcaatttttagaaccttttcattatcccataaagaaacaccatgccctactaaaaatacaaaaaaattagctgggcgtggtggtggatgcctatagtcccagctactcaggaggctgaggcaggagaatggcatgatcccaggaggcggagcttgcagtgagccgagatggtgccactgcacgccagcctgggcaacacagccagactccatctcaaagaaaaa

SEQ ID NO: 608607 - DNA, 297 bp, Homo sapiens
gtaggtgggattaccggtgcgacaccacgacccagctaactttgtgtatttttaatagagacggggtttcacctatgtggtcagtctggtctcaaacacctgacctcagttgatccacccgactcgtcatcgcaaagtgctgggattataggcgtgagccacggcacctggtgcatagtcagttgcacagtacattaagcatgctggtttgcaactgtccctgaaatagctgtcaccggccacacgcctaaagcctgactgctctgctaacagtcacctgtgcataccaagtttcct

SEQ ID NO: 608608 - DNA, 630 bp, Homo sapiens
agggagtttcactcttgttgcccaggctggagtccaatggctcgatctcggctcaccgcaacctctgcctcccaggttcaagcaattctcctgcctcagcctcccgagtagctgagattacaagcatgcaccactatgcccggctaattttgtatttttagtagagacggggtttccccatgttgaggctggtctcgaactcctgacctcaggtgatccgcccgcctcagcctcccaaagtgctgggattacaggcgtgagccaccgtgcccggcccaagaactcaaattctaaagacacaatctcagaataacaaatctcaaaggttatttgagaaagacaaaaacccactgcttaaaatgttagaaatgcgctccctaaaagtctcagaacaaatttttaagaatgtcatataaacagtttatgtacagaaattatttatttaaacctttgctacacatgcatacaaattcctattaaagcctttgaaacactttaccaaagtgtattactttggaaaaaggaaacctttaaatttttcttttcaaacacttttaaaattcccatttttaaaaggttcctatgttacacaaggttcccttgaaaccctattgggtggtttcattaaat

SEQ ID NO: 608609 - DNA, 701 bp, Homo sapiens
  misc_feature (228)..(228): n is a, c, g, or t
  misc_feature (234)..(235): n is a, c, g, or t
  misc_feature (325)..(325): n is a, c, g, or t
  misc_feature (546)..(546): n is a, c, g, or t
  misc_feature (549)..(549): n is a, c, g, or t
  misc_feature (551)..(552): n is a, c, g, or t
  misc_feature (554)..(555): n is a, c, g, or t
  misc_feature (557)..(557): n is a, c, g, or t
  misc_feature (561)..(561): n is a, c, g, or t
  misc_feature (564)..(564): n is a, c, g, or t
ggtcatgttcgcctggtacaggtgccgctgttcccagcaacgccgggagaagaagttcttcctcctagaaccccagatgaaggtcgcagccctcagagcgggagcccagcagggcctgagcagagcctccgctgaactgtggaccccagactccgagcccaccccaagggccgctggcactggtgttcaaaccctcaccacttggagccctggagctgctgtcccccnaacctnntttccatatgccgcagacccatagccgcctgcaaggcagagaggacacaggagagccagccctgagtgccgaccttgggtggcggggccntgggtctctcgtcccacccggagggcacagacaccggcttgcttggcaggctgggcctctgtgtcacccactcctgggtgcgtgcagacccttcccctccaccccccaggtcttccaagctctgcttcctcagtttccaaaatggaaccacctcacctccgcagcacccgacttaccagacgcatgcccctccctctgcctcatcaaaccacagacccggnctncnntnntnccanccnggctggtccggccccaggtgtggggtccgctctctccactcccagggctccgcgcccaagtgagggggccctgccggagcctcagacacactccagttcagggctgttggggggccttggcacatacctgtcccttg

SEQ ID NO: 608610 - DNA, 804 bp, Homo sapiens
cggggagtgcgcaccttattaggctctgtggacggtagagtaatgaattgctatccccgtactgtatggagttgtactgaaccacgtgctgggcacgcgcaagtgtatctgataggcggccgttcccgacacggtgatggagccggcacttatagcctgcactcagactgtaccatgtgtctgactccgaggggaatactggctggtgaggcgatagtcgccacacggccactgacacaggacctgcctcagtgcacgaggactgttacatcctggaccaggggggcctgaagatcgacgtgtggaaagggaagaaagccaatgagcaggagaagaagggagccatgagccatgcgctgaacttcatcaacagccaacgcagtacccaccaagcacacaggccggagcgtgcagaatgactcggggctgagtcggccgatcgtttacagcagctcttgccagaacgctggacaagcagtccaagcgcggactctcaggccctaggcaaaacccacactgtgggctccgtgggtgagggccaggacgggggcagtagagggagccaggatccaggagctgggcacaggagagcacacttaggtccaccacccaccctccttccctgacgtgcatcttcaagcgaagacttttacgctggctctgggcttgtcaatagcagatggggacgtggacaaactctagttgtcacaaaaagggatgctgagagggcttgggcactggtggcatagtgcctgtaatcccagcactttgggaggctgaggcgggtggatcacctgaggtcag

SEQ ID NO: 608611 - DNA, 358 bp, Homo sapiens
cctgtgattgatcaaagccattagtgacattacacagtggcagtactgtatgactgtgacaaatgtgcaccttccttacaggtaagcaatcctagcaggtgttattggctcacagaaatacctagaaaaagtagaagaattagaaaagttttaaatctatgataggtaaaattaacaagcacatctcaatactcagtgtttcaaaatacagtgagctatgagtttaaaaatgaatttagtgagttttgattacctactttaaaaattgaaataggatgaattagaatggaaaatatcagagttcagtgcactgggtaagataaatattgatgtgtgaaacttttgttttagttatgtg

SEQ ID NO: 608612 - DNA, 255 bp, Homo sapiens
cattttatacccgctctgtcttaggcgttgcaagagaggagtatatacagtagttcccccttatccacaggggtacattctaagacccccggtgggtgactgaaaccacagatagtaccgaatcttatacatactatgttttttttctaaacataaatacctacaataaagtttaatttttaaattaggcaccataattaataataaaacagaacagttataacaatatactataataaaattatgtgtatgtga

SEQ ID NO: 608613 - DNA, 244 bp, Homo sapiens
cgctcgagctgactacgcggctcgatctgactacgcggatcgttatgactacgcggatccatgtgactacgcggttctatctgattacacagagaagcacggcagcatgctccaaattaccgactcgagccgcgtagacagatcgcgaaaaataacagtacggaactgtttggatgccctgttattggtatgagtccactttaaatcctttaacgagtatccattggagggggtttgtgggtga

SEQ ID NO: 608614 - DNA, 452 bp, Homo sapiens
gttgctcagggctaccctctcacgcacaaacgagctcatattcgcatcaacggcggggcggttgaatatcgggtttatgctgaggacccccaccagtcttttggttgaccatctgtcgggagattgtctcagtaccaaggaaccgttacatctacctagtgtccgagtggacagtggcatccgacccggaggtgatattggcacttatgatgatcctgtatttcaaaactgatcacatatggctctgatgggaactgaggcactgaagaaaatggcggatgcactggatactgtgtttttcgaggtgttgcacatgatattgcattacttcgaagaggttgattatccactcacgctttgttgaaaggagaaatcatccctgaatttctctcccaatttgtacctgattgcttccaagacaccatgcctgacccggagtgagaaaaaccatt

SEQ ID NO: 608615 - DNA, 1058 bp, Homo sapiens
  misc_feature (492)..(492): n is a, c, g, or t
  misc_feature (681)..(681): n is a, c, g, or t
agagaggaagaagcgaggggcacggtcgtctgaagacagagctggagcatgagtgccagaccatggacactacagcccagcgaatagagacgggactgcggaggaaggaggaccctaggacaggtatccaggccggctggcctagcgagctcacacccaggcatctagtgactatattcgccagctgactggagtctcatgcagtggtgctacctacggcaaaggactgccgtacccaatcccttcagtcgatagagagatgctagaagactggggatggtagaagacgagcttgagtggagatgtgacgcgggcgaggatggcctacgggacaggatcctccctagcacaacatgaagagctaactaggaaaggaagacttagtggggcctccatcactaggggctaggctaggcacactacatcaagagtatgcactagcgcactggcaagcccacgagcttggtcgttgtgttgttccaatcccgttgnaacacaacacaacagaaaggacagagatatagatggggcacataaccagagggaattgttgccatgacgatgtaggaccatttcatacacagtcgtggagcgaaagcccgggccagaaatataggtccttcctgggaatccggtccggaacggcaattaggaaaaagcgcaatttgcaaaaggaccctnaattgggggagcatttagccacgcattggggagttggtgggtttgcccacaaaatttaagcgaacttgggttcgcccaagggacatttgcaagcaagggccccaagcttccaaggaaagatggggcgattgagtacaatttggagatagttaccacggggcaatattcagatccgggacgcccacagaaaaaccaatgggcgattgggagaaaaaccccaggttaaagtttccaaattccccggggttacttttccagcatatgggattggagcgcatttgggggggaaaacaataaggggccttggaggggttccagaaaaggcggggaaaaatcttggagggagaaaagccgcatatgaggagcttttaaatccg

SEQ ID NO: 608616 - DNA, 296 bp, Homo sapiens
agccaggaacgaaaagcaaagagattgttctgaagaccgcgctctttggcatttgaaagactgccaggtagtgcgagccggagatgtctggaggattctctctagccgcgcaccccgctgctctgaaggtcaactgagaagtcttgtgggacagagacttgagttaggaagccctcagtcgcttgcctttcacggtggcctgccctgctgccatcattggctgaagcaccatctagattcactggtcacccaactgcttcagggtactatgtagactttgcctcactacatgtcta

SEQ ID NO: 608617 - DNA, 293 bp, Homo sapiens
cccacgcgtacgactagttctagatcgcgagcggccgccctatattttattaatctatcgccttaatacttattgttatatttcgtttctagttattgaatagatagagccttcgtgcccccccttccccctttaatatgtacccccaacttgagatagtatagaaggctttcaggtctccctgaggagtggagtggaggcacgtcagggccttacctgctacactgactatgagaccagtacgaactaaaagtgcacacctataagaaactgaaacacacaacaaacaaatg

SEQ ID NO: 608618 - DNA, 195 bp, Homo sapiens
  misc_feature (7)..(7): n is a, c, g, or t
  misc_feature (44)..(44): n is a, c, g, or t
tcacggntcagcgcagggctgtaatcatcaacagctacttacgntgggagagtcagtttgaagtccttgcagagaggattactcatgcgactgctagttgcgttcgtcgttcgagtctgctaggccgacatagtaatgaggatgtcacgctccgtgggctattatcagaatgactgctacggtgcgttggcccaa

SEQ ID NO: 608619 - DNA, 188 bp, Homo sapiens
gtatgaaccctgctcgtgtgtgtacatctgtgctttagttactgcagcacagatgtaccacaggagccttcagaaacaaccagaagctctagacagctcctagagtgagagccctccatactcgttcgtgtgtgtgtgtgtctgtgtgtgtgtgtgtgtgtgagactagagtagatcagagagcgata

SEQ ID NO: 608620 - DNA, 132 bp, Homo sapiens
gactctaacgatcccttatgactggaagcatagtattagaagataatctatttttgtgtaggtgctgggtaggttaaataatttttttgtagctgtttaaccagaaagggtatatgcctctgtgtgtgtgtg

SEQ ID NO: 608621 - DNA, 167 bp, Homo sapiens
agactctcgagaaactgctgcctcatatccgggggaatgaaccatttgtgttcaccaaggaggacctcactgagatcagggacatgttactaggccaataaggtggccacctcctgccctcgctggttgccattgccccatcgttgaagtcactgtgccagcgccag

SEQ ID NO: 608622 - DNA, 277 bp, Homo sapiens
  misc_feature (124)..(125): n is a, c, g, or t
  misc_feature (133)..(133): n is a, c, g, or t
  misc_feature (137)..(137): n is a, c, g, or t
  misc_feature (143)..(143): n is a, c, g, or t
  misc_feature (148)..(148): n is a, c, g, or t
  misc_feature (152)..(152): n is a, c, g, or t
  misc_feature (166)..(166): n is a, c, g, or t
  misc_feature (169)..(169): n is a, c, g, or t
  misc_feature (175)..(175): n is a, c, g, or t
  misc_feature (182)..(182): n is a, c, g, or t
tgtctacgttgcgatgcagcatcgggatggcgaaggcgatgcgttgttggtgagcgcgttgggtcagtgcagtgcgtgtcatgagggtgctggccttgcgttttcttgcgtgttgggagcgtgnntgcttggnaccngggccngattntgcntcactgggaccagnggnttgttnccagatncaaggcggtgtggctcagcgaatccatacacggtgtacttggtcacgcctcattttttagtctacctgtgcgatgcatattgcactgtgttgtgg

SEQ ID NO: 608623 - DNA, 232 bp, Homo sapiens
ggggggttttccccccccccccaacccgggggggaaaaaaagggggtggggattttcccccccgggggggggaaaaaaaccccccgggggtggcctttggggggcccttttttaaggaaaaacccccttttgggggggtgggtcccccccccccccccccccccttttacccctggtctttttggctggggggggttttccccccttttttgcaaccccctttttttgggga

SEQ ID NO: 608624 - DNA, 281 bp, Homo sapiens
  misc_feature (128)..(129): n is a, c, g, or t
  misc_feature (137)..(137): n is a, c, g, or t
  misc_feature (141)..(141): n is a, c, g, or t
  misc_feature (147)..(147): n is a, c, g, or t
  misc_feature (152)..(152): n is a, c, g, or t
  misc_feature (156)..(156): n is a, c, g, or t
  misc_feature (170)..(170): n is a, c, g, or t
  misc_feature (173)..(173): n is a, c, g, or t
  misc_feature (179)..(179): n is a, c, g, or t
  misc_feature (186)..(186): n is a, c, g, or t
tgagatgagtctcaagctgccgcccgtttgggcagaatattcttggtccagtggtgagcgcgttgggtcagtgcagtgcgtgtcatgagggtgctggccttgcgttttcttgcgtgttgggagcgtgnntgcttggnaccngggccngattntgcntcactgggaccagnggnttgttnccagatncaaggcggtgtggctcagcgaatccatacacggtgtacttggtcacgcctcattttttagtctacctgtgcgatgcatattgcactgtgttgtgg

SEQ ID NO: 608625 - DNA, 687 bp, Homo sapiens
gaggacttctcgaatcgacggttctcctttatgatcaggaacaaggcaaacctgactcctttcaccacttgcattcaacatagtactggaaggcctagcaaaggaaattaggcaagaaaaagaaaaggcactcagattggaaaagaagaagtgaaattatctttctttgcagatgatatgctcttacatgtagaaaaccctaaagattccacacaatatactgtaagaaataataaatgaattcagcaaagtaggaggccacaaagtcaacacaaaaaaatcagttacatttccataccctaacaataaatgatatgaaaagcaaattacaaaaacaattccatttaaatagcatcaaaaagaataaaatacctaggcattaaattaaccaaggaggtggagacatttgtataatggatactacaaaacattgctgaaagacattaaaaacatgaagaaatggaaacatatctcatgttaatggattagaagacttaatattcttaagatgtcaataccactcaaggaaatctacagagtcgatgcactccctatcaaaatcccatgaaatctttgcagaaatagcaaaactggcgggcgcgtggtcatgctgtaatccaggactttgagagggcaggcagtgcatcactgagttgaagtcaggccgctgacagaggaaacggggga

SEQ ID NO: 608626 - DNA, 1068 bp, Homo sapiens
  misc_feature (564)..(564): n is a, c, g, or t
  misc_feature (748)..(748): n is a, c, g, or t
  misc_feature (750)..(750): n is a, c, g, or t
cttcctagtttcgtccccgcccgtgggggaaaaaagtttcttccccttagattgtggtttgtagaatgccctttgtgtgtgaattttgttcccggattctcccctgttgggacgcacacttaggagcgtaaccctcgtggttatggaaccccacttataatatggtgggagacacaagggggtctctaagagttttttgcccgcgccgtgagtttcttctatagagacgttgagagggtgggcgttgcccataatatctccccccccttgtgttgtgcgccccacacgacgtttggcgctatacgtctctacggggccctatgagaagccacgctgtaatgtctctttctccaacatacagtggcgctcttgaattttgttggcctcgagggggttcacgctctttgtgggctccgctctgtctgttcgctcgagggaccacgttgggagaaacacacatgggccacggctctctcgatagagctcttctcgggccctcggggggagttgaggcaacgcgggttttggggggagttggggtttggtagaaaggcctctctttgnggtgtgccacactcggcctctgttgggtgttgcttcgggctctataaaggacgcacacttttcttctcttcacatttgggtggagagagagcccaccaggcgcactctatgaacaccgctcacacacacacagtggtgtatatctgagacaagagaagaagagaggttgcggggtgtggagagngnggagaatttatagtttctgtttcccacgcgctatagagagggagagaatataaagagaggggctcatagttatagttttctctggagagcacgcctcgctctttgagaggagagagaaaatatataagctcttggaacaccgagggagagagttctatgagaaattaatcacttgagaacactaattaaatggttattttcttttttcttggagttttccacgagaaaagccttcttaacttttaatgcttttctcactcgcaaagtaaatgtaccccttttttttgaaactgaattaaatactcattttatctttga

SEQ ID NO: 608627 - DNA, 301 bp, Homo sapiens
aggatcctttgtgctttgggacggcggacaatgaaggatgggatgtcaccacctgcttgcggacccttcgtatcagacgccgtggtccttctcatccagcgtgagtggccccgggcggccttgcgtatctagctcaggctgcatttgtccctctagaactcacttttgttccggggcccatattcgctgatcagtttccttgcttggttgcaacgagatttctcgaagggtctccggggggtcacataagttttgcgacaaacccagctcctggcccttgtcatgtggggtccgttccccc

SEQ ID NO: 608628 - DNA, 208 bp, Homo sapiens
tcaagcatcagcccagcactgacgcaagccttcttgaatcatactttgccttaaaggaaaatgtgttatcagcaggcctcactcagtgctgtgattacaggcgtaaacccacgctatctgatgttggcccaagtttcctctgctctaattttccaccgagtatagaactctcttatatcttgatatgcactcgtgacctcctctagag

SEQ ID NO: 608629 - DNA, 147 bp, Homo sapiens
tcgacggaagcaggagtaaggaatgtgtgattgagaaggtgataaaagaaaattaaaaccttcatctgctccttattctgcttacagttggcagttactattgatcccccgcttttctcaccttgtttcctacagcgtatgctctta

SEQ ID NO: 608630 - DNA, 1244 bp, Homo sapiens
  misc_feature (1037)..(1037): n is a, c, g, or t
gtgttaatgtgagttgcactattgatgtgagcgtgtgcatcgtgtgctgggtatactacaacagtggaagaggtcttctcgagggtgttcgctgcttatgtcactgcattagacgcggcgttgtcagatgcagcgctgtggaggtggtaggcgactagtcggatggtgtgtcgtggttctggacgacgatgattgctgttgggcgtggcatgtatcgcatcctggattcgcgcgtcggtggtgagagtgagctattaggtggtcgtgagaggtagatgggatggtgggtgtacagggtgttgttgcatgagacatggacgatgcatgatgtagcacgttagcttaaggtttatgcgagagggagaagtagatttggaggggatgggagagtgtacgtacaaaggtaggtggtttgggagcaatgctgttcgtctgactggaatgaatgcttagtagatgaaagtagcgtagtgagtagttggccatccaataagatccttgtgagacatggggttggtgtgaatcacaaggattgtggggcttggtcttgtggttaccagaagaggagagagggaagagggcgtagaattggaaggaaattagggaagatgaggaggaggactggtgggaagggagggcattgtgatgttcgcgtgtagtgtgggggagtgggtgattgagattggggagggaatccaaggggtagcattggccttggagtgggtggggttgacatctgaagagtgagacctagatattgggcgtgtggagaagtatgggaggagggaaagtagggttgagcgattggtctccgatggcgaatcgttagatagcgaaagtggggttgtgatacaagtcttggtagctgtgggggcaatgttaaggggcaaagattcacgggttgggataaagtgatttgactggggtgggtttggtaaactaagaatctttggtggaatgcaatgtcaaaagtggcaccatgtatgggcgcagcgagagactagtgtggaataggggcgagcggaaatgttgcaacncaaggaggtggttgttggtgagtgaacttgttccccaatgggttgtggtggttggtcatttacaaatatggttttgcaaagccagtggaatgtagcctggaaaataaagtgggagcgcccaattttgggagactatgttggtggaagtgatggttacaacgagaggagaaggaataaataaacatggaaaatcacaaagagaggtgg

SEQ ID NO: 608631 - DNA, 1483 bp, Homo sapiens
  misc_feature (285)..(285): n is a, c, g, or t
  misc_feature (752)..(752): n is a, c, g, or t
gcatgtatactactaacaggaccgtaagctcgaatatccaccattcttcgaccccgcccgtgaggaggagacccctattcgtatagccaagcacctcatgtcgtagacttttgtcggtcagcccgtgacatgttttatcattctgtagtccatagccacggcttcgggcaataagtctgcccgagtattgtcaaacttactagctccggtaacaatcagaactcatttggcatacagtaggttatggtctggagactatgatcatcgaattgcgcattcctcatnggtcttatcggtcgtgtacgcgacgaccgattatgatttacacgctgaaggaatcatgaccgtaggacacgactggagcgatattgtcaccgtccgcataccaccactaaaatctactctggctcattcgcccgatccgcgcccgtcaatacgctacttttcacgtcctgaccttccgtcgcacctccattccgatcgtgaacagggcgaactgatcgcacaaattggaatgcttgggtagcaaaggtagtcgtctttgatgcctcccctaagggaattctacagtgctgtctccgttatctacacctcgctcatgcgatggccactagaattagtgacattggttacttaagcgcaaaagctccatggcacttgagcacgattcgattatcttatcacggagcacgtttactagcggttggtgagcctttcaactttgcccaaactaattgttgccctaagtccanaaatacgtggatgccctcggttaaatctgtcgtcgcagtccaattacgcggacgtgtctctcctaatattcgaactttggagtttgcgcgcgcgtaaatgtcctccatgagtcctaatctagcgcccctaatggaatgcaaggaattccttaacgcggcccagacaaaatccccgattttttccacagtattaccagtatgtccatccgaggcggtcaccaatcctcgagctttttacgtttccccaagcgaaaattacctttttcgttcggtgcccttagttccggggcaaattgtcccccgaaaaggtgacgcttccggaaactaaccccccgcattggctttacgcccaggcttttgataggccaagtcccttattccaatcccgtgggaagaggatccactttgcaattatttctcccttaacccaggccagggcgacatcacttcacttaaacttcctcccctggactgtggaggaaaaagggcctgttggctgtcgaaaagccgaaaaaaggtcctctaattaggttgggaaggaaaaccttcccaatataacctgggggcgtgtcgtcactttttggtgtggccccccccaaccgtatccaccacatttcttaatgaaacacggttgtcttaaatctttgcgcaacagggggggggtctgatcccccccagttggtgtgttggccacccacggtgccctgcgctgttcttagcaacaaaagatg

SEQ ID NO: 608632 - DNA, 457 bp, Homo sapiens
aagctttagagcgacatcttgatgttaaatctcttagtgtggagcaaatctttggtcaagttaaaattgaaactttagatgatcttaataaatatggagttcaacaacttaaatctttattagaaaaagccaaaaataaacaagcaggatttgaaaatgttactcaagaacaaatcgaatctttagaaaaaaatattgaattattatctcaacaatataaaactttaccttctggaacaggtaaaacaaaaattcctgaaggatttttccctcaagattgagtattacttcaattcaaatccattgtagatgttttacttttagcaataaacactgaagtaagtgatttacaagcacaaatagctcaacaaaatgaacaattaaaagcatcaaaagatcaaaatacaaacaaagctgctcaagacaaattagcacagttgaatcaaaaaaaaaaagc

SEQ ID NO: 608633 - DNA, 473 bp, Homo sapiens
catcgatctcggccatgaagcactagccatctcttgctttgcctttgtaacctttgacgaccatgactccgtggataagattgtcattcacagattgcaaactctgaatgacaatcttatccacggagtcatggtcgtcaaaggttacaaaggcaaagccccttttcttgccactgcctcggtcagtcatgatttcaatcacttcaatttttccatactgttcaaaataatctcttaggtgatgttcttcagtgtcttctttaatgccaccaacaaatatctttttcacagttaagtgggcacctggtctttgagaatcttctctggagacagctctctttggttccacaactcttccatccaccttgtgtggccttgcattcatagctgcatccacctcctccacagtggcatatgtgacaaacccaaagcccctggagcgcttggtgtttggatctctcattcccggtggg

SEQ ID NO: 608634 - DNA, 192 bp, Homo sapiens
gcggcgtttctttcttaacctctttcttgagatcttttttctcttctttcttgagctcttttttgacttcttttttcacctctttctttttttggtgtttcctccttcttggtaggtggtttggccttctttttagccacttcttttcttgggcttttctttctcctctttctggtcttcaggctttacctt

SEQ ID NO: 608635 - DNA, 118 bp, Homo sapiens
tccgacggtaccaacagtacggggattttcacaactgcttttccatacagtgtctggaatctatagataacacaatgcagttcagtcatgggttgatttttaactaccagtgccaggg

SEQ ID NO: 608636 - DNA, 254 bp, Homo sapiens
cagagatgatgccactgcactccagcctgggcgacagagcaagactccatctcaaaaaaaaaaaaaaaaaaggctgttgaattcgggcagggcttttaaaattccgggcccgggtgatttcggtaactcgggggcacccggggctagggcccttcctaggcccggcaattaccctcttcctccatttagtattgggcccagtgtctcttacttctctttaccgggttttaacggggccggtgttaagagccttt

SEQ ID NO: 608637 - DNA, 311 bp, Homo sapiens
ttttcttttggtcttggacgggataatttcaaaggttatatcttcaagctcacggatcttttccggtggaactcctctaggtgaattttttcagttcagttatggtattcttcagctccagaattgggaaatggggatacaagaaagttatgcaatatgggtgcggggtgtatgtgtagtaggaagggggtggaggataggctttcaaaagatgagtacctcggaaagattcgggttcacttcatagggaaggacaagtaacagattttatagttcaaatgaagtataaagcgtggaggggtaccgagctc

SEQ ID NO: 608638 - DNA, 792 bp, Homo sapiens
tttgtctacttcctcctgcttccccgccgcgccgccgccatcatgagggaaatcgtgcacttgcagtgccgggcagtgctggcaaccaaatacgtgcgccaagttttgggaggtgatcagcgatagagcacggcatcgaccccacgggcacctaccacgggggacagctgacctgcagctggaactgcatcaactgtgtactacaatgatgtgccacctggcggcaagtacgtgcccctgctgccgtgctcgtggatctggagccctgtgcaccatggactccgtgctgctcggtgggcccttctgggcagatcttccggcctgtgacaacttcgtattgcggtcagagtggtgctgtggaacaactgtgtgccaatggtgtgcactacacagaaggcgcggagctggtggactcttgtgctggatgttagtgagaaagtgaggctgaagctgtgacttgcctgcagggtttccagctgacccatccctgggtggtggggacagggtctgggatgggtaccctcctcatcagcaagatccgggagggagtacccagacaggatcatgagcactgtatagtgtgggtgccttccgcccaaagtgttcagacacagtggtgggagcccatacaaaggcaaccctctcagtcccaccagtcgtagagaacaccgacggagactactggattgatacgaagcgtcctaagcaattgcgtcaaaacctaaagtgacaagccactattgtactgacccctgtgttttgtcatggggtgtcactgtggctcaggcatca

SEQ ID NO: 608639 - DNA, 802 bp, Homo sapiens
gcagaaataaaacttcaaagcgtacatatatcgaaaagggcaatgtaatgtttcgggtgtactttctgttaagggcttgatgattcagactggagatccaacaggtactggtatgggaggagaaagcatatggggaggagaatttgaagatgaatttcattcagcatgacgacatgacaggccgtacacactcagcatggctaacgcgggatcaaatactaatggatcccagtttttcataacggtagtaccaacggtaagtacagtatcattgtttataaagtacagatagataggttatgatgtaagagagtgaactcagtagaagaggtggattattctgtatttgctgcattatgtatatcatctagcagaatacaaagatgaaaatgagcaagaatataaaattatgtgactaatcagtttagaattggtcaatagtgccactgtagtaggaaatacaatggactacgattcaagatacttgaggtttcaatctcaactctgcctctactgatgatgtaagctagaattaattattgcacttctgtgagcctatttccttggctttagaatgcaagattagaggataggattcacagtttgagacgattccccagatttagatcttgaaatcgactccttgaatggatgaatacgataagggacaagccatggtatgcataagaaagtttacatacgaactgggtggataatcccagggtgaagggaatgtacacatggggaaagtaatggtaaagggcaataaccccgcctggaggttactagcgagcgcgtacgc

SEQ ID NO: 608640 - DNA, 884 bp, Homo sapiens
  misc_feature (325)..(325): n is a, c, g, or t
  misc_feature (330)..(330): n is a, c, g, or t
  misc_feature (422)..(422): n is a, c, g, or t
  misc_feature (424)..(424): n is a, c, g, or t
  misc_feature (430)..(430): n is a, c, g, or t
  misc_feature (433)..(433): n is a, c, g, or t
  misc_feature (882)..(882): n is a, c, g, or t
ggggccagtgtgctggaaagacaacatactgtcacgttactatcctggcttctgagggtacacttgcttccaggtttcagcctgtttttccaggctgtttggggctttctctgtccaaagattggctttgagaagaaagggttctgccaactgcagggagatccctggaccaggagatcacacagggacgatttgtttctctatgtatgccaactcctaaaagacatgagacatgggctttccccatctctgtagaaaaaaaaaaaaaaaaaaggataccaagtggttttcccaggcagaccctcaccttgcagtggcacctgcnatganagaagttgaagttaaagacctttattgaagacagactggtcaaaacctaaaggaggcccagatgaccagcctcgggccaaggactgctttcnanagaganaanagtcctggcccttagagtatcagtttacagtcttaggagtgcattgggggctagtttttcaacctctacacataagctccaagagatcccatctccttcacagaaaccctgggaagatgttctttgtgcacatggacttgactactgaatctgtctccgactccttgaagagcctcctcttagattgccctagtagtccgatcatgtgtcctgctttcctgaaagccaggtacccttggtctccatggtcccccgatgcatcttcctataccagagacttcctgttcttattcttggaagacactttggagaacagcagcatcctcaaagacgggaaagacatcctgactcatggctcttttcctacccctcaggtacctcttccaaggctctgcagggatcccagcccataccaacttggtggaaacatacgaacttcaagaagctanta

SEQ ID NO: 608641 - DNA, 856 bp, Homo sapiens
ggcggagggtgcgtgcgggccgctggcagccgaacaaaggagcagggcagccgccgcagggacccgccacccacctcccgggggccgcgcagcggcctctcgtctactgccacacatgaccgccgaacgtgcacagcctgaggctggtgcacgatccagttcggcctcatcaactgcggtcaacaagtacctgacgggcgaggcgttcgggttcaaggtgaagcgcctgtgcgccagcagcctgaagaagaagcagatctggactgctggatgcagccccctgacgaggcgggcagcgcggcgtgtgcctgcgcagccacctgggccgctacctggcggcggacaaggacggaacgtgagctggagcgcgagggtggcccggttcccgattggccgtttcctcatcggggcgcacgaggacggtcgctggtcgctgcagtccgaggcgcaccggcgctacttcggcgggccgaggacctgcctgtcctgcttcgcgcagacggtgtcccccgcgagaagtggagcgtgcacatcgcatgcaccctcaggtcagcgatctacagcgtcacccgtaagcgctactgcgcacctgtagctgcgcggcgtgcgacgagatcgcgtggacctgcgacgtgccctggggggtcgactcgctcatcaccctcgcttccaggatcagcgctacagcgttgcagaacgcgacagcgttccttgcgccaacgagggcgctggtggcgcgcccgagcggcactgggtaaccgctgagtccgtccgggagtggcttcggcgatgggaggcgtactggcgcgccgggcccagggaagctcaagggggaggcccagggggaagggaaccc

SEQ ID NO: 608642 - DNA, 438 bp, Homo sapiens
  misc_feature (394)..(394): n is a, c, g, or t
ttggtgatactgagctaggaggtcgaggatgcagtgagccaggatctgtaccactgcactccaggctgggctacagagcaataccatcaataaaaataaaaaataagatacacataaaagagacacagagagaaaaacagacgaatggaaagatagggacacggggagagactaaagtgtgagattcataaatagagagagctggccagctaagtgagatataagctgagagaggcgaagagagattgacttctgggatgcaagaagagagaggaattgtgtggtgacccgagcaaggccaggttttgtgggatgggccagcagtgaagagggggcgctccgaaccaccagttctgtctcatgtagagggggcgctctcggggcagacccctgncttggggtgtgactgggttcccctggccccaacagagatagcgt

SEQ ID NO: 608643 - DNA, 317 bp, Homo sapiens
gacagtatgttgggtgcatggctcagcctgtaatcccagcacttaggtaggctgaggtgggtggatcacctgaggtcaggagtttgagaccaacctggccaacatggtgaaaccgtatctctactaaaaatacaaaaagttagccaggagtactggcaggcgcctgtaatcccagctactgtggaggctgaggcaggagaattgcttgagcccaggaggtggaggtttcagtgaggagattgtgccactacactccagcctcaatgacaaagtgagactctcaaaaaaaaaaaagagataccgggatccgagaccga

SEQ ID NO: 608644 - DNA, 189 bp, Homo sapiens
cctgatgtgtcggtacccttctcgacgcacaacatcacagccgacagctcattcccacgagcaacaatgcagacatgcctaaccaacacaccagtcgatttacaacaaccggaacgccgagagactttttccgaactcagcaccatgatcacgcctcgtgagcctcatcgtccccgtgatcacaacaat

SEQ ID NO: 608645 - DNA, 349 bp, Homo sapiens
tgagcaagtggagcccgagctctaatcagagatatgaaggatggcattcttcacggaaaatggaaaccagtcatggagatgaaaaaaacagacctggaaatctctggataattaaactcagtaaagaaaactctctcataacacaatttacaagcttggtggcagtagagaaaagggatgagaatgggtcaccttttcctggatataccacaaagtctctggaacgtgtattggccaaaggcaagatggtagactgtcctggcccttacatggagctgggcaggggcggaaccccaagagaagccggtcagggaacctagtcatcttttcagctatcctctggagtggg

SEQ ID NO: 608646 - DNA, 267 bp, Homo sapiens
tgggttgggtttggttttgttttgttttgttttgttttgtttcccaaaaaattaagaattttaatgttgaaaaactgccccaatttttatggggccaagcctaaaaaaaaaaaaagtagtttgaatcataattttaatccttggatgataaaaaagggaaagttttggggccctaatttttcccttccctggggttgggctttaatcagttgaaatggatttttggacccccatttacgcttccataaaagttttattgtttagtga

SEQ ID NO: 608647 - DNA, 319 bp, Homo sapiens
ctccagcttgcccatcattctcggcgcccacacaggtgacagtcccaagtagataacctccatgggacaagttgggtgttgccttacccgcctgcccagcccctcctcccacaggaacacaggtaccacctgcacccacgacagcttcttttctcacacatggggagactggagccgagccccttgtgtcttttgaaataggaagaaaaatgagtgttcaggaacatgactcctggactgggctcttgggcccagttcagtgtctcatcgcaaatctaggcatttttgcttctattttatttaatttttttttttaagg

SEQ ID NO: 608648 - DNA, 618 bp, Homo sapiens
  misc_feature (93)..(93): n is a, c, g, or t
  misc_feature (106)..(106): n is a, c, g, or t
  misc_feature (152)..(152): n is a, c, g, or t
  misc_feature (170)..(171): n is a, c, g, or t
  misc_feature (190)..(190): n is a, c, g, or t
gcaagggaatccagcagcagcacagcagtgtcagccgcgggtgcccagcagggcggctacgagatccccgcgcggctgcggacgctccacaancctggtgatccangtacgcctcgcaggggcgctacgaggtagctgtgcccctctgcaangcaggccctggaggaccnnggagaagacttcaggacgncgaccacccggacgtggccaccatgctcaacatcctggtccttggtgtacagcggatcagaaatacgatacaaggagatgcaggttatacctactgaagtgatgccttgcgctattcggtgagaaaactttcgggcgacagatcatccttgcggtggccggctgactttgaataaccattgcagtcctttatggtaaaagacgggaagtacgatcgaagctagagcacgttggttgtatacacatgagcttcttggaatactcctgatgacaagggtttgagcggcgaaatggatcacgcgccggatgtaacgcccaccttaggccatagattggacttagtcccttgtgagctcgtggcccagaacgcctggacgagctagtttaccggaacgttggtacactagtcattctatcaatagtagtccg

SEQ ID NO: 608649 - DNA, 132 bp, Homo sapiens
catttggcgaggcagtctcgaactgacctcgtgatccacctgcctcagcctcccaaaatgctgggattacaggcttgagccactgctcccggctgatttttgtattagtggagactgcctcgccaaacgatg

SEQ ID NO: 608650 - DNA, 119 bp, Homo sapiens
  misc_feature (65)..(65): n is a, c, g, or t
caccagcagcctcagttaggagacttaagctcatgaaatgcgcgctcggaagtacgcccgcattncgttcttctgttgctggcgaatttgctttgtcgagcccgccttccctgagtgca

SEQ ID NO: 608651 - DNA, 167 bp, Homo sapiens
catcttagaggatccccttaaatggccagaatagttactttgggctatgtggcgcacgctgtcttgcttataagctatattgggctctatgcagaaagtgagaatggaaagaatttgagagatacgtgagacctctaaaaaaatcggacccacttagaaactgtgaa

SEQ ID NO: 608652 - DNA, 626 bp, Homo sapiens
atgagctacctggctatccccgcccaggtggctaccaccagctgcaccaggtggtggtcctggggaggtgctgctaccctcctccgccagcatgcccccatcgggctgataacgtggccacctatgcggggcagttcaaccaggactatctctcgggaatggcggcaacatgtctgggacatttggaggagccaacatgcccaacctgtacccctggggcccctggggctggctacccaccagtgccccctggcggctttgggcagccccccatctgcccagcagcctgttcctccctatgggatgtatccacccccaggaggaaaaccacctccaggatgccctcatatcgacatacccaggagccctgtgccgggccagccatgccacaccccacggacagcagccccagggcctacctgggcagcaacagtgagctacccatggtcagcctcaagtgacactccctgggcagcagcaggcagtgcgaactacccaggatacccggggtctgggactgtcaaccccgaagtgaccccaaccaagatttggaaagcgaggaacatcactgatgctcacggattgacccacggcgaaatgccgaggactgggaagggcaaagaaag

SEQ ID NO: 608653 - DNA, 320 bp, Homo sapiens
cgaggaggcggtgctgtgtgtcaagtgatcacgatcgacgcaggacaggtatctcttcgttatcagaagagttgcttcatcacatctgggatcagaaaacagcaggtggctgttaacagataagtataactagcatctgcagtatcgcatgttagggataagtgcttattctgaagagctgtggagtccttgaaatatcaaccatggcacttgctcctgacccctatccctaggggatatcaggattgatgaaatatggcatcgagccttttataaattgtaggacttgtacctgtgggcttcagcgatgggatagtaga

SEQ ID NO: 608654 - DNA, 92 bp, Homo sapiens
cccctggggtgacatcggctcacaccttcccctgctgcatgtgggggccgagtgggcagtggacctcggtggaaataaaaggtatctatcac

SEQ ID NO: 608655 - DNA, 120 bp, Homo sapiens
acggaccaggattgacagatggatagctctttctcaagaaaatgggggcgtcacaggtacctcaccacactgcaaaattcccctgaagggtgacattcacatgaacgtgagcacacgcga

SEQ ID NO: 608656 - DNA, 676 bp, Homo sapiens
ggaccggggctcttgggatgtccagtggtctgcaaagaggcatcccggaatcgtgatgccgctggagcgcgcggacagcctcccacatgcaccaaggacatgttcccgtgggtccctactcctagagaccccagaatgaacgggccgccgtcgacaagaagtataatatgctgtgtggaatgactacgaaccttacccggatgcatggcatggggtatgtgcgactacccgaagctccctgacctgctcacacgcatgatgagacgatccatggtatatgctgggaccatgcctgtggcctgatggttgaactgggcgttgaaccgactgtcactggcacctagacatgtacaacaggaaccgtgtggatacatccccacacacctggtatcttgcgacatgtcatgtgtagtgcagactcttcgagtttccatggctttcatgatattcatgtgctgggtggggtgacgtgtacctctgtctaccaggcctgtgggaccaaagcagtatccttacaataatactgaacctggaacgacggcgttgatccctccaaagaatccaggagcgggtggttcactagtgagatctgaggaggcttcgtggggctaagggtcctctatccaggactccctcaattcctagaacattaacctttttgaaatcctattaaagc

SEQ ID NO: 608657 - DNA, 752 bp, Homo sapiens
aggggagagaaaggggggccatgggatagggcctggcccaagtgggattcgactcgtggccggaaaccatggcgtctggacggagtgtacgccgaggctttgctgcacggaggagagtcccgcctggaggaaagttacaaacaaaggggggagacccacacaaaagcgagctcaccacagttcggataggccacgcgtccaaagatgcttcacgtataagagatgtatcgcccgggcgggtgctaatttgcacatgtctatgaacggcggctgtaagcgcactctgtttggttgaaacgccccataaactctcgcgagcgcgtatttagaccacgggtttcaaaccccttcggaataaggcgaaattttctggagtgacacctgagggagcagatgaataacgccgacttaattagctcttgcgccccgggggtcggacaccgatcacacctctctttgtagaactattcccgctcttcggcagagatttgatcgtcacgccgtccactaatacggctggagggtatctcgaccgatggaatcaccgaggtctaaactcttcgtataccccgcgccgtactttcggaaccggacgatacagtctccgcccccctctacataagatggggctacctccgggtcattcttcttatcagaaacgtcccgtagcttcatgggagaacagagaatcgtaggggccgaacacgcatggccctcaatgttgggcagacaacagatcacgaccccactaa

SEQ ID NO: 608658 - DNA, 592 bp, Homo sapiens
gcacgaggttttttctttttttaggccttgtcttcatatggatgctgatctttggggttctatgcctggatttcttactcaatctgtatcctaaattcggggttattgtatcgactattcacttttcgtgagtttatagaggatgacatctctcttgggttatctaaggtcctgatgaccttctgattacagcggttttccgttagtgtgactatgctgaacatttggcactagctgtgagtccgactctagctttgttaactgatggtactgtgacctgttggggctgacttcacctatggttgtttcatatttctaatttgtaaattgggtctaatataggatgagcctcctgctgatcatgctgtgatcatgatcgcgtaacgatgggttagcggactgtcacatgttgccttggacaggaattgcgcgatggtgttacacttgtttgtcctatgactttactgatgctgctgccggaagatcatttgagtttatgattttgggaaccttatggccaccttaggaaaacccttttgttccaatagttgatgattaagttgtttaagtggccctatgctttaattcccca

SEQ ID NO: 608659 - DNA, 254 bp, Homo sapiens
gcgtcgacagcgtcgaatacaaatcttgtgtacgacaagaaactgtaggagcagggcttgccgcgacagaggccctgaagccaggcgctatgctccgggcttggcgctgatctgctcctgcaggttctggatctggttctgcagggtggtgatattgcgcgtgacctgcccacggaaagcatcgaactccgccgtgttgccagccgcctgtccacccgcggcctgacggttgtcctgctcgctcttggtcgacg

SEQ ID NO: 608660 - DNA, 665 bp, Homo sapiens
cagcaagctaacactgggacagaaaaccaaacactgcatgttctcactcataagggagagttgaacaatgaggacacatggacacagggagggaaacaacacacaccagggcctgttgggaggtgaggtgtgaggggaggaaacttagaggatgggtcaacagatgcagcaaaccaccatggcatacgtatacctatgtaacaaaccttcacattctgcacatgtatcccagaacttgtgcagtaaaaataaagaaaaagaaagaagaaagaaagaaagaaagaaagaaagaaagaaagaaaagacctagctctatattctcaagtgaacaaaaaatctttttatattattgagcaagctaatgtattaataaatttaaagtcaatggttattgctagtcctaatttatgaaaaataaaagagaatctggatacagctattcaatgtgcaaaggaataatcagaaaataaacagtatgttccaggaaacatataaggtttttttctcaaatggaccaaattgataagaatatctaaataataaagtatgtatcatcttccaaatagtgcataatccttctttcatattttaatacatacctgatactctcatcatttcatatattacattcacattccttcgtgtatttctatataccctctggt

SEQ ID NO: 608661 - DNA, 764 bp, Homo sapiens
  misc_feature (395)..(395): n is a, c, g, or t
gatgtcactcagttgctctatgagtgtcctctttctgttccaggatccagtctaaggtgccacatggcaggaggtggtcacatctccttgagtcgtattccggtcatgtgacagtttgcagtcttacctttgcgtttgcatcacttgtggcagttattgagacatgctcgcgtcagcgctgtcttccgtagaacggtccctcgactttttgtgatgtttgaacaatgtggtcagactgggagatacgtggactgttatgggaacgatcaccacagacgggacgcgagccttcttatcatcatcccatctcgtagggtgccccgatgcccacagttggcatcacggcatgtgagtcgctgccgtaaaggtggtgcctgcgggatttctgccagtgncatatttgccatttgccccctttccagtgcgccagtctcaggtcctctgcacatattacggtccgtgcacatttagtttgtgcttggagctgtgtctaatactatgtccagatctttgttgctcagcctgtcccaagcttgtgggccatgttcactgctttgcccggtgggggttctgtgtcccctgtggggttaatgcccccatctcatcctttattgtggtggacaccctttctttgcttgcttggtgctacaagagtgctctgaggacctcaagtcagtccctagaaccaagccatttctcatgggaggcccccttgaattttatttgttagagaacagggcttggactgtcgccggctggtgcag

SEQ ID NO: 608662 - DNA, 910 bp, Homo sapiens
  misc_feature (37)..(37): n is a, c, g, or t
  misc_feature (44)..(44): n is a, c, g, or t
  misc_feature (91)..(91): n is a, c, g, or t
  misc_feature (97)..(97): n is a, c, g, or t
  misc_feature (103)..(103): n is a, c, g, or t
  misc_feature (180)..(180): n is a, c, g, or t
  misc_feature (191)..(191): n is a, c, g, or t
  misc_feature (261)..(261): n is a, c, g, or t
  misc_feature (269)..(269): n is a, c, g, or t
  misc_feature (283)..(283): n is a, c, g, or t
  misc_feature (299)..(299): n is a, c, g, or t
  misc_feature (313)..(313): n is a, c, g, or t
  misc_feature (318)..(320): n is a, c, g, or t
  misc_feature (336)..(336): n is a, c, g, or t
  misc_feature (350)..(350): n is a, c, g, or t
  misc_feature (441)..(441): n is a, c, g, or t
  misc_feature (462)..(462): n is a, c, g, or t
  misc_feature (503)..(503): n is a, c, g, or t
  misc_feature (513)..(513): n is a, c, g, or t
  misc_feature (537)..(537): n is a, c, g, or t
  misc_feature (550)..(550): n is a, c, g, or t
  misc_feature (809)..(809): n is a, c, g, or t
  misc_feature (832)..(832): n is a, c, g, or t
  misc_feature (839)..(839): n is a, c, g, or t
  misc_feature (898)..(898): n is a, c, g, or t
gggccgtacggaggtggcagctgtgggaggaggcggngtggaangccgaggagctcaagcccggaccaatcgccacgttccgggccgcgancctgancctgcngcgtaccgggaagcgaaaccggccggatgggccgctgagcccgaattgggcactgtgtggagccccctggagctganatcaggatgtnccgcttcatgagggacgtggagcctgaggatcccatgttcctgatggatccctttgctattcaccgtcancatatganccgtatgttgtcangtggctttggatatanccctttcttcagcntcagnnntggcaacatgccaggnaccaggcctgcaanccgccggatgcagcagggtggagctgtctccccctttgggatgctgggaatgtcgggtggtttcatggacatgtttgggatgatgaatganatgattggaaacatggaacanataacaactggaggcaattgccagaacttctcatcttccantgtcatctcntactccaatacgggtgatggtgcncccaaagtctacnaaaaaacatcagagatgcgctcggcaccaggcgggatccgggagacacggaggactgttcgggattcagacagtggactggagcagatgtccattgggcatcacatccgggacagggctcacatcctccagcgctcccgaaaccatcgcacggggggaccaggaggagcggcaggactatatcaacctggatgagagtgaggccgcagcgtttgatgacgagtggcggcgggagacctcccgattccggcagcagcgtnccctggagtttcggcggcttganttctcangggctgggggacgaagggcggaggggcctccccgcctggccatccaaggaactgaagantccccttcccga

SEQ ID NO: 608663 - DNA, 1058 bp, Homo sapiens
aagagctgcaacaacagccagcaagaaaacagacctcatggcccggcgcagtggctcatgcctgtaatcccagcactttgggaggccaaggcgggtggatcacgtcaggagatcgagaccatcctgactaacacagtgaaaccccatctctactaaaaatacagaaaattagctgggcgtggtggcaggcgcctgtagtcccagctactcgggagactgaggcaggagactggcatgaacccgggaggcggagcttgaagtgagctgagatcgcgccactgcactccagcctgggcgacagaacgagactccgtctcaaaaaaaaaaaaaaaaaaaaaaaaaaaagggccggggggggggggtccacccggtgttttccccagatggggggaggccagagggggggggaaccaaggggcctcagggacttctcggagacactctctgggggattaaaagggggtgaaccccccggtttttttttattcaaacttcacacaaaaaaatttacgccgagagccgcggtagaaggcgcgccttgtatctcaccacctatattcaagaggagcctagacgcacgaggacactggggttttacccccggggagggcgacacttggcagtagggcccagaataagcagccacttggtaagttgggtgctcgccagcgaaaaaggacggcacacctcactcgtcttccacaaagaaagcacagcaccacatcgcgatgcggacaggaagaaaacctcttaccacaagaggaggtgggtgaggaaatttctcgccaaaccgtagttgtggtggggagatttttccccagaagccagtaagtaggtgtagtcacaccacctgttgtgcgtttttgcacccaggagacatctgcgctgcctagtcaaggaccaatacggaggtgtagccaacaaaagggggcaaactcggcagaggcgcacacactagagctcgtgaatatgctatcgctgtattcttttctcttttttttttctgatttctcgtgcgttgacactcacgtataggatacgcaaaagtaaaaagagga

SEQ ID NO: 608664 - DNA, 320 bp, Homo sapiens
atgtagtgggcctccaccgacccacatacatgtaggactgcgattacctgctggggctaccctacattgatgagtctcactgtcagctctatgagccacagtgcgtaagccacgactggagctcgatgtaaagactgtacgataccatatatcagaacaggctgataagagaactgcgtgcagagcactcatgttgaggctacagacctagtggtacctaattgtacgatgcctgactaagtattattcgtcttgaatgactcattgtggtggataatgcatactgattatctgcatgagatatgctactgcgtatgagc

SEQ ID NO: 608665 - DNA, 87 bp, Homo sapiens
gtaccattctggtatctgatagtgaccttccaaatccttagtggcactaagcgccacaggctctccaactaaaaaccctttacacac

SEQ ID NO: 608666 - DNA, 589 bp, Homo sapiens
  misc_feature (123)..(123): n is a, c, g, or t
  misc_feature (125)..(125): n is a, c, g, or t
  misc_feature (137)..(137): n is a, c, g, or t
  misc_feature (142)..(142): n is a, c, g, or t
  misc_feature (144)..(144): n is a, c, g, or t
  misc_feature (148)..(148): n is a, c, g, or t
  misc_feature (156)..(156): n is a, c, g, or t
  misc_feature (162)..(162): n is a, c, g, or t
  misc_feature (166)..(166): n is a, c, g, or t
  misc_feature (183)..(183): n is a, c, g, or t
  misc_feature (220)..(220): n is a, c, g, or t
  misc_feature (431)..(431): n is a, c, g, or t
  misc_feature (454)..(454): n is a, c, g, or t
  misc_feature (529)..(530): n is a, c, g, or t
  misc_feature (549)..(549): n is a, c, g, or t
accatgcccacctaattattttttgaatttttgtagcgaggggttcttgctgtgttgcgcaggctggtcttgaacttctggacttgagtagccctcctacctctggcctcccaaagtgctggnantacaggcatganccacngngccnagcctgtntttgantttnaagagtcctttcacatngcctttgatttcctgtggcagcttaagcaggaggtanagaccacctgttgcaagatgtgcagtctccacagtagctgggggagcagctgagggaaagggaatttaatttccaagttacaaaatcattatcatttagagaggatcggtcttattcaatctaggcataggtgcagggttagattaaggtatggctggaagagttaccaattagtgacagagggttctttaaatgagttgttgttgttgtngttgtttttgagatggagtttcnctcttgtctcccagactggagtgcaatggcatgatctcaccgatggctcactgtgacctccgcctctcgggttcnngtgactcttctgcctcagnctcctgagtagctaggactataggtgtgcaacacgaataa

SEQ ID NO: 608667 - DNA, 953 bp, Homo sapiens
acgctcctcatactaggcctactaaccaacacactaaccatataccaaaagaaaaaaaaaaaaaaaaaaaaaaaaattggggggggcgggcccaaaaaaattaaaacctgtggggcgcggggcccagcagagaggtatacggtggacagtgtgcgccatacggatgctccccataaaaaaaaccgtgggcaccagcaacaaaggtgctgtgggtctctacccccaagtgtaaaacaacgccgggcggaaaccggacgggtttgtgaaaaaaactccagaggcaagtcacggaagcgatcaaacgcggggcatgtcaacaacaggggacgtccaaagcaagccagcaataatcacaaataaccgcccccgccgagggaaggacggtagcagaaaaagggcagaactaacggagagaaggaggaagcacgaaagagagggagagaagaaagggaggacgagccgaggaggaggcaagacacgagaagacaaggaaaagggaagaaagggccggcggcaggacggagaagacagagaacgagggaggcaggaggagagggagggccggaggaacctagatcgggaaagagccgacaacgtgcgacatacgagaccgagggagacaagtggagacggcaacagaagagagagaagagacgcagaggagaggacacggaagcaggggaacagacataacacgaagaggaaacagacaagagcaagaggagaaagagagcacgagacacaaggcacgagacgaggcgagcgaagagagagtgaggagggaaaggacgagaagtgagacggaagaggaggagggagaggacaaggaagagaaaaagaaagaagaatggacacagacacagagaagaacagcagagaaaatagaaggaagacagaaagaaaaaggaggagaaggagagcaagagaggagggcaagggcggacggaagaagc

SEQ ID NO: 608668 - DNA, 525 bp, Homo sapiens
gcatcaaaggggggaaactgaggcagaaatttaaaaataaatatgcattcattcactccaagaaaagttaacaggcaaggcaagggttaaaaagaaaagaacaagttttcctcggcctagcaagctcacttcaaggacagttataagataatgttgtttgagaagccaagtccaaaggaatgggttccagacatccctcccctctagaacaaggttgaaggaaaaaaaaaaaaaaaggaggaagacaaattcctttactgttactcctttccctggcttcttaagcatgattatgttttacaaatgtctgtatttagccagttcttgattttcttttgacacagctccaaggccaccagctatgcaaggccacaagttatgcactatatgattaactgcttttgttttacttttgtaagtccacttataaaaaccctgctctgtctttgtttaatgctcagctttttggatttgaatccactcagccggtgcacaccttaaaataaacatcctcctgtactctca

SEQ ID NO: 608669 - DNA, 327 bp, Homo sapiens
  misc_feature (12)..(12): n is a, c, g, or t
  misc_feature (24)..(24): n is a, c, g, or t
  misc_feature (41)..(41): n is a, c, g, or t
  misc_feature (63)..(63): n is a, c, g, or t
gtatttttgtgnccttaggaaatngggatgccccaaggagngggagagagacaggagaacagnctggttgttggagccagtgagaacacccacaacatttattgattaagtttgttgtccttaagtgggcatggttccgtggctccccaaaataatttcaatagtaacaacaaagatcacttatcacagatctccataacagatataataatgaaaaagtttggtgtattatgagaattaccaaaatgtgacacagaaacataaagtgaacacatgctgttgggaaaacagtcactgatagacttaacaccagcgttgcaaaaaaaa

SEQ ID NO: 608670 - DNA, 447 bp, Homo sapiens
gcacgaaaaaaaactgagtttttaatttaaatttgaatccctgtatgtggctattgattaacccattggacggcccaaccctaaaatattgtatgactgggtttgaaatagcaagaatgatgtgaggccccaaaggtggagtgagaatatttaagaaaaaatagctgggtgcggtggctcacgtttgtaatcctagccctttgggaggttgaggcaggcggatcccctgagatcaggagttcaagaacagcttggccaacatggtgaaaccctgtttttattaaaaatacaaaaaattagttgggggtggtggtaggcacatgtaatttcccctacttgggaggttgaggcaggaaaattgtttgaaccccccaggcggaggttccagtgagttgagatcgtgccattgcactccagcgtgggcaacaaaagcaaaactttttttca

SEQ ID NO: 608671 - DNA, 313 bp, Homo sapiens
caaaaatcggccccctttttccagggccggagctaccaggggagccccggagccctgctttgtttgggaacccccaaaaagggattgtgatgggtttcccctccagtatgagtattagcccccccgcccgtccctttggggttggggccaaactgccaggcttcccccccaggtcatgggctgggccctgcccttttttatggaggcccaaccaggggttgagcccactcctatttgaaacgtcccgcagggcaaaaaccccccccccctttgcttcctttgggttttttaataaaaaaatttcctggggcca

SEQ ID NO: 608672 - DNA, 106 bp, Homo sapiens
cggcggcgtggtatcattctattaccccctctattgatccccagctccaaatatctcatcaactaccgagtactcgccacccaacgatgacgaactcaactaacct

SEQ ID NO: 608673 - DNA, 285 bp, Homo sapiens
  misc_feature (19)..(19): n is a, c, g, or t
accagctagccaacatggncaaaaccccatctctaccaaaaatacaaaagttagccgagtgtggtggtacaaccctgtaatcccagccactcaggaggctaaggcaggagaatcacttgaacccgggaggcggaggctgcagtgggccgagattgtgccactgcacaccagcctgggaaacaaagtgagactctgtctcaaaaaaataaaaaaggaaactactccatttttagtcatctccttacttagttctttacttacacaggttagctccaactcatatca

SEQ ID NO: 608674 - DNA, 832 bp, Homo sapiens
ggtcccctccggcttgcggtcctcgcagcaatgggggcgccggctcccagcatggctgtctctgcagatctagggcaaggatctgcgtgcacttctccatgtgcacgtctatctggcatatccgtgattccgacgatcatagcgcgtgcgcggaaatggaaccaccctgggggaatatgaagaggccagcaagaacgaaaggcactacctcctaggacagaatgaatagatgtgcgtgttgaccaagtgcatctgtggctcagtggtttaccaccaggttgcagcaccatttaaacttctgcatgtacgctcttcctgtgcgacttgggttcttccattgtagcaccatgggctgtgcccagtggcaacaggagggaagatctagaactttaaaggattccccaacttgtctggctatttgagctcctgtagcacacttaagaaagcactgtgaaacgcccttaagagattttcgcactgagtggccagccgctactggacagtcgaccgagaacctgtgacgaacgcatttttccaatctgaacacttgaccagggcccttgaatatacttgtttcatcaagcgaaccattctggttcgagaagccccccagaggcacgagttaggtaagtgcttaagacgttaaacgcttttcccagctcttgaatttgggatgaatcacggcaaagaacggaccctttagttaacacttgtatggaagaacgcgataactggccaagacccaccgattgttggctttccattccaaaaaccgaaagggggcccctatcagggcaggcgcgcaatacaacgaatgcaggggttccctcac

SEQ ID NO: 608675 - DNA, 187 bp, Homo sapiens
ttacaaccgagctcgtacccctaattggttcttcgatgacgcagcctctagagtagctgggaccacaggcgcatgccaccacaccctctaatttttgcctttttatttttattttttttggcagagacagggtttcgtcatgtttgccaggctggtcttgaactcctgagctcaagcagtcctcacg

SEQ ID NO: 608676 - DNA, 155 bp, Homo sapiens
aggtggcagcatctccttctgggcatcatgcccgccctcagacccctttgtgaagcccaagattcgtcaaaaagagaaccaaagaagttcatccggcaccagtcagacccgaaattgtcaaaattaaagcgtaactggcggaacccagaggcatt

SEQ ID NO: 608677 - DNA, 121 bp, Homo sapiens
ccgagcaccaccaatacaccgagcaccaccaatacagagagcgccaccaatacaccgagcgccaccaatacaacgagcaccaccaatacagagagcaccaccaatgcaccgtgcacgatta

SEQ ID NO: 608678 - DNA, 140 bp, Homo sapiens
ggggggaaaaaaaaaattgggggccaagggaaattgaggccccatttagggattaaacatttttaaccaatgggggggggggggttattaaaggttgccttcccgggaaaaaacggcaagaaaaaaaggaacttccccca

SEQ ID NO: 608679 - DNA, 116 bp, Homo sapiens
cccccccggggggccccccccccgggggttttttttttgggttccccccccccccgggccccccctttttgtttgggggggttttttttttttccaaaattaaaatggggccccca

SEQ ID NO: 608680 - DNA, 863 bp, Homo sapiens
  misc_feature (782)..(782): n is a, c, g, or t
cacaccacacccggctaattttgtgtatttttagtagagacgggattcatcatgtggctaggctggtctcaaacatccatgacctcaggtggtccgcccacctcagcctcccaaagtgctgggattacaggcgtgagccaacacacccggccactcatgttcatatgcaacgcgagattgtggttgtaaatagaaatcccatcttcccgatgtaatatatacatgtgtgttatataaagtgagttcacactataggttactatactacacgaacagcactacattatactgtagtactgctgtactgtactaatgacaatttttccaataagctgggaatatggtcatagactagttattatactcactttacttttctgcttgcataagtatagcacattctagtgttctgttactggagaaaggcaagagatgtctatgcccattgttctcctaagaggctacatagttagtccttcctttgatggattataaccctaatttatatatacctaaatgcctataaagtgaagagtgataactttagaatttggggctgttgttgaaactaattcttcaggtttatacttgtgtcttttcttactggtaggaatttatcatacagatacacaaatgcaattcccaggtccaaagcgaacacatttttatgatactgccaaattgccattccaaaagattgtactactttatgttcatacaagaaatcattttcagagtcatctcatagatgtcacctcaggtagagcaggatgactcccatnttagggggaacataaattgtttccggaaatagctttcttccccttctcccaggttcggtgtatttcttagtcacctaaaat

SEQ ID NO: 608681 - DNA, 177 bp, Homo sapiens
tagatccgaagaacagaggatagaacttgtatattacatcttgcccaggcagaaggggcgatcgtgattgttgagggttggagcaggcccttgtactgcatgccacatcacctaacatagggtggggtagatctctggaggggctagggagccctgtgtagggcaagatggcagcga

SEQ ID NO: 608682 - DNA, 126 bp, Homo sapiens
ggacactctgtcgtggttgggcactgtgcggcaacttgaggatgaaattagtgagctgtgtgcgttgaaaggcatggcctgtctcctcacttgagtggccggtccatcgagcaaagccctgttctg

SEQ ID NO: 608683 - DNA, 123 bp, Homo sapiens
ttatgtgcgtggttacatgatcggcgagcacggcccgtccggattcccgatgttcactggagtcaatgtcggcggcgtcggcttcgacggcctggccgagctcttcgatacggacccgatgga

SEQ ID NO: 608684 - DNA, 127 bp, Homo sapiens
attattatagcaagctccagtctgcgcgtacgacaaacagaacttaataatcgtgcattgtcagtatctcttcatgtcagccacatggccctcgtagtaacagccattctcatccaaaccccctgaa

SEQ ID NO: 608685 - DNA, 680 bp, Homo sapiens
ataattgcgttggtgggagaacccatacatattaggtagtgaggatggggggccgtctcttgtggcctatgtgaacatcgtaaggtcacactggtccagagtgcaaatgtctggtgccagaggccctgaaggaggttgcagggggcagcagagcagtgacccccaagagcctcaatcttttccatgacgtagaggagcagaacacacatctcctccactcctaaggagaaggagggcaggggagcctccacaatccccaggcacatgcaccagatatggcttgcgaagagatccaccaaatgtcagaagcaaaagcaggtggtctgggagccagaaatccaaggcccttgctttgtgggtgtacgttcgtgcttgggacccattggctgtggcatggattacggttgaaaaggaagccatgggccattttggagcagcatatcccacgatgttaacaggagaccccgatcaagaacggtgcaacgaccacaccgagaaacaacagcgccagaaagggaagaacatccctatggagccagcgagagggtgcacacatcaagagcgtccatgagccaccaagagaacagcgcaagcaacaccaaagcggggcataggacaacagaagcatctagacaagagaaagggagcccgaacaccgaatggcttaaaggagcataata

SEQ ID NO: 608686 - DNA, 1266 bp, Homo sapiens
  misc_feature (87)..(87): n is a, c, g, or t
  misc_feature (721)..(721): n is a, c, g, or t
ggttggtggtggtgaatggtaggagaagaagctggtggagtcccgcagaagagatatccggtgaggccacccagccaccgtcagagntccactatccctgggagacccgcagagtgaaccatgaggtcgggcggcggggggaccgggccgtcgtcgctcggactatggtggaagcgttgtcagccgagagcagagctactcccgcccagagtcatccatcagatgagagatacctcgtagcgttctggcgcatgaggtgatcgctagagacgtctgatgatttaacacatctaatagcgaggagcgaacgtctcgcgcattcagtatgcgacgtgccgaggcctgcatgggtgtaggcagactgtggcaggttgtgcgtgaggtccatgtgggaaatccatcatgaggtcgggtctatgtgccttcttgatgatgggttaggatgttcgtcgcccgcatcgtatgacacataaataatctcgaccttttttacacgcgattctctaagattaaaggtacagaagccattatttatctcatgcgttcggagtgcctctaaatttgggacaggcggcgatatcgcccatttaacggtctgtgcatctttgatcatttctcattgaacgaaattagggatatatacagcgaattgtgcttatccctttacagcgagactatcggtgagtgatggtaagtaacaatggtaaattggcccttcgcnatggataggggcatccatggtaccacttgtcgaagtgcgtaacatatttaagtaaaggtgggaggggctttttgcacattaaaaaagctttaacccggggggaaaagcctcttgtgtaatttatcaactgacacgaacggagtggggagagacaaaggtatggagaacgaggggggacggccgaaatagggggcaatttatatgctatggagcaaaaggagatctcctcgggggaaagagcaatctaacacacgacgtcgagacgaagaccatcgcggaacgcggaaagcgacgccttagacacaggacccgcaaaacgtgcagctgactcgcctcggcaacatggaaggtccccgggcacgagcggacacacacgggcacaccacaaggggggcacacacaccacgagcggcaccgacggcagtccgcacgacacacaccgtgtggggccaccccacacgcgcagcaacagcccgccgccaccgcggcccaggcgggcataacgacgccgcccagcacaccacacaatgctgttcacgacacac

SEQ ID NO: 608687 - DNA, 219 bp, Homo sapiens
ggccaagagaggactatcagatcaccagaaggtcacatgatacgtgttgcttgaggcgagaagtcaggatactatttttcctatgtctctgttctgctgcacaggcctatgaccaaacaagtggcaatgaattatgcttattagtcccagactaggttgctcaaatatccactttccaagcaaagaccaggggctccttgtgtagaaatgactagattt

SEQ ID NO: 608688 - DNA, 1338 bp, Homo sapiens
  misc_feature (307)..(307): n is a, c, g, or t
  misc_feature (1338)..(1338): n is a, c, g, or t
gggggggggggggggggaaagggcccttctttcaaaataaaccaaattaaaaaatttttagagggcaaaatattaaaaaaatatttgggctttacctttattttcccgcgaaaagccaaggtgcttatccctctccctcgtgtgtgtgtggcatctgtgggaagagaggaatcggggccctatttccctcttgaaagagaaaagggggggggctttaagagatagtggcaagagggacaatctcctgtgttcacacaagagtcgcttctctctctcatatattgggaagtagtgacacttatttacnaaacaaaacacaacacaagtagtgtgtgccatctcacaagagtctcctctgcgcgcccacacatgtgtgtgtgacacactttgtgggggggggagcgcgccgcgcctccacaacgcggacggtggtgtgtgtgcacacctctctcacccggcgtcccagagttgttatacaacactccgtgtgagagtgcccagaccgcacagaaaaaaacacaacaacaaaaacaaaaaaaaaacaaaagagaaagagagggcgcgcgcgccgcgctcactaacagaaatatctctctctctcgcgagagaggctcgcgcccccagagctagttcctcgcgcgcgtctctcacacccgcgtcgttcttctgtgtgtgtcccacaagagagaggcgcgcccccctataagagagagagagagcccggtatatatatatatacgacacgcgagagagcgcacgagagagagacgcgcgcgacgcgtgtctacaacacacaacagcgcgtgcgacgagcgagtggcgcgggacacacacgcgcgtgccaccccccgggtgggaacaccacacctgtggtgagaaaagagagacgcacccccctaatatcacacgcgcgcggggggggggggggagcccacacaccatagtggtgggggcacacaccactacaccactctcccccacaaagaacggaagagcatagattaatactaacagcgcctccctacaagacggcggcaggcgcatccatatatttagacaccaccatcactttcgtcaacagaagggggtggatataaaactaagtctgcgtggtgtgtggcggatacaaccaaacaaagacgcagggcggacagacaaatgatttaatgtacctcaaccggctgtgcgcttgattaacacagacaaaaacttttagcgcgagccgcccaacacccggagagcgcgaatcagttacttatcttatgcgcgagcaaaccaacattattttttttcaccaccgagggagctgaggatgtaatatatacataatctaatgan

SEQ ID NO: 608689 - DNA, 206 bp, Homo sapiens
  misc_feature (66)..(66): n is a, c, g, or t
  misc_feature (86)..(86): n is a, c, g, or t
  misc_feature (95)..(95): n is a, c, g, or t
  misc_feature (102)..(102): n is a, c, g, or t
  misc_feature (113)..(113): n is a, c, g, or t
  misc_feature (142)..(142): n is a, c, g, or t
  misc_feature (165)..(165): n is a, c, g, or t
  misc_feature (174)..(174): n is a, c, g, or t
ccaggccctcagtaggttttaaggagtccccagccctcctcccttttggggccgaccagcttatantggtccattttccccggccncatgccccnccaagtnttgcacagggnccccccccccaggggccctgctccgttanataattttaaatacgactgtggncccaacccnataaaacctctgtttgttcgaaaagaaggtga

SEQ ID NO: 608690 - DNA, 1586 bp, Homo sapiens
aggtcctgattggtctttattgtttttctttttggaaacagagatcatgctctggcccgtgtctgggtccaggcgggagggtagtgggggcaatttcggtctcatctggcaggcctcggcgctcctaaggttcaagacgatgcttcgttgattcgtcgaggcttcccaagtaagctggggatctaccaggagggtgccactacacccatctaaatgttaggttattttcaaggtgagaaaagcggggtgttcagacagagggtcgttatggatgggttgaccatggtgatgactaagatgtggtagcgattgaaaaggaatcaagggatgactttccttaatgcggaggggaggccatggacaaagtccgctcggtcggccacacacgtggtccggaaagggccaccaaagaccagcgagaaggtccaggacagcggccgacacactcaacacagtcaatcgcaacagctctaccgagacaaccaaagaagacaaagaggcaaccaacgcgagagcccactacctacaagagatcccacgagagagccgaggcaaaaaaaaacggacaagcccacaggaaacacgagcgccccaatcgcgcacaccaaaaaaacaaagaacaaaccagcgcgcaaccccgcaccccaacacgcgcggacaccacacagacaggagcaccggcaatccgtggccagagacaaacaacgccaacaaatagaccaacagactcccacaaaataacaactacagcgccaacccaaacccaccggaggaaacaaacaacagagcgacgacacaacagcaacacagcagcggcaccaccaaagcaaaaaagagaacacaacaacaagagaacacccaaaacaaacaacagaagcagaggagaagaggaaagaaaaagacaacagcaagagcaacgggaaacaacacacaaaaacaaaacagaacaacaaacgaaaaacaacacacacacgagaccgacaaaacaaagaacgacaaaaacaaaaaaaaacaaaacaaaaccacaacaacaacagaagaaaacaaaaaagaacagagacaaagaaacacaacaacaacaacaaccaaaaacaaaagacaaaaaaaaaaacagaaaacaaggaagtagttggggattgaagcagagagtagagggtagtgagagtgggagaggagagataggagaggagcgagaggaagagaataaagaagagaaggagatgaagagagtgctaagctagtacagtagagaaaggatgagtagatggaaggaaggaagcagaagaaggagagagagcacggagacggagcaggaagaagacggcgagaagacagaaggaagacagccaggcggcagagagaagcgaggaaagagacacaaagaagcagtacgaagaggggaccgagagacaggcgtacgacggagccaacacagcgcggtagaagataacagtcagaaggggaactgcccagggtcatcatgagcgtctagaaggcggggcacgcatgagaagaataaacgccaaagcggagcacgataccagcaccggaggcacacgcacgcagcaagcgaggaagcgagtaaa

SEQ ID NO: 608691 - DNA, 122 bp, Homo sapiens
aagaagatcccaactatagaaaaaatcaccaagaagaaacacatggacacatgaacatcactaaacagctcaagcaccaggtaagaccagagcaatctgtggaaaaaacccgtatgtccgac

SEQ ID NO: 608692 - DNA, 393 bp, Homo sapiens
  misc_feature (34)..(34): n is a, c, g, or t
  misc_feature (163)..(163): n is a, c, g, or t
  misc_feature (369)..(369): n is a, c, g, or t
gtgaagtaacaggtgcccatgtctttccctacgntgaagtcccagaggcctaagctggggcctcagaaaacatgttgaatgaacacatgaatatatcccatactaaaattgcactaggcccaggcacagtggctcacacctgtaatcctagcactttgggagncccagggcggatggattgcctgagctcaggagttcaaggtcagccctgggaaacacagtgaaactctgtctctactaaaatgcaaaaacttggctgggcatggtggcatgcacctgtagtcccagctactcgggaggctgagtcaggagaatcacctgaacctgggaggcggaggttgtagtgagccaagatggtgccattgcgcnccagcaattttttctaaaaaaaaa

SEQ ID NO: 608693 - DNA, 903 bp, Homo sapiens
gggataggagagagatgaattgccaaagtagcagcataaatatctcttacttagctttgtttataaataaattagtatgattggaaaaactagtgtatagggaaatgaaatcacatgttcagagcctaataacaggtagggaagggcttttctactaccctgaagaatgcaagggtaatccaaaggcatccattttctaggcttaaaagatatgatcttagatatatttaattatattctctacactccagcattgaatatgtgctgtttaagaaatgcactaatagctcatatgggctcatagaaacattagaatttgaagtaccttttaaagtaattattttaagacaaatagcctggaacgtaatgagattctcatgccatgcacgctttcatttgtcagttgtacgtgactgacgatcatattgaaatgactacctgaaatgcatatggtatcatgggagagttcaaggtatagattatgcgatggttggccacgaccagtttgcgctgattactcttagagacagaagaaatggacaaggtgacagaaggccaggagcggacactgacaggctatcggatacgaagagggaatgccaaaaggcaggccatacttcctatttttcccccacaggattcatttccgcacacaaaatcctgttgtttcctgggatatcgtcatgcgcatcgaaggaagcactggtgtttggagagccgtatgggttcctaaatgcccctaactctacaagaaaggttggctgcagaataaattaccctgtcactaactgcaatggcttttaacacggggattgtgctgcgaaacacccggtaatgtagacagagttgaatcgacaagagagtctgaaaaacaatggtggcatcacaaagaaggaacatgta

SEQ ID NO: 608694 - DNA, 150 bp, Homo sapiens
cttcggactgtcatcgaaaccctattaacgcggttatttatgggggggctgtagtgtctacttgtatacgggtttaggagctttacccgaatcccgcatcgggccgttaaaacgcaaatgaggaggatccccgcatcggcgtaattagta

SEQ ID NO: 608695 - DNA, 442 bp, Homo sapiens
ggacaagccatctttgaatggttcctcgatccgcctccttgcccgccgcagtcgcctccgaccgcgcgcctcctccgacgccgcggactccggcagttttatcgccagagtccctgaactctcgcttgctttttaatcccctgcatcggatcaccggcgtgccccaccatgtcatgactgcagtccgtagactaccagctccgaaatctaccatcctagggactatgagagggagaagcaaggactggtgtgtaggaaagaggccgaaactggaagcagacgcctcctgctgagaccggcgaatgctagatcgaggacaagatgttggggagcacgcgaggctgacaatgaggtagacgacagagagacgaacagggcggggaggacgacgaggcggaagaaggagggtgatggtcgacggaacgacgatcgagcgtattgg

SEQ ID NO: 608696 - DNA, 476 bp, Homo sapiens
ggaatgcttcatattgcttcatgtataagcacctacacatggccccccccaaccatgaacaagcattcgtatgacatgcttactcagcactgagatctaagatgtgcatgcatagactgaggcccgagagagagaataggagtcagctgagtcgtcccccagattagacaatcgccaaatattctgggaccttgctgggggtcgtacagccctccctgctcatcattgggcctttgcgatttggtacaagctcctcgggaaaccaggagtgacaagggcgcttgtccctgaggagtgcagagcgcggtagttcgtgtgcttgagtctgccctgatgtggcagaggaggagcgggcccccgcagagccagggctcttcaagtgtctcctggtccttggtgaagtggaactggaccaggcgcgagttccggaacagcggcactagggtggtctgcggggaagcgaggggacccccagc

SEQ ID NO: 608697 - DNA, 201 bp, Homo sapiens
cgggaggcctgacaatgaaaaaaatcatactcatcacacagattgttgtttggttgctggtagtgccagcctagttcaaaaaacgcaacaatatcatgacgtagtatggctgttttataataagctctttgtgatgtatacgtcctattatactgcggagttggggtaggggtcttgatcgaacccagagattcccacaat

SEQ ID NO: 608698 - DNA, 413 bp, Homo sapiens
  misc_feature (203)..(203): n is a, c, g, or t
gctctgtcttaaaatacacagagtctatgattgatcgagacaagtcttttatacttgaggaagacataggacaaataaacagttgtttatcagccaatactgtggaagaaattattgaaaaacttacatgcaagatggttcatctatttgccctaagagcaataagaaggtaaaaaaataaacatgtctccaagcatctctanaagatcacactaaaggcaactcatagaaggggtcttcaaaagaccttgcaaagaagtactaacatctggagtatcggctaagtcaagcttgtatgagaggtcatgactttcatgaaggcgttagagctgttttaattgataaagaccagagtcccaaatggaaaccagctgatctaaaagaagttactgaggaagatttgaataatcact

SEQ ID NO: 608699 - DNA, 143 bp, Homo sapiens
ggtttttccccccccccccccgtttttcggggggtaagccccaggaccccctcggggtttttttgggtccccccccccccccctggtcatttcccccctttccctggtttggggtctttaaaaataccttggggttcccccca

SEQ ID NO: 608700 - DNA, 326 bp, Homo sapiens
gaccccatcctttcctctatcacgaattctgagttgctcattttaagatcaacgaggcatttttagggcatgtatgcctgagagaggaaatcaatgtgaacggcaaacttccctctaaaacagcctaatacaatactggtccaggaggaacaaggcacggaaaccccctggtgaatgactcatctcatgaataggcatggcatggtcaggagagtctatggaggataagacctggaacaatacctctctctcttgcttttttacacacacacacacacacacacacacactctcacacccctatgagcccaaatctattgaattga

SEQ ID NO: 608701 - DNA, 238 bp, Homo sapiens
cctctctgctcaccgaacattatggccaagcatggcggctgtatcctagcactttgggaggccaagggggatgaatcgcttgaggtcaggagttgaagaccagcctgggcaacaagacaagaccttgtctctacaaaaatacaaaaactagccaggcatgatggtgtgcacctgtagtcccaggtacgcgaaaggctgagatgggaggatcgcttgagcctgttcggttgagcggaga

SEQ ID NO: 608702 - DNA, 845 bp, Homo sapiens
  misc_feature (452)..(452): n is a, c, g, or t
  misc_feature (459)..(459): n is a, c, g, or t
gtactaaataactgatgacctctgctggatttctgtttacatccagaaaacaatgttaaggatgtatttattcccctaccctgacatgaaacgtgtagcgagtagaatccgtgtttctagcagttctagaacttctacgatgcttaacacgtcaatcaacaaagacttgtgtttttgacgattattcgtaacttgtggcgaacaagtaagacttataacgcagaacttttagccaatttttttcatctaaaagtattttaagatatttttaaaatccaagagcttctctatacttttcagaaatatccagatgcagtgaactgccagaaggtaaccagtctcaaacatgcttatcccattatcaacctgaaagttgcttgtctttaagataaaaatgtaatgttgtgatatccttccagtaatgccactgtattttgtctccaaataaagangcttatngtagtatgtttgcagaaaaattctaaacaaaaattatacagcttattcagcagtgtgggaatagggatctaaattttcaaatcacacattcatatcatatatataacatggtgctagattttataattgcgcagttgagtatcagtttaatctatacttcttaaattccaacttaaaaattatgcaggtttcagcacaatatatgggaacagtttaaccaatgtttaaaaatcagaaacagcatgcagtgttccatgctttaaaaatgatttttaaatgtggtaatatagcatatacgtttcatcttcatctgtcatttgcgagcagtcttccaggttaaaagatacttctcaacaggttcacagtaattttactctgtatgtaag

SEQ ID NO: 608703 - DNA, 111 bp, Homo sapiens
tctcagtctcctcatgctggcacaccacactgacctccagataccctgctccaggaagccatccatgatttcctgccatcatttttgctagttggtcactcccaggtctat

SEQ ID NO: 608704 - DNA, 154 bp, Homo sapiens
ctcctatagatttaaggaatagttggaaaatgggagctacacagtagactatgaaggaccaaccaaaaagaacaagaactgggtggtatcatggaaacccaggtaagagagggcttcaaaaaggagaggtgatcttctggcgggtacctgagct

SEQ ID NO: 608705 - DNA, 382 bp, Homo sapiens
  misc_feature (43)..(43): n is a, c, g, or t
agagatgtggctgtgcttttcccttaggcaaagtggaaaaganttagcccttaccaaagggccccttcccaaaaagtgatgctggaaaatctccggaatttggtttccttggcaaaatcaaaacccaaaggcccaacccgccctttttgccctttggcctttggcaggcagcagttcccccacccaaatgaggtcccccatctcccttttcccggtttccctgcaggaaatcaacccccccccggaaatccccgccccaagggtcaccccccctccccccccccctttttttaaaatccccgggggggttaaaccaaaaatcccccagtggaagggggggccccccccctttttttggggaccaattaaaagggggctttta

SEQ ID NO: 608706 - DNA, 195 bp, Homo sapiens
aacctgaagggaaagcccacggacgatggagccatagagttcaccttcgacctggagaaggagacgcctggatgaggtggccaagagatgattgagtctggattcttccacgagagtcaccgtccagatcgtggcccagtccatccgtgaccgcgtgggccataattcatgttgcggcgggcgaggatctaggcc

SEQ ID NO: 608707 - DNA, 94 bp, Homo sapiens
ctttaaaagaataaaagataatgattaataattatcttttattcttttaaagaaatatggaggtacaaagaataaaagataattattaatcatt

SEQ ID NO: 608708 - DNA, 270 bp, Homo sapiens
  misc_feature (53)..(53): n is a, c, g, or t
  misc_feature (63)..(63): n is a, c, g, or t
cccccccccccaccctttgagatggctgacaagcggaacccccccaaaggggncctctgtggnttggaagctaatgtgctcgcttgtcccgtatgatgtgttactcgtgggcatttcattgagagtgatatagcaatagggtaacctgtagtcacacatgcctgtctggatgttcagtatttgtaaacccatatggtggcttcttttttttcctttcaagtcaatttctagctccatctagagtaagcaataattcatagtattaggcca

SEQ ID NO: 608709 - DNA, 130 bp, Homo sapiens
catgactgccagcctcagtgaccttcaagcctaatgaccttgctccaggaactgggacccttgacccagcttgacccagtcatctaggaatctggatgttatcaccttgaccccacgagcgactgacagg

SEQ ID NO: 608710 - DNA, 119 bp, Homo sapiens
aatagaatggatggaatggaacggaatgtatggaatggatttaatggaatcaaccgagtgcaggagaatggaatggaatggaatgcaatggaatggagtcatccggaatggaatggaat

SEQ ID NO: 608711 - DNA, 415 bp, Homo sapiens
cgggctgcaggaattctgcacgagaaggagtctgagaagatagcgctgtcagagaagatgatgggtacacagcacagactgtgcaccatatccctgtgagatggagcggcagaaaccagatgcccagagccggcaggagcacgaccgggtaggcctgccgtcgtaaggaggcttgcggagcaagagcgccctctcttcaccgagctattccgcggttttcagcataccatctggcggactcctcttcctctctcttctcctactctggggcttctatcctgggggtccttgagatgcctatcttccttttgtggctcggaacctctcacgcctgccacaaggtactcttttccttggtaggtctgaactttaaataagggaatgcctgtgagaatgccattgctcaatttgtgtc

SEQ ID NO: 608712 - DNA, 216 bp, Homo sapiens
cggatcctgtacacctctaggggctcagtaaattagtactttccataagataagatgaacccagagtagctaccagtggagatatttaaccttttatctgcagctatttgcttaggaacaaaaggaaaggcagtttcttgcatgactcaactttcagcttttttttttttcccttttggccttattaattggggccccctaaagttgtcgggtccc

SEQ ID NO: 608713 - DNA, 110 bp, Homo sapiens
tgagaacagtagtgaactagcctaacgataattttcgctccgggcaaggctaaaggaaaaatggcacgggggctctgtgaaacgctgtaaagtgaaaaggagagtgtagg

SEQ ID NO: 608714 - DNA, 199 bp, Homo sapiens
cgtaacatagcagacgcatgtgcgtagcggaaacgaatccaactaggaactatgaggttgcaggttcgatcccaggccttgctcagcgggttaaggatccagcattgctgtgagctgtagtgtaggctgcagatacggctcggatctggtgttgctgtggctgtggtgtaggccggtggctacagctccgatagcaccc

SEQ ID NO: 608715 - DNA, 185 bp, Homo sapiens
ttggtggggctttgggctgggaggggaaggcggataagagatgggggaactgtggatgccaataaggagaccatgcgtcatctcgttggaatcaaaaagggaataaggaatagatgtatgaaaagtcgtgtcactggatgcataattagaaataaagtgtatgctgctgaattggaaaaaaaaaa

SEQ ID NO: 608716 - DNA, 407 bp, Homo sapiens
  misc_feature (163)..(163): n is a, c, g, or t
  misc_feature (317)..(317): n is a, c, g, or t
  misc_feature (322)..(322): n is a, c, g, or t
  misc_feature (392)..(392): n is a, c, g, or t
ggcacgagtgtagatgtggaagaacaggccacttcaagagaggatgtcctgaactaagaaaggagaaagaagcccttccacccataactttcgaggaagaataggggggtcaggggctctgtctcttgagtcccaccaggagcccttgataaatttggaggtnggacctaaacatgagcttatcacctttttagtcgattcagaggctgctcgctcctctgtttgtttccccccgtctaatgttgtctcctcctcagaggaacttttattctccggggtaaaaggggaaggagaggggagaacagcaggcataagtnggctnggcagaggcaggggaaagaccagcagaggagggagagagacagagggaggggaaagaaagagagaggganaaagagagagagaga

SEQ ID NO: 608717 - DNA, 500 bp, Homo sapiens
  misc_feature (135)..(135): n is a, c, g, or t
tttaatggtgtttccggttggcaaacctcacgcaagaggaaaaacagtattatatgtggggtcacccggggggtttccacacttttaaatcggaagttccttccggggtcactaagggggttgtgaaactctttnactctgatcccatcactgtgacggtccctgtaaaagtttccaggaaaaaccctaaatttatggaggccgtggcggaaaaaacgctgcaggaataccccaaaaaaccccgggaggaattaaatttggatgttgcttttgcacccaccgggggaattaagtccagctccccccaaaatgaagtgcagccccccaaaaaaagctttgcccgttcccaagtaaacagggcccagccttcagggccccaaatccggccaaccttttcccgctttggattctgcactttaacactcgactttgctggtcatgggaaaaaaaaaattggtcctgcatgcaactaattcaataaaactgttttgtgagctgga

SEQ ID NO: 608718 - DNA, 354 bp, Homo sapiens
  misc_feature (3)..(3): n is a, c, g, or t
  misc_feature (206)..(206): n is a, c, g, or t
  misc_feature (292)..(293): n is a, c, g, or t
ggnccataaaatcaattgagccaggttaggatccagcatttttccttgatgaaataaaatgtctaatagaagtggtcactgtgcatcctttttattgacggttactagtgtttgatgaaactttggctcctccatgtataacaagtacccaggccacaaggcagtggagagtagtggttcagagcactggagagtctgggcaacgnttgtcacgcctgtgatcccaacactctgggaggccaaggcgggtggatcactcggggtcgggagttcaggaaccggcctggccagnntgcggagccccgtctctactaaaaatacaaaattggccgggtgtggtgatgtgtgcctgta

SEQ ID NO: 608719 - DNA, 276 bp, Homo sapiens
  misc_feature (205)..(205): n is a, c, g, or t
gccgtaggcaaagggaggtggggaggcggtggccggcgactccccgcgccccgctcgccccccggcccttcccgcggtgctcggcctcgttcctttcctcctccgctccctccgtcttccatacccgccccgcgcggctttcggccggcgtgcctcgcgccctaacgggcggctggaggcgccaatcagcgggcgggccaggggnttgccagccccggggctgcgccggcgaatcggcggggcccgcggcccagggtggcaggcgggtctacccgc

SEQ ID NO: 608720 - DNA, 371 bp, Homo sapiens
  misc_feature (72)..(73): n is a, c, g, or t
  misc_feature (93)..(93): n is a, c, g, or t
  misc_feature (97)..(97): n is a, c, g, or t
  misc_feature (101)..(101): n is a, c, g, or t
  misc_feature (140)..(140): n is a, c, g, or t
  misc_feature (151)..(151): n is a, c, g, or t
  misc_feature (168)..(168): n is a, c, g, or t
  misc_feature (205)..(205): n is a, c, g, or t
  misc_feature (226)..(226): n is a, c, g, or t
  misc_feature (234)..(234): n is a, c, g, or t
  misc_feature (246)..(246): n is a, c, g, or t
  misc_feature (255)..(255): n is a, c, g, or t
  misc_feature (268)..(268): n is a, c, g, or t
  misc_feature (274)..(274): n is a, c, g, or t
  misc_feature (310)..(310): n is a, c, g, or t
  misc_feature (313)..(313): n is a, c, g, or t
  misc_feature (322)..(322): n is a, c, g, or t
acacaagccggccctgggcgctcctgcctcctctctcagacagggaagcgggaaccagacttactgatccannccccacctgcctcccatgcnaagnccanccccaagatcccaggcagcgacacagcatcccctctggncccctcctggngctgctcctcagcaggnggcgcaccaaaacttgccccctacaatgttgaatganaaacgtttcccctcccctggnagcaaggnggttcccaaganctgagaatnccccctggaaganacactnccccctagacatacctcccacccttccatgccctangtnactcaaagnggggaaactgaggcacagagaggtggagttacctagcccaggccactct

SEQ ID NO: 608721 - DNA, 456 bp, Homo sapiens
  misc_feature (86)..(86): n is a, c, g, or t
attctgtactccgtgccatcatgtccgtcctgacgccgctgctgctgcggggcttgacaggctcggcccggcggctcccagtgccngcgccaagatccattcgttgccgccggaggggaagcttgggatcatggaattggccgttgggcttacctcctgcttcgtgaccttcctcctgccagcgggctggatcctgtcacacctggagacctacaggaggccagagtgaaggggtccgttctgtccctcacactgtgaccttgaccagccccaccggcccattcctggtcatgttacttgcatttgttggccggcctcccctggatcatgtcattcaattccagtccccttttttgcaatcatgacctttttatgtttccatggtgacccccttgggggtccctgaccctgcttggtggggtcccccttgtaacaataaaattttttttaacttta

SEQ ID NO: 608722 - DNA, 318 bp, Homo sapiens
tcagagacaggctcccctggagcttggccagctgactcacagaggtccctgagtctgggccacagctcaggctccgggtccagctatgccctccaagagtgagtggcctcctggtgcctctaaggggggacatgggggaagctatgacgggcaaagggcgtagtgtgaccttaccatgcaccaatggctcgttccgtgtttaaacgagcaatttggggttccaggctcagacaagtttagcaacccgtgacaggattaaaataagttctggacagcagggtaatcataacagtttatcttatgttcacatagcagggt

SEQ ID NO: 608723 - DNA, 317 bp, Homo sapiens
tgcttgtaggctgcatgaagcctcgcaagttcctcgatcattatggagttgtactccggatctgtgaagaagcttggaccaacgtgctggagacatgtgctggaagctgttttcgccctcccaagagcggataaacggttaggtgacccaaccagcatagagtgaccccagccaagcccaacgtaaattgctgacccccggcatcctgatcaaataatgtagtccctgtcttacccccctaaaatttgggagtggataagtaaagtcagataaaatcccaccctttctcttttgtgcttgtaagttacactgactga

SEQ ID NO: 608724 - DNA, 1146 bp, Homo sapiens
ggccctgctgacaatatgcggaccccgtgagcgcccagcacgccaagctgtcgcttggacgagtgcaaaccacatctacaaacgcctgctgcacgctgcgcatcagacttttcctaaggctcacgctaggtcctcaacgtcatagtacaacaagtgacaaagagacctgtgattatcacactgcccaggaccattggccttccgcggagcacatgccgagctcgctcgcgtggtagcctatggaccattggaccgcgaggcgttcaggtgcagcactgtgtactaatctcaagccgtcattcccgattagttgacaggtgaacgtctggatattccgactccgcaacgcgttattgacccaaatttccattcgaagtcgtagacatgagacgcattatcccctgttgtgcctgcaaacctgtttcgcatcgatgactggctcctcgtggtccacccacactttgggaacaattagcccatcggtgacgaggcagtgatcgtggcaggaattgatggaggcaagagaagaggagtactagagattccgagccgatcacccccttgggggcctttagcgcctcgagatggatgcacaggttgaaccatctatcttgcgtcagtttcgcgtatggctccatcgcaagaatcatcaaaacgccctaagaaggatcgaatgtcacacagccccactaatgatgtccccttctttttaattccttatggtcttgagcgagtcctatccggggtagaccccgtagcataggccgccgtgctgacaggaatctcctgattcccataacgaaaccggaggacaccgtgcgcttgaagttgccaaagattggctggaacctgtggaaccaaaggcccgcgagcttgatgcccaagtgaagccaaccacattgaaactggggcaacagagtcttggccacggagggaacaggccccattcgctgcaaatccaacgcgattctccgagaggccacccgagacacagtggcatgcgttggccccgacgcaaggggccaagggacagagacccgagggcgccttgacacgaaggaacctaacgaggcaacttcatccgccttggcacacggtgtcaaaagaagagccggggcttccaagaacctttcccagaacccgttc

SEQ ID NO: 608725 - DNA, 208 bp, Homo sapiens
  misc_feature (6)..(6): n is a, c, g, or t
agtagnttagagctctgtacatgtcgggtcggacgtagcgtatcgatggcgcagtggagggggcgcaatatgcatcctaggcctataaatattcggagtatactgtacgcgggtaggttaacaaccggtacctctagaactatagctagcatgcgcaaattttaaaggcgctgaatatcgatctgcgcgcagcatctgtcagtgcatg

SEQ ID NO: 608726 - DNA, 213 bp, Homo sapiens
aggaaaggatagaaatgttcaggacatcatcatacaggctcctcatctacaaagttccagtagcagtgacgcctacacggaagacttggaactgcaaacaggctggggtcccctcagtgacatctgacgctgtccaaccaaaagttcgatttttgttttgggggtgaaggaggaaacagcctgtactaaagccctaaaataatttcttgttta

SEQ ID NO: 608727 - DNA, 109 bp, Homo sapiens
ccgactttggttttcggcgtgtgacgtgaagatcggcgacattgggcttgctcagtatggtctctcggcgtgtgcaatcttcacgagcccataatcgccgatcttcacg

SEQ ID NO: 608728 - DNA, 247 bp, Homo sapiens
atgtaaaggaacatccttctccattgaaagagaaatttgatttctctgggagaaaaaattacaacgtgtagtcactaggatgcattatgaacctgtgattgcgatgtgggattttatgatcaaggtctcttctcttccgcaagatgtcttcagctaagggcggaattacagatttcagcgcccacaaaaatgtttcacagacctttagccccatctagtggccatatcctgtcaggacacccaagcc

SEQ ID NO: 608729 - DNA, 166 bp, Homo sapiens
  misc_feature (3)..(3): n is a, c, g, or t
  misc_feature (141)..(141): n is a, c, g, or t
  misc_feature (151)..(151): n is a, c, g, or t
tanacagagaagagcccagagtatagagcggaagcaagagagtgagccacgtattgttagtagagttgtccagtgttgtgcttggaatggtggagtgttctggttcagtctcctcattgttttatcagagtatttattccntgtgcttcangtcggtaacagcccg

SEQ ID NO: 608730 - DNA, 1218 bp, Homo sapiens
  misc_feature (1218)..(1218): n is a, c, g, or t
tctggtacgccccggggtaatgggatatgtcgaccagcgctgtctggggagtgcctgggtggccctgggatggggaacctgcggtggcttcctgctggagtgtttctgtgcagtggcattcgtggtgccggggtctgcgtgcctgtgtgacgggggccgtggtgcctgatgtgcctggcgtgagtctccgcgtgatggcaatggcctgacggataatgtgatgtggatgcccgtcaccagagttgggcctgcttgtgtcaatgtgacatgacatgatcaatgtccctggacgcgcagactctatctcttctccctgcccattaatgtgaatcagagatcattgatttcttcctggcggtgctctcttctccaagtgcattgagtgtttcttgaactgattagtagcccaggttgccaggaagtgcatgaacccggtgcctggcacatgctgcagccaggggtttcaagggcacttttgttgctattcgtggtgactactaagctggccaccggtccgggacctggtgctgtttaaggttgctccaaaggcactgctggttctatccggtcgcaatacccgtggcgtgccaattccactccctttggctcagatgctcctaccaatcgttcccaccgtatgccgcacgaagggcttaccttgtgtggggcacacacatgactctgtgctaaagccctcaccactaactatggtacccccaattagccaaaggtggttgagcaagggccctggctagtacgtgtgctactatgagtgacatggagtaagcggctcttacaaattcctcgtaggcaagccgcacaggggggccatctttgtgccagatttctgtactttccgttcaaagcccttggatgcctataaaatgaaaatgctatggcgtccaacttgaactagcgctatggtgatacattcagagacttaggaagctatggtctacacgaatcatctttacaatggccccagggagaggagcctttagccacacattttgagtcacagacgcccctgttggagggccaagagcatattacgggcagccaaaagtggtccctaagctctttttttgagacgttagccacacagtcctttcagtaaacagtgaacctcttacgcaagcgcgtaactcatttaggagacccaccctcaggacaacccttcatatgttgcgacaggaggagtgaacatttggctatctn

SEQ ID NO: 608731 - DNA, 1006 bp, Homo sapiens
ccgatgcttcgttgtgtgcctcattgcgtcccgtccggtcgctggcgttcgcagggcatccacgctccgactgggtgcctcctgtctggggagccttcccttcctgaggtcggcgtgctgccggatttgcgtgaccaggcggttgaggcccacacggagccgctggttagcgggaccggggctgcagctggcgtcggtgaggaattgcggaccttcgtgctaggtcctcttggggctgtatccgctcagggggtgatctcgccagatcgcagatttatggtcagtggacggcttcatcgctgactggtagcacatgccggcaggccggggatgcccagttgtgcgagatacgttgcgcaggagcagcgcgagcccactcccagccagcgtcgtcgaggagccccagggggaggacagggaagcagaaagagcttcccgggggcctcagacgggagaatgcatgcgcgacagcccctgggagcgacagcagaagaggccatgtcctgaggtccacctcctgcggccgaggagggggacgtcccgggatgaacaggatggagactgtcagctgagacagaaccctgggcagcggcagtcccccccagaatgggtcccctatatagtgccagcaggacatgtacagagccagcggaaggtgtaaccgcagccccctctgagtgatgcctacctcagtggtatgcctgccaagagacgcaagacgatgcagggtgagggcccccagctgcttctctcagaggctgtgagccgggcagttaaggcagctcggagctcggcccctgacgagcccgcgagagctctgagccgggacctggagggcaccagaggttcaggagagctacaggcagcagctccggtctgatatacaaaaacgactgcagtaagacctccgaaatacagtcctcagcgcttccaccaatgcccagcgggcctttcgctgatgatccttagctctttgctctatggcctattcctcatcagggggact

SEQ ID NO: 608732 - DNA, 267 bp, Homo sapiens
ggtatttgggtccagccgtgctcgcctgtgtttgatgtgtccgtttcaaatttcacactgcctttgccatggggcagcggacaagcacagtgccctggcacaaggctggcctctgcgtctcttagctggacccagagtccctgtataagagtgggggactgtgggtggcactcagtaggtgtccctgtacaagagtggaggggctgtgggtggcactcagtggtggtccctgctgaccacagccagtctactcctagaataggaatc

SEQ ID NO: 608733 - DNA, 262 bp, Homo sapiens
taacaaaaatgggaacagggctttcgggatacaaggtctccttacaatttttctatcaaaaaaaatggaacctctgaagcttttaattaagataacccggtacctgatattaccagcgggaaattcttttaagggggcccggggatctggcccttacatattttaggggggggcaaaaggccaagggataatgggcctcaatgacactgcccggcaagggacatgggccccttgggggacagtggctttttgaaggaagtgg

SEQ ID NO: 608734 - DNA, 238 bp, Homo sapiens
agcatagggtgggtacctgtagtcccagctactcggaggctgaggcaggagaatggcgtgaacccgggaggcggatcttgcagtgagcggagatgcaccactgcactccagcctgggtgacagagcaagactccctctcaaaagaaaaagaaaaaagatgtaaaaaccattcttagtttgtgggccttacaaatcaggccactggcccatggcttgtagttagttgatccatgtcatg

SEQ ID NO: 608735 - DNA, 572 bp, Homo sapiens
  misc_feature (6)..(6): n is a, c, g, or t
aaatangccaaaaaccgtaagtaaaaagaacaaagctggaagcatcacactacctgatttcaaactatattacaaggctacagtaaccaaaacagcatggtactggtacaaaaatagacacatagaccaatggaagaggttagaaaacccagatataaagccacacccctacaaccatctgatcttcaatgaagtcgacaataacaagcaatggggaatggattctctattcaataaatgctataactggctagccatatgcagaagattgaaaatggacccctacctttcaccatatacaaaaatcaactcaatatggattaaagaattaaacttaaaacctaaaagtataaaaactctagaagaaaacctaggaaataccattctgacataggtgttggtaaatatttcatgatgaggtctccaaaagcaattgcaacaaaaacaaaaattgacaagtgggacataattttgcttgtaaatacttcaggaccgttctctttttattatttttattttttttctttagacttctcaagtgtggatatttggcacaatttgtgtgtatttta

SEQ ID NO: 608736 - DNA, 377 bp, Homo sapiens
  misc_feature (5)..(5): n is a, c, g, or t
  misc_feature (38)..(38): n is a, c, g, or t
taccntttttctccttcctttccttcttctttactacncttacttgcgttttttagattaatttcccccctctgcaccgcctttctctcagtagggcctttttctcaccttccccgcgcttctgcctcttgctatcgtgaatttaccccagccgccgcgtgtttgtattcctttactcctcgtcgcgtagcactccggcggggccgtcctcgttacttgggtatgggtagcccctcggcgggcgtgttcttgtcgtgctgttgcgttccgcgcgcgtcgcgcgtgtagttgttttttcaccggacgaggtgcgccacgttgtcccgttctagttgtttgcgaatgttagggagtgtgtgtggtgacgcggcgtgtgg

SEQ ID NO: 608737 - DNA, 658 bp, Homo sapiens
  misc_feature (447)..(447): n is a, c, g, or t
cacctgaggtcgggagttcgagaccagcctgaccagcgtggagaaaccccgtctctactaaaagtgggaagctagctgggcgtggtggtgcatacctgtgagcccagctgctcacgaggctgaggcaggagaatcactagaacctgggaggcacaggttgcagtgagctgagatcgcaccactgcactccagcctaggcgacagagctagactcagtctcaaataaatagtaaatatattcttaatctttatggggataaagaaattaggacttgtgagacattttaaagggaatatcctgctttttaaggaatgctagcattttgtaagagcttcataatcatttaagagatcagctacttaccctattccagaggggttaatacagaaaaggctctcatttcttagctcttctaagcagctagctgtcctttctctcatttgagntggagactctggctgttttggtcattctcaccatgctttgctctatctttttcccccattgaccctatacactcttgtgcactcagctgtgagtcgatccagagcagcacctggtggaggtgaggccatgggcaaaccttctgcttgtgtgagactgcgctcgagtccatctgctgctgctgggggcccacctgtaagagtccgctcattt

SEQ ID NO: 608738 - DNA, 579 bp, Homo sapiens
cagaaggttgttgtcgtccgttgtgaggcactcaacgttgtctggtgaattcttcagaaccaagttgaaataccatgactacttgagaaagggtactcgtttcaacaagaccagaggtccattccacttcagagccccatcccgtatcttctacaaggctatcagaggtatggtttcccacaagactgctcgtggtaaggctgctttggagagactcaaagtcttcgagggtgttccaccaccatatgacaagaagaagagagttgtcgttccacaagctttgagagtcttgagattgaagcaaggtagaaagtacaccactctcggtgacttgtccgcctctgttggttggaagtacagcgatgttgtttccaagttggaggacaagagaagagtcagagctgctgagtactatgctaagaagaaagctgctaccaagaaggttgaggctgctaaggcttcccaagctgattctaaggtcaccaaggaattggctgcccttggttactaagcggttttgatgatgaaagaggaaaaacgagtataggtttagtctaaatgtttatctgtaattgtacc

SEQ ID NO: 608739 - DNA, 319 bp, Homo sapiens
catacgctctgggaaaaaaaaatcttcaactgtcactgattacccttgtccaaacccaggacatatcctaagacctggccgtgatcattttcctgaactatctgggtgaatggattacaagaaacggagaaagtagagccagtggtgtggggagtggtgtgcatgcccactgaaatctgcagtagggtgccgatttgtacgtccgttgaaagttcctcgggtcacatctgaaggcggttctaggtcaccctagaggcctaggctggctgtctacacgtcagggggctgagttgccatacaaagactcaaaggagtgaat

SEQ ID NO: 608740 - DNA, 292 bp, Homo sapiens
  misc_feature (190)..(190): n is a, c, g, or t
  misc_feature (253)..(253): n is a, c, g, or t
  misc_feature (255)..(255): n is a, c, g, or t
  misc_feature (279)..(279): n is a, c, g, or t
tcgatgaggccctgcataaagagccgcgccgatcttcaatgcttgtgcgttgagagatcggcacagaaactgggcgaagaacacgccgagattttcgatgcgcacctcttgatgctggacgaccccgaactgctggatcaggtcgcggctgggctgcagtggtggccagagcgccgaaacggccctgggntgccgtatccgacacctttattgctgtctttgagacgatggaagatgagtacatgcgcgaggngnccgccgacttgcgcgatgtgcgantccggggtcgacg

SEQ ID NO: 608741 - DNA, 368 bp, Homo sapiens
gtgtcagacaatacattcagagtacctaaggcaaaacaaaacaaaacaaaacaaaacaaaacctgccaatcaaaaatactgcatccagtattagaaatgctatcctttagaaatgaagtagagataaagactttccagacagactgagtaaatctagcatcaccagacatgtccgtacaagaaatacaaaaatgagttattcaaactgaaggaaaaagatgtttttgcataacaagaaatcatctgaagacagaaacttcactggaaaatgtaagtaggaaggcaaattcagaatactctaatactgtaattgtagtgtgtaaaccacttacatcttcagtataaatactaaaagacaaaacaataaa

SEQ ID NO: 608742 - DNA, 131 bp, Homo sapiens
aaacgcaatggaaacagaggttctataacataaagaatgaaacaaataggctgggcgcggtggctcacgcctgtaatcccgagcactttggtgaggctcgaggaggacgaagcagcatggtaccgacgctc

SEQ ID NO: 608743 - DNA, 474 bp, Homo sapiens
  misc_feature (126)..(126): n is a, c, g, or t
  misc_feature (177)..(177): n is a, c, g, or t
ctttctgtcccagaactccaggaaacaatggagaaactgacttggctggcatctgaaaggcgcatgagtcaggagggtgagtctgaagaagagaattctcaggaggagaactctgagccagaagangaggaggaagaagaagcagaaggaatggaaagcctgcagaaagaggatganatgacggatgaagcagttggagactctgctgagaagcctcctacttttgcttcacctgagactgctccagaagtggagaccagcagaactccaccaggagagagcatcaaagctgctggaaaaggccggaacaatcatcgagctcgcaacaagcgggggaagtcgggctcgggccagcaaggacacctcccaagctgctgtttgcttgttattgattgaaggacattcttcgagcgagattccactcagggaagcaggaaggactttggccttttgccccagcttatcttgaccaaa

SEQ ID NO: 608744 - DNA, 1433 bp, Homo sapiens
tgcactggatgaagctcgaaaagcacgtgcaggcagagagtgggaccgtctttattgctcaaattaggagactactatccgtccagtagatcacaagttctcacgagacttggaagttacatgtgatccattgtgctacgtaggtgaagcgctatctttgcttgaagctagagggaggcaactatactcgactgtggtacaatgaattgtggccctctatggtacgatgtcctagaacaggtcgtggcagtgagaagtcccgaagagcacctgtctatccagtagtggtacctaggacaattgtttacttatgtgaagtatgacctttagcaagagccatcatatcgtataatctctactatatctcaagatgtcctcgtcgcttcttgcggcaggtagggctgccaagattgggaacggtgacgcacagttctatgagctcctacggatcttcttgggccccctctactgaagttgaagttcgcagatcgagcctaggggcgcttgatgcccacagtcaagataggtaccaagcgagttctataccacataccgttgttgtggaagaagccatttcaaccaccataccttggagccttgggatgctgacagctaacgttacggtgaccggcacacggttcaaatcgaattttgatctggaatcgcggaaacggttctgaaacaccattccggagtcagctactcatgttcccttgtggagcaaggagaggggccatgacaatggttgacaacattccacgataggttgacgaaaccgccaccattcctcagaaatgccgaggagttgggaacgatagtacaacacaacagagttcaagaagccaacaaggaggaaaaggacgggtgaccatttatatgaccctctaggcgagcagcaggggccaattgagaaccgccaagctttaaagccaatgtgtatgcgaattgagcgccaatagcctctaatcggagcaagtagttaacaagcacttaagcgccagtagggaaggatactatacctccgatggcacagctctgcccgacacaagggcaccaatgcgtgtggagtttacgcgacctgtgtggggtaaggagaattctcgcggagatccaaaccgggttgggtatcgggttaaacagccacaaacgggtcccatcgcgagatagaaagagaaaagaaggcatccatctaagaagcgcctgcgcgcccaaggtgcttgccaaggacaaccaagttctacataaactatcggacggcggtggcggccaacgcacatcaagcagacggcgacgggcgacaaacaccgaagaggcaaagaatgagcaagcgagaacacaagggcgcaagaccaacaagagggaggacaaaaacagagttggtccactcaatcagacacgtggcaaacgcgaagcatgcgagagcgaacccaaga

SEQ ID NO: 608745 - DNA, 885 bp, Homo sapiens
tctaatccaacagttttttaattaggatgtcagcccgtgggtccaaaggtcaaaaaatagggacaggggacagcccaggcgaggcggggccgggggttcaccccaggagtgtcccaaccacgaggggcagaatctccctccacctccacagtgcgtggccaagggcacaaacgcttgccgatattcgcctgtgccaagtgggggtggctcacaatgtgcgtgctgtgccgcgtggctccgtgttatgtggcgcccggggtgtcgccagaaacacaaaacaggaaagcctctacagggcccggtcctttggagagcttccttgtgaaatttccctacagaagaagagcgccctccttaacagattctgtggcataagagccgtggtctcacagggcgtgttcgttaaatgtgattgaccaccattcaaaaacaggcgcgggactctcctgtgtgagcagtgctcctctctcccaagtgtcgtcgggccctatggaggacaacgaacaacggcccaacgcccgagtatttccacacaaggggatctcactcacactcaggatttaaacaggtgtgcttgacgccgactgtagccggaaagcccagacagttgcactcccaaagacacacgtgtgcacagtgagaaaaaaggggaggtgttgtggcgcacaacggaaagtatgtggcttacaccatgtgctgctgccccccgcaaaaaaatattcagagggaggcggccctctgttgacatgaatgctctccccgggaaaaaaacccccccgttggtcaaggggtctcccccacgcgtcttccccgaggaacaacccccaaagatttgggggggtctctaaagtagggaccctatagaaacgtggcactttgtaacag

SEQ ID NO: 608746 - DNA, 330 bp, Homo sapiens
gcctgtgttggcttggtgtggatgcaggttgctctcaaggaggatctggatgccctcaaggaaaaatttcgaacaatggaatctaatcagaaaagctcattccaagaaatccccaaacttaatgaagaactactcagcaagacacaaaaaaaaaaaaaaaaaaaaaaaaaaaaaatacaaaaagtagccaggtgtggtggcaggcacctgtaatcctgggttctcgagaccgaggcatgagaattgcctgaccccaggaggtggaggctgcagtgagccaagatcatgccactgcactccagcctgggcgacagagtgggactctgtctc

SEQ ID NO: 608747 - DNA, 1015 bp, Homo sapiens
ccatttacccaaataaagtataggcgatagaacattgcaaaccgtggcagcacatagcatcatcagtcacccgcgaagggcacacagcatgcaacacacattcatcagccacagccataatatcagccaaggcactaacccctataccttctgcatcacatgacattcaactagcaaataactttgcaaggagagccaaagctaagacccccgaaaccagacgagctacctaaagaacagctcaaacagagcacgaccacgtctatgatagcaaaatcagtcgggacagatttataggtagaggcgacaaacctaccgagcctggtgatagctggttgtccaagatagaatcttagttcaactttcaatttgcccacagaaccctctaaatccccttgtaaatttaactgttagtccaaagaggaacagctctttggacactaggacaaaacttgtagagagagtaaaaaatataacacccatagtaggcctaaaagcagcaccaattaagaaagcgttcaagctcaaacccactacctaaaaaatcccaaacatataactgaactcctcacacccaatgggaccaatctatcagcctatagaagaataatgtagtataagtaacatgaaaacattctcctccgcataagcctgcagtcagatcacaacactggactggacaatctaagagcacaatatctacaatcaaacaccaagtcataattaccatcactgtcaccccaccacagcgcatgctcataagcaaacggttacaaacacgtaaaacgacccgcgaaacataggccgccaggaaccacacacacaacactaagatacgccgaataaacggaccggaagcacgagaacactgcttacaggcgcggaaccaaagcggaaggaaaaaacaaggaaccaaacagaccgtatgaatcccacgaagcaagagacgcaaaaaaccagaacgacacactcaaacgcagaaccaccacaacaccggacaaaaaaacaaaacacg

SEQ ID NO: 608748 - DNA, 327 bp, Homo sapiens
gcaattctccccttccatcaccccaccctaccctggttcatttgcccccctagtaatgatcaaaaaaagaaagaataaaatgttcccccaatctgtgacttagaaaaacatgtggagggttttgccattttttgaattttgatcccccctgagtcctcattgaaatgttatttggggaaaaaagtttacctggggcctccttcccaaaaactttttttcaaatgaatttttagtcaaagactaaaacttgcctttggaaaagcctggataaatttggatggtaaaagacttgaggacccctaataaaagaatgggggactattggga

SEQ ID NO: 608749 - DNA, 1031 bp, Homo sapiens
  misc_feature (138)..(138): n is a, c, g, or t
  misc_feature (769)..(769): n is a, c, g, or t
tgagaaagtgttttttcttcgccctttgggttaaaaaagtttcacgtctggggtcgcctttgtgtgtgtgtgtagatgtgcgcgccttggcgtgatgtgcgcttgtgacatgtgtgtcgcacgtgtggtagaggggancatgtgcctcacccttctatacccttataaggggggcggcagggagtgtgagtgactgtgtggggagaggctttgggagagcaaaatatagcggaaagagagggctgtgacctgtgactcttctgcggtttctctcacagaagtgtgtgtaacaaaaacacaaaaatctctttaaacacaaattctcttgaacactctctctcacagagagtctctatattttttttacacacgtgaaaagtgtgtgtacaattctttatataagatatatttttttcacgagagagagtctgcggacaatgtgggtgtgtataagttctcacccatagcgtgagagatatgaggggcgggcgcgacattttttctgtggcatcatgtgttttaatgctgaccacacccatttgcgcacggttccccatataacagtgtgcgggggggggtctacatatcttataacaccgtgtgtggaccccgtgtgtgtgtctgtgcgcgcttataaacacccacagcgtcgtagagcgtggtgcgggggctctttatataaaaccacccttttgtgcaaatgtgcgcgctcttataaagtgtgccccccatgtgggggaaaaatacgtgcgcgcgggggataaatatnctcacctttccaccaaaaaaaaaacaatactttcaaacaagacgggagaaaacaacattatacgacgggcgctcaacacaccccgcacaaaaagacaacacaacaaccaaagaaaacacaacacaacgacaaaacaaacacaacgcggaacactcgacacaaccgcgagcaacaacgaccaccaaagcagaccgaagcgggggcggcgcgggccgactaacaagaaataaccacaccagagggcggggtgccggcccaatca

SEQ ID NO: 608750 - DNA, 114 bp, Homo sapiens
agcgcgggtcggcatccctacttcctgcattctcaagggccaccagcagacagaagatgcaaaggaatccaataccgacaaaggttctcactaagttcaatctacaaaactggc

SEQ ID NO: 608751 - DNA, 112 bp, Homo sapiens
atggtcatgtagtgaggacagaaagtgtctttgacaccatgtgctacttgtcccttcgtaattggcttctaacagaattcaaccagtatataattgataatgtgaatttttg

SEQ ID NO: 608752 - DNA, 730 bp, Homo sapiens
agatcctagctactcgggaagctgaagtgcgagaatcccttgaagctgagaggcggaggttgcagtgaggctggaacataccactctacgtccaacctgggtgaaggagcgatactccatcccatctgagaatagtatgaccatgaactttacatatgtaacgtcataaatgcataggtgaaattaaaagggatctagtgtaggacactggaggtgggctgtaaggctaacgctatcatcccgtacttttggaggggcagacagaagaacaccttgggccgggcagacggaaccaaactggtgagcaaatgagagttccagtcttacccgggaactggcgacataccccggaaaacattgtcgccggattgccccaagcggcttaaaacttgccaggttattggttgcggccgaaattggctttattgccaaattgcccttaagggaggcggttacaattaacgggccgggggttaacacgtctgactggaaaaaccctggggtacccacctaaatgcctttggaaaatccccttttgcaactgggggaaaaccaaagagccgaccgaaagcttttcaaaagttcgccccccaagtggaagggaatggaaggtaaaatttggtaaaatcccgtaaattttgggaaacacaccatttttaccaaaaggcgcatcgggcaaatacctttaaactaccgcgaagggtggttgtccacctggacaggccccctt

SEQ ID NO: 608753 - DNA, 120 bp, Homo sapiens
  misc_feature (37)..(37): n is a, c, g, or t
  misc_feature (39)..(39): n is a, c, g, or t
  misc_feature (109)..(109): n is a, c, g, or t
tggaagaattcgcggccgaggctggggaagcgtggtncncccatggacgacgggtttgtgagcctggactcgccctcctatgtcctgtacagggacagagcagaatggnctaatatagat

SEQ ID NO: 608754 - DNA, 107 bp, Homo sapiens
  misc_feature (5)..(5): n is a, c, g, or t
gtggntgtgggtaggcatctgtgtcaggctcaactcttcagagccgactcagacattttctacatcaaaagttccttcctggttatctccatagtgtcaatggccaa

SEQ ID NO: 608755 - DNA, 226 bp, Homo sapiens
  misc_feature (138)..(138): n is a, c, g, or t
ccagattacacaagcttttaattcccatgggtctcgtatagtatcctcaaatctgtataggacctttgactttaaacccttggggccttttaaactgctgtcacttttcactgaacctcttcttccgggagtcttacncttatttcctcatatatccccattcaaaaaaagtcatcattcatgtatgtacttcttaacctgtgacatgctgcaccccggggggacc

SEQ ID NO: 608756 - DNA, 866 bp, Homo sapiens
tgaaatggagctgagatggctggagccagggtccagctagaggacaatgcccacgtggcatcttcggggccctggaggagggagtgggaggaggatgggaggggtgaggtgtcagttccccattggtctaggccaggtgttctgtggcggtccccacaccacacaacacacacacatctgcacctcaaccacagactacacttgctgaactggctcctggggccatgaggctgtcactgccactgctgctgctgctgctgggagcctgggccatcccagggggcctcggggacagggcgccactcacagccacagccccacaactggatgatgaggagatgtactcagcccacatgcccgctcacctgcgctgtgatgcctgcagagctgtggcttaccagctacggagttcgagaagtggaccaagtgaaacgtctcacaggcccaggacttagcgaggggccagagccaagcatcagcgtgatggtcacagggggcccctggcctaccaggctctccaggacatgtttgcactacttgggggagtttggagaagaccagatctatgaagcccaccaacaaggccgaggggctctggaggcattgctatgtgggggaccccagggggcctgctcagagaaggtgtcagccacaagagaagagctctagtcctggactctaccctcctctgaaagaagctggggcttgctctgacggtctccactcccgtctgcaggcagccaggagggcaggaagcccttgctctgtgctgccatcctgcctccctcctccagcctcagggcactcgggcctgggtgggagtcaacgccttcccctctggactcaaataaaacccagtgacctca

SEQ ID NO: 608757 - DNA, 1835 bp, Homo sapiens
tgaaatggagctgagatggctggagccagggtccagctagaggacaatgcccacgtggcatcttcggggccctggaggagggagtgggaggaggatgggaggggtgaggtgtcagttccccattggtctaggccaggtgttctgtggcggtccccacaccacacaacacacacacatctgcacctcaaccacagactacacttgctgaactggctcctggggccatgaggctgtcactgccactgctgctgctgctgctgggagcctgggccatcccagggggcctcggggacagggcgccactcacagccacagccccacaactggatgatgaggagatgtactcagcccacatgcccgctcacctgcgctgtgatgcctgcagagctgtggcttaccagctttccaggcccatccttgagtccggactccctccccaaccctgacggggcggctttggctatgtgtacatggtgcaagtgcacacgtgtgagcgcctgcacgtgagtatgcgtgtgtctggcttcacacacacacctgctgagcatgcctgcgtgccagtgtctctgtgaggtgggggcctgggagtacttgtgtgattgaatattgggctccagtttttcttaccttgctcttgtggtttaaaatggcacgtgccggccgggcgcggtggctcacgcctgtaatcccagcactttgggaggctgagcggggccgatcgcctgaactcaggagttcgagaccagcctggccaacatggtgaaaccccgtcactactgaaaatacaaaattttagccgggtgtggtggcacatacctgtagtcccagctacctgggaggctgagggagaagaatcacttgaacctgggaggtggaggctgcagtgagctgagatcgtaccactgcactccagcctgggcgacgaacggcgtgagactctctctaaataaataaataaataaaaatagaatgacacttgccactgggcaggtgtgccctggacgagggaccccagtgcccaggcctcacctaccacttcagcatttctttcccatcccccacccccatcccagagagctttgggggctgggggaggggccatgcaacagcctcacaggtgcttcctgctcaaacggctctcttgccactttattttccccagagactctgctcctatcctccccacctccccctaactgagcagcagtcctgagggccctgcctcccagtccctccttgttccagatgtggcaaaatctggcaaaggcagagaccaaacttcatacctcaaactctggggggcggcgggagctgagcgagttggtctacacggatgtcctggaccggagctgctcccggaactggcaggactacggagttcgagaagtggaccaagtgaaacgtctcacaggcccaggacttagcgaggggccagagccaagcatcagcgtgatggtcacagggggcccctggcctaccaggctctccaggacatgtttgcactacttgggggagtttggagaagaccagatctatgaagcccaccaacaaggccgaggggctctggaggcattgctatgtgggggaccccagggggcctgctcagagaaggtgtcagccacaagagaagagctctagtcctggactctaccctcctctgaaagaagctggggcttgctctgacggtctccactcccgtctgcaggcagccaggagggcaggaagcccttgctctgtgctgccatcctgcctccctcctccagcctcagggcactcgggcctgggtgggagtcaacgccttcccctctggactcaaataaaacccagtgacctca

SEQ ID NO: 608758 - DNA, 290 bp, Homo sapiens
  misc_feature (145)..(145): n is a, c, g, or t
  misc_feature (148)..(148): n is a, c, g, or t
  misc_feature (213)..(213): n is a, c, g, or t
acgctcagcggcgggagcggtgtcgccccaagacgatgcttgagaagaaccccgagttctacgccgcctgttccgctgccatcaagcaacgtccacgcgtacacagtgtggacagcttcgtgcacaccttcaaacgggtacacgnagncgaggtttttccttcaacaccaacggtttaccgggatattgaggccggtagattcgaactacggncccacgacttaccgcgtaaacccagcttgcgaattaaacgagccattcccatacccgcaccaataagacggggttgg

SEQ ID NO: 608759 - DNA, 399 bp, Homo sapiens
acgaccccccccttagggggccgaaagcccttaaacaatttagcctggcctgcctggtgacacggtgaccccccaaccttactgtgggttcagggcaggcggggacccccccctggtcaagtttacaaccccggcggtggaggctcccgtggaaaggaggccgttctgcctgctcatgttaggctgttgctcagcatgcaggggccctgttgcgggcacagcccaaggttgcctccccccggtgggtgccctggttctgcgggtgcagcacggaaaccccggctttttctgtacaggaccctggcccctttcaggtcaaaaaacaagcctggagggatgtctggctgcaaaaactatttttatcctgccactttttataaagggctgttttgccatgga

SEQ ID NO: 608760 - DNA, 721 bp, Homo sapiens
aggtgagcgggcatgtgggctgagtacatctcctcatcatccagttgtggggctgtggctgtgagtggcgcctgtccccgaggcccctgggatggcccaggctcccagcagcagcagctgtggcttaccagatgtggcaaaatctggcaaaggcagagaccaaacttcatacctcaaactctggggggcggcgggagctgagcgagttggtctacacggatgtcctggaccggagctgctcccggaactggcaggactacggagttcgagaagtggaccaagtgaaacgtctcacaggcccaggacttagcgaggggccagagccaagcatcagcgtgatggtcacagggggcccctggcctaccaggctctccaggacatgtttgcactacttgggggagtttggagaagaccagatctatgaagcccaccaacaaggccgaggggctctggaggcattgctatgtgggggaccccagggggcctgctcagagaaggtgtcagccacaagagaagagctctagtcctggactctaccctcctctgaaagaagctggggcttgctctgacggtctccactcccgtctgcaggcagccaggagggcaggaagcccttgctctgtgctgccatcctgcctccctcctccagcctcagggcactcgggcctgggtgggagtcaacgccttcccctctggactcaaataaaacccagtgacctca

SEQ ID NO: 608761 - DNA, 211 bp, Homo sapiens
ctcttttaatggggggaaggttttgtttagggggggggctcttttttgggggtaatttgggggtttctcctcctttgggggtaaaattggggtttccggttttcccttgttttttggttttgggtgggtttttgaaaaaaaaggaaaaaagggaaaggaaccttttttttttttggggggggtttttttgttttttgggggggttccccca

SEQ ID NO: 608762 - DNA, 1077 bp, Homo sapiens
tgaaatggagctgagatggctggagccagggtccagctagaggacaatgcccacgtggcatcttcggggccctggaggagggagtgggaggaggatgggaggggtgaggtgtcagttccccattggtctaggccaggtgttctgtggcggtccccacaccacacaacacacacacatctgcacctcaaccacagactacacttgctgaactggctcctggggccatgaggctgtcactgccactgctgctgctgctgctgggagcctgggccatcccagggggcctcggggacagggcgccactcacagccacagccccacaactggatgatgaggagatgtactcagcccacatgcccgctcacctgcgctgtgatgcctgcagctttccaggcccatccttgagtccggactccctccccaaccctgacggggcggctttggctatgtgtacatggtgcaagtgcacacgtgtgagcgcctgcacatgtggcaaaatctggcaaaggcagagaccaaacttcatacctcaaactctggggggcggcgggagctgagcgagttggtctacacggatgtcctggaccggagctgctcccggaactggcaggactacggagttcgagaagtggaccaagtgaaacgtctcacaggcccaggacttagcgaggggccagagccaagcatcagcgtgatggtcacagggggcccctggcctaccaggctctccaggacatgtttgcactacttgggggagtttggagaagaccagatctatgaagcccaccaacaaggccgaggggctctggaggcattgctatgtgggggaccccagggggcctgctcagagaaggtgtcagccacaagagaagagctctagtcctggactctaccctcctctgaaagaagctggggcttgctctgacggtctccactcccgtctgcaggcagccaggagggcaggaagcccttgctctgtgctgccatcctgcctccctcctccagcctcagggcactcgggcctgggtgggagtcaacgccttcccctctggactcaaataaaacccagtgacctca

SEQ ID NO: 608763 - DNA, 408 bp, Homo sapiens
ttaacccctaactgtctgcataatgaattatctggaaatactttgcaagcagagccacagctaaggacccgcgataatcagatccagctacctaagaacagctaatagagcacacccgtctatgtaacataatagtgggaagatttataggttcaggctactaatctaccgagcctgctgagagctgttttcccccaatagaatcttagttcaacttcacatttgcccacagaaccctctaaatccccttgttaatttaatctgtctctacatagaggaacagctctttggacactaggaaaaaaccttgtagagagagtaaaaaatttaacacccatagtaggcctaaaagcagccaccaattaagaaagcgttcaagctcaacacccactacctaaaaaatcccaa

SEQ ID NO: 608764 - DNA, 183 bp, Homo sapiens
ccttcagttttggggggcagcttggggaccccccccttcccccgtcagcctttccccttgcaggatcaggatcctcctcccaggcaatttaaaacctgaggacttcccaaagcaggaaatttgtttttaagcagaaacccccctcccctgcccttttcctgaaataaagaacagctttgcaga

SEQ ID NO: 608765 - DNA, 442 bp, Homo sapiens
cacagagaagcaagacttccgcatcgggggaggatagggcttgagggccgccagcccagactcgcttcacaaatgtgagaactatgacagtccagcgagtaaaggccaagagtaaactccaggtttccccagagtaacgctctcacattttaaaagttcctcacgttcccaccgctcttgtccctctttctgagagatacaggccaaaaggtgggctctccctgtttttttccttttaagcattttttttcaacttgaagtcactgttaggtttcgttgaggaccctaccaacttttaatatttgaaaatggggttggaatatatttgtgtctcatcaaatcagcaacagtactgtgtgtggaaatgccaccattacgggatccgcaacctgtgatttaatttttaaagtaaatcaatggattttggcaatacaaaaaaaaa

SEQ ID NO: 608766 - DNA, 971 bp, Homo sapiens
  misc_feature (329)..(329): n is a, c, g, or t
  misc_feature (656)..(656): n is a, c, g, or t
aatgagtgactaatgcctgtttactctcatctctcttgggcacgcgacgcaaatgacgcggtttcacagaggctcctcgaacgatccgcataccattgtgcgtctagagactgagtgcaatagctccagtctctattcaaaatgcatacacgcgtactcaatttagagtggcgtcagtggtggacaggacaactcatgtaattctccagacttagatcgggggaggaactgaaggctccggagacaatgcgacgtgacaccccgggggcaggcaagagacaggctaggcatggttgacgtcccacagtagtccatttggcacatcatgngaggatcacaatgcctctatgtttgttttaaccgcattgccaagaaggaatctcccggctcttctcatcgagcaagaggaattattcacattcgaagacctttttatcaccaatgttccttatgcacattttggttacacacttaggccatccggccaaatttttacgctacgagggccgaaccgtgagttacatcaacgatacaaagggggggcatttaaactttggaatatgaagatttacccttcactatgaaaaagtttcccgatgttgcaccggtgaattacggggttctttcaccgggctaagttcatcaacaggaaattntccgtcgcagctcattcaagggagaacaaggggctgaaatgtattttaaccaaccaactgatgggttttaaagtgaaaggaataaacgccgaagattgagaattatttaattagccagttttattggaaaggccccaacgtgatttttttactgcggaataactcttttaaacacacatgtgtctgttattctctccaaaagtgtggaatatactcttatttgtccatgcgaaagagagaacttattccaaaaaagaatggaatttaattgattagacgtagcttcaagggttgtgtgtaaccaactatgtaccg

SEQ ID NO: 608767 - DNA, 266 bp, Homo sapiens
tgagcggtaccggcatctagtcatctcaaaataaaaataaggcggtcgcggtccactctagtcactatcttccaacttaagttgactgaatattcttcatagcagtttcacaaagactgggattattcctcagtttccacctgtaagacaagaagggggcaggaggggccaagatagccgattagaaacaagatggctctcatagagaagaatgacaacagcaagcgaattcagcaccttcaactgaaatgtccaggttctcacac

SEQ ID NO: 608768 - DNA, 335 bp, Homo sapiens
tgctttccctttagagtcaggacagcttcctctatgtgtcagccgtgtgtgcaagatctcaggagtacagcccttcctgttctgatgggaccggtgttactgcacatcaggatttggggtaggggaaacgtattcatcccgtgtgagcatgttctgtaggatatctgaccgtgacacgtacggactccttgtgttcgttctggctttggcttgtatgtgctgcagcatggcatctaggcccctaacatgcatgtcgagtttcagcaagcctcatcagacattagaatttcttaggagttaccaccaaaaacataataaacattcatttttttgca

SEQ ID NO: 608769 - DNA, 912 bp, Homo sapiens
tccaaacaataccttttatttaatacttctctatacttggtaccaaatctttttgggcggaattaattttataataaacttttaaaatttacattcttcctctctcttttttttaaaaacctcaagggcctctttaattgctcaaaacttcttttttaaggctatattttaagagattataatcattttaacatctcccccccttgttgtagactcatatcaccggtgggattatccagggatatacacggtgtcgtgtacacacgctaaaaaccacagagacgggaggagagcgggacaatattacacagggcagttgagacatcttggggaccggagatgcgtttaccaaccaacacgcgcaggtaataaaagctctgaaaccctctcccgtgtggcccctataaggccaagacatggtcctttctggggaaagccctctttaactctcttacacccaagagtattcctccacaagccctcttacccttcttctcccctcctcttatacctccaccaaacaacaaacgccaaccagggctctggcctctatacggcttttactctatgagaggaacaatttgtgtgcgccgggggcaaatggatccaaaaccaaagatccctgtggggaacagaaccgagccgtgtgaacgcggttgacatttcattttcacccggatattggttcccgccccggggagccattctctcctcgttgaaaatttacattcccccctgtggccctttcctcctatcttcacttcgaccttcccacatataaagaagagagacgccccaatcaaattttttcaccagtggttaacatagacagtgatttaataatacgatgagggggtggccccgaggggcccggtcccgtaaaaaatcttttgcgcccaacaaaacaacaat

SEQ ID NO: 608770 - DNA, 440 bp, Homo sapiens
ggataacttgaggtcaggagttccagaccagcctgtccaatgtggtgaaaccccgtctctactaaaaatacaacaatcagccgggtgtggcagcacgcgcctgtagtcctggctactcgggaggctgaggcagaattgcttgaacccgggaggtggaggtcgcagtgagccgagatcgcaccactgcactccaacctgggtgacagagcaagactcggtctaaaaaaaaaaaaggctgggaaatttcagaaatataaagagggaaaatttgtgattcactaccccgaggaagaccaaagtgttaactggttattttcttccttggaaggaatactttcataccttcctttaatgagattgaactctgggccaggcatgggggtcagtactttgggaggagtaatcccagcactttgggagggtaaggcaggaggattgct

SEQ ID NO: 608771 - DNA, 488 bp, Homo sapiens
caaaaaattgggaaaagaaaattttttttttggtgaaggctttggtccccaaggggccccctaaattaaagtttggagggggtggcctttttttcaggcccctcccctttacccaggcgaaaattatcaagggggccatttggggctttgggttaaaaagtaaattaatataacccttgggttttattaaaaaagaaaaggttttcccctttgccaaaagattgccccaaaaccaaaaaactttaaaaacggggggtaagggccttcccccctttttggggcatattacccaaaagggttggtaaaaaaaaaataaaaataacccggttaaagaaacccttgttaacccattgccagggcccccggtaaaaaaccctttttttggttttttgggaaaaaagccaaaggggtttaaaccaaatcccctggaaaaggtgggatgggggattttggggaaaattttcccaaaaaagggcaaccaaaaccca

SEQ ID NO: 608772 - DNA, 283 bp, Homo sapiens
cgcatgtggcaccagggatattcaaagcctatccctcttctgatgtcgaagaaaggcagacagcatcttgggcagctcccagcagatcaggggcatctgcgtactatgcagcacagttacccagcctttgatgggtcttccatcgtttgtgctagctcttagcgtggacgcaccttgccttagctgctaacagtggttagacatcttgaaaagcttatgtaatcctagagacatatttttggctattgggatagccacacaagatgtacatatgtcaacacct

SEQ ID NO: 608773 - DNA, 106 bp, Homo sapiens
aactcccagttcacatatggagaatcagctcactgctctctagacacgtggcgttggtgaacggaccatgcttccgtagctctgacctgagcagcaggtaaagaca

SEQ ID NO: 608774 - DNA, 758 bp, Homo sapiens
  misc_feature (67)..(67): n is a, c, g, or t
caagcagtgagagatttatttcctataaagggtggtagcctgcagggttgtccttctgacaggctgngaagcatagcctccagccagaagccagaaacagactcttcaaggaggaggtaaagaaaatagcaatttatgctgactggaatggccaaatacatttatttaataagctccaggaggagtcatgaatatttatggaaggagaaatgcatgcatgcacaattgagtttctggcttcttcatgggtcccatgtacaaaaaatggcagtgttagcatgatcccaggtgcagttttcagccctctgacattaaaaggtgaaacagaggacatgaaaactcgctctgtgcatcctctgtacgctggccagaacctctctgttgtgggtggtctcttatcaggcaagaaaggagaggttgatatcggtagtggaggctttgaaagggctggtttctgttaaatccttagggaagaaagcctcatcatggttagcaaaggagtgggtttaacgatgtgtatgttaacccgatcatccatctagcaaagtgagaactcagtttgtgaaagttactctgtggtcccctcagcaaagagtggttctgtgcagtcagtgggagcttataatttaaatttggtatcaatggtatgggaaagaagtagtgtgttcatgggagtgatttggagaaacctgggtggggtaagggggggttttgggggtgtgttttgggcaagacgtgggaaaggtctttttcgaagg

SEQ ID NO: 608775 - DNA, 382 bp, Homo sapiens
tgtcctgggcgtactgtaggaatgaggaacctgactttactatataaatgaagctgcagtcagagaaccccattggatacttttttttttttggacaatggagtctggcatgatgcctaggctgaagtgcagtgccaagatttgggttcatggcaaccttatgcttcccaggtccaggtagattctcttttctaaacctcccaagtagctgggataacgggtatgcaccaccacggcgcgcggatacattttactacttataagtagcacgcgggcttgcacccatatggacgggtgggtctcgaattcttgacctcgagtgatcggcctgtccgggcctcccaaagtgcggggactacggggcatgagcacccgtgcccgg

SEQ ID NO: 608776 - DNA, 829 bp, Homo sapiens
gggaggagcactttttttccaaaaaggaacagaacgtctctactgggttcttttcctcctgatattcagcacttagagtagaacagaaactactcgtcctggccacattagccgtggattacgcaggtgctgcaagcctttgccactgtatattactttttaacagggcagaaactgcctgacaggtgaagactttggaccaggcaatacagctgggacaggtatcaattccaaaccagatgaaagacccaggctcagccactgtatcgcagaatcatggatgaattctcaagcactactttcttcaaagaaccatgtctcatttctcacaccagccagcagcccatggcaaagctcataggatgataccatggctctggatagctgatgtgcaccattatcacatacggatcctacgaggaacagcttaacatatccctgaggggtatatatctcaaggctaatctacctgatgagttggttgatcgcagttccatagggtggttcccatcggctacgaaaacgtggtacacatgccctaatttggcgaacaacccacccacactaataccaagcaaacacacactcccacgttccacgatcacatgccctggaaacacctggcgcattactaggggaaaattaggggacggacacttagttatttaacactcaaacgcaccagagcacacacgggtcgaccgcaacgcaatccctgcaacgccccacaatttatcaccgaacaccaaaacgtctcacccaaggcgtatttgacccccgttgcacattcaacgaccttactaaccaagcatcttttcgtgtaccataa

SEQ ID NO: 608777 - DNA, 329 bp, Homo sapiens
  misc_feature (96)..(96): n is a, c, g, or t
  misc_feature (185)..(185): n is a, c, g, or t
agcgctggcagtacggatctgaacaaccggaatggcaggtcatcacctgtggcacggcagcgtcggcgtcagtgccttatggttatggttttatgngattgggcaattgccgctggcaatggcggtgacgctgaattatatgtcgccaatctggatcgccgctattctgctggtgagcgcctggnggcgcaggcagcgcaatatggactggcgcctgatggctgcgattatcatggggtttggcggtgtggtcttgttgctgcggccaagcatacatgcagaccagtggatcggcggagtggttgttcagatccgttactgccagcgct

SEQ ID NO: 608778 - DNA, 170 bp, Homo sapiens
ggacccccaacgcggagccactgagtaccggatacaagtgcagtccctcacttgtaagtggtgcccttaaaggaaccaatgagtgcctgtacgccagatgcgtgaaatgcccgagaactttgccgttgaagctgctaactaccaagacactattggccgccagcaggatg

SEQ ID NO: 608779 - DNA, 314 bp, Homo sapiens
ggaaaacagtggatcctagactcattgcccagagagagactatgaacattccaaatgaaggagaaacagttgatcctagactcactgcccagaggaggactatgaacatcttagcaagtctcccctcagttgtcctagaatagatgtctctacgtagttgataaggacatacattcaagttttgcagctttttgttccactttacattttaggttgacgcttacactcccattcaggatcttcagagacatgtttagagacagaggatatccaaccacagtctgtttacctctcccctaattgctgactattgt

SEQ ID NO: 608780 - DNA, 449 bp, Homo sapiens
gacttgagagttgagggaacagcacatatggagtggagcagagctggatccaggtgccatgggcagttggagaagtgcacggcagagtagctgaggccatggcgctggtgccctgggtgtctgtccaccttacccttgactagttcaccttccacacattatgtagcctggcagtctccatcactgggcatgttcctaaaaatttccagtatgctctcctgtccatcagcagctctccattccctgttctgtgttctgtccctcagtcctggtgtccttccctcaattccaaggccagtcctacctctagacattttgatttgttatccaatacagttccttggcttatttacaccaggtgagtcaggtttcgttcgtctgattgtttgtactattttgtcacttacaacaaaaaaagccccgaaaaaccactggaaaaatacctggta

SEQ ID NO: 608781 - DNA, 100 bp, Homo sapiens
ctctagaggatcttaaagggagtcgggtagagaaaggcagcagtgctggtcaagcgggtcgcttggggggtgagcagtgcaggaggggcgaggggcggga

SEQ ID NO: 608782 - DNA, 252 bp, Homo sapiens
tagtagaaggccgtcatctcacacatgatatgtctacaaggagctaaacatgccagtggatcccagcaaaacacatggacaaacaacgtacaaataataatccgtgtatctagtcaaaaggaacatataatcaaaaggtcggatcgtagctaaggttggctagcattcttccctctttaatatcaacaaacatttaatgcacaggcccactcatgtgccaagccaatggtacatgatggtgaatacaacaaa

SEQ ID NO: 608783 - DNA, 312 bp, Homo sapiens
acctcataggttcgtcaggcctcggtagcacgcagccaggtaggatgcgggcggcgggagtggtggagggggtctattacagagtcggtgcttgactccactaacaagtgggttactgtattcgtttcttaaacctattccttcaagtctggaagcctgtggagggcctgtcacctaaaaggcaaggatcccttgtgagcaccaggcagacaaatgtcaaaccacgaccccaggggctgcactaggcgtcgggcccagaagcgcctggccatccagccccgagtctttcatgcctctcctgcgaacctatga

SEQ ID NO: 608784 - DNA, 133 bp, Homo sapiens
  misc_feature (4)..(4): n is a, c, g, or t
ctgntggagttgcaaccaacaggatctggtgattcgaccccagcttttctttccaggccctcatcaccttgatcctcgggtaacctatcctgctccagctgcactccagcctgggtgacagagactctgtctc

SEQ ID NO: 608785 - DNA, 169 bp, Homo sapiens
aataaagtataggcgatagaaattgaaccatggcgcaatagatatagtaccgcaaggaaaagatgaaaaaatcataacccagcataatatagcagggactaacccctataccttctgcataatgatttaactagaaatacctttgcaggagagccaagctaagaccccc

SEQ ID NO: 608786 - DNA, 156 bp, Homo sapiens
agactactgaatcatcattgatctaacacacaaagcaagcgaaaaaccttatgatagttaaatgtttgctggacggccctgtcagacggagatcacaaccgcgtgatcaattggatccaacctttatcacgagtatttagtatgaaaataatgtta

SEQ ID NO: 608787 - DNA, 310 bp, Homo sapiens
  misc_feature (1)..(1): n is a, c, g, or t
  misc_feature (261)..(261): n is a, c, g, or t
nggatacagtgtgacattttaatacatttacatattgtgtaatgatcaaattaggataattagcttatgtatcacttcaaaaacataatttctttgtgatgagaacattcaaaatcttctagtattttgaaatacataatgcaatattgttaaccacaatcaccctactgtgcaataggaacaccagagtttactcctcctttccatctgtaggcttcaggacccattgaccaatctctccccttcggcccccaccacccnccccccgctggtcaccactctcctcccctccccggcagggggcttggaa

SEQ ID NO: 608788 - DNA, 960 bp, Homo sapiens
gagcgggctccacgctgcggcagccccggcggccccaggtgcgcggcccccgccatcccggccccgccggcctgcgccatggatggagggccctctgcctgggcgggctgctccagccccgaggatgcgatggtgacggagctcttaacgccccgagggctccagtatcgcttcgtgagaacatcggcctgaagggcccccgtgaaagtacgaggaggacgagttccacgatcttcaaatgaagcgtacctgggcccggcggtaccccaagggaacccgtacctgcacgcgttcaacgcccgcagctggggcgccgacatgcaacggccaggtcaaggcgaagctcgcggggggcgacagcgacggcggggcagctcctcggggagtaccccgggatcccagagctcatctgcgctgcgacgacgtcgcgctcctgcatggaccctgcatgccgcccgcctgcaaccgtgcacattcctgtcctcgctgctaacccagaagcaccagaaacccagcgcggtagtatgccccatgtgagcgcctaggaggtccctgcgaaacggaagccataccacacaccaggattcgtccgcatgatcccagatatagaaatccaggaaagcagtgtggtagtaactacaaagtacactaattccggacagaagccaagcttcagcggcaatccttcttgcttccagcgaatccctggtgcacagttcccgactcgtaccccaggaacctagacggcatgccttcctgcttggatcctcttcagaacagatacaaaccccaaaagggctgaatatgccccaattgaaaaagagagggacccacaaaagtgctaatgtagtagtacataattatagcagccatgaaacctaaacacccaccccatgagaggatctcagaaatcagatcttcccatactatataaagccagaatgtccaacacccaacacc

SEQ ID NO: 608789 - DNA, 243 bp, Homo sapiens
gagtagctgggattacaggtgtgcaccactacaacttggctaattggtatacttttagtagagatggggtttcaccatattggccaggctggccttgatctcctgacctcaggtgatccgcccgcctcggcctgccaaagtgctggggttacaggcgtgagccaccgcacccggatgagaatatgtctatttattaagataaagatttgagttagatgtttgtaaaacttgttattaatgtca

SEQ ID NO: 608790 - DNA, 625 bp, Homo sapiens
  misc_feature (173)..(173): n is a, c, g, or t
  misc_feature (350)..(350): n is a, c, g, or t
  misc_feature (372)..(372): n is a, c, g, or t
aaaaaatatgtgaaaaaaacctgccaggaccagaaaaccccatacaaaaaaacttggagtgtttaaaagcattgttaaatcccattatgaaagatttttttgaccaatgcccctgaacccttataaattaatataaattcccaattcttgtttaatcccacaagtaaagattnttttgacaatgaacctgagacttatgtaataaacaagattccaaatcctgcggaacacattggtgttccaggctcttatcatcaggaagttctaggaaggcaaagacacccacaccaagacatgtgctcctacagaatcggaacacgcactctctgcttcacaaaatgcttctcaantaccactaggccacatgacatntgcagtcccaccatcccacttctcttatgttgccttacagtttttctaacaattaaaaattgcctgaaattagccaggcatggtgaagcgcagctctagtcccagctacttgggagggtgaggtgggaggatcgcttgagcccaggaaggttaaggctgcagtgagctgcgttcacgtcacggcactccagttgggtaacacagcgacaccctgtatctaaaaaataaaaattgccagccgggcacggtggct

SEQ ID NO: 608791 - DNA, 827 bp, Homo sapiens
cacttgatactatgaggtgctactattaagatgctcaggagatctgaaaattaagccaggccatatcgtgagtgaaatcccccatgtacgtttagaataccaagaatttattttagggtcagttggcttgtgatggggtcacacctgattgctttcaggaatatgtcgggagaggctgacggcgaggatgaaatcatttgaatgtcctgtggcagtgggtgatgggttgaatgtgagacgtcaatattcaagggtcaagtggatgtccatgccctgagtaagacatgtggtcgatgatcttcggatctgaataaaagtgtatataattaaattagaagacaagtagtttacaactaatgttaggatcaaggttggttctcaaaactcccatgacctcagtagtagaatcgcacccagcctcggcacatcctaaagttgctggcaattacagggtgtcagccaccaattccgcagcccaaatcctttacctttataattggagtgtggagttcatgtgtatgtttaactagtcagcgaatcatatgattgcatttcaactctactgtctagatgtctctttactatatgtcccatttgtttgtgtttgccccctgggtggtctccttctaggacttcctttgtgtgaatcaggaatcttctacggcattgcatctgttcatgaatttttgttatactttgaatgtgtgtggcgagggtggagtgttacatggttgctctggagcaagccttctcagtgaggtctatagagagaattaagccctaactccttaggcatcaatatttccggagtgaattactctcttctg

SEQ ID NO: 608792 - DNA, 187 bp, Homo sapiens
tgcaggtgactcgtaggaggacccgagtctcgataccgtggttgagacaggaataagaacaagcgagtgagcatcaataaagatgagctgaagtcgacgtcacaaagctgtcgaacaccgttcacgaattagtgtagcaacgagtaactaaggggcctctgcaactaggtggcagaatagagacaca

SEQ ID NO: 608793 - DNA, 334 bp, Homo sapiens
aggtcaataacgtgccagccaccgaggtcacacgattaaaccaagtcaatagaagccggcgtaaagagtgtattagatcaccccctccccaataacagctacaaactcaccatgagttgtcaaaaaactcccagtttgacacaaagagtcagactacgcaaagtggctttacacatatcatgacaccacacaatcagctacgcacccaaactgggcattagcatacccccactcatgcttcagcccataaacctaccaacagttcaaatcaaaccaaacactgctcgccaagtaacactcacgagcccaccagctttaaaactccaaaggcacc

SEQ ID NO: 608794 - DNA, 172 bp, Homo sapiens
  misc_feature (118)..(118): n is a, c, g, or t
aaacaaggaaagtcaccaacaaagagcacaaaaatgtggaaaatgtgccactatattgatataaaaaaggatacttgggttaggtctgagggttgaaacaagaaggcaaagtgtctcncttattcaacctacagctgggaacctagtgcatcgaggtgactaagaatttttt

SEQ ID NO: 608795 - DNA, 943 bp, Homo sapiens
caccattccaaataacttaatttgggtgcataatcgggcgccaagggcgccaaaccattaatgagatccgccagtatgtactggggccccaagatcaataattagccaaccccaggtgacaagtggctcctctggtaggcaggttactatcactggctctgctgccagtatttagatctggcgccagtatctaatcaagtgctcaggctttcctcatgagaagggtgcatggggtgcagccataagaacaagtgtagggttccctcaaataatcgcccttatctcgctgttctctcgcactgattccgaacttgtgtaatgttctggtacagtgattccatggtttgaagattaatttgtataggtgttcagtgtatctacacaaatttatcatccagcataatgaatttaaaaagtcacatttctctgttcatgcatgttaatgcatggtgagtcctatatttagttttataagcttttccctgttttttagtgtttgtgaagggtgtatcataggtcgtcaatgaattttatttcttgttggtcgataacgaaagtgtaggagtggcaactgttaatagaatttcagttcagttctgtcatgtcgagagtttatcagttcatgaaaccggatcgggctaatcgttcaaacttgaccaagccctttgctgccttggcctctccaggatgtctggcgcggctgcggttggaattggtccctgtggcggcggctgagtgcggaccggcgttttctgagccagggtggccgccacgtgggtccagttaaagtaacccgcgggggccgggttttgcgactgccctgggacatcgggtaccgccgtctggggggggccgcctccggtgggacggtctttcggccgcttccccgaggaggcgggggacaaagctcctgttggggggccccgcctttttctgaattccg

SEQ ID NO: 608796 - DNA, 318 bp, Homo sapiens
gacctagaggatcccctgacatgctgataacggaggattgtgcacatttattttccgaaaagctgtggcctttagatgggccattttttgtatatcgcccttttggggtccattctatgggggatgctggtcagttgccggctgagcgtaacgggtatgtgacctttgggtgcttatcccggtcgatccggattaaccataaggtgatccggatttgggctgcaattctggatgcgatgccaactgccagactgattattgacagcggtgactttaaagatcctcagatctgcgaggaaatggcggctcgctttgcag

SEQ ID NO: 608797 - DNA, 123 bp, Homo sapiens
gcatggtgcaggcggtactcctcacgggagcatccgctccagggccaaaacgagagcatgggcagctgaatagcagacactcttccttggtcatgccttcccggtaggtagcatcaacatagc

SEQ ID NO: 608798 - DNA, 140 bp, Homo sapiens
tctcagcccctccctgcactgagacgtcaaatggaaggggctcctggtcacagcatcacttttaaacttctggaacctgcccaccactgcccaaatctccatctgtagccctttccccatctgccattaaaggagctgtt

SEQ ID NO: 608799 - DNA, 2413 bp, Homo sapiens
  misc_feature (2199)..(2199): n is a, c, g, or t
attccgtcctgcgcggctgttctctgtgagccagcgcttcttttatctccggtccgccttctctcctacctaagtgcgtgccgacacccgatggaacgattcgactgagacatggacatgagccccctgaggcccccagcacactcatctttatcaggtttgttgaacatacacagtgccagcacacaagcattatccactatcacagtgtggcatcatgatagacaacatgcatgccacccagattcatcgtttctcaagaacacaggctcagcatatcagcgaggctcggctgcacgaggcatcgcaggtatgcaacatatgtactgaatgcacgtagtgacacactgacattaacagacaaaggacaaggagtcacaaagtttacacagattaaccaaacctgtgcccacacgtctatgaaacataatgtacgtggtaccaaggcaccaaacgggatattcccccatatgggcggggggcaatactgcaacgacttccaccacacacacatcggactggggctccattcacagcgggtctgaaacgtcaggtgggcttgcccgtgggaacaactgatgtctatacctaaacgatggggaacgcaagaccaccgtcacagaagcagacacagaaggggcagggacacggaaatgccacgcaagccgaaggacaagaaaatgaacagggcagtgctgaggaacagcacgagaggcacccggcaccaagacacgaaacgtagtccagggcaagacaggacggggagcactaggccccaccaggcaggcggtgggcgacgcgaaggggcatctcaacagagacaaacaggcaggaaacacagcatcgacaggagcgacaaggacaggcagcacggacacagcggaatgaatggacagcgggggcggagacagcagccaggacgagcaggcagagcacagccagggagcggaagacgcaacgacggagggagagagacgaaagagggaagaggacgcaacagggagcaccaagacagaacaaacagaagaaaggagcagacaagcgcagaagagcaggcgaccgcggagaaggcgtgcgcgaacggagagagcgcacggcagccgagacaagaaatacgagacccactccagcggagccacagcacacgcaggcaacgacagcggcaccgccccgcccccacgaggaggacgagcgaggagaccaaacagaaaggggaggcgcgagcacgacacagaagagggccagacgcagacagccgcggggacaggcgagggagaagacgagcgcggacggagagagcaagaggcaggagaacagagcggcgacacgcgcagggcagcagaagacagagaggacacgaaagaagacggcgagagaggagaagagagagacgggagagggagggagagacaaaaagaagaagagagcgaagcgggagcggagagggaaggcgcgacgagagagagacaaagaggaagacgggcaggaacggaacgaagcggagaaaagaaagcaaaagacgaagcgagagagaagagtgagccacgacagagacgacgagagcgagcgagacaacagacggacacgaccagagcagcgaagaagagaggacagcggagacagcaaacaacaaaagcagcagcaggacgaagaggccaacgaaccagagacagggaagaggctgacgacgagagaccagagcagaaggagaagacaccgaagaaccagaagaaggaagaagagatgcagcaggagacgaagaagaagcagacggaaaaggaaaagacacacgagcagaggcgagagaaagacggaggagagagggataagagcaaggaagccacacaccaggcgcacgaagggagcgcacgaaggcaagcaaagaagacaacggagaagacaaggacgagcgagcgcgggacacgcgcagaagcggagcgacgagcagacgagagagcaagagagcgagacaaaagcaacaagagagaacacagaaggagagagagaaagacgacgacagcaaagagagaatggacgcagagacagcagcagaagagacgcgaggcggaacaagacgcgccaggagcgagcaagcagagaagacgcgagagacacgggaagacaagaagtcagaaggaggagaccgcagagccagagcgacgcgagcaaacgagagaagagaggcacgaggaacagaangcgaacagcaagaggccgagatgagcagacaagagacgagcgagaagacgagcaccaacagacagaaggacgaaagaacagagcgagaggaggacagagcgggggtggagagaggcgaggcagagcgggcacgagaggagaggacaggcgaggggagcccagaaagagaagaggcagaggccagagaacagagcgagcaggagcacaggcagac

SEQ ID NO: 608800 - DNA, 174 bp, Homo sapiens
atctacaacaactcaaactggatatcaacagatagaaattactatgtctgaaataaatatgtactggctggaactagcagatttttagtttaatgagggagagtcttgctcttgttgcccaggcatgtagtacagatgatcgaccaacgggataccgacgctcgacattcgtaa

SEQ ID NO: 608801 - DNA, 116 bp, Homo sapiens
gttcagaacatgcagagtgtatctttttttaaattctccttccgtttctaaggtatgcgggattgtcactctgtaatatgacacactctttttccttgggaaacactgtatcagct

SEQ ID NO: 608802 - DNA, 303 bp, Homo sapiens
acgtccatctcgtcctcgatgctgatgctcttggactgctccgggtcactcaggatctgctccaccagctctgtcccgtggtccgacaagtgacgactgggagatgccctgcacgtcgtcttaatcggggtgctagtgtcgtgcggcggtacagaacggtccaggtgaggtggtcgacggcatcctgcttgtcctcgatggtcttggttacgatctcgtcattgaagtgctcatgcatacggtgctccaggtgtgattctactggcagtggctcatataagaacttcttgaagaactccttct

SEQ ID NO: 608803 - DNA, 196 bp, Homo sapiens
  misc_feature (12)..(12): n is a, c, g, or t
  misc_feature (114)..(114): n is a, c, g, or t
  misc_feature (118)..(118): n is a, c, g, or t
agttcggcacgnggcagttcttcatgctccagacgtacggccagcagcttcagaaggccatgctgcagctcctgaggacaaggacacctacagctggctcctgaaggacgtgantacnctagcgacaacgtatagttcctgaaggagcggcttgcacggctgacgcaggctcggcgccggcttgccagttccccgg

SEQ ID NO: 608804 - DNA, 138 bp, Homo sapiens
taagacgcgatccctgctgtagctatagtttgagatgcttgacttcctctctattgctgcttgttcactatacaaattgtctccgaacaatctacagtcaaaaagtgcactcccgattgcttcatagtctcgggctcc

SEQ ID NO: 608805 - DNA, 160 bp, Homo sapiens
ttggttggacgacggcctctccaatagcgcgaggcctttcggtcccgcgctttcaccctcaggtcgtacgcggtattaatccggctttcgccgggctatcccccactactgggcacgttccgatgcattactcacccgttcgccactcgccaaccaatat

SEQ ID NO: 608806 - DNA, 164 bp, Homo sapiens
cctagggagcctagcaactccagcctgattgctatgccctcaaaggcccattatatcacaggaatttaaagctactttagcggtcttcgaatcgaagcaaactctataaatgccataccctcctagatttgccaatcttccgttcttggcgaacttttgataaa

SEQ ID NO: 608807 - DNA, 352 bp, Homo sapiens
agtgcaatcggagaagtccctactgagcagagagcagcccaggctgggactagggcccacggtcaccccaagggtgtcttggttttccagacaccactcgaatgcctctccaaaggctggccttcttaaagctgggccagggcacaggccctaggagttgcaagctggctgggctgagtgctagagaccaagtgcatgtcagcccagcagaccactgccctcctggagttctcaggatgaaccattgtcgtcctgagtgtgcagagcttctcagggcacaaagccctcacctcctctgccttcccagaggtcataaggtgcccaggccattagttggatatacagaggcatg

SEQ ID NO: 608808 - DNA, 1194 bp, Homo sapiens
gtctcagaaaatgtgggttctgtgtgtggccatgcatttcatccaagcacaagcagggcacatgcttccccttgtcaacctttgcagcctgtttctgtcatgtagtttcaaccaagtgctcaccttctgcgtgtcaaactaaaggtcagactacttatggggcaaatgcagcacacatgcaaacatccagcgcacactgggcttgtcagcacaggcacacatctcaccttttcaacccaggcctgcatcttggcagtttgcagccccagcacaccaacacccaactccaacaactcctccatccattagggggcgtgggctcaaactccatcaatcccacgcgcccaacacacagcccccatccacggcacccacccccacacaaacaccccacgcccacccccacacagcaccaccacaaaccacccacccccaccccccccccacccccacaaccccccgcggcccaaaccgcgcccacaggcgcaccaaatctcccacgaccggccaccaaacggccacacgccgaaccctcaccgccccgcacccaagacacactcacaacccccacccccacacggccccaagcacacacccgtgaggcccccccccaagaaacaaacaaccccaggacctacaccaacacccacggcggcccaaaacagggcacaccgaaccaacaaccgcacacccgccacccggcccctcaacgcacaatgaggcgaacaacaacccacgaccacccacagctagcaaccatcaccaacccacccgcaccccaccccaccacggggccgcccccccccacctgcccccacacgcccgccccccaaccacgcccgtgacacaacgggccacacatggcaacacgtgccccccccctataccccccgcacctgtgcaacacaaacaaagcgcccaccacacaaccacccccgcaccaacaaggacggggcaacgctctagacaccgcacagatacaacaccctcgggggtcacacgacgggcaacgacccaacacgccgacgccgcctcacacccgtccccccgctaacgacggccacccaccgcgcggcggcgccgccagcgccaatcgacgacccagttggccatacccgacacccgtcgcgactcacaccaccacccggcgcccccaccacggacacacgctactaccaccagaccaacagcaac

SEQ ID NO: 608809 - DNA, 365 bp, Homo sapiens
atgatttgtgtctcatccgggttcccgcatccagtagaatctctatccattgtgagcggctacacaatgatgttgtctccactggtttcccacaagtaagagttcagatacagtctggagccccgtgatcacagtgttctgtgtgtcaataatggcacacccggtaatcctgtcaatgttacacagaaaaagaacctggggagtgccgggctatttatgcgagcaatctatgttttagatacaaatctccgctgtttatcccatgaacctcttgttatagtgtgaggcgtgagaaaaacaccagaggtggcgagccacacagggtgaggtttgtgcccatagcagtagcgcacaaggtatatatg

SEQ ID NO: 608810 - DNA, 300 bp, Homo sapiens
  misc_feature (73)..(73): n is a, c, g, or t
  misc_feature (91)..(91): n is a, c, g, or t
aaatttaaaaattagttccttagtcacattagccacatttaatgtgttctatagccacgtgtgactggtggcnaacatattggacaacacnggtaaaagatattttagtcatttcagaaagttgtatagccctgtctctacaaaacactaaaaaattacctgtgtgtagtggtacatacccgtagtcccagctactcagaggccaaggtaggaggatcgcttgagcctgggaagtcaaggctcctgtgagccatgatcgtgccactgaactccagcctgggcaacagagtgagaccctgt

SEQ ID NO: 608811 - DNA, 541 bp, Homo sapiens
  misc_feature (71)..(71): n is a, c, g, or t
  misc_feature (83)..(83): n is a, c, g, or t
  misc_feature (108)..(109): n is a, c, g, or t
ggcggccaaacacgagtcctccacacggcaaatacggcgacgcgcacaggtgtcggcggccttgatccgcngggccgcacatnggccagctcgccaaactcacccaanngggcctcgatggcgtcatgcagatcaatccagcgacgacgagccagtggactgaggctcaacgttgaaagcaacagagcaccgtcagccgaaagtgaccaaggctgatgaaaaagagccgaaaggcggtggtgatatcgcttcagagcgggatcgttggacaagtcgacagcctggtagctgcgctgtccggccaggctggcgggccaggtcatcaggcagcgaccgaggatcccttgcccctgcagcaacgggtcactgagtaattgcatggccaagtacggttgcagcatcaggtgcaagctcaggcgccggtcataagcccgtaagctttccccggccatggggcgcgcacgatcaattggactgccatcccagagtgaggacaaggtcgtgaccgctttcaaacggttatcccgactcaggtggtgtg

SEQ ID NO: 608812 - DNA, 1084 bp, Homo sapiens
gcaataaattgcggcgagaaggaagcgaggagggcatgtacgtgctgaggtgtgacctgtaccgactttgacaacgatcctcatgaccgtcgaccgtgcttagagaagtctgagcaggtgcagggtgcccaggaagcagttcaagaactttcagatctgaggtgcagaatgggccgcatacaggtctggcatcggttctggaacctggaggcttccccgagcttgggagaactacatgagccacctcaagaagcagatcctgcgcacggataacatcagcttcatgctaaaacgctgactgccagcccaagccccgagaaatctccaacctgctggtggctactaagaaagcccaggagtggcaggccgtcgtaccccgatgagccagctgagatatcgatcggatcctcaagaaggatctggtgcagggcgagcaccttggcgagaggcacgagaacaaacatctattctgggaccctgatggattacaaggatgacgaaggaacatctgaagagaagaagataacagtgatcgtcaaagtcttagacccgagaccacaggcatatttccctggacttacccagaggcagccagcatgatgagaacaggtctcccaaaaacacatcgagtacctcatatggagtcatggagtccagacgcacagaggacaatatcatggagggaagcagtaaagtggaacaaggaggaccaaatgaaatacccaaccagtgcaaccaggcaaaagacgaagaccagtacccaaacaccatgagaaaacacaccgaaaggccaaaaacaggcatggccacaagtgacccccgaagacacaactcggacaggagtaacacaagcaccgcgaaggaccagagggcgaaaaatggccagagaacacacacacaaaaagacccacccacataggacaccagaagacaggagacaataagagaaacagcaacaaacagagggcccacatgagaagacaagagcgcacagaagaacccacgcgagaagcacccccaatcagaagagagagtcagcaaagagacgactagcacgtgacagagagagagcacaacacaacag

SEQ ID NO: 608813 - DNA, 330 bp, Homo sapiens
aaataggttcatgaagcccttaagtggtggttttgtccgtcaaacgtttaaaactttaacattttcaaagtgccccggctgtgtacaaagacacatgtaattggggttgtaccggttgtttttttgtttgaacccttgaaaggggtttattttaacgttttttaattttaaaattttaaaattttgtttaacaaaagcttgttttaaggtactgttttcatttccttaccgaattgtttttaaaagttcatttgttgaaaaataaggatcctttttaattccaccgcatttgtactgttcccttttaatttactggaaattttaaaggga

SEQ ID NO: 608814 - DNA, 260 bp, Homo sapiens
ggcagatcccacattgtatgatataacatatctattaaaaacatgcctaatctggccaggcgtggtggctcactcctataattctagcactttgggaggctgaggcaggcagatcacttgaggtcaggagtttgagaccagcctggccaacatggcgaaactccatctctactaaaaatataaaaattagccgggtgtggtggcgggcgcctgtagtccgagctacttgggaagctgaggcaggagaaacgcttgaaccc

SEQ ID NO: 608815 - DNA, 106 bp, Homo sapiens
acatgaccatccgcatccgcctttattgacaatgagaagatggagtcccggacgcatctatccctctttggcccttacaggtttgccacgagagtgagacgccttc

SEQ ID NO: 608816 - DNA, 375 bp, Homo sapiens
ggccaagggggggggttcccctaaggtcgggggttcaagaccattttggccaaggtggttaacccccgtttttactaaaaaaacaaaaattacctgggggggggggggggcccctgaagtcccagcaactggggggggtggggcaggagaatcctttaaatccaggaggggggggttccagtaaattaaaattgccccccggcattccagcctgggggcagagggaaaccccgtttcaaaaacaaccaccaccaataccaccaccaaaagcaagggccaaacaaagcccccttccctttttaccccccccggatttttttccattaacatttaaagtccctggggcccccgggcctttttgtggctttgatttta

SEQ ID NO: 608817 - DNA, 236 bp, Homo sapiens
  misc_feature (137)..(137): n is a, c, g, or t
  misc_feature (140)..(140): n is a, c, g, or t
  misc_feature (154)..(154): n is a, c, g, or t
  misc_feature (158)..(158): n is a, c, g, or t
  misc_feature (160)..(160): n is a, c, g, or t
  misc_feature (169)..(169): n is a, c, g, or t
  misc_feature (176)..(176): n is a, c, g, or t
  misc_feature (181)..(181): n is a, c, g, or t
cacaccatgccctttgtcaggttaccatgtacagagattacttggagagcctcatgccgtctctaccttcgcacactggtcaagtatctgctgagcttcttcgccgcaaggatgcagaaataggctgagggtccatnggnaggaagacacaatnaggnantaggaggtnggggagnaaagnagacagactttcaaaattggattaggcacttgggagagatcaatttcccacatca

SEQ ID NO: 608818 - DNA, 193 bp, Homo sapiens
tggcccgagtaattttttaagttgaacaaaaatttgtccttttttttttcaggttatttgagttcattggaggggggggttgggcaaaaaagttagggattttttgccatttttttttttagatcaggggaaatgtttaagttaaaaaaatttggggggttttttgttttgttttgttttgttttttttggga

SEQ ID NO: 608819 - DNA, 453 bp, Homo sapiens
  misc_feature (36)..(36): n is a, c, g, or t
  misc_feature (331)..(331): n is a, c, g, or t
  misc_feature (351)..(351): n is a, c, g, or t
  misc_feature (378)..(378): n is a, c, g, or t
  misc_feature (398)..(398): n is a, c, g, or t
  misc_feature (430)..(430): n is a, c, g, or t
aaaacagctaatgtttgttggcacatctgcagacanctattctaaatgcttaattttaatcatcacaacaaccctatgaggtagatattgttatccctgtttttcagatgaggaagccgaggcagagagaacttaagttgctggcccaaggacaaacagctagtaggacagcagtcaagggcagcgtggcttccatgggtgatgtgcttgggtcagagatctggaatatatagggacttaggattttgttaggactatttgaggctgttaggacttcattttaggaccaattgggtaccccaggatattttttaggtaggattaaatttcntaggggttaggtagggaccntaggacccacatgttttattaaggctngatatcccgtttgatggggnaggaaatggggttttttcccagtttttttttnccgggtcccccttttcccaaccc

SEQ ID NO: 608820 - DNA, 102 bp, Homo sapiens
cttagaggatccctatcttctcccatcaggtcagagcaagaaatatggcaggattattccttagaatataacactaaattttctttagagttatccaagatg

SEQ ID NO: 608821 - DNA, 904 bp, Homo sapiens
  misc_feature (81)..(81): n is a, c, g, or t
  misc_feature (91)..(91): n is a, c, g, or t
  misc_feature (132)..(132): n is a, c, g, or t
  misc_feature (137)..(137): n is a, c, g, or t
  misc_feature (164)..(164): n is a, c, g, or t
  misc_feature (168)..(168): n is a, c, g, or t
  misc_feature (172)..(172): n is a, c, g, or t
  misc_feature (189)..(189): n is a, c, g, or t
  misc_feature (204)..(204): n is a, c, g, or t
  misc_feature (206)..(206): n is a, c, g, or t
  misc_feature (217)..(217): n is a, c, g, or t
  misc_feature (219)..(219): n is a, c, g, or t
  misc_feature (227)..(227): n is a, c, g, or t
  misc_feature (236)..(236): n is a, c, g, or t
  misc_feature (249)..(249): n is a, c, g, or t
  misc_feature (260)..(260): n is a, c, g, or t
  misc_feature (262)..(262): n is a, c, g, or t
  misc_feature (276)..(276): n is a, c, g, or t
  misc_feature (280)..(280): n is a, c, g, or t
  misc_feature (291)..(291): n is a, c, g, or t
  misc_feature (302)..(302): n is a, c, g, or t
  misc_feature (307)..(307): n is a, c, g, or t
  misc_feature (311)..(311): n is a, c, g, or t
  misc_feature (313)..(313): n is a, c, g, or t
  misc_feature (323)..(323): n is a, c, g, or t
  misc_feature (325)..(325): n is a, c, g, or t
  misc_feature (330)..(330): n is a, c, g, or t
  misc_feature (333)..(333): n is a, c, g, or t
  misc_feature (337)..(337): n is a, c, g, or t
  misc_feature (341)..(341): n is a, c, g, or t
  misc_feature (349)..(349): n is a, c, g, or t
  misc_feature (382)..(382): n is a, c, g, or t
  misc_feature (386)..(386): n is a, c, g, or t
  misc_feature (417)..(417): n is a, c, g, or t
  misc_feature (422)..(422): n is a, c, g, or t
  misc_feature (425)..(425): n is a, c, g, or t
  misc_feature (435)..(435): n is a, c, g, or t
  misc_feature (438)..(438): n is a, c, g, or t
  misc_feature (441)..(441): n is a, c, g, or t
  misc_feature (446)..(449): n is a, c, g, or t
  misc_feature (459)..(459): n is a, c, g, or t
  misc_feature (461)..(463): n is a, c, g, or t
  misc_feature (469)..(469): n is a, c, g, or t
  misc_feature (480)..(480): n is a, c, g, or t
  misc_feature (486)..(486): n is a, c, g, or t
  misc_feature (488)..(488): n is a, c, g, or t
  misc_feature (493)..(493): n is a, c, g, or t
  misc_feature (496)..(496): n is a, c, g, or t
  misc_feature (525)..(525): n is a, c, g, or t
  misc_feature (536)..(536): n is a, c, g, or t
  misc_feature (549)..(549): n is a, c, g, or t
  misc_feature (553)..(553): n is a, c, g, or t
  misc_feature (559)..(559): n is a, c, g, or t
  misc_feature (563)..(563): n is a, c, g, or t
  misc_feature (567)..(567): n is a, c, g, or t
  misc_feature (667)..(667): n is a, c, g, or t
  misc_feature (824)..(824): n is a, c, g, or t
  misc_feature (883)..(883): n is a, c, g, or t
gaagttgggagttaggaaggtgaacttttctatctgaattctccgggtccctgaagccctccttgccgctctccatctgtnttgcactgcnagctgggtccctgctggggctctgggacttccacttctcantccanataggaacccagcttccactgaatcantgcnaaanctgcctcccagcctggntgggaagggggaaancnactggtaggancnagccccanatggaggtnaggagccactgcnaacctcccgtntncaggtgctgatgtnggcntgcagagtgtngggctggtgcnttcanccanancccttcaatnanataangtntgtntatntacatgtntgtgtgtgtgtgtgtgtggcactctcaaaagtntttnaaagggtgcagatgtaaggctcagtgttggnaaaanacnaagggctatnatnatnaaaannnnaagctttatntnnnccttanaagtgggaaanccagancnctgtnganttcctaccacaacccagtaggggcctctntctcccatggnctggacagcattnaaangaagcnattnagcncccacagttgaacacccacagggctttaggtgtccattccctctcaactgcttagaggcagctttgagcacagccttcctggaaggaagctaggcaaganctgccacacagcgaaggttggggtttacaagggtgacattggtacccccttggccaagagtaaagaagaacaagtctaagccttgcttttatcttagttgtctgggtggtagcagaactcatcagctccttatcctcagtctgttcctctataaaanatgagagatgttcactgactttgtgcagtgagaaggcagcaagtactcacggctggtgntgtgggactcacagcttctaa

SEQ ID NO: 608822 - DNA, 262 bp, Homo sapiens
gcggcaagcccgcttgctcctcagtcctagcaacatcaaagactaggttcctggaatcctgtctgctgctgtctacctaagataacactagaatccacttcagtgtagcacctgggtcagttgtccattaatgctagtcctcaggatttaaaaaataatcttaactcaaagtccaatgcataaacattaagttggtaattactcttgatcttgaattacttccgttacgacagtccttcacatttttcaaactaagctacta

SEQ ID NO: 608823 - DNA, 1232 bp, Homo sapiens
  misc_feature (154)..(154): n is a, c, g, or t
gggggaaacaaatgccgaggaaaattcccccgggtgggccttttgtggcccaggcactgggggcgggtggtcggaaaaatatgtgctgccaagacccaaacatgggtgggggaaagtaacaaaggtagaaatggaacacaagacgtcccctgcntgaggttaaggggtttcccaaacctaactgaagggaaattcccaacgcctcaggtgagaaaaagcctaataatgaaacccccccctataataaggtaggcgtggtaaacacacaggggggtaacccctcccaaaattaggggaatagggcctctgtgtccctaatggaaactatttgtgccaatggggcaagacgacacactttttgccacacaacagttgggggctcacaaaaagggttgtgaaataatcgaaactccaataacgtgggtggacctccatcggcatgatgcgacaatgagggttataacacacaaattgtggtttactcaaagtggcactacacgacactaactacggagatttcttaacgtcacgtccactgagaaaagcgacactgagaaattctctggaacacacacgggcgtacaggcactggaaatgggccccagaggggtccacatataatggcgtggaaggtgagaactatacgcgcacggtcaccaacacacacagggcaaacaaaccctcggctgtgagagatatccggtgacatacacaaggctaacctacgatagacccgtcagagttttcacgaagacagacacacgaagaagtggagtgtggtaacgtgtaccacggggactagggggtccggaaacggtgtgagacgttagtggctttagaatgggtaacggaagtttcttgtttaagggtgactggaaaggatggtggacggggtgcacaggcagctgtagatgtggaacttcagcgcctgctctcaactgataacaacgttatcaacatgccttaaagacggcaatatatgtctactgcctataattcttaatatcgcaacgaagtaatacaaccttgtagtaaaccgtggatttaagcggtgtagaaatgtctaacgtttgtaaaaccaagcgttatcggaaattttcaaatcgtgcacagaaatagaaagtgaactcccaggtccctctaaactcactttaaggcatcagcttgtgttcacctatcccctcgccctcctacccccggtgaattaattaatcagaaccaggtccagcctg

SEQ ID NO: 608824 - DNA, 97 bp, Homo sapiens
tggacctggtttttagcccttgggcactgcaccctgtttaacatttcaccccactttggacaggggtttttacccattttttttacctcacacccaa

SEQ ID NO: 608825 - DNA, 216 bp, Homo sapiens
agcaggctctaggcgaaggctatacccttatgttagaatcgttcctgataatacattagtgtgcccccatgtgtgaactttccctcttacatattggtgttgccattgttgtcctgcatataccaggaattccaatccaaatttggagttcccacagagccaccacgccacgccacattgttttcagtgtgtagagcctcatttgggcttatcgag

SEQ ID NO: 608826 - DNA, 392 bp, Homo sapiens
cttgcaataaatcttatattacacgattgtctactggtgctgtcatctgtggttaatccaatactaacacagaaggtgtaggacccagagtggtggctcatgcctgtaatcccagcacttcgtgagctatggggttgggcggatcacgctgaggtcgggaggtcaagactagcctggccacacatggtgaatagcccgtctctactgaaaatacaaaaatgagccgggcatgcgcctgtagttcccagctagctgggaggctgaggcgggagaattcagttgaacccgggagacaaaagttgcagtgagctgagatcatgccattgcattgaagcctgggcaacacacagagactctgtctcaaaaaaacaaaaaaaagaatgcgttggaga

SEQ ID NO: 608827 - DNA, 324 bp, Homo sapiens
gttaaatgggtgtcttagtccattcaaactgctataaaaatataccttagattggataattcatgaacaaaatttatttatcttggctgggaagttcaagatcaaggccccagcagattcagtgtctggagagggcccaccctgctccacagatggtgccttgttgctgtgctctcacatggaagaaggggcaaggcaattcctttcaacctcttttataaggccactaatcccatttatgaaggcaaagatctcaaaacttaatcattttccaatgtgctgcccccctcttaatactcaccaataaattctacttcctgtcca

SEQ ID NO: 608828 - DNA, 256 bp, Homo sapiens
aaatgttgctgctgagtcactcgggattttgcagtctcaaaattcatctggtagcctggccagccagccctcgtaacctagcaccagagcacccctgctggaatgcttgggtatatatcctgatcattgtccctccccctgtgctctcaggtgatatatgatttgactatttctttacctcctgctttagcctaatttgtattttagtaagtcctctttactacctgattagttggatgtgagctgagctacagcg

SEQ ID NO: 608829 - DNA, 735 bp, Homo sapiens
  misc_feature (75)..(77): n is a, c, g, or t
  misc_feature (79)..(79): n is a, c, g, or t
  misc_feature (82)..(83): n is a, c, g, or t
  misc_feature (140)..(140): n is a, c, g, or t
taggacgttagaaaacgcccgagcaagcacgtggaactgcgcccagcaacacaggaagaggaggcgcccctatcnnngngcnngctgtgaggagtagacagcgggtggacctgtggtttgcaacacaggaagaggcggcngccctatcactgtgctggttctgtgaggagtagacagcgggtggacctgtggtttgcaacacaggaagaggcggcggccctatcactgtgctggttctgtgaggagtagacagcgggtggacctgtggtttgcaacacaggaagaggcggcggccctatcactgtgctggttctgtgaggagtagacagcgggtggacctgtggtttgcaacacaggaagagactatgacataacacattggaaataaatgccagaggcccttaagtccaggccaggaacaggacagacgagaggcagggtgcaggattccttactgtgccactgaaagtggatccacagcttccccacctcactcagcagccgctgcccagctccactgtctcttccccacacccgaatctcatcaccaggaagtcccccggccgccactgtcgaagcgtatccagccctgaactcttctcaccacctctgcggccaccaccccagctgggcctcccgcctcctggccagatctctgaacagcccccaactcgttccctcctgaccctcctgtaaggtcaagcctcacccgagaccccgaacgacgggtacgag

SEQ ID NO: 608830 - DNA, 1257 bp, Homo sapiens
  misc_feature (683)..(683): n is a, c, g, or t
gggcgccgcgcggttgaggtttgtctagttccacgctcgtagccatgccgttcaatggtccgcgtgcgacgtctggtgcaggtactatcggacgccatgattgatatgcagacatgcgtgttggcggcatgtgcaaacgctggctaatttggtctcatccaaaggtcgacaccgggacggccccgtggcacgtatcgcattcgatccggggcaccgctaaagtcacaaggcttgcttggatcgcagttcgtgcttctcaggactcggaagcgattttgcatggatgtaacacacatccagatgtccggtgattactggagtcgcgtgagatcatcgctgcgactcaagactattagtcgctagtccagcccaagctcgcatactcacaaatggcaccataggattgcgtccgtaattcaccaagatatactatgtgggatgatgggccgttctcgaaggcacagggaggatgcgccaaacgcacaattcgccttcgaattgcaaggctgaattggaaccccggcactccatagaccttgcgatagagctcgaacccacgtacggatccagacgtagtcggaagtttccgagataatagctttttggaagagtcctttgagattgaccccggggaccctcagtgatttacgctagggacacaattccctaagcgcgcagtgtgnaggtcgcctaactcgtgctgtaacgttcccatacataggtcccaacctatggctaacttggagttcagaatacgaagtctaattgtgtgacaagtcggtggatatgttacagagagcgttttcaacacagacaacgtagaatatgaccccccagaatacatactcgcgaggggggggcctttaactgtgagctgcgttcagcagcagtcgccgaaccgtgcccacatcatacccttggcggatacctatgaggaaccacgttgggaccataggagttcccgggtgacgaaatcaccgttgggaagatctggaaccctttagccgacattcccaaagattggagtcatgcacacttcgcacgttccaaccattggatggtcgggaagaggcgcaattaccatatagagccgtaggttcagatctcccacaccccaaataagagggaccgggaaaaggaccggggggacaaagaattcctgtttgcgccggaccaggaaagaccaagctccaaagaggggggtatacgaccaccggccgtttgttttacaataaagagaaatgtggggcagcgctt

SEQ ID NO: 608831 - DNA, 435 bp, Homo sapiens
ggaggcaacagtgcggggagctgctgagtcgggtgctccactgctggtgtgttaggggcttcgtgtagtttgttcctctggctggcctggcatagttggagcatgtggcaaaggatcatttgggggtggccatagttccctctgagagaaaaggggtcttggacgagggggtcattgccagggtctggctcagtcttaggactttctttccgagggccagtgttaggagctttacagattgaagcattctgatacaaagccataaaggcttcactgtatggtatttctgaccatttaccctgccttttgcaaagtaagtataattgtaggttagtattacgatgtagccttcaatggtctggccattgcacctgactgtctagctgatattgtggccaagtagtattaaaataaaaaactcaagcatttttttca

SEQ ID NO: 608832 - DNA, 553 bp, Homo sapiens
  misc_feature (2)..(2): n is a, c, g, or t
  misc_feature (92)..(92): n is a, c, g, or t
tnaaccacaaagtcaaaagagcaagaaggccatacatatgggtaaaggatcaatcaacaagaagagctaactatcctaaatatatatgcacnccatacatgagcacccagattcaaaaagcaagtccttagagacctacaaagagacttagactcccacacaataataatgggaggctttaacaccccactgtcaacattagacagatcaacaagacagaaagttaacaagtatatacaggacagacgagaggcagggtgcaggattccttactgtgccactgaaagtggatccacagcttccccacctcactcagcagccgctgcccagctccactgtctcttccccacacccgaatctcatcaccaggaagtcccccggccgccactgtcgaagcgtatccagccctgaactcttctcaccacctctgcggccaccaccccagctgggcctcccgcctcctggccagatctctgaacagcccccaactcgttccctcctgaccctcctgtaaggtcaagcctcacccgagaccccgaacgacgggtacgag

SEQ ID NO: 608833 - DNA, 951 bp, Homo sapiens
  misc_feature (951)..(951): n is a, c, g, or t
ttggtgtctggggacaactatcctccccccaaccctggatatcctgggggtgggccccagccaccatgcccccctatgctcagcactacaactaacactgagggcccacttacccaacatgccacactaaccagaacacacaacgagtacgagacaaggaaagtgctacacaacgaaagaaacaccagagagcagaaagacaaggcacagagaagaacaaccgaagagaaagcagaagcaaaaaggaagagagacaacaaacacaccacaaaagaacagaacaaagaagaacacgaaacagcacagacaagaagaaaaaaaaggaaaggagaaagaaaagagaaacaggaaagagagcagagaacgagcagaaagaacagaggaaaaagaagaaaccggcgaaagcggacagcaagccgacggagacgagagaccaccgacaacagagacagaaagcaacagaaccagaaagcacacagaagaaagaccagcgtagagagacaaccgaacgaaagacgaagggaaggaagaaccagcgcacgagacaggacagagacagacagcagacagcggagacaaagacagcaaaaacaacacggagcgaaagcgcaaaagaggaacaaggcagagggaaagccagaaacaggaagaagacagcgcaggcagagaaagacgagcaagcacagcgacacagcagcagccaagacaggagagccacagacgcgcaccagcgcgccacacagacacaaaagagagcaaacgagacaagcacagagaaacgagagagcaacagaccagcgaagagcaggcaagccagacaacaacgaagagggaagaccacccaagcagacaaaacagcagaagagcagcagacaagagagacaaacaaggagcaacagcaccaaggcggcagaagcaagacacacgacgacagaccgccagcaaacgcgn

SEQ ID NO: 608834 - DNA, 245 bp, Homo sapiens
aggatcctttccagctactcagtgaggctcatcgaagggatagaggtgggaggagctcacaggttggccatgctgaagggtgggccgaaggctgtgggtgagcactgtctgagggtgagcacttggctgtggtccggcagcaggcccaggaggccgggcctccttcttagcctgagggacgttgccatgtgaacatttggctccccaagcctttccggtcccacggctccacagagtgtgttggg

SEQ ID NO: 608835 - DNA, 587 bp, Homo sapiens
  misc_feature (75)..(77): n is a, c, g, or t
  misc_feature (79)..(79): n is a, c, g, or t
  misc_feature (82)..(83): n is a, c, g, or t
  misc_feature (140)..(140): n is a, c, g, or t
taggacgttagaaaacgcccgagcaagcacgtggaactgcgcccagcaacacaggaagaggaggcgcccctatcnnngngcnngctgtgaggagtagacagcgggtggacctgtggtttgcaacacaggaagaggcggcngccctatcactgtgctggttctgtgaggagtagacagcgagcgggtggacctgtggtttgcaacacaggaagagactatgacataacacattggaaataaatgccagaggcccttaagtccaggccaggaacaggacagacgagaggcagggtgcaggattccttactgtgccactgaaagtggatccacagcttccccacctcactcagcagccgctgcccagctccactgtctcttccccacacccgaatctcatcaccaggaagtcccccggccgccactgtcgaagcgtatccagccctgaactcttctcaccacctctgcggccaccaccccagctgggcctcccgcctcctggccagatctctgaacagcccccaactcgttccctcctgaccctcctgtaaggtcaagcctcacccgagaccccgaacgacgggtacgag

SEQ ID NO: 608836 - DNA, 582 bp, Homo sapiens
cagcccaagactgggcgaaggggacaccgaggtggaaatggcaccctgtggtagccagcggcggccctatcactgtgctggttctgtgaggagtagacagcgggtggacctgtggtttgcaacacaggaagaggcggcggccctatcactgtgctggttctgtgaggagtagacagcgggtggacctgtggtttgcaacacaggaagagactatgacataacacattggaaataaatgccagaggcccttaagtccaggccaggaacaggacagacgagaggcagggtgcaggattccttactgtgccactgaaagtggatccacagcttccccacctcactcagcagccgctgcccagctccactgtctcttccccacacccgaatctcatcaccaggaagtcccccggccgccactgtcgaagcgtatccagccctgaactcttctcaccacctctgcggccaccaccccagctgggcctcccgcctcctggccagatctctgaacagcccccaactcgttccctcctgaccctcctgtaaggtcaagcctcacccgagaccccgaacgacgggtacgag

SEQ ID NO: 608837 - DNA, 390 bp, Homo sapiens
ggtggccgattagtctttgaaaagttggtccattatcagatcgtctctgtaaatattttcctctagtctgtggcttttctgtgttcttttcttttctttctttttttagatggagtctcactctgttgcccaggctggagtgccatggtgcgatctcagcttgctgcagcctccgcctcccgggttcaagcgattctcctgcctcagcctcccaagtagctgggattacaggcacccaccaccatgtccagctaattctggtatttttagtagagatggtgttatgccatgttggccaggctggtctccaacccctgacaacaggtgattcgcctgtcttggcctcccaaagtgctgggattacagatgtcggccactgcacccagccct

SEQ ID NO: 608838 - DNA, 287 bp, Homo sapiens
tgtgatggcagggaagaatcacacgcctgtccaatatttgaacacattccataaacgcaactataaaatcaaagaactcagagagcttcagtgcggagttcatcatatattcgcatgatgtacacacattattggacaagtctgtacattaaaccccaaaagaacatcagttttgtggacaatggtttcctctgctgtagagaaacgtatgcatatatgatcagtaagcagctcacatctttctgaatgtcaaggtctacaggattgtctctgtccacctttagtca

SEQ ID NO: 608839 - DNA, 132 bp, Homo sapiens
aaatttactgggctgatctatgtaatcacagaggcagtttgtcagacaaggggggaggtttatttctgggtctcttcctccttggataaggtcttgatgatctcctccttcttggctgggaggcgctcttca

SEQ ID NO: 608840 - DNA, 81 bp, Homo sapiens
accgcagacacggccgtgtattactgtgccagagcggggcgcactgggagctacttcccccatgactactggggccaggga

SEQ ID NO: 608841 - DNA, 234 bp, Homo sapiens
  misc_feature (15)..(15): n is a, c, g, or t
  misc_feature (56)..(56): n is a, c, g, or t
  misc_feature (58)..(58): n is a, c, g, or t
  misc_feature (67)..(67): n is a, c, g, or t
  misc_feature (76)..(76): n is a, c, g, or t
  misc_feature (81)..(81): n is a, c, g, or t
  misc_feature (84)..(84): n is a, c, g, or t
  misc_feature (89)..(89): n is a, c, g, or t
  misc_feature (112)..(113): n is a, c, g, or t
  misc_feature (116)..(116): n is a, c, g, or t
  misc_feature (121)..(121): n is a, c, g, or t
  misc_feature (143)..(143): n is a, c, g, or t
  misc_feature (165)..(165): n is a, c, g, or t
  misc_feature (178)..(178): n is a, c, g, or t
  misc_feature (185)..(185): n is a, c, g, or t
  misc_feature (188)..(188): n is a, c, g, or t
  misc_feature (200)..(200): n is a, c, g, or t
  misc_feature (202)..(202): n is a, c, g, or t
  misc_feature (216)..(216): n is a, c, g, or t
  misc_feature (223)..(223): n is a, c, g, or t
  misc_feature (233)..(233): n is a, c, g, or t
ggctgccacgtgtcnaaattagattttgtgctgtatgaccccaaaaggttaaaggngnagccacagntgaaaagtnatggntanaaagnttgcagcaccacaactcaacagnnatnacttncccaaagacagccacaggtcanccagcctgggaaaaaagcgcgntcactactgttgnaaaatcnagncatttgaacccngntcctgccaaggggntaaaggntcaggaaggnt

SEQ ID NO: 608842 - DNA, 124 bp, Homo sapiens
gccagctcatatgcctatgggggcacatagatgtggacccagtgagaaatgcaaacctccgtcacacaagtggacctgtgcctggcgctcacaggtcaccgacgatccgtgcgtccatcgtgca

SEQ ID NO: 608843 - DNA, 214 bp, Homo sapiens
aaaatgtattttctgcttccaaagttaaatatatatatatacacattgacatcttttttacacactagatccaagtcgatagcgcctccaggcacctgcgagatgccaactcagatcatccctggtggaatatacctcaaccctggcttcaaacaattcttaaagatagattaccaccatatgtgagcttataatagtaaccaaaaaaaaaaaa

SEQ ID NO: 608844 - DNA, 723 bp, Homo sapiens
cccgacgctgcccacgggtggctcatcctgtggtagagaggtgacaagttcagaggtgtcggcgagggcatggcactcttctctcaaactggcctcccgggaactcaggagctggagatggcagttgtgggacagccccctgtgccgccttaccgggcctttctcaggactcccgtggactttgaatcctcagggagttctgagccccccgcccaggtaggccgacttcctggccatccagacagctgggggaggtgttggacgcggtcccgccggctcccaacagctcccaccagctatgtctaggtagcaagcatccggctacccatgcgtgactgggcaagtcgaagcctgcagcgtgatagtgccccttggtagacagtgggcaactacgtgagtcctatggatggcaagacgcagaccttagaggcaggcctggaagtaagaggcggtgggtgggcctggggcctggatgcctgggcctgcctccccgggcagggtcttcgctatctggcacatctgtgcctggtgctggtagcagatggtcaaggctcctgtcagctctacctgcagctgcggatccagaggtccccaggtgatcccggcgaggaggagtcgatccgagcccctttagcgtcccgttacacaccccaggcaatcgggggcagtggccaagggagctgtatgcagaagacccaggagcaaggtggttacccaagtggg

SEQ ID NO: 608845 - DNA, 2136 bp, Homo sapiens
  misc_feature (744)..(744): n is a, c, g, or t
  misc_feature (1847)..(1847): n is a, c, g, or t
ctcagatctgtagtgatgtggtactgccgttgcgctctctgtgcgcttcttggtctgtaggctgtgttgttggtgctcgtcgcgctgagcagctgaggaggttgtctcgtggcttgtctcttggctgctagattgctttaggttcagcttctgagctctgcggtctcgaggtgtgtctgtgggctctctgcttgcgggtctgcgtatcgtgctctggacgtgctgtactggcatctcctcgctttgcatctttcgtgctgcttcgaccgcgcttgctgtgctcttggcgctagtgttgtgccgtctctctttgttgttttgttgcttgggtggggttggagtttgtgggtgtttctggtctgtgttgttgcggttgtgtttttgctgtgtgtgttgatgtggtggtggtggtgtaggtgttatggtgttgtgcctcctgcagttgtttttggttgtggtcgcgcttccatcagttgtgtatatgccgtcgggcctcgcgtgtttgtgggatgtgtcatagatagacaccagactatacgccacgtgcgttataggagcggtgaatcccacgcacataatatattgagcatcctccgctagagggggagggtgacctactcaccaacgagggtgttgtggtcatccacacataggatagaagcatactagcgggccgttgttgtgttgttataatgattgccgctgaccgggctccccactgtggtggcccgtatggttagcganccgcggggttgccttcttatgcagtggaggtttatgctccgtggaacggtccaccttttggtgggtttgggtcgcgaataatttttcctgtggcgctaatctggtgagggggacgcccaaagccaccatgtgttgtgtggcggtcgggagaccacatgagaccaaagggaagtgtgtgtggggccgcctcccatagaatgttgtgggctgcccaacggagtatgtgtcgtggggataagtacccctcctcctgtgtgggagtggccccgctctagtatggtggttagctagcagcatcaagagtgcggtgataaccacagctggtagtagttgctcgttgcggcaggcgacacaataatggtgtctttagagaagagggttgtgggttgcgtagaacacacacgaatgtgtgtggcccctgtgtttgagacctggcgtgggggagaactgtcctaaggagagagaacctcgctgggggtgagtataggagagtaaggatgtgtgtgatgaatatgataatgaggaattacactgtgtccacggtccgcaacgacgtcccccgcacgagtggtggataattttttgtgagagggaggagaattacccaccagctggggggtccttcggtgtgcccccctgcgataatagggggttcctactcttgggaaatatgttcaacagactgaagagtgtgttgtccttgtcaccagatgatggatgtaccctctctgcggtacgcatcacagaggaatatgggagactcttggagtagtttgtgttttgtgggtgttggaatagggagtaaagagagaagtgtgtggggacccacacatattatggtgaagcccgacgataaaaaaacacacgacacagtggtgtagcctgctgaagtttgggagtgtcttctgagtatatataggattgtgtccacaggagtttgtatttggtgagatagtgtgaggtggggagcgccgcacagagactgtggtatgacacacacaaagtgttgtgtgtgaagtgtgtgggaatactctctacagaggcacctcaccctctagatgtgtgtggaaaaaaactactgtcgtgggagagggaagatgtcngaaagcacagggcacacccgacacacaggtgtctgtcggcgcacacaaatgtcacacactgtctggagaactctggggtatataagtgtgatgcacatagtgatggggtgtgatatatgattgatggacacacaggattcttatggtagtgtgtatataaatagatatttgtaaaaccgaacacacgcccagcccaataataggggcaccaataccgtgggacccccccttcttctggtatgtgataggagaatttagaataaacccaggtttccgtgtgtgaatataa

SEQ ID NO: 608846 - DNA, 437 bp, Homo sapiens
  misc_feature (223)..(223): n is a, c, g, or t
  misc_feature (227)..(227): n is a, c, g, or t
  misc_feature (232)..(232): n is a, c, g, or t
atgaccatggaggtcgcgtcgttccagttgcggcccggcgagcccggatcgacgtagttcttcagacgcttgaaggtcgcgagcacccgcttgaaagcgtcggagttgagcgctgccatgtcgcggtctcggtagaccttgaggaacagttccgagccgccgacgttggcgaggatggcgtcgaaggtgatcttctcctgccacgactgcccgcccagcgcangagnacganggccggcgctttgaagcttgtccagcgcggcaaagagctcatcgaccgtcctgggctcctgggcgatgccgccttctggaaggccgccttcgagtaccagaaccagccgatcgcatggatgttgaccgggacggcgtagttagcggccctttgaccttgacggtgttgaggattggtgccggcagcagcttgtcccaacctcctt

SEQ ID NO: 608847 - DNA, 258 bp, Homo sapiens
gaaaaagtgaccggaaactttatgatgctgggttgcagctttcaccatctgaacatacaagaagcctgggagctggagtggaccgtggaggagagctgtccaaccagaaacacccgttccatgtagaatacgttaaaaataaatctgtggtgttacatcactgacatatgggagccatttcattacagaagttggctttccataaaagtctaccatttattatattttaaaacacataggcccattcttacatatatt

SEQ ID NO: 608848 - DNA, 851 bp, Homo sapiens
aagctctgctctggcctcaaaagccactggctacccattggcattcactgctgcaagaagaattgccctaggaatcccacttccaggaaattaagaacgtcgtatccgggaagacatcagtcctgtttgaacctagcctggattacatggtcaccaagtattcgcccgcttgggatcttgagcgttttcatggaacatctagccgaatggtagctctatgaaaagtgtaggagaggtcatggctattggtcgtacctttgaggagagtttccagaaagctttacggatgtgccacccatctatagaaggtttgcactccccgtgctcccaatgaacaagagaatggccatctaatatgagatcttagaaaagagtggtctgaaccaagctagcacgcgtatctatgccattgccaaggccattgatgacaacatgtcccttgatgagattgcgaagctcacatacggttgacgagtggttgtgtattaagatgcgtgatattcttgaatcgatggaaaagacacggaaaggcctcaacagtgagtccatgacagagagaaaccctgaaaagggccccggagagttgggttctcagataagcaggatttccaaaatggccttggggctcactgaggcccagacaagggagctgcaggttaaaagacaaaacatccacccttgggtttaaaccagatgtgtacaactggtgtcgaatacccatcaggtaacaaactatcttctatggtgaccctacaatggttcgggcacctgtcttgtcactttggctgaccatggcagactgggctcaggagggggcctatcaagttgggcagcggcggaaatgaatgggg

SEQ ID NO: 608849 - DNA, 270 bp, Homo sapiens
actctagaggttcccatggactcctcatcgcggctgcgagcacagcatccagtgatcacatgctccaaggagaaccaggccagcaatagattcccactgatggtgtatggtggtgctgggaatggacagctccccatctcacgggtgagtgggcttgtggcctgaccctcactgctgcacactagtcatgtgtatttctggctccgtctccagaaggtcatccaccacagtccgcccagcttctggggcgatgactgggagctccatagt

SEQ ID NO: 608850 - DNA, 137 bp, Homo sapiens
ggtgctggagaatctggaaaaagcaccattgtgaagcacgatgaggatcctgcatgttaatggatttaatggagatgagaagtcataccaaagtgcaggacatcaaaaacaacctgaaagaggcgatgggtaccgag

SEQ ID NO: 608851 - DNA, 463 bp, Homo sapiens
  misc_feature (24)..(24): n is a, c, g, or t
  misc_feature (74)..(74): n is a, c, g, or t
  misc_feature (153)..(153): n is a, c, g, or t
  misc_feature (234)..(234): n is a, c, g, or t
cactatcacgggacagcgcaagantgccccctgattccattaccggtccctcccacaacacgtgggggattcangtgagagggtggggacacgccaacctttccgtaggtatgaataagggtagttcttagctgatgtcaagtaacaattgangttgtgcttatacttttttttctttgaggcagtggctggtcttttaaatgccttcattaagtttctagtacttataccaanggaattaaagacatgcaagttgctgctggctggcatctatatcccagctattcaggagtctgagacaggatgattgcttaaggccaggagtttgagactagcccgggcaacatagtgagactctatctcctaaaaaagttagctgaatgtggtggtgtgctcctgtaatgcccactcctcatagatatttcaaaatagtaatatttattgctgccaatgtgagtaggcc

SEQ ID NO: 608852 - DNA, 386 bp, Homo sapiens
gatggcggctccctggaacatgtgctgaaagaggacaagaggattcccgaggagatcctggggaaatgtcagcatctgcggtatctccggggcttggcgtacctccgagtagaagcaccagatcatgcacctgagatgtgaagccctccaacatcctcgtgaactctagaggggagatcaagctgtgtgacttcgtgtgtgagctgtgccagctcatagactccatggccaactccttcgtgggcactgctgctcctacatggctccggagctgtgtttgcatgtggcacacattactcggtgcagtcggacatctggagcatggtgccctgtccctggtggagcttgtgccgtcgtgaagtgtaccccatccccccgcccttcct

SEQ ID NO: 608853 - DNA, 727 bp, Homo sapiens
tgtcctcgggaactgcaaggccctgtgagacgggaggactgggatcccgggcgcggctggtggaaccgtcgaagctcagcggggccgcggacactgacctgtgcttagaactcatcctggcccgcagagcctgccgcgagtccctggtgtcccctgtggtcgggctacttggacgccactttcccgagcggaagtcagcccgcggcttcggactccggcggtgaccttgctcgagaggaatggcgcctgccggggttcaaggcactgtcttcctgttggccctgatcagtcattatgccagcacctgggctctgactgcccacttcacatacctcaccaatgattgacgtggagagactagaatgcctcgctggtatcgccctttcgcagaatttggaatcatgcgcttctactccgatcgtggggactcagcagccttggtgctcgaggtgcccagatgcacacatgaaagccatgtacctaacatcagatctaacgcttgatcccagcaatgtggattccctcttctacgctgcccatggccagccaggccctctcaggatgtgagatctctatttcaaatgagaccaaagatctgcttctggcagctgtctagtgaggactcatctgttagcccagatctaccatgcagttgcggctctaagtggcgttggcttcccttggcatccaagaagcacctcagtgtccttactgctcgtactcacag

SEQ ID NO: 608854 - DNA, 929 bp, Homo sapiens
tttgttgtctgttgttggtgtgtgcgtcttgattgttttattgtgtgcctgtttttgtgttgctgccttcgcgttttgctctgtgtcatgtccgtttttctagcctttgcaacgctgtgttcgtgctgcgtttttgcgggtggtggtgcatgtctttgtgcttatcttgtgttctgtgttgtgcagctctttggcacaagcattttttgttcgtttgtggtattgctctgtcagtttagttcgtcggtagtctattttgttgcgttttccttaaatgtagtgtattagtgcatcaatgttgcttggctctaatgaaattgtttagactctggtacatgacctatgttaatcattacttataatggactctttttatgtctgcaactgctttgactagtttttatgtggctatagctcattgtacactaatagtaagcaagatagtgcaatatatctagaaggtatgctggcatttagtgttggacctcaaattgtcaatctcagagaaatcatctgatgttttctaataatcacctttgccagctcgaaagtaaactataccctatgtagttgtggaagtgttatgcctaatattgtgttaactgatattaaaccgtccaatgttctgcctacccctgcttggtatcacagactattctttgagacagtctgttaaccaagaccaaaacagatcactgcattcttagcaaaattgcctagctatgttgaagtgtgctcaaaatacaatggtgttgatttcagtgcactttgtcgctattaacatcctttttctcatgtagattgtcaataattgagtaatctctagaagcattattttaggaatatatgagttgtcacagtaaatatcttgttttgttctatgtacattgtacaaatttttcattcctttgcatatcctgccggttgat

SEQ ID NO: 608855 - DNA, 522 bp, Homo sapiens
cttctctagttcgcactcaattctatcgctggcttgaaaacgccattggtctgctggtcacagacatcgcagcgcgggttggtgcggaaatgctgcagtgcacagctctcgcagaaataatgcctgcacttggtgacaactgggtttgggaagctctggcgacagataaaacacttgaatggtattccctcatcatcgctacccacttcatagttgtcatcctcatagacaccatagcgaccctaatcaagctcacgttcgatctgccacccatgcttgtaatctgaacggtcatgaaggaatttgcagctatctccgaagccgcagaagccagtctcttggtagtccttacagatgtcgggctgttaatcccagcgcacggtggcacgtagatcctcgggcgctcggatggggccctttcctcaccatcccggaagaggcattgccccatgacgtatcctatggctccatgtctctctgctacatgttgatccccgatacttgcattggtcccgagctcga

SEQ ID NO: 608856 - DNA, 814 bp, Homo sapiens
gaggccttaaccaacgataacggctgtgcgatcggcgaaacctcgtgagctcgcagtggcggggtgcgatggccctggtgccttgtgatgatggagaattctcagttgtgtaagctgttcatctgtgcgtgcctcaatgttgcatgactgatgtgagtctggtgcctgctgctggccacttttgatgtgcctttgtggactctgactgtgactgctgtggttgtgtgtgttgaatccccatgaccaatgctgctccctgtttgcttttggcttctgtgacctactccaattgttggagtgatgtgctgtgactgcctgcccatttgtgcctgccttctgtcccccattgcctgttgtgacttgttgcagaacacttgttggatgctttgagatgctgtggtggctggtgttgtccctgtgtgatgggagttctggtgctgctgtagccccctggtgttgcccccaactgcccgagatgggttaacagctggacacggctccttatttttggtacctgggatgggtgccctttacacatggtggatcgacacctggtttgtgcttgacaggggtggctgaaaccctttgaatttccggaagcgcaacattttccatactggccgagggtttttgagccaacccctgtttggcgcaacaacatgtgtgccctgagggactttattttgcgctggagacaaaatgaccagtgtcccttgtggccacaagcaaacgcctggtttggaacttttcctggggctttcccggttcgttatttatcccaatggaaattccactggatctggcgtggcatgga

SEQ ID NO: 608857 - DNA, 225 bp, Homo sapiens
tggaccgtcttcatcatacctaccaatattgtacctataatctgtgatatagcaaaacatccatgcccctgtcagccacccgtcctgtttcatggaacttatacagtgccattttaaatattccagttagtgaagatgatacatttatttttaaatgatattaaagttttgatattatattattgcaaaaataggtttaagatgaggtaggtatgatgaaggacg

SEQ ID NO: 608858 - DNA, 129 bp, Homo sapiens
tgtcatgtgagaggtgcctgagctgtttgtgcgcgtgcatgcacgcgtgcctcatgatttataggaaagagtttattctctctctgttaagaataaaggagctggcttagtcacatggccactcaatac

SEQ ID NO: 608859 - DNA, 357 bp, Homo sapiens
gtaggtacatactcagcattccctccatcaacaacggcatctcctaagtcaaagtcatcccctatcaagagcgggaaagagcagtaaactaccaaattccagagagaaacgagtaagtgatatgacctcgtgaactagtatcagaaatataccacggacccacattccttaatacttctctgaatatcagcttgaccaggatctcattagaagaagtgaattcgctgaccatgtttacatcactattctcgtcaaatgacaagaagaaaaaacagagagacagatacagataagaagctaggagagaagctcccagaggagaggcagtggggatagagagagcgaggtacagtagtt

SEQ ID NO: 608860 - DNA, 632 bp, Homo sapiens
  misc_feature (74)..(74): n is a, c, g, or t
  misc_feature (91)..(91): n is a, c, g, or t
  misc_feature (163)..(163): n is a, c, g, or t
  misc_feature (169)..(169): n is a, c, g, or t
  misc_feature (389)..(389): n is a, c, g, or t
  misc_feature (395)..(395): n is a, c, g, or t
  misc_feature (413)..(413): n is a, c, g, or t
  misc_feature (436)..(436): n is a, c, g, or t
  misc_feature (471)..(472): n is a, c, g, or t
  misc_feature (477)..(477): n is a, c, g, or t
  misc_feature (488)..(488): n is a, c, g, or t
  misc_feature (499)..(499): n is a, c, g, or t
  misc_feature (502)..(503): n is a, c, g, or t
  misc_feature (605)..(605): n is a, c, g, or t
catcgtccccacctccacctgggccgcccggcaggcgaggcgacggaggcccgggagccatgggtgactggggnttcctggagaagttgcnggaccaggtccaggagcactcgaccgtggtgggtaagatctggctgacggtgctcttcatcttccgcatccncatccngggcctggccggcgaagtcacgtatgagcggtgacgagcagtcatgaatcttcgagtgtaacatctggcccacgccaggctgcacacaacgtctgctatcgaccaggcctctcccgcatctcgccacatccgctactcgggtgctgcagcttccgtcttacgtcagcacacaccacctctggatctacctgggtccatagtcatttaacctgctctcggncgaganagagcgggctgcgggcancaagggaggggggagctgcgggncactgccggtccaaggtacccacaggatggagcgnngcgcntggcggccgangatgcgatacnagnngccaacaatgtcggtggcagaagattggtcgcctgcgcatccgcggagcacgtgatgggcacctatgtcgccagtgtgctctgcaagagtgtgctagaggcngggtttctctatgggcagtggcgctgt

SEQ ID NO: 608861 - DNA, 120 bp, Homo sapiens
ttcatatcaacattgtcgtcattggacacgtggtttcgggcaagtccaccactactggccatctgtctctataaatagcggtggcatcgcacaccgggcccattcaaaattttgagaggg

SEQ ID NO: 608862 - DNA, 249 bp, Homo sapiens
ctcagctggaccaaattagttgaattactcaccatcaataaactataaatggcgccaatgaccaacccgccaacgattcccgttgtcaaagaacctaataacaagtaaccaaccgcagccccaacaagcccaactaggtttaaaaaaaccaagcaaaaggccaactgtccgtcgtttattggattgtatctgctcatataacattaaaacttaaccgttggcacttctttctcagacccgccgatactg

SEQ ID NO: 608863 - DNA, 286 bp, Homo sapiens
atgttttgggggtttttttgtttgtttgtttgtttgttttttcattttttaaaaagcgaagtagagacaaggtcaaataatggatgtttaaaacatttaaggatcagcctggtcaacatggcaaaaccccatctctacaaaaaatacaaaaataagccagccactagggaggctgaggtgggaggattgcttgagcctgggaggtcgaggctgcaatgagccatgaagtatgccactgtgctccagtctgggtgatagagcaagactctgtctcaaaaaaaaaaaa

SEQ ID NO: 608864 - DNA, 279 bp, Homo sapiens
taggtagttaaattacccccatgttaatgaagcggaattaggctcccgagctaagggactcgcctagggtctcccagtgagtaggaggagggcctgggattttaacccaagggtttgaggccagggccgcctgccgtaaaatgggtgtttaaaagtgagtcagggcagggcagctggtatcgaggtgccccatgggagtaaggggaccccttccgggcggatgcagggctggggtcatttgtattttaagcccctcggaataaagggcgttgcccccca

SEQ ID NO: 608865 - DNA, 594 bp, Homo sapiens
ttcactgttattcttaatattacccataatgaatgtctttgtattgggttcttattttagataactccttttctttacttatcccctttttatgaggggttgaaattggagcctgtgggcccaacaccacgcagtgtgaagcaccccgtgctccttcaaaacacactatctatccacactatccactacacacgtgacacacaaacaatagactgcgctaataccccatcatattcactactacccccccgatacagcacattagcagcactccgtctacacgtattctccgaggggtcactactttcgcaccataccattgtttaacaacttcaacacaacccatctaatttaacacgacttccaccaccacaaggtgtgaaacaacacacatgttaggaacaaaatcaatttctgatcgcccccaccacaattatgattgccgggcataaaactacacactcatattacaccttatgtgcgcccatgctttataaccaaagaaaagattctgctgagctatgagggtaggctccaccatctcacccacaccatattaaacctatcgggctaattcgagacgcctccagcgat

SEQ ID NO: 608866 - DNA, 1413 bp, Homo sapiens
  misc_feature (7)..(27): n is a, c, g, or t
  misc_feature (30)..(30): n is a, c, g, or t
  misc_feature (96)..(96): n is a, c, g, or t
  misc_feature (101)..(102): n is a, c, g, or t
  misc_feature (989)..(989): n is a, c, g, or t
gcaacannnnnnnnnnnnnnnnnnnnntcnttcgctgaacgaagtacggcgaataataataagagagagtgactgcctggctggagaccactgctngtgtnngcctctagccttttaagtgtgtatgggttgtcttattagtctcggctatcgcaccgctgtgggtagtctgtggtatagttttattttatccagtgatagattgtgtgtttgattctcttattattgtgtgtatcatcactctcccatgctgctggctgtttgacaccaaactaaagatgcttgctgtgcactgaagagacaccacagtagtgtgcctgcgctcagtggttaagtatgtatcgcaggccccggtggtggtgcgtcatagtgttttgttagaggaggggctctccttctctgttgggtgacgcttaataattgagggcgttgttggtaacacagagctgccacaaacatttttgtgtggaagatttttttattccccacgcggcgtcccgccacagtggggtgttcgccccttaggccccctgtaggccctcttcttttttggtgtttcctttccttctctggggtgtgtgttcctccctccccgtcgccgagcctttctgtgtccttccaccaaagagccgcgcgggtttttcagatagtggtttcacactcaggtaaacagcgcgctgttttgcgccgccctgttttcccaggggttcccccccccgcggggtggtttccctgggtggccttatactagtttcggggccactcacgaggggcgatttttccagggaccattttgtgttctatatatggagggttccctccccccccctgctctctccaattcttgtgctagagagccaggaatgtgtcccgcccacacatggcttttatggatctcttttctatatattgcctggtcccacttgtataagtgttacagaaatatattagagagcatggcgggcccccgccttctttccccacaccangtttattgtttcacccacgcgcgggcgccgttctgtgcacagcatgggtctttgtgacatgggagtgcggcctgttgttgtaaaacgcagtcgcgcacatgttctctcgcgagagcctcgcgtttttgtgcgacgagtgctctccgggaccccatctgtcccccccctgggaaacaatctgtctctccggtaaaggacgccacccacaggtgtgcgcgtgcagagatctcgtcattaacacagatttgtgcagatacacaacctttctctaacgaatggttctgggagtggtgcacttcttgaaggcgttggccactcggtgcgacgccgccgtggacagttatagaagcttctcttttctgaattctttgttttaagaaaattgtacgttctttctggctcgccaattgaacagcagaaatat

SEQ ID NO: 608867 - DNA, 115 bp, Homo sapiens
ctcacaaaagtacttttgtcagtagaaaacaatccaccagccatgacagggcaccttattgtatcagtttctttaattctgtttttttgcaatgacatctggaggaattgttctc

SEQ ID NO: 608868 - DNA, 124 bp, Homo sapiens
gattgctggcactgtagaattgggcaacagttcttcagacctggctcatagctacaatgcatttagtatattaaagcagctgacattgatgactttttgcgagccttcccaggcactggagttt

SEQ ID NO: 608869 - DNA, 163 bp, Homo sapiens
gaggaccatgctaagccatgaccagtgaggagaagcaacagagccttgtctgtccccattgagcggagtcttgtcctctgctctactgcagtcaggtcactgcctactgcctcggggctgctagtcattccagtcgaggacgattgtaacctgcgtggtgatg

SEQ ID NO: 608870 - DNA, 116 bp, Homo sapiens
cccctagtttagaagttcaatagcacattgcgtgctggggtagtaaaatgggcaggtaagggtgtgattccattgctgcctgggggttctttttgtaggtgctattgaaacttcta

SEQ ID NO: 608871 - DNA, 288 bp, Homo sapiens
aatgacggatgtggcgttgatgatgaggcgtggggtttatgacagagcgtggggtcaatgacagggtgtggggttgatgacggggtgtggggttgatgacggggcatggggtttatgacagcttgtgtcagacgaagccacatcaactcattctgagcacccctttcctcaaaacataaggatgagcatgaccaaaatctcaagacatttttcctaagtccttaagacggatgaacttctacaggtaagtaggtagattaataaacagaggtaaggaatgttggcatg

SEQ ID NO: 608872 - DNA, 982 bp, Homo sapiens
  misc_feature (241)..(241): n is a, c, g, or t
actggtgcatgcccgccgacgcataaagcagagcgatgcttgtaacacccgtgagatagagcgcgtggggaagttcgagagggaggttaaccccttatgagggccctgttaaaatcctgcctggggggagggtaatgcctttggggcccacaaactaaagggtcaaacgcactcgccaggaaaaggtgagaggggttttccgtgtccaaccgacagggttgtctccctagggtaggcacgngtgttccgcacgggtcagcgcacgcggggcttggaaaaaacctggcggtgccacggtggccctgaggcctggatataaatgagcggggcggcaaccccattgatggggaggccacactattggtgaaccaatagagaacgccttggggtaaacagccgataaaaggcttttggggcgaccctccgcagggtgaatacacttctaaggaggtgcgggcgcggtctcttcttttttattttttgttttcatttgtcaaagagtcgtcgcagacttttattcaacgtggtctcaaagtcagatgtaccagggtaagccgctgcgcatgcactccacccagtctccacgggagagccaaagaaggccttcagtacatactccaagttgtgtgggacaaataaatgcgagggtggaaaggaggtggaggggcaacgaaaggctctaatcagttccaagataactaaatagaccaataactaaaaagagtacttacaggcgaagattaaaaaaattttgcattacatatatttacacgaaagcaatgcatatcacctcccctgtgtggacgttgggtagaggaatgggccattctccttagagtagacagtggggatggcttttaggatggcaagggacttcctgtaacaatgcatctcatatttggaatgactagtaaaacaacaacaaagtgcaatcgaagtcctcggccacattgtgaacttagagcggagtggctcgctccaa

SEQ ID NO: 608873 - DNA, 728 bp, Homo sapiens
ggctcctcctccccagacatggtgttcacgttgcgcggtcttctgctacatgctggcgctgttgctgcactgccgcgctcatcttcttcgcgcatttggcacattaggtacgcattctgatgaagcgtgaacgacttgattacaaagaattccgtatatgaccagtgtagataccctgaatccgccttgtactcccagacgtacctcatccacgctctttcttctgtgtcatgtgtctttgtgcagcatgatctggcttacactgggtctcaatatagcccctcttggcatatcatatttgagaaggtatatgagtagagccatgtgactgaagatggccccacggatcgtctattgacccttctacaaggcattcatgtatatgcaggtactgttctagcattacttgtcacgaatggaaggatggtgccacattatgctttgtatcttctagcatttattgttactagcctatatggcagtgaatctatgttcttggtgagctcttaagaacagacaacacagaagaattggtcctagttaagtgcatgcacaataggccttagccactgtgaatggcatgcgtatccagcatagatccgtgtccgaagtagtagcctgtgggaagtctgatcgagtgtgactttatagatatgactccttattcgtttaattgtttccacagtttttgcttgtggtcaagactggttcatatgttgtactcagat

SEQ ID NO: 608874 - DNA, 281 bp, Homo sapiens
ggaggaatgcgagaggcaggacggatgttgccgtgtgctacgttctggtcctggcccttcctgctcctgaggccccttcctcatcggtgccagcggacttctttctagggtggcctttccctctgtggggtggcagagcccacaagtgggggatcacacgtagcagtgtgaggccctgagtgggaggggtcttctctagtgcaggagacgtcgctgagcacttgctccaggcgcctggcacgcgataggccatgcacggcagggcaggacagatgcctggg

SEQ ID NO: 608875 - DNA, 136 bp, Homo sapiens
atcgctgaggtgcattagaggatcctgtagtcgttagcacggcagtgttgtgctatctagcaaatatgctgttatgtccagaaattgtgtgtgcaagaaaactaggcaatgtactcttcctgatgttatgttgtca

SEQ ID NO: 608876 - DNA, 980 bp, Homo sapiens
atgtcgtactggctagctgacgcaggtgcgagggcccacgtttcaattcaagatttcttgtaaatggaactcttagtagtgtagcaggtacgccatagcttcataagtggtaaagaaaggtatacgattggaaccattagtggggcatagtagtgatggggtgaaaaggataagtatatcaaaatgagaatgtgctgtagtcggaaggtagggaggtaaaggatgttgctttcagggttagtagaaacagggacgtttctactatggaaacgaatgcgtttctataaatgcatggatccaagtaatttatattcaatggtaagtatataaattactgctgttcagcttattaatgtttgaactgtgcccattacatgaattagaaaatttagagaaatcagttggttctaggtcaggctagcagtttagagaagagttgaagaactaagagcacttaataagagaatttgtggatgaatttcttttataacatagaaaagaaatgaaaatacataaataatatagatatgacaaataaaacttaacaactatatatgccaaaaaatgtaagggtagtgaggtaggttgttaatcatggacactgaggctgtggttaataactttctaactatgtgagctgcatgttctttccattggtaagaggataatcaatgaagacaggttggcttcctactatggctacgcgtactagagaggcggccttggacaaaaaataaagcatgtctgcggtgaggcaaaaaagaaatatgcaatacttttaagtgtaaaacatgtcaataagagatacaaggggacaaaatttggagacctgcatatcaaatctttttggcaccttccaactctctctgttaatgaattacgttatacccgtggcgtaatgataatccttccacagtagagagatatccggcataaaactacggagcaatattgtgcgaagaaaaatggacgcccttatg

SEQ ID NO: 608877 - DNA, 727 bp, Homo sapiens
  misc_feature (105)..(105): n is a, c, g, or t
ttcggacgaggctgcccacaagcctgtgaagcaatagcaggggtaaagcaaaccccagcccacaccctggcaggcagccagggatgggtggatcaggaaggctcntggttgggcttttgcatcaggctcaggctgggcataaaggaggctcctgtgggctagagggaggcagacatggggaccatgaagacccaaagggatggccactccctggggcggtggtcactggtgctcctgctgctgggcctggtgatgcctctggccatcattgcccaggtcctcagctacaaggaagctgtgcttcgtgctatagatggcatcaaccagcggtcctcggatgctaacctctaccgcctcctggacctggaccccaggcccacgatggatggggacccagacacgccaaagcctgtgagcttcacagtgaaggagacagtgtgccccaggacgacacagcagtcaccagaggattgtgacttcaagaaggacgggctggtgaagcggtgtatggggacagtgaccctcaaccaggccaggggctcctttgacatcagttgtgataaggataacaagagatttgccctgctgggtgatttcttccggaaatctaaagagaagattgcaaagagtttaaaagaattgtccagagaatcaaggatttttcggaatcttgtacccgacagatctcgtttctaccaattcagcacactgcgcctactatgatcat

SEQ ID NO: 608878 - DNA, 157 bp, Homo sapiens
tctagaggatccctcccacaccgttacggacactggattccacaaggtagatgggctccatgaggcgtggtgggcggccagcacactggcgtagagtcagcgcgtgctgtgggaatatctggccccctccgcggtgtatggcgtcggttgcagggtg

SEQ ID NO: 608879 - DNA, 363 bp, Homo sapiens
agtgttactgaatctgttatggccagtgttttataacccccttcacattacctggtcagtaacttgcttcagatgaaaataacggcagaaagcataattttttgttgagatcttgtttgagacggtgtctcaactctgttgctcgaaggtggagtgcagtggtgtgatctcggttaactgcaacgctcagcctcccgggttcaggtgcttctcctgtctcggcctcccaagtagctggcattcccggtgcctgccaccaatgccgggttaaatgtagtattgggagtagagtcaggggtttcgccatgttggccaggatgttcattgaattcatgcactaggcgatctatctggctcagtctc

SEQ ID NO: 608880 - DNA, 433 bp, Homo sapiens
  misc_feature (66)..(66): n is a, c, g, or t
  misc_feature (114)..(114): n is a, c, g, or t
  misc_feature (116)..(116): n is a, c, g, or t
  misc_feature (120)..(120): n is a, c, g, or t
  misc_feature (123)..(123): n is a, c, g, or t
  misc_feature (126)..(126): n is a, c, g, or t
  misc_feature (135)..(135): n is a, c, g, or t
  misc_feature (141)..(141): n is a, c, g, or t
  misc_feature (266)..(266): n is a, c, g, or t
  misc_feature (297)..(297): n is a, c, g, or t
  misc_feature (319)..(319): n is a, c, g, or t
ctcgttttcgccccatactcgatgccgttctcaaccaccatgcctgtcgtgttaagggcggggatnggacatgactggtagcgattcggtgcccataggcttgaatatatgtcntngtcntanctnttgtcaacngtgaangtcggtgtggcagctgttgtgcgcatagtcccaggtgtggtgaaccggacactctcagtaggattttctgtttgttgggttgatggagcctcgggtgcagtagttgtggctgtgaagtctaccanctcttgctcctcaagagctgtagtggaaacngcatggctgagttcaatcgaanagcgggtggagcggctgctcgagggtgtggtaacgtcacacttaaactcttcgtcgagtagggaaccaagtgggcggagaagtagagggtacggattacgacatatcacatcct

SEQ ID NO: 608881 - DNA, 398 bp, Homo sapiens
  misc_feature (36)..(36): n is a, c, g, or t
  misc_feature (107)..(107): n is a, c, g, or t
  misc_feature (118)..(118): n is a, c, g, or t
  misc_feature (124)..(124): n is a, c, g, or t
  misc_feature (127)..(127): n is a, c, g, or t
  misc_feature (136)..(136): n is a, c, g, or t
  misc_feature (139)..(139): n is a, c, g, or t
  misc_feature (145)..(145): n is a, c, g, or t
  misc_feature (149)..(149): n is a, c, g, or t
  misc_feature (152)..(153): n is a, c, g, or t
  misc_feature (159)..(159): n is a, c, g, or t
  misc_feature (204)..(204): n is a, c, g, or t
  misc_feature (226)..(226): n is a, c, g, or t
  misc_feature (245)..(245): n is a, c, g, or t
  misc_feature (247)..(247): n is a, c, g, or t
  misc_feature (249)..(249): n is a, c, g, or t
  misc_feature (251)..(251): n is a, c, g, or t
  misc_feature (253)..(253): n is a, c, g, or t
  misc_feature (259)..(259): n is a, c, g, or t
  misc_feature (271)..(271): n is a, c, g, or t
  misc_feature (282)..(282): n is a, c, g, or t
  misc_feature (287)..(287): n is a, c, g, or t
  misc_feature (294)..(294): n is a, c, g, or t
  misc_feature (299)..(299): n is a, c, g, or t
  misc_feature (304)..(304): n is a, c, g, or t
  misc_feature (307)..(308): n is a, c, g, or t
  misc_feature (311)..(311): n is a, c, g, or t
  misc_feature (319)..(319): n is a, c, g, or t
  misc_feature (324)..(324): n is a, c, g, or t
  misc_feature (327)..(327): n is a, c, g, or t
  misc_feature (331)..(331): n is a, c, g, or t
  misc_feature (345)..(346): n is a, c, g, or t
  misc_feature (350)..(350): n is a, c, g, or t
  misc_feature (360)..(360): n is a, c, g, or t
  misc_feature (363)..(363): n is a, c, g, or t
  misc_feature (367)..(367): n is a, c, g, or t
  misc_feature (370)..(370): n is a, c, g, or t
  misc_feature (392)..(392): n is a, c, g, or t
gatttgggtcccgggatttgtgaggtggtgtgattnctgtcagtgtttctctatgcctatgttgtcaaggctcagatgcgtgggggtcacttgggagactgtcaaantggtgattccnggttcnggnggttcaggnggncgcggnggcnggnngggggnggggcgggcccccaactgtcggcatttttggccctttccctgggngattgtggtgcacgtgaggcgnctgtgtttccctaaacgcngncntntncggggnttgggggggggnttgcgggattngggtnggggacnttccntgcgntgnnccnttgggggnggtgnggngcgntccgcctgacgggnnacgngcctttggcnccngggngangggtggtgggttgggggcggtnttgggc

SEQ ID NO: 608882 - DNA, 785 bp, Homo sapiens
  misc_feature (274)..(274): n is a, c, g, or t
  misc_feature (276)..(276): n is a, c, g, or t
  misc_feature (284)..(284): n is a, c, g, or t
gcgagggccgttgggttggcgcgtggttttgggttggcgccgcgccgccgtgtgtttccgcgcgggggtcgtggtctccgcccgcaacaccctggggtggccgcgcaaggtatggaccttgttgcgtcgcgggagtgttgtgcttaggacgctgattctcgcatcgagttggtgcgtcgctcacatggatgtgtctcctgttacagagggcgaccgtattcgtggtcctgttgttattgctcgcgccgttgtgcgttgcgcgctggcgtccgcncncccgcgtnctgtcttgtgatacgctccgtggttgccttgtggtaggagagaggccgcgctcgtgtcgtcggagcgagactctgcagtgttgtggtgtgttcccaccatgcgcgcgcgctcggttgtgagagtgtcgccacgtcagtgcgatgcatagtggctccgtgtcgtgtgtctgccgagggcgccccgacactgcgtggtgtgggtctgattgactcgctcttgtctctccagacagtgtgacaagcgagagcaatactctttgtcttggctgtgccgcgcacctcgctcgcattgtcatcctctttcatgtgcgcgtgtgaggagcacctagtctcttgtagagtctatgattgtttcgtataaaactcctcaacgctgtctttggatggcgaaccacactgagtgacccccacgatgagttgactgtctccaggagatctttgtgtgagcgccccactataagaagaagagtcaaacaggcacaacaaataacaaacaaacaa

SEQ ID NO: 608883 - DNA, 338 bp, Homo sapiens
  misc_feature (179)..(179): n is a, c, g, or t
  misc_feature (224)..(224): n is a, c, g, or t
cccaaaagtcctggaccagacagactcacagctgaattctaccataggtacagagaagagctggtaccaattctactgaaaccatttaaaaaatcgaggaggagggacttctccctaactgattctataaagccagcctcgccatagtaccaaaacctggcaaagacacaatgaaaaantaaaaccacaggtcagtacccctaataaacatagacacaaaaaanttctcaacaaaatgctagcaaaccaaatccagtagcacatcaaaaagttaatttgtcacggttcacgtaggcttcattcctggggatgcaaggttcagttcaacatatggcaat

SEQ ID NO: 608884 - DNA, 303 bp, Homo sapiens
tcttggcctctccccatgtctcagtgttgcctgcatttctcccaggacttgggggtggggtgaaaagcgtacacaaaagatacttaaaagggctcctggggtacacaagcccagcaggtcctgagtgaagccgtgggccctccaaatgctcgtcttatcgcaacctctctctcccctagtcctccaaatccactcctgccttcctcaggttcgctacctcgcagctttgactacccagcggcaattcaatatttctactatcaacttaacttataatgcacatcgccaaatcctttcctctac

SEQ ID NO: 608885 - DNA, 468 bp, Homo sapiens
  misc_feature (331)..(331): n is a, c, g, or t
ggggaccctggatttaccttgatcggtggcggtctccaggaaaagtgtcccctccttcaagcctccccacaggggtttgcccaggatgtgggcggcatgttcaagcaattcaacaagttaattgggggcaaggcaaaggggcagtccattatgggcctgcagggtttttttaaaaggggcatgaacgaggccttcggggaccccaagttttttgttggggtggtggagccccccccaataagcctgcctggggttggcctgagttcccaggagatgtttgggggccctggtgatggccccttagggtggagcccccatggcaagcccagcntggttttgttttttgtccggtccccccatcccccctccccggggggcctgattccccctcccggggggccccctcccccagttcctcccgaaatggtttttatttttgggggtttaataaaaacttcccccgttcca

SEQ ID NO: 608886 - DNA, 845 bp, Homo sapiens
tggtctttgtccaaaattttataaaagggtcttaaaaagcaacatccaaactccaaaatacagctgccaaggaaaaccctgtaatgctgtggggactggctggggcatggcaggcggttcgtggtcttcccacccttctggttctggaaatgggggtggtggggcagtatctcatcttaggggtcccacaatgctcacgtggtcaggcaggggcttctatagggccaatctaaccagtgggtggtcccagggcagaataggatcttcaccttgatgcccagcaacaccctgtctgagcaaacactgtggcgcacagacagtgtcaacgtagtagttaaccagggtctccgctgtggatcatcaggccatccacaaaccttcatgggattaagccctctgtcctcggagtttcccagagaccacaacctcgacagccttgggccccactctccatgatgaaccgagcacaccataagcaggccctccgaaatgaagccctcctaggagtttgtaacgcaaagactctgcctggggcaatggcacacagaccctctatggtgccaccttttcagacataaagctctatagtgccctcgtgaaaagccaacctcttttgaactacagaaagtcagtcccggaatccggcggccttttcaccaagaacatcctgcgtatctggggggcaagaaaatgattcggccctgtaggtgtaacccgaactcaatccagagttgctcacttcagacactccccgaatagaaactcttcagtacagttggaaagcccacaggaaaactccctctggaattggctggccatgaccggccccggttatggacaggcgt

SEQ ID NO: 608887 - DNA, 228 bp, Homo sapiens
tagctgactctagagtatccccacttcaatgctgtgagccatcaccactaaatggacatacaaagtgccaggtataaatcagcactgtctcttataatagcttttcctaactttgccctaggcaacaagatggattcaaaaagtgggaaaatctgtattgcgatcgctctcacctgattcaaaatacacactacacgtttctaagaagtgtcattgttggccgggcat

SEQ ID NO: 608888 - DNA, 272 bp, Homo sapiens
cgtttaaggcgagccgggtacttgaacggaggatagtgcctcatcagcttcgaggaggagcgggccagctgtccttcaacactggacacgctctactgaacaccagagctggccagtgaggagacgctccactgaccacccagagctgggccagggactcaacaatggggacagaagtcccccagtgcctgccagtggactagagtgtgggtacaggaccaaggggcttctggtcctccagcccctgtactcgtgcatgccctgcggtcact

SEQ ID NO: 608889 - DNA, 435 bp, Homo sapiens
  misc_feature (4)..(4): n is a, c, g, or t
  misc_feature (78)..(78): n is a, c, g, or t
  misc_feature (81)..(81): n is a, c, g, or t
  misc_feature (83)..(83): n is a, c, g, or t
  misc_feature (86)..(86): n is a, c, g, or t
  misc_feature (129)..(129): n is a, c, g, or t
  misc_feature (140)..(140): n is a, c, g, or t
  misc_feature (147)..(147): n is a, c, g, or t
  misc_feature (159)..(159): n is a, c, g, or t
  misc_feature (212)..(212): n is a, c, g, or t
  misc_feature (224)..(224): n is a, c, g, or t
  misc_feature (277)..(277): n is a, c, g, or t
  misc_feature (304)..(304): n is a, c, g, or t
  misc_feature (318)..(318): n is a, c, g, or t
  misc_feature (320)..(320): n is a, c, g, or t
  misc_feature (322)..(322): n is a, c, g, or t
  misc_feature (335)..(335): n is a, c, g, or t
  misc_feature (374)..(374): n is a, c, g, or t
  misc_feature (378)..(378): n is a, c, g, or t
tttnggtcttctcttttccccctccttcctctcctccctccccctggttaaaaaaaaaaaaggtaaagaaagccccanttncntgngggggggttgctgatagcaggggggggggcctggaaggggagntggggcccgtnggggggnggggctcccaantccctgggaagccagggcttgtggcttacagagaggagagggggtacgggcantggctgctcgtntcctctgccacccctgcccactgtccaggggacttcaacacaaccgggggggnaggtttgtgtggggtcaggtctgatanaagaggagcagganananaaatcgttaaaanctagcgaattcccctaagaaaacatttcttcctcctttncttntggaggctccttaggttggtagggaaataggagtgggtgggaaagaggggggagagg

SEQ ID NO: 608890 - DNA, 723 bp, Homo sapiens
ttttcccatgaaatctttcgccttctaatattcaaaaagtgggttttttcctctcataaatatgactctaatagcccctttgtcattcttagcccacatatattatgcgacattacttcctcctctccacacctctgacctctctaataatacttctccgtgactttcacacacacgcgcccactcattgaagaagtttctctagggtccgccacacagaaaaattatgctgagtattaaaatactatctgcgtatagcaatgttttttctcctttaccagggtactattcccgagcgttaatcactataccttaacattctattctatggctcaacaagcatcgtgagaaaaaattttcacacaccccatcggtgttcttttataaatagaagtggtttgtacttcaaacacttcctaataattattatgtttctcccccctcgaagaccccccgcagatattatcaaagtcctagaatatactccacagacagcacgtgccgataccaccacgcatcctctagatcttttctataagatattttctcctccaatcttattatgttagcgaggagtatatctattaaacaacccacttttaagacgagtatttcaacatatctacattcactattccatccacccctgatttccattggagactatggaaatctgtctttctctttccccccaatacaaattctcattcccccacaaaacaa

SEQ ID NO: 608891 - DNA, 432 bp, Homo sapiens
  misc_feature (8)..(8): n is a, c, g, or t
  misc_feature (16)..(16): n is a, c, g, or t
  misc_feature (73)..(73): n is a, c, g, or t
  misc_feature (79)..(79): n is a, c, g, or t
  misc_feature (171)..(171): n is a, c, g, or t
  misc_feature (174)..(174): n is a, c, g, or t
ccccttcnaaaacccntcgaggtttaagatctccctcactgcccgaaaaaggcggccctgtgtatcctttttnagaaanaggagtgcctgtttcctatacctaacccagtcaggacctagtacaagatgcctgcctggacgaataaatgaaaaagcttctggccgggtgcnagntgtcacgcctgtaatcccagatctttgggaggctgaggcgggcggatcacgaggtcaggagatcgagaccatcttggctaacacggtgaaaccccgtctctactaaaaatagaaaaaattagccgggcgtggtggccggcagctgtactcccagctactcaggaggctgaggcaggagaatggcgtgtggggtgaacccgggaggcggagcttgcagtgagcagagatgatgccactgcactccagcctgggcgacag

SEQ ID NO: 608892 - DNA, 137 bp, Homo sapiens
aatagcattctttctaaacttacaaatcagacacatagtgctgtgggtgtgtgcatgggtatatgtgtgtgtgtgttctctggagttatgcaaggaagacgttttctttacatatgtgatgatttgcctcattgaca

SEQ ID NO: 608893 - DNA, 327 bp, Homo sapiens
cagcgatgaggatattgtgtgagtagtatgtgcccatgggtatatgaaagttgtgtgcgtatattagagtataagtgggttttgtggttttatttatttggtatggtatgggtttaatcgggagagggagaggtgtgaattcagggttagttggtgagtgtgtatataaggggttgggggtatataaagatttaggggtcctcggtgtctgtggtgacccggtaatactcgcagacacttgggtgtggcccatggtctgtgtgtcctcacgacgttcgtgagggggccttactactgtcttggactaacacacctagtacaggcggg

SEQ ID NO: 608894 - DNA, 904 bp, Homo sapiens
  misc_feature (40)..(40): n is a, c, g, or t
  misc_feature (60)..(60): n is a, c, g, or t
  misc_feature (62)..(62): n is a, c, g, or t
  misc_feature (248)..(248): n is a, c, g, or t
  misc_feature (274)..(274): n is a, c, g, or t
  misc_feature (392)..(392): n is a, c, g, or t
  misc_feature (405)..(405): n is a, c, g, or t
  misc_feature (435)..(435): n is a, c, g, or t
  misc_feature (455)..(455): n is a, c, g, or t
  misc_feature (475)..(475): n is a, c, g, or t
  misc_feature (590)..(590): n is a, c, g, or t
  misc_feature (617)..(617): n is a, c, g, or t
  misc_feature (661)..(661): n is a, c, g, or t
  misc_feature (667)..(667): n is a, c, g, or t
  misc_feature (671)..(671): n is a, c, g, or t
  misc_feature (682)..(682): n is a, c, g, or t
  misc_feature (690)..(690): n is a, c, g, or t
  misc_feature (749)..(750): n is a, c, g, or t
  misc_feature (798)..(799): n is a, c, g, or t
ggagctgggggaggattggtggcccgcgaggctcgtcgcngacaacgcggcggcgatgtncncgagccaggcgagtgccgcggcggcagcggcggggccttgcgcgcggcagggcggcctgggcttcggcctccctccggttccctggaagcgggcccgcgaccagcgcgggagcagcagcagaggcggaggctccagcgcgtctctctcctccccctcagcctgagccgggggaagccaggcggccngggtgtctggaggggggggggtccgntgcccgagaatgggaattctcttcactagaatatggagacggttcaatcaccaggagcacaaagttatcatggtggggctggataatgcagggaaaactaccattctttaccaatttnctatgaattgaangtggtacattacatctcctacaataggaangtaatgtacgaagagatagntgacttaataatacacgttntcctaaggtgggatatgggtgggccaagaatctcttcgttcttcctggaacacttactatactaacacagagttggtaaatacgtggtgggacagtacagacagagagaggattnctggtaactagagaagaactctataanatgttagcgcatgaggacctaagaaaagctggatggctgatttnggctantaancaagatgttanagaatgcntgactgtgcagaaatctcccagttttggaagctaacttctattaaagatcaccagtggnntatcaggcatgctgtgctctaactggcgagggatggtgccagggactnnattggctgatgtcgcgacttagattagatgatctctatgacctcttctcatagatttgttaaatgaagtgtggatttacctgaaagctgcaaattaagggttaga

SEQ ID NO: 608895 - DNA, 471 bp, Homo sapiens
  misc_feature (30)..(30): n is a, c, g, or t
  misc_feature (38)..(38): n is a, c, g, or t
  misc_feature (46)..(46): n is a, c, g, or t
cagaccaaggcagggccagaggggacggtncccgaggncagcggcnccggaaacggcaacaggcacaactcggccccggaacatcccggaggccccggggcctttagagcccgcgaagggctgtctcctcgggcgcggcggggccggggctctcagcctcgccgccgacctcgggaaaagccccccagcctctccacccggcagctggaggaggctggtccggggctggggacagcgggatcgacccgcctggggctaggccgacggctggggatcgcggaccgcggggggcgcacgtgcgagacccttttcccggcccgcagggaggcaggacggagccccaacttcaggcgccgacgccgcgtcccgcccggaggccgccggggagggccgagtgcgcacgcgcctgactctgtccccacggcgcgcccgggggcgccggggccgccctgtgattggcccgggcggccg

SEQ ID NO: 608896 - DNA, 184 bp, Homo sapiens
attctgttcatgtgttagtagacagagaatgatggtttccagcttctttgcagcgtctgtgttcttccaatagttcccagccgcactcttttggacttgagtcacatagagggaggcagaggaacatgaaaaagctgcagttaccgtcccatgatgggcaggggctgcctcagagctgagctga

SEQ ID NO: 608897 - DNA, 1791 bp, Homo sapiens
gtttatagtagtcagtcatgtaactcattaaccctaatcactagagttaaagcaaaaaacaatgaagtgctcatatgtaattgaacctacttcagatcacatgaaaatgactgatttaacatttaagtatcacagccttaaaagaaaaagaaagtaaaccagtcctttgtcattcagttacctaatggggtgccatcaatcaagctgcgcatacagccctggcagctcagtcagccacaccttcctgcatcctcattggccttattcattttacaatgcagttaatgaatctgccagatctgtgaatgcatagagcattcatgctcaaattacatagctgattctttgtcgtagtgtcgggacatctctgtagagcaccttttctttcttagcactaagtcacccagtacaatagtagtgcaactgcatccttccacacttcaggctatctctatcaggcaaacagacgacttcctagtcatcaggtgtcctactggggcaccactcactccaccaactgtccccgtcaccttaaatgctgccaaactaatcagtatacataaacggacacggacatggcccaactcagcaagaacagagaacaagggagaaaacaagactcacccgaacaccatcatgtacacgaacacgacggcacacggcaaacagggcaagagacaaaaaaaaaaggaaaaaacacagtgacgaaacacaaagacaggcagacaggagagcaacgagagaaaaaaagaacaccccccacacggaccacacagggcgaccaaggactacaatagtaaacaacaaacaaaggcaccacagcaagacaaacaagaacaaaaaagcgacacagaaacacggccaccaaacaggcaggccgacacagtacacagcaaacgacacaccaacaaacaaaaacgagaagcagagaagacacagaaacaagaaaacaagagacgacagaagcagagcgagggaaacgaagcggaaacagagcgcggaacgagaaaggagaagcaccacggacagagagcgcagaaggcacgagagaagcagcagccagcaggagagagaaggcgacagacaaggagacacaagaaaagcaggacaggacgagagaacaagggtgaagagggcagcgaagagaggaagacgagaggaaacagaacagaagggacgagcagagcacaaggaggcaacaacagaagacagagacgaacaccgcagggagaacagacagcccagaaaacaagcgaggagaagggcaaggacgagacgatgagagaacgggcgagggacacggacaaacagcagacggagaacacgcacgaagacagcaaggagcagacagaagaaaagagcgagaagcccgaacagcggagagagaggaggaaaagacaacggagagaaggagagggaaaagcacggcagaaaaaggagagagagaggaaaagcaaagagaagagaagagaaagagcaagagagggagggagcacacacgaagcgcgagcaaacaagagaagaaagggcaaagcaaccagagagcagagaaaagcagaaacaagaagaggaagacagaaagacagggcaaccaaaacacgaggaggcaaaccaaagagagaacacaaaggcaaacagaaaagacgaagacaagagaaagcaaacacaaacgacaacgaacaagagacgagagagacagacgaaaaagagcaagcaagaaaaaaaacgaggacagacgagacaaaaaagaaaagagagaaaaaaagagcaaagagcaggaagaagagaggg

SEQ ID NO: 608898 - DNA, 324 bp, Homo sapiens
ttacctgtgattgtgcatgtctgaagaataggccccgagcactggcacactggagggaataagtaatgctctggcggcaatggtgcactatgtagggcttagtgtcatcatcctcgtcctcatccatgtgctatgtacatgttaagcaactggggcagatagaagtccacgtcctcgttgcgaaagcagaagagccggttgccaatgtaggcttgtactccaggctccttggagttatacaggtatgaaatggccatggagatgtcaaacagttttgactcaaacagcctcagcagccaagactgtttagctgagttgttctgc

SEQ ID NO: 608899 - DNA, 240 bp, Homo sapiens
actctcctctgctgtaggaaggcggtagaggggcggtgggacccaggccatcaggagcgggatgccaccgagttctcaaatgaccttgttccgccctggcccttcctgtccggcctccagtggtggcaccgtgatctccacccaggtgcgtgaccacccccatccccaccaatcacctcatgcgagattctacgcagagtgggagtagagccagtgggcctgtgtgggaccccagggtgt

SEQ ID NO: 608900 - DNA, 125 bp, Homo sapiens
ggttatgtactatactgctagtactagacaagatattgtacataaaagaaaattttttgtctttaaatagatacaaatgtctatcaactttaatcaagttgtaacttatattgaagacacattga

SEQ ID NO: 608901 - DNA, 427 bp, Homo sapiens
ctgagtttccccagaccaccctcctcttccctacactggccgtaaccgtgccgggacacaggtctctttgcctttgcttctttgtatcctatggctgtgactggggtctgatcattaaattacatgacttttaaggccagggagctgggcacgggtgctcacacctgtaattccagcactttgggaggctgaggcgggcggatcacttgaggtcaggagttcgagaccagcctagccaacatggtgaaacccccgtctctattaaaaatacaaaaaaattagccgggcatggtggcgggcgcctgtagtcccagctactcaggaggctgacacaggagaatggcgtgaaacccggaggcagagcttgcagagagccgagatcgcgccactgcactccagcctgggcgacagagtgagaatccgcctc

SEQ ID NO: 608902 - DNA, 181 bp, Homo sapiens
ctacttttcaggctcagaaatgggtaaaatcacaggacatctctcttcccaccaagaaaaaagttgcatattttggtaagtgtttgtcctagagggaaagatacaagctgaatatttaccttatgcagtgctggtgcaagattctctacataaatttcaaagaccgtagagacctagcggg

SEQ ID NO: 608903 - DNA, 136 bp, Homo sapiens
ttctagctcggtacccccctgtcaccttgtgctcctgcctgaaccaagaatagtccaagtaagttccactccctcatagccactaagctgttgcccaagctactccctcttctagaatgtgtcctttctatctgat

SEQ ID NO: 608904 - DNA, 238 bp, Homo sapiens
gatccctaatgttagccacggggtttctctttggcggtgatgatacggttctaaaatcgattatggtaggtctagcatggtggctcacacctgtaatctcagcacttgggaagccaaggcaggtggactgcttgagcccagaagttcaagaccagcccaggcaacatggcaaaacctcatctctacaaaaaaaattcaaaaaagtagccgggcatggtggtgggcacacattatggag

SEQ ID NO: 608905 - DNA, 406 bp, Homo sapiens
gaaatttctgtaggatttttattgggggcacctggggccacatggagggagtcctcacctcatgaccttgaaggagggttaatttggaagcccctcctgggatgtcaccctttaagtcctcatgagtcaatcttgagattctccttcactttcttgaatgtctcttgaaaccactcccgcatcttggcagaaagttcacttttgttgatgcggctgatgagttcccgagcctttgtctccagtgtgttttcaaactcctttagcttatccaaagcactggagacgtctggggtccctgtgaatgggcttggccttccaagacgatcgacagaaccaccacacagacccgggagcgacaggaaagagcctcattgcgaggccggaggggcactcttaatccctgctg

SEQ ID NO: 608906 - DNA, 267 bp, Homo sapiens
ttccgcgagcagagccagccgactgtggggctgtgggccatggagacgtgctggctaggccagactgcctgctgccctaggtggggcctgctccctgccctggaagctagactgagtggagactcaagcactagagtggggcaatgggatgtgctgtcctcctgcagcaggaggaggagcacacgaaccctgaccctgctactcggtgcaggccactccaggccttgcttctctaacagcccctgtggctggctccagagctgcctg

SEQ ID NO: 608907 - DNA, 396 bp, Homo sapiens
ggagcatcctcagctcagtcacatcctcaacccacccacccatgcccaggggcagttgttaaagagatgtggggccaggcacggtgtttcatgcctgtaatcccagcactttgggaggcagagaccggaggatccagaccctgtctctaaaaacagaaacaacaggagtctgcgcacagtgtgctcagcgccgtgttaatcccaagcatttgtgcggaggccaaggggcgcagatcattttgagatcgcggagatccaagaccagcttgctcgacaacagtgaaaccccatctctactagaattgcaaaaatatagccccgctgtgtgttgcacgcctgtgttccccaatactcgggaggctgagcggaaagaatcacttgaacccggggaacgag

SEQ ID NO: 608908 - DNA, 425 bp, Homo sapiens
agcgggctgcccggagcgctgagccgcgggagcggagccggggtgagcggcgcgtgctggaagatggcgagcggcgggatgagcggcggcttggcggctagggcggtcctgtggctcatgtgcctgcatgcggctggggagctcgggacccagggcggctcacatcaagaaggcgggaggcgactaccacgaattacgagcgcgggcgccgaggtggtcgagggccagttcgaccgttacttaccagtgaagaggagtgggagtcggcgctgagggacggcggaggcctgcgggtcgtcctccggtcgtggtcccgactctgtgaggcatcggcacgctctggtgtgaatggtcgtgccgctgtgggtgtcctctcgacctcaccgccggacctggggtcgcataactcgctgagggcgacgcgg

SEQ ID NO: 608909 - DNA, 308 bp, Homo sapiens
cattctcaggttaagccattctaagtcacaggatgatataggaggtcggcacaagatacaggtcataaagaccttgctgataaaacatgttgcagtaaagaagctggctaaaacccaccaaaaccaagatggtgatgagagtgacctctggtcgtcctcactgctacactcccaccagcgccatgacagtttacaaatgccacggcaacgtcaggaagttaccctatatggtctaaaaaggggaggcatgaataatccaccccttgtttagaaataaccacaaaaatgggcaatgagcagccattatt

SEQ ID NO: 608910 - DNA, 517 bp, Homo sapiens
cgggcaaagcaagtcattggcactcccttctagcagcaaccaaaggactgaccttggtctcgtcagcatggtcagagtacgtagcctgtatactcctcctctgcctggcagtgactctgtgtgtacaagtccctccctgaccattcatgttctggaagcaaaagtccgaaggtggagttcctacacaggatgccacgagccgcatcacgagtggtcagtgtccatgtaccatgtccccaagtatagagccaggccgctcttacagtgttaagtctgccctcagaatgcaggaattgctgccagcccgcaccaagcgcttccattcctcaagagagactgggcgatcaattgccctgcgtcatggtgccaagtgggcttggtcttgtcttcagccagtcaaatatgtgtctctttactagaaggagccggcagcgtagggaggggccaggtgtagaccttacttccccgggtagcgcgtgacgtggcaatagaataagatcagatgccccccaagaat

SEQ ID NO: 608911 - DNA, 385 bp, Homo sapiens
  misc_feature (281)..(281): n is a, c, g, or t
  misc_feature (294)..(294): n is a, c, g, or t
  misc_feature (322)..(322): n is a, c, g, or t
  misc_feature (334)..(334): n is a, c, g, or t
  misc_feature (359)..(359): n is a, c, g, or t
  misc_feature (376)..(376): n is a, c, g, or t
attatcgcgtccggtgagttgttgatgacattcgctcccccacgctttgagatcgagcattgcgccgtcgcacaccgggagcaatttttcccagccggtttcgctcaacatgccgttactgtccaccagacaggtgagatggcgcagttgcggatcgtttttgatagcagtaaacagcgccaccacaaacggcagctgggtcgtggcttcaccgccactcaccgttatcccttcgataaacagcactgctttgcggtcatggctaagcacttcggtcacgntcatggattgcgncatggggtgggcatgttgcgggcacttnttcaggtaggtntcacactgttcgcaaacccacaggngttccacacaattttgncgtaaacaa

SEQ ID NO: 608912 - DNA, 3199 bp, Homo sapiens
aatgaatgcatctaaggcacttagacaggacctggcacacagtaattattcaacaaatatgttgtcactattgttataataacagaggtgaggtttctgtaggtgattcagcaataggaatcaactctatgttgtttgggggcactgaggatgatatcaaaaggctagagtgttattttctccaattttacattttggctagtccttgttgaacacagagcagttttttccaaagttatgtcctaaatcaagtcatgtcaaatgccattgtttaggttctgttcaacagccatccaatgagcacatattaagtgccagactctcctaatgaacactggggagatttaaatgtatgagaaatgacacatcccccatagaagtgcatataatttactggagaagacaggcttatgaacaaattatttcaaaacaatttcagccaggcatggtgcctcatgcctataatcccagcactttgggaggccaaggcatgaggactgtgctgagctcaggagtttgagaccagcctgggtaacatagcgagatcccatctctactaaaaataaagaaaatcagctgggcgtcggggtgcttacgtgtagtcccgcctactcaggaggctgaggtgagaagatcgcttgagccctgcagttgaggctgcagtgagccatgattgggccattgcattccagcctgggtgacagagcaagaccctgtctccaaaaaacaaaacaaagaatttccatttggtcattactctcataggccatgacaatctcaaaaaagtgactcaccaattcataaaatatttgttcctccttgttatcaccttcctcactactcatcttctgtcctatttatgcctcctcattaatagatgagaggagaggaggaactggggaatggtggtgaggaaggagcagagaaataattattttagtgaaaatgctaacaactaagtataaaccaatgcacagtgtacaagtgcataatgagaaaacatgcttaagatatcacatccctccctgccatgccattcttgagaagtgccatgtagggatacatgttatgataaagcaaatatacagcattggattttttttttaaggggtctaatttcaaccattgtgctttaccgttccagaaagataagagattgtaacccagaagaagtgaagtttataagctcttcttactggtttgccatccaggggatactttacggaaagcctagctcatagctatttaatagtaatatcaggctgggcatggtggctcacgcctgtaatcccagcagtttgggaggctgaggtgggtggataacttgaggctaggaatttgagaccagcctggtcaacatggcaaaacactgtctctactaaaaaaaaaaaaaaaaaattagccaggcatggtagcacacgtctgtaatcccagctactagggaggctgaggcaggagaattgcttgaacctgggaggtggaagttttggtgagctgagatcacgcctctgcactccaacctgggcaatagtgtgagactccatctcaaaaaaaaaaaaagaatcttccaagcaagcactttacagttgagagacatgttccctataataacatcataagaactttaccataaagctgtgaactaggcaaaggtagacattattatattccttctttacataaatgaaatggaggctcagcaaagtgacatttcaaataattagtacagaagacttctcattatttgaacttttttctacattaattccaatttcattttgttcttaattttgccatgtttctaaaacagagtggttcctaaggcaagaggaaagccaacctagaagggaggacctgggaaatagcaagctggtttagcaactacacagagcacctacaaaggcacacatcaggcagggcgcggtggctcacgcctgtaatcccagcactttgggaggccgaggctggcggatcatgaggtcaggagttcatcaccagcctggccaacatagtgaaacctcgtttctactcaaaatacaaaaaattagtcgggcgtggtggcaggtgcctgtaatcctaactaatcaggagtctgaggaaggagaattgcttgaatctgggaggcggaggttgcagcaaactgagattgtgccactgcacaccagcctgtgggacagtgcgagactctgtctaaaaaccaaaaaaggcacacatcatatatgcagaactgaaaaatttcaaaaggcagcacttcgtatttttaagagatggactaattactgagatatataccatcaaaaaccaaacctgatgacaccttgactcgacaaaacttgcaggaataagaggtacctaggtgggtgtggtcactggtgaccagtgggaatggcatgaattcaagtatagctgtcatctcagtcttcctgcctcatcaagtcaagtgcagcgtgttctaggagaacagcatgcttgcttgtcctgatagcaagtggttctgcttgtacctgtaattgttacatggggtcaaaagttaagagctcagactttacagaacaaaggaacaacctgcccaaatcatctgcatttcaatttactcttgtgaaaaatggaatcagaacaaaacttgaaaggagagatcccattatctttattgcctaatgtcaagtaggtgttagggctttttaaagagatgcatggaagtctgaaagaatgtcaccccagtagccaagtaatgaagcaggaaaaggttgaaaatggcctatatcccacagtgggaaagaaaagacaggctgccttcagccccaactcttaactaaagggacagaggatgatcaagttagagcttaaatattcaaataggtgatttggtgatatcttagaacctctgacatcaatagagcataagaaagatatatttgggggccaggcacagtggctcatgcctgtaatcccagcactttgggaggcggaggcgggcagatcacttgaggttaggagttccagaccagcctggccaacatggcaaaactccatctctactaaaaatacaaaaattagcaaggtgtggtggtgtgcacttgtaatctcagctggggaggctgaagtaggagaatcgcttgaacccggggggcggaggttgcagtgagccaagatcacaccactgcactccagccggagcaacagaatgagactccgtcta

SEQ ID NO: 608913 - DNA, 105 bp, Homo sapiens
aggtatataccctccgttctacttctatgcctttgttagtcttgtcctgctctgcgttctaatgtgtctcttcatctccgttctcctgtgcgagtccgctgcttt

SEQ ID NO: 608914 - DNA, 226 bp, Homo sapiens
tttagcgattgcccccacccaactctgcatacttaccatttccaaactacggtttaaaaatctactttatatccaaaaacagtaacactgacattcctacccctattttcaagggagacagagtcaaggtccattcaaatctatatttacccaacagatttagacaacatgttttaaccatccaaatcatacaggttttcacttccaaatccaactatcagccagg

SEQ ID NO: 608915 - DNA, 978 bp, Homo sapiens
catggtgagtcaggccggggaaaggagaccaggtggttggtgagagtcttggcctctgggtatgtgctcaggagcccttctcatgagtcctcggacgttgtggacatgcctaggttctgatgagtcagaatctgttgtgcattgtccaacatgaggcctctgcctgggcgtcggttacagtctctgtgttcttggtagggcattcacatagatcgtggccactatggatctgagcatcccattatgctaccttccagcctccgtggctttgttagtgagaagtgccaagacccattcgtcattcctcttcccaccatacttgcctgcgaagagcggtttgacaggacttgattctcccaccttcttggccttatgtatatttcagcatagtagatgtacttaactacgactgtcgagacacttttctcctgttagttggcgcatacgtgttgggccccttttgcaggcctgaaacttttgggcccttatggtttgtatgataaggcactaaaggctaggaatttatccactttaccgtgatgtctaaacgatgggggatttatatatcgagatgtgggtaaagagggggcggggttcttgaggggtcatgatcagaggagcggatccaacataaatatgttgaaacaaaccccaaaatggccttatttggctctaagttgacccgtttaacccctcgcgcaggttagtcccgagcgccacggtctccatgccctcgcctttgtcaccctatagatggagataacgactgtggtaaacccgtcgaacaccaattttatgtcggggtcggtcgatcataccttagttgttctgtcttcaaggaacgtccttgaccacatagtctggactttcattacgtactttgtttacatccaggttcccatccatttttttcaataaccgttccattagctagtcaacttcttggtcttgggattaggctcgtgactgtgtcgacaa

SEQ ID NO: 608916 - DNA, 1281 bp, Homo sapiens
cccacagagtaccgatatggccctggcatacgtgaagcccccatgagtacgctttactactagttgcgcgtctatcgacccagtcatagcacctgattaacatcatcaagatgtatcagcgtgacgcatcgcctacagcaatacgcccgaatagcaaataacaccttgataaactacaacggcataggagaatagccataggatatgaacgtaccatattctggatatactgtctctcagttgcattagtctccccacatccaactcactgaagagcacaaactctgcgcgcaagtaccttgctgcatttctaatattcaccccatactatatcgcatcctccaaacgggtccaaaatattatacgtttgatccatacatatacgcatgcaatactatataccatcgtaacactgaaacattcacttgggtttataaatacctaaaagcatcaagaccgtacagagattaattacaaattcggatcaaacacgcattaataataaatttacataagtacgtgtacttgcaggccattgaagtcattccatatgaatcgcttaggattggataccataaaaatacaattaaaatgactcaggcgcgcaacgaaaggtaaagccctagccttacagggaactggctctgtcccgtaaaacctctactttttcttagcgcaacatgcaaatcacatgaacataggtgcaaaatcaagcttctacacccaaatgggtccaatttcccccacgttaaatgtaggccgcgaacagcccatgaaggatttggttgaacggtcttcccaaggtttcgggacaggacatataggctagaatgcgcctcttaagttcctagctgaactataaagcgaacaaggcgtggcaattagtcgtagcacaactccgttagtatccccctatttaccttgatgggaaatttacatacagcgaaacagcgcaatccatggtccctatccgcgggttgaccataacttcaagatagaacgccttgggtcgcgataactgggccataaatcccgggtttatcccagtgttgacaattggccgtgggcgcaatcctttacaattcactgtcgaacgcataagaatttggcgatggggcggccaacccacttagggcaaaactgaggataaaaggcccaatttttaccaaggacaattatcccgtttacgtcataaccgggtgtatttcaaattctctggagagagaggttcgttaaaactatcgtagaggttggaacacaaaatacgctatatcgaaccag

SEQ ID NO: 608917 - DNA, 245 bp, Homo sapiens
cttccccctgggttcaaagccattcctcatgcctcagcgtccccaagtagctaggattataggcaagcaccaccatgcccagctaatttttgtatttttagtagagacggggtttcaccatgttggccaggatggtcttgatctcctgaccttatgatccacccaccttggccttccaaagtaatgggattacaggcgtgagccactgcgcccgtcccagtttcttttttaatatattttttata

SEQ ID NO: 608918 - DNA, 1083 bp, Homo sapiens
gatagcaagaggcaagaaaggaacagtctgaggtttgagtctgacccatggacctctttgtggtcaaaaagtgatggggggaggacacaggatgaaatggcttgagatgtggcaaaagcttttcagcccagccaagggtgctccatggcaagcgctggggcacctctctgggagaggaccttcaccaaggtcagacgatgaacagcagtgctcggggacctgggtgttggcggctgcagcctctgggatgaccctgctcgcttcatcgtggtgcccgcggcctatgccttgtgcacttgggcctgtgggctgccagtcaatcgtggcggcctgtgcaatgttcatcctgacgcggctggcgcgcctgggccaggccctgcttctctacctgttcaccctgcgctctggtttgctgcagttctctcacgctcacgctgcccgctgtgcgctcacctactacctgggcctgagccggaggctgtctgccactgcggccggggccacctactacgtgtccacctatgcgcgctggtggcttccgccgcgctcatcacgcgtgtgccgctgccggcttcgtacagcggtcccagggaccagggccggctcccgcctggcccggtgctacaggcgcaccgagtgctgctagactagcgcactaagccctgggctggctcagtgccttggccccttcctctgcttggaagcacctgctgcgccaccgctccgcgctggacttcggccagtggagagccttcgatggctgcctcctgcaaggatggacaaacggcaaaccgacaacgactgagcaagagcgacacaaggagccatcatagccatggagcccaggcgcctcaaccgccaagacgcagcccgggagccaagacccaacaacaatagagcccgtggccccccacgacattacgccacatcctctccgccaacaccctactgccgcaccccactaggtacgcgcagcaacaaaacgccaagcgccaagcaccctctagcgccagcctaccaccaacagcggccagagaggagacaaacgcagacgacacagcacgtgcggcatcgacaaagaag

SEQ ID NO: 608919 - DNA, 251 bp, Homo sapiens
acaataatacttaataatgtactcctatcactcttgatgtcttatagaaattctcgccatcaacttctcacggtggcgtctcaaaaccacaccccatatccgacgactcaagatttcataatagacattgcttgaccactctctctatctaacgacagtgcgactcacccaccttatcgaaaggctcgacacccacgcaagtctaatcttattttaactatgtcccgattaatatacataggcctttcagc

SEQ ID NO: 608920 - DNA, 226 bp, Homo sapiens
tacttctgaaggacatctttaccatcttccaaaagttttctggagccaattggtagccaatccctggcccgtagccaactacggattggcttggccaatagattaaccttttctggcctttcattttaaccggattcttccatttggtagcctttggggtgaaactgctggaaaagtgaattacactgtaaaagctggtaaagtagctgcctaacggaaccaacag

SEQ ID NO: 608921 - DNA, 176 bp, Homo sapiens
  misc_feature (1)..(1): n is a, c, g, or t
nttctgagacatcaaactggacatctgagaagatgatcatgagagtgatttaagaaagaaagacagtggagaattgcaatcgatggagacattcaaagaaaagacttttggcactacactcaaaagagagtacaataagtagccctttgccttatacacttttaacatgaacataa

SEQ ID NO: 608922 - DNA, 418 bp, Homo sapiens
aggacaagacaggcagcacatcggaagtggaagcagcgacaaaggtacctgagaatagtcgacagacacaggttacccccggcccactcagattttgaatgaaagccagtatcgcggggactcatgatgccttcttcgaagccagagaaaatacatgcagtgtatgccttcttcaggcttgacagccccacctggttcaaaggacagcagaagtgcaagcaaagcagcacagcatgcaaccttaagcacggtgctttaagcatcctgaaaaatgagtctccatggcttttctcaaacatagcagaattagcttagcttcaaacagaaatcaggcttcaagttgcaatacatagcttcgttgggttttcagatgcaaacattcaaagtgaatacaaaattcaaatcagctcggggatcc

SEQ ID NO: 608923 - DNA, 386 bp, Homo sapiens
ctagcttttagctataaaccactcaaagattcagcccccagatcccacagtcagaactgaatctgcgttgttgggaagccagcagtggccttgggaaggaaccatgctgtggtcagagagggtggctggcaacacttccggggaaaactccttcgcccaggttctctctctagagagattgttccacaaccctgctcatgctgccttcaactagatcatgtttgccttgcttagagaattactgaaacagcccagtcttgcgatgcatttacagattctaggcctcaggttttgtagagtgtgagccctggtggcagggttggggggtctgtcttctgctggatgctgcttgtaatccatttggtgtacagaatcaacaataaata

SEQ ID NO: 608924 - DNA, 160 bp, Homo sapiens
  misc_feature (33)..(33): n is a, c, g, or t
  misc_feature (65)..(65): n is a, c, g, or t
gaaaaaaaatatagaaataatataaaaacatgnctggcatttcacaccatcaaaaaatcaccctnatccttcattttctgacctatggagtgatgcctgtttgactataagaggtctgcaacccgttatggaaacctgatttaatgatgtgctctgaaaa

SEQ ID NO: 608925 - DNA, 284 bp, Homo sapiens
ggtcatttcagttctagtaaaaaatacaaaaaacaaaaacaaaagatttttatcaaatgttatgatgcaaaaaaagaaaaagaaaaaaaaaagaaaagaaaacttcaattttctgggtatgcgcaaagaccatgaagacttatccaagtgcatgaccggattttggtggtttggttcatttggtgtttaatttgtgtttttttttttccagctgtatgagatgggctttctgaagtttaaatagtccgatttcacccatggtgtcctgtgcttgcagtgcgagt

SEQ ID NO: 608926 - DNA, 102 bp, Homo sapiens
aattcaagcttctaacgatgtacggggacatgaaatatgtgttgttttcatttgcaaatttaaataaagatacataatgtttgtatgagataagaaaaaaaa

SEQ ID NO: 608927 - DNA, 344 bp, Homo sapiens
gaatcgagctcggtaccatgtgttgcttggttgtagtgagctgagatcgcgtatccactccaggctgggcaacaaagcaagactccgtcttaaaaaataaataaaaggaaaaaaacggaaaagaaaattggtttcttccacccagccatattctcatagccattttacaaaagggcatcacaatcaaaattttactgccgtccagcagtaaaagctcagaaggagaggaaaattaggccacatactttttaagctaaataagtggaggccaggctccatagggagcagcaatcccatattctcatacctcttcatacctcttcagtgtgacccaggcaacccct

SEQ ID NO: 608928 - DNA, 896 bp, Homo sapiens
gatgatgtgattccgtcctgtgcggttgtactctggagctccgtgcttattatactcacgatccgcactttctctcctacctaagtgcgtgccggcacccgatggaagattcgatggacatggaccttgagccccctgaggccccaagaacctatctcttctcggttgtgaactaacaggccgacaaagattatcactttaagcgctggataatgatgaaatatgagcaccagtcatcttgtaagaacggctcaggctcaagcgggctggtgccaacagcgatgagcttgcacaatagttgaagcagcaggcaactgaacttcacgaaacggccagctccaacttcacaagctaacacctggccaaacttttggcaactgtctgtaacaagccaaccggttctcccctttggcgggctttcgaacataacaccaccagtggtctttaagcgttgcaagttgtgcgtctcacgggccacgtgcattatcagccgcgacagcacttacgtcgctgtcgcagccacggatgcagcacgtcagaccgatgcacacagcgccaggagcgattgtcaaacactcttacgtatcttctgcaacgcggtctgaccctggaggctggctagccaggcttccacagcaaacagtaacacttgctgctgctcaccatgctgacgagctgctcacgcagcagctgctcaacagctgctgcgccaccgcgaccgataccacacacaccgccccagaacccaccaatcccccaaatcccaccccaccccagccaaccaacccccacccaccccacacaccctcaccccaacccaccaagccccacacacacccccacagcccccgcgcccactcaccgccccccactggccccaccccccaccaccacgc

SEQ ID NO: 608929 - DNA, 584 bp, Homo sapiens
gctactctctagatctgtgaatcttagtggaagggctgagggtttaccggtgttagtcagcaaattcccctgtgattcttttgcagttagctcattcctggacttttcaggaacttaatactcataagaactatagatgacagcaatttttctgtttagatggggagatagaaaaagacatgagggaggtgatgagagtataatggttaaaaggtaacatcaattgagcacaaattaatttgagggaattaagtattaagaatctgaattctgtaagaagattcagttaaaaaaagttaaaaaaagcattggaaaggtccgttaaaaaaagcagaaaaggacagtttatataacaaacacctgtatttccaccacccaacatgaacaaatgcattggaatgtcatgtgttctttagctctttctttctctctctctcttttaaaaaatgtatatattttcaaatggttcggctttgtttttttttgagacaaggtctcgcactttgggaggccaaggcgggaggatagcttgagcccaggagtgcaagaccatcctaggcaatatagtgagacctcatctctat

SEQ ID NO: 608930 - DNA, 924 bp, Homo sapiens
  misc_feature (16)..(16): n is a, c, g, or t
  misc_feature (178)..(178): n is a, c, g, or t
  misc_feature (273)..(273): n is a, c, g, or t
  misc_feature (409)..(409): n is a, c, g, or t
  misc_feature (554)..(554): n is a, c, g, or t
  misc_feature (586)..(586): n is a, c, g, or t
gagaacaataagagcngttgcccaaatctgcctattgcagctgtgagaaggtggtcaaagcaaggatctttcacccacagaaagagagcactgaccccgatggcgatggactactgaagccctaactcagccaaccttacttacagcataagggagcgtagaatctgtgtagacgaanggggcatctggccttacacctcgttagggaagagaaacagggtgttgtcagcatcttctcactcccttctccttgataacagctaccatgacaancctgtgtttccaaggagctgagaatagaaggaaactagcttacatgagaacagactggcctgaggagcagcagttgctggtggctaatggtgtaacctgagatggccctctggtagacacaggatagataactctntggatagcatgtctttttttctggtaattacgtgtgtactctggcctctgcatatcttcacaatggtgctcatttcatggcgtattatccattcagtcatcgtacgtgacttgaaggtcttgacttgtctagaatgatgcacatntcatgtattccagtttgttaatacttattggncgttgatcaaaatgtctgagaataatctttgatatgactggttttaaactaggaaattgacattagcatacaaagatataaacatgctagtgaactatggattttacaagatctgctttgagaacagattgtgacttgatctcattgagaatcgacgtcctttacttatgaaaagatctactatcatgtattttggcgtaagagtagttaccataggtaattctctgaataatccatacagatgcccatcataattatcattggaagctcaggataagcagccgaagagttggactgatactcagaataactttccgtttgtacttggtaaaaaaaaa

SEQ ID NO: 608931 - DNA, 213 bp, Homo sapiens
acaagcatccctgttgggggatcttgacccagtctagagccgctggtactagcccattcttggaaaacaaaataagtactccttaaaaagtcaagtggtcatcaatttattttcgctattaaattgtaagtgtccttctaagaggaaatagttctaacttaggggtaagtgcaagcgctctaaaggtattactgtaaggttaatttactaagt

SEQ ID NO: 608932 - DNA, 667 bp, Homo sapiens
  misc_feature (4)..(4): n is a, c, g, or t
  misc_feature (145)..(145): n is a, c, g, or t
  misc_feature (152)..(152): n is a, c, g, or t
  misc_feature (166)..(166): n is a, c, g, or t
  misc_feature (199)..(199): n is a, c, g, or t
  misc_feature (285)..(286): n is a, c, g, or t
  misc_feature (288)..(288): n is a, c, g, or t
  misc_feature (292)..(292): n is a, c, g, or t
  misc_feature (296)..(297): n is a, c, g, or t
  misc_feature (341)..(341): n is a, c, g, or t
  misc_feature (394)..(394): n is a, c, g, or t
  misc_feature (476)..(476): n is a, c, g, or t
  misc_feature (653)..(653): n is a, c, g, or t
tttntaaaagctctccccggttccccccttctatccctactgctcagttaggccccccgctacctgggaatcggtgcttccccgccacccccatttcactcccacttgtctggggcagacggtagctccggggccgggcgggggngggggcngcggtggcgggcgngttgacagtaaagacattgtagtcctggaaccntcgtggccaccgttggcggctcccatgctctgcctcccccaggcagccctccaggagcctgctgcggggtggggctgtgggggggnngnctgngggnncgggcttgtgtgtttgggggggtgctctcggcctgtcatatgcncttctcaatcttctagaaagaaacccaaaaaagaaagcagacgacgacctcgngacagaggagaaaaatcccaagtgttcacacagttacacggagtctttatggcaaagagaacatttagcagctttgaatatngggcatctcctttttactcaacacaagcattctagaccctataagtgaacagggcacaagcctaaaaaaaatcaaagcgcaagaaattctaagaggactagttcttttgttgttgctgggttgtgtaattttttgtgttttcccagtgataagcccagttgttggtaggcagaggcncgagggaagggtga

SEQ ID NO: 608933 - DNA, 738 bp, Homo sapiens
gccggactggtggctggtctgcagggttgacctgcggcaatgcaagtgctgcatgtgtagtgctgggaccactgaggggtccaggctgattccggctggatgcctgacaggcctgcgccttgacctgagcggtgccccagataggccatcgtgcctgcgggcacgctggtggtgcgtgcaactgtgtgctgtgcatcaacggggacatcgtgcacagggagcaggggaccagcgagcagagattatcagaggaacgaccaacacacccagcagcagaacgctttcttcatcaggacaaagtccattgacccagactgggattcttcaaaggggaagcggatgacaacttcttgcaaggggcccagaggaaacccaagagcattaggggggagcacacaggttcagaatggtacgaatacgggctgaacaaaccattgtgttgccatagtcaagacccatggagagagcccagggggtgacaaacatcaattgtgacccccggagagtttcggccccaccgagggagtatgacctatgtgcactgaatgtgaacgcaacagttttgcaagccacatgggtaggaagaggggaaaaacgcttggatagacgccataattatggatcgccacgatgggatcccatggtaagggaaggccagcatgtattaatcgggatacggaggtggtcctattaaccaagggtgcaaaggggatggggggccgccataaggcacgaact

SEQ ID NO: 608934 - DNA, 278 bp, Homo sapiens
caggtcattctcatggtacagatcttccactgtctagtttgcagtatcaaacaagcccgttcacatgagtgggcacgggatatgagcagacacttctcaaaagaagatatttatgcaatcaacagacatgtgagagaatgctcatcatcactggccatcagagaaatgcaaatcaaaaccactatgagataccatctcacaccagttagaatgtgcgatcgattaaagaagtcatggaagacaacgaggtgctgtgcttaggagactgctgtcagggc

SEQ ID NO: 608935 - DNA, 170 bp, Homo sapiens
tgactcgattctcaggtggatgagaatacagtgataagcaaatcttgacatgttaccctaaaataggcactataaaatagactgtacgcttggagatacgatatagagttgacctgccctgcaagggttacgtggccgttctatctcacacagttgtgtggtgctatcaa

SEQ ID NO: 608936 - DNA, 768 bp, Homo sapiens
  misc_feature (268)..(268): n is a, c, g, or t
  misc_feature (426)..(426): n is a, c, g, or t
  misc_feature (475)..(475): n is a, c, g, or t
  misc_feature (673)..(673): n is a, c, g, or t
gccctccacctctgaagctacaatcacgatgaggatgaggaagggaaattaccttgatgatatcatgaagctcttggagcagtcggagtggctgccaacaaacgtggattggaacggggtaccgtatgtcaaatggaacgcgtggagtccaggcccagccgtcatgctgcgtatggaaggagcgtgttagacgtcgtacacgggagggagccaggaagacttgacgaggcgccagggtggggagtacttggggctggagctcgtacangcgtgctcattacacaggagtccttggaacggagacagtggaaattggccactccttggcgttggcacacatggcctttgctttgcatcgctcgccatgcttcgcgaggtgtcgttcgcccttcacgacttcgcaagggcccgaatgttcgcgctgtnttgtcgaacgctgcttaggcgatgcggtcgctccctgtgtggccctccntgcgtatcactttgcacatctttatgcgcgcatacgacaagtggaccgcctggtggctagtctcaactggtgggttgggccagtaagtatgggctggtcgacggatggataggtcgtgggtagctttcgtgggtagggcaccgcgccttcgatagccagcctctagagggtgtgttggagcccccccgacagtgcgcntcgacgaggtgtggggcgcacttgcgggtggccgctcctctttcaccttggggggcctccagttggggcacttctttccagggggggccctgtgt

SEQ ID NO: 608937 - DNA, 226 bp, Homo sapiens
cagacacgtggcagttgtgtgctgaagattggggaacacacccccatcagaccctcgccatcatggaaaatgccaatgtacttggccctgtaatgccagtatctatgccagcagaatgtgcattgttgcccatctgtggacgcctgagatcctccctagatggggaccatgactatgaagcgctgccatgtatgttgaccgagacaggtgcttggcttgcttgtct

SEQ ID NO: 608938 - DNA, 92 bp, Homo sapiens
ttagtgaaaccaagattaattccttggcacacctggaaaaaaaggaacccggtgggggcatttacagtggtttcaaaaggcaaataattaag

SEQ ID NO: 608939 - DNA, 532 bp, Homo sapiens
gttctctcagtgtgtcaatcacacagcacgcccgacatcaagtcccattatgccttccgcatctttgactttgatgatgacggaaccttgaacaaagaagacctgagccggctggtgaactccctcacgggaaagggggaggacacccggcttagtgcgtttgaaatgaagcagctcatcgacaacatcctggaggagtttgacattgacagggatggaaccatccccctttttgagttccagcaggttatttcccgttttccagactttgccagctcctttaaaattgtcctgtgacaacagccccagggtgtgtcctggccccctgtccaaaaacctttttattgttgagctgtggccaaggtcaagcctgtgttgccaggggggccccaattgccccacccctgaagtggggttgttacaccctccccccgggcagggggggcccttgttgtcagggcctttcctcactggtgttgtcattgccccgtttgggtttgtactaaccagtaaaaaaggtttaaaagtttga

SEQ ID NO: 608940 - DNA, 800 bp, Homo sapiens
taaagaggtggtgtacatctccactagctctccttacactagcaggtgtctcctctatcttacaggggccatcaatttcatacacaacaattatcaatataaaaacccctggccataaaaccccaataccataacaccccatctatcgatctagataccgtcctaaatccacagacagatccttaacttctacctgatactcatcccccagtccctagactagctagagccttcacatcatacatacatcaaccaagaccctgcaaaccgtccaaccaccaacctattcattcagaccaccagcaccggcaaaggggcagaaccacccaccatcattccagagggtacccgcagctaccgcaatttccataaaatacctaggtcccctaagactagttataccttgaaatattaacaacccaacaaaggaacaattacaaaaaactaaaaacacaataaaataaaaagcgtaagaagcagaggataatataactaatttataaacggagatataaaaaatgggacttcagaggttaatataaaaaaaagaaaaaaaaaaattaatctatatatattatataataatagagaataaagaaaaagagaataacaaaaaataactaagggacataaagttagagaaaaagagaaatataaaagagatggtaacatcaatataaagaaataataaaatgaatagaaataaaaaaaggtggaacgagtgtggaaaatgagatgataaaaagtggtaaagagattaaatattaaataaagataaaatgaaatagaacaaaataaaa

SEQ ID NO: 608941 - DNA, 127 bp, Homo sapiens
atcatactcgtaccgatagttgactggtatgatggagcaacacacctaaacgttctcgctcttcctgagggcaatgtcagtccagcatagagttttacaatttgatagaaagtacctcgtccattgg

SEQ ID NO: 608942 - DNA, 334 bp, Homo sapiens
gagacggagtctcgctctgtcgcccagactggaggagtgcagtggcacgatcttggctcactgcaagctccccattccaggttcaagccattctcctgcctcagcctccagagtagctgggattacaggtgtgcgccaccacacccagctaattgttttgtatttttagtagagacagggtttcactgtgtaggccaagctggtctcgacctcctgacctcaagggatccacccgcctcggcctcccaaagtgctgggattgcaggtgtgagtcaccatacccagcctgtgaatgcttgctttattcaccttttttcttaatgacggtcgacgc

SEQ ID NO: 608943 - DNA, 1466 bp, Homo sapiens
ggaagtgctttgccccaaggttgtgtatcattgtcacgcgcagctgtgtggtgtgtggcttagatgccgaggctgtagatccttgcactgtagtgcagactcgaaggttggggacgcgtcaagagactgcactggaggagggcgaggcacgatgcattcatgccaggtcgccactggcagggctctggctgcccgtccggtcaaatacactgtaaggttactggcctagccacgcgaggtcagctcgttcgtgacatcgaagggaatcgtgagaacccttgccgtcggggagcgtgacttgtttagtagggcagtgcctgtatttaaggttagagaggggttgcaaaataccgaggacttgcgtacctaactaactggtcgtggaagaaataggcgtgagtgactaacttgtacgaacgtaagattgttcgtggcttccagcatagcacacatagtggagcacgctctagttcagcaacattacgggacaggccttgggtgagccggggtccccagtggggcaagcactggttgtgcatgggtgcttaaggcgagtaagcacagagcgaactgcacggatagtctgggtgcctgtgtcaacataaccataatcttgtgtcaacgatgtgttgatctcatcaagcgggtatagaagccacgccgtagagcatttgtacgccgcccacgaggtcatggtgactcgtccaagggggtatcggtaggcacacctcgacgcaaggcagtttacccagcccagatgggacatggagacagtgggcccattttgtgaaccccttgagtgatacacaaaccccgggatgggtgtaagtgcacgtgggctagaaattcatttctggcggcaacagtttagcacgacgagacttataacaaacccgtggagactccgggaaaattcgaccgcgagagaatcagttgaggaattcaccaccgtgtgggccagacccgggtacccatacccttcttaaaggccgtttgcgactggctctctgtgaagcaactttattgcacacgcaaggactcccttcccatggttcacacgaaatttaaggctgggacttgtgaaaacataggacgatgtgtgcgacctgaaagcgatgtccccagagagtaggcgcgaagtactcaagggaacactgactgaagacatacagagcccatgacaaagcacagcacacacaggtcatcccgcagacgaagcgggcacaagacagagtgacatgaccgtaccataggtgtccccccacattgagcaaacaggaaagaaccgagcaatgagagtgcactcgagggacccaatacagggggcccgaacccagcggagggcaagcgagtagatcgcgacaaagagacaaaggccgggagggcagagggcacaccacctacaaggtgcgaaatgacaggccgcaaacaaacggaccaagccaatggaaacacaagggacaacg

SEQ ID NO: 608944 - DNA, 821 bp, Homo sapiens
tccaccgtgccgctccttcttctgccgctcctgtgctgctgtgtgtgctcgttgtgcggacctgtacctctttggtgaagcgcaagtgaggagactccgggctcgcaatgccggagaaaagccaaaggaaggagtcaggattggagaacaaaggatcatataatttggaaggtgggggcacaagagatggtttcctgtggtgcagttaaagataaagaggcaatacacccatttagtaaactatttgaagcgcctatttgtgaacgacaggttttgtcaatgacgggcagatcagatcccgatttttgctgggcacccaaatcaattgaaagcagacacatctgcagcagttggacactggcgctttgactgatacaactgtgatgtgtcccaacagcaagacgggaggtgtctacgtgaaaaagggacccgtgttctttactcaagaactctgtcttttaaagaccaagattacttctctcaatgagaaaccgtgcattgttgttccaccacttctgatactaccgtatagtcctctaatcctttcatttccccttccccatccttttatggtacattaaggtagtggtatatggtgacaacgatatggattttttgttttgaaaataaaaaaggccatggtttgtttgggttgagacaaggggagagggggggagaaatctggttgtgtgaaatctccttcccattaatgggtggcataaaggttattttattccaaaagttttggccccgtgtgcaaaaaaacaaataaattggactgtgcaggggaatttgttattggaagcgatatttggcgggag

SEQ ID NO: 608945 - DNA, 307 bp, Homo sapiens
atagttcgagagctgcatgtgtatgggagtgatgtccctgtgagcagccgggatcctactaaatttcagcatcatggatttggcatgctgctgatggaggaagcagaatgaatagctagagaagaacatgggtctgggaaaatcactgtgatatcaggggtcggcaccatgaattattatagaaagatcggctacagattacaaggtccgtacatggtgaagatgctgaaataatggccacaccagtgcactcatttgcaggatcctccctggcagaacacggagaatcatgatttcttaaatactc

SEQ ID NO: 608946 - DNA, 152 bp, Homo sapiens
gagctattgttaggtggttggtttctggacaccacttccgaaggcttttgctaggtgtcgcgagctccagatctccactcaacatttcttccatctgtctctcttgcaaacagtgcccttggatctatcctcaaagcacattcagctccatc

SEQ ID NO: 608947 - DNA, 462 bp, Homo sapiens
  misc_feature (1)..(1): n is a, c, g, or t
  misc_feature (17)..(17): n is a, c, g, or t
  misc_feature (65)..(65): n is a, c, g, or t
  misc_feature (217)..(217): n is a, c, g, or t
  misc_feature (243)..(243): n is a, c, g, or t
  misc_feature (259)..(259): n is a, c, g, or t
  misc_feature (344)..(344): n is a, c, g, or t
nggtggtggccagaccnagccccagggagggtgctgctgcccaatgacattgtaattgtagaaancgtgtgccctgacacaggtctaaggactttcccaaagtatccagtcagtcagtcagtcctcacaccaggattgtaggtactgtcataactcccatttcatagttgacgaaaccaaggaccaaagagaaataactcacatgaagtcacacacntgataagtgatgggatgtctcatccnaagccctgccctcttnaccaagatggccttgtgcctgatccatgtcagaaaacagaatagccgacataaactcatttgttagccaggtgtggtagcccacncctgttgtcccagctactccagaggctgaagcaggaggatttttgagcccaggagtctgaggctgcagtgagctatcattgtgccactgtactccagcctggacaacagattgaggcc

SEQ ID NO: 608948 - DNA, 414 bp, Homo sapiens
  misc_feature (60)..(60): n is a, c, g, or t
  misc_feature (296)..(296): n is a, c, g, or t
  misc_feature (303)..(304): n is a, c, g, or t
  misc_feature (306)..(307): n is a, c, g, or t
actggaggtcaggagtttgagaccagctgggccaacatggtgaaaccctgtctctccttnaaatcaatttagccaggtgtgggggggtaatcccagctggcctgtaatcccagctacttgggaggctgaggcagaactgcttgaacccaggaggtggaggttgcagtgagccgtcatcgcgccactgagccaagatcgcgccactgcactccagcctgggcgacagagccagactgtctcaaataaataaatatgagataatgcagtcgggagaagggagggagagaattttattnaatgtgnngnncttgcccccccccccccccagcaggagagcagcaaaatttatgcaaatctttgacgggggttttccttgtcctgccaggattaaaagccatgaggtccttgtcaaaa

SEQ ID NO: 608949 - DNA, 314 bp, Homo sapiens
  misc_feature (20)..(20): n is a, c, g, or t
  misc_feature (40)..(40): n is a, c, g, or t
  misc_feature (50)..(50): n is a, c, g, or t
  misc_feature (56)..(56): n is a, c, g, or t
  misc_feature (116)..(117): n is a, c, g, or t
  misc_feature (119)..(119): n is a, c, g, or t
  misc_feature (122)..(122): n is a, c, g, or t
  misc_feature (216)..(216): n is a, c, g, or t
tggtggttgaaacaaggaanaacagaattttttattgatngaatatttgnagaatnagtatttgttatgtcaaaggcagtgagattatataaaatgattattagttaattgaattnnanaanagagtggtcaattatagcagataggtgttttttgaagtcggaaagatggcttctcacaggacatagagggaaggaaggtagggagacaaatganttatagtttctctgagggagcctagtctctaccttgctcattatcccagtgaatttcaaaagcaggttggtcaacatagcgagaccccgtctctctcc

SEQ ID NO: 608950 - DNA, 288 bp, Homo sapiens
tcgaccccgtggtagcacggggcggggaccaggccccaggacggcgccccgggtaacccgcccacgtgacccccacccaggcccccaccctgtgctaagtcgcgaactcccggtactacagtgcggtcgccctttagaggggacggcggctttccctccgggccgtgaaggaaggaagaaaacccctaggaggttgtaccgaactgcactcccatacacaggagtcgtacttctcctaccgcccagtagtacacacgctacagtcgccacgtaccggaacgcctcgtg

SEQ ID NO: 608951 - DNA, 795 bp, Homo sapiens
  misc_feature (629)..(629): n is a, c, g, or t
tcatacggaactgtaagtccattaaacctctttctttgtaaatgcccagtcttgggtatgtctttatcagcagcatgaaaatggactaatacagtaaatggtaccaggagtggggcgttgctgaaaagatacccgaaaatgtggaagctacttggaactgggtaacaggcagaggttggaacagttggagggctcagaagaagacaggaaaatgtgggaaatttagaacttcctagagacttgttgaatggctttgactaaaatgctgatagtgatatgaacaataaggtccaggctgatgtgttctcaaatggagatgaggaacttgttgagaactgaagtaaaggtgactcttgttatgttaaagagactggcggcattttgcccctgccttagagatttgtgaaactttgaacttgagagagatgatttagggtatctggtggaagaaatttctaagcagcaaagcattcaacaggtgacttgggtgctgttaaaggcattcagtttcaaaagggaaacactataacaaaatttgaggggtgcattaaagttggaaaatttgcagcctgacaatgcaatagaaaagaaaatcccattttctgaggtgacttgggtgctgttaaagngcattcagtttcaaaagggaaatactgtaaacaaaatttgaggagtgcattaagctttggaaaattgcacctggcatggcatagaaaagaaatccaggcaggcacggactcacactgtaatcccagcactttgggaggcgaagcagggtccattagttggagtcag

SEQ ID NO: 608952 - DNA, 122 bp, Homo sapiens
catgtaaattagtcaacctctgtgcaaaacagtatggagatttctcatagagccaaaagtagatataccatttgattcatgccacgtccacgtactgggcatctaccctgatggaaaatgta

SEQ ID NO: 608953 - DNA, 396 bp, Homo sapiens
  misc_feature (35)..(35): n is a, c, g, or t
ccttaaggtaataaaagccattggcaacaaacccncagccgacgtaatactgaatggggaaatttgaaagccttcccctgagaaatggaacaagacaagggtgcccactttcaccacttttattcaatacagtactgcaagtcttagagcaatcggataagagaaagaaataaagggcatccaaaccagtaaagaggaagtcaaactgctactgtttgctgatgacatgatcgtatacatagaaaaccctaaagactcatccataaagctcctagaactggtaaatgaattcagcaaagtttcaggatgtacacaaatcagtagccctgctatataccaacagtgacctagatgagaatcccatcaagaactcaaccccttttacaatagcagcaa

SEQ ID NO: 608954 - DNA, 389 bp, Homo sapiens
gatcggttcggacctattcgctactacgccagcctcagtccattcgtggaaatcgacggccagtcatatgtatacagctcactataggccaaattgggtgccgggacccccctagagtagtgttatcctcgtccaaaataatgtctccatgcaactggacttgtattgtttattgaaaagaattcaggctagagttgggaggagtatgcaagagctctgtgcaagcggaagctcagtctgagcgtgagggatcagggtagtaggggactctcgccttgtccactgatggggggtctggctgttactcctctcccttcagcacagaaagaacttggtcagtatccatgcctgtgtaagtgctcatgactgctgtgccttgcctgtacaag

SEQ ID NO: 608955 - DNA, 529 bp, Homo sapiens
tggcacaaaagacacaactctacgtgtgatatccgcatcactttacctacatacacatatctcggtagtcctctagctctcttcgccagtctttcatttttgcgtttaggagacagggtctagctgtcacccaggctggagtgcaggggtgtgactgcaactcactgcaacctccgccgtccggggagtcaagtgagtccgtagcgttaggccgtccccaagtaggtgagacatagcagggtgtgcaccacacacacccaggcgtaatttggagtattgagtggggtaaacgacgagggtttcacccatggctgcccatggctggatctcaacactccgggggatcaaggtgatcacgcccacctttggtcttcccaaaggtgctgggaattacaggtcgtgagccaccactgcctggcactctcttcccagttctacagctttctacagacgcactctgagggccgtgtctgcccagtggaggaggcttccgctggtgttctagggggcatctttgggcatgactcag

SEQ ID NO: 608956 - DNA, 858 bp, Homo sapiens
gggatgaggctgtgtcaaaggcgccatgagcaagatcagcgaggccgtgaagctgcgccctgtgcctgtcttcagctcgggcaggaccctgtccgctgcagttccggatccagcagctggaggctgctgcagcgcctgatccaggagcagggagcaggagctggtgggcgcagctggcctgctagacctgcacaagaatgaatggaacgcctactatgaggcggtggtgtacggtcctagcagcgagatcggagtacattgactccaggaaggctccttgaagttgggccgcggcatttgcgcccgtgggagcaagaggcccacatagacttcagcgaggactgagctctacgatcgcactcgtgaggccacttgggcgttaggtccatcggtcattagggcaacccttggaatctttaacccctttcaaacgctacaagcgaattccaaggcaccatgagatggtggcagccctatccggcttagacaggtggaacacgtgcaatgtgggcggatccgccttacaagaggccgcgcgttccgggcaccggcgtatggacgttcgacaggcaacacatcattgcggccggcaggcccttggctttgagcataacccgattcaataccacacgcaagttatcctaggcaccgaatggggacatcttggtaacaccccaggatataacgtcaaacattggcggtgacttggatcccccgcatgcaaaacaaaccaatcggaggagacactgggccttccaacgggggacagcaagagtttaccggaaccgattatataccgcttggataacacaatcgtgagacaagaagaacaagtgtgcggattgaggagcacaaaca

SEQ ID NO: 608957 - DNA, 670 bp, Homo sapiens
  misc_feature (586)..(586): n is a, c, g, or t
  misc_feature (649)..(649): n is a, c, g, or t
gtttcatgtatgttgtctatattccacaataagaaaatatacaaatgaccagcaaatatgaaaagacatcgaatctcgctagtaattagaaaaacaaaagaataaacatgatcacctatcatgatttgccgaaaatgtaaagactgataatatccctctttgctgaggttgcaaagaaacaggcgttctcataggctctcaataggaaagtaaattaataactcctttttaagaacaatgtggtaatatgtataaaaatgtaaagctcatcttataagttttaaattccaattccaaatacctagcctaattaaatccacatgcattcaaaatatgtgtacaaagatgtctgccattcactacagcattgtttgcagtagtggaaaaaaagaataaatgtcaatatgggaagatttgtgaaaagtactataatccatacaatgaaatactatgcagccattaaaaataaatctttgtaaactgacatggaaagatatccaaaacatattaagtgaacaaaagcaagacacagaataacacacagatagcctaatcctgtttttaaaatataaatatgtacatatanttatatagaggtctgacagactatgcatttatgctgtaacctgttagcagtgattacctctgncgttcatattttgaatgtgtt

SEQ ID NO: 608958 - DNA, 661 bp, Homo sapiens
  misc_feature (622)..(623): n is a, c, g, or t
aggacactcaaaaattgtgtgggaaatggttccattggatgtagggctgtcatcagcattatatctaccaactctgggtcttcttcattaaatgccaataatgttcccccttcccccaattattgtgacaaccaaagagcattaccacagatttccaaaatgcccccatggagtgtgtggagggtgtagtttgactattctggagaaccattgaaaacaaacaacgggagatatgcacctcacagagctagcacttagagattttgcccatattagcacttaaagatcgaccattctttgtaacagttgcagaatattcaagcatacctctgtaccaggatttatttagctagtgatggtcacactgactttttcaatggtcttgttgcaagcaacgccgcagagatgatcgttagacattagcctttgtgcactcatacagttacatctctagaataaattcccacaagtcaagaggtacatgtctttttaaatttgtatggatattgccaaattgctctctcaattattgccagatatttcaccactaagtattgtagaaggttttaatcttggtaactgtagttctttagatgtacttagtagcgtccagccttgactnngctttttatataggatattcacgtggacaggttggctt

SEQ ID NO: 608959 - DNA, 785 bp, Homo sapiens
gtttggaagatgatgatatcacgcacgtcgaaggaagtgtagatcctattcgagatatagaattaatacagtgaagagcttcagcgttaaagatgaggaaagtgattgggcccattatagatgaaactagaagaggtggctgtgagaggaggagataaagaactatgaacctgagatatgatataatgtgctgagtataatcctgggttatagatctaaagaaacctgttcgcttctatcatgattggaatgacgaagagattgaagtgttgaataaacagttatttttgacttgcaaagaccaagtggtctactaggttaatcttactgaagaaagatctacgattagaacagagataaacaaatggttgataaaaaattaagagagtgggtggacaagtatgacccaggtgctgtaggtcattcgctttcagtgggggctctggaactcaagttgcaagcaattgagtgctgagggagagacagaagtatctggaagcgaacatgacacaacagtgcttggcccaaagatcattgacggctgggtttgcagcacgtccaactagaatactttttcagcggcaggcccagatgaagtgcgtgcatggaccatcaggaaagggactaaggctacctcagggctggcggggaaagaattcacagcagattatggaaaagggattcataatgagctgaaagtactgaaagtacgaacgatataaaagaaggaaggttctgaaaaatgaggtcaaggatgctggaaagtacaggagcaacaagcagaa

SEQ ID NO: 608960 - DNA, 1354 bp, Homo sapiens
gaaggtagcagcctgtctgtctccgccccacagtccacgagactttaccagaatgcagtgacatccctggagtgagactggagatgcctgcgactgtgtggagtgcatgtagcctcacgcagagctaagtgtgtgtgcaccatccccgcactgggcccaggtgacccacagctgcaagaacgagttactagaggtggggacataacacattgtggagactccacattattgccacatagatagaggagaacgattttgaacagaacatgcaaacactagtacactatggccagactctctgggcatccatataggatcacctagggggccattatagagcaagcctcagtgggcaattcaggccagcagagcgagccgcgccatgggtgaaccaatcccgaaccagcgtaccaacgcaacaagaattgcgacaggtgtgataccagttgaccgttacgtttcgcccggcaaagcgtattccgtgaccaacatctgtaatatacactgtgcagtagggtcaggaataaacgtatacaaggggaggggaagccggggcggacgaccagatagacgggggaacacaaggggaacaattggcgaaacaccaaggaccacaaaggggactccaccccgggggcacagtcggagccatatgaaagcacggaaccatggggcgctacaaactaacaggggacctcactgacaacggcagagtttgcattgatggtaccgttgccgccctacaccgggcgcaccgttccaccttgtgcaacacctgcacggacttgtgagacggaaagacgggccttggcaggaccaccaagaaaaagcccaaaacatggcacccatatagaggacttacgatatgaaggcacaagacgaagacaagagagcgcacatgacagcacagatacgcgcagcagacgcccatcgaaaagtcctcaaaacgacgacggggcacacaacaaaagcccacagataccaagaaacgggagagagcatgggagaaaaacaacaccagtggctatccatggacgaaggaaagacaaacaaaagcagcagagcaggacccacacaaagggccaaagcaagcacaagcaagagaggacaaaagagcaagccccggggacccaccaaccggagaacagagcgcggaccacagaggagcagaaccaacgagccgcacaaggacacgcgcgcagggcgaacacgagcaacacgacggacagaaggcacgcacagcgctggagcgccgagacacccaaccgaccgacaacataaggcagcgcggcacaaagaccaagcaccacggacagaagcgggacccaccagggagacgcagccgcccgcggcc

SEQ ID NO: 608961 - DNA, 223 bp, Homo sapiens
caggattccctactgctcgatcaatagcgctgataatgtgcggaggtaaactatgctcgtgtgtctacgtctcttcctactgtaaatatatggtgtgctcacacgagtaaaccctaggaagccaattgatatcctcgctcagaccatacctatgtatccaactggttcttttattccggagtagtacgttacactctgggcgctattgctgcacagagtgaga

SEQ ID NO: 608962 - DNA, 396 bp, Homo sapiens
cccagaccctgagctcccctgcagccctcccaggaggcaactgttaccaatttctgccatgatcatttgtaacagtgaaaaatgagaaacgatctaactctttcacggataaataaattacagtctgtccatgcagtgggatactctgcagtctctaaacatcgtgcctgttaccgcatccctcttctgttaagtaactgtgcattgcctctggccccaggccctcagcctagactactgcttctggctggaacccgcccccccaccaggccccacttgagtcctcagccttcagactctccaagacttcacacccccactgatgactctccgaggctgtccaaggcttcacacccccactgatgagggaaccccgcagttctcatagctacctgg

SEQ ID NO: 608963 - DNA, 492 bp, Homo sapiens
agttctagatcgcgatctagaactagtcgcgagcggccgcccttatttttttttttggagactgtcacccagtcgggagtacagtggcgccatcttggctctctgtaacctctccctcctgggtccagcgattctcctgcctcagcctcctgagtagctggggcaccaggtatgcaccatcactcctggctaattgtgttttccgagataatggggttcacccatgtggtgcccagggttggttcctcaaacctcctgtggaccctcgagggtgaatcatgctcttgccaatggcactcccaaatgttgctgcggatctccatgaccgtgagcccaccattgcccctagctcaaagaaatttgtccactgccttatactcgtcgccgtggttttccactatgttctccaactaggcgtctttaaatacctctaagttgtgttaccactacaccattttgggcgcatctgttcgactcacctcctctcccatt

SEQ ID NO: 608964 - DNA, 420 bp, Homo sapiens
ctataacttagcacacaccaataatcatgagtgagtctaacatacacaggaagtaaatgaatagtgtaggagataaaccccataacatggaaacttatcaaaaaattacttgagcagctgtctgatgatggtgatgtatatctccttcttcttggcagccaagcccaacaaaataatggcacacagcagttgctgcccaagcctgggtgctcctggtggtcctgcactgatcggatgtgcagtaggcttgtcaaggagaggatcctccctggcctctccttgggcagaggaggtgagggtcacctcacgaagatcaccatgcttgtcttgatgacccaatgcaactggggggctgaggctccttgaaccgggctcatcagcagagttgtgggcagcggacaggggatccctctagagtcg

SEQ ID NO: 608965 - DNA, 830 bp, Homo sapiens
  misc_feature (188)..(188): n is a, c, g, or t
  misc_feature (262)..(262): n is a, c, g, or t
  misc_feature (268)..(268): n is a, c, g, or t
  misc_feature (305)..(305): n is a, c, g, or t
  misc_feature (418)..(418): n is a, c, g, or t
  misc_feature (424)..(424): n is a, c, g, or t
  misc_feature (442)..(442): n is a, c, g, or t
  misc_feature (484)..(484): n is a, c, g, or t
  misc_feature (609)..(609): n is a, c, g, or t
  misc_feature (654)..(654): n is a, c, g, or t
  misc_feature (656)..(656): n is a, c, g, or t
  misc_feature (672)..(672): n is a, c, g, or t
  misc_feature (689)..(689): n is a, c, g, or t
  misc_feature (694)..(694): n is a, c, g, or t
  misc_feature (723)..(723): n is a, c, g, or t
  misc_feature (726)..(726): n is a, c, g, or t
  misc_feature (804)..(804): n is a, c, g, or t
ggcgccccgaaccctcctcctgctactctcgggggccctggccctgacccagacctgggcgggctcccactccatgaggtatttctccacatccgtgtcccggcccggcagtggagagccccgcttcatcgcagtgggctacgtggacgacacgcagttcgtgcggttcgacagcgacgccgcgagcnagaggatggagccgcgggcgccgtggatagagcaggagaggcctgagtattgggaccaggagacacggaatgtnaaggcncactcacagactgaccgagagaacctggggaccctgngcggctactacaaccagagcgaggccggttctcacaccatccagataatgtatggctgcgacgtggggtcggacgggcgcttcctccgcgggtatgaacagcacgcctacganggcaangattacatcgccctgaangaggacctgcgctcttggaccgcggcggacatggcggctcanatcacccagcgcaagtgggaggcggcccgtcgggcggagcagttgagagcctacctggagggcacgtgcgtagagtgactccgcagatacctggagaacggagaaggagacgctgcagcgcacgnacccacccaagacacaaatgacccaacaccccatctctgaccatnangccaacctgaggagcnggggcctgggcttctancctanaggagatcacactgacctggcagcggganggngaggaccagacccaggacacggagctcgtagagaccaggcctgcaggggatggaaccttccagaagtgggcagctgtngtggtgctactagagaggagagagaa

SEQ ID NO: 608966 - DNA, 405 bp, Homo sapiens
ttgcgcaggcactttgtgggtcggtgactggggatcattggtcctgagacttttctcatggtccttcctgtcccttttgttgccgcgctgctgtggtctttgaggatttgtttgtctcttctctcgggaagaatggcgagcttcttgatgatgctcagagacttttgtaccatgatgtgatgcttgagaactttgcacttttagcctcactgggtaaggtcctcatgcttttctgcctttaccactctgttcttcctatggtgggatcatgagcaccgcttccttcaccagtttcctggagtaggtgctctagatgcctggtctaagctgtatggagtgtcctccctacttgctgagtagtcttcacgccgtgcagccgagggtttggggtcatgagacttgtga

SEQ ID NO: 608967 - DNA, 877 bp, Homo sapiens
  misc_feature (94)..(94): n is a, c, g, or t
gggcgcaacgcggatcccgaggcgcgggccgcccccttggtggttggatccgggtcagtcgggtgccgagattgggagagacgctctgaactgnatgcccgaattaccggagcgtcccagctgcgaggagtgtaaaccaggaacatcgataagtagtgtaaaaactgtggcacaatgaaattccgaagccaaggatggagaggaggagagtctacaagactgctttcaaaaaaattaagagtggatgcatcagggtctgtagcatctcgtgtctgtgggagaaaggcacagggtgtcagagcaccagttcagaaaagcaacagatgataccaaagcttaaaaccagatgtgcatctaaagacagtggggcacgggtctaccaaggaagtcttcagcgagggagcagtgacgaactcagcggtcgtccggacgtctaaagtctcctgtcctccatcctccaaagtttatacccattggcagtacaatagcggtcttcttccaagcagtcaaaactcaagcacaaaagcagactgactcacctgtttggcagcaggtgggctggggaatttacatccccctaaagagttcagtgcaggagaaaggtctattctctacgatgtaatcacacaggggcagtcgttggagccttgagaacttctgttccagggtcccatcagagagtagcaggaagatcctttgaggttacaaagttcccaagagttcaaggccgggatctctctgacttcaacaggttccagctaaacagcagcatgcatgcttggcaggatgccggtagaaggctattgagggttccatacggggggggcccctgcccggcaaacccgggggacatccgggcgacaatgggcccctttaa

SEQ ID NO: 608968 - DNA, 692 bp, Homo sapiens
gggaaggggagaggaagagacgaggaagaagaggagtgaagaaggaggggagaaggagaggcgagagaaaggacgaggggaagaaagagaaaagagagaagagagagaggggagagagaagcgaagagagagaggagagaaggggaaagcgaggagggaggaaagaaggaagagagaggaagggagaagaagcaggggaaaagagagaagtggagcggcgggaaagaagggagcagcggaggagcagggaggcagaacagtgaagcaaagaggcaggcagaaggagaggagggaggaagaggagagggaaagaaatgaaagagcacggaaaggaaggggcgaaagaaggatggagataagacaagggggggaggaggagataaagagataggagggaggaggcaaggagggaggaggaaaggggaaaggagtaagacagacaaggagaggatagaaggagggagagaagagagacagaaggagatgaacatgaaaaggaatagacgaaaaaggacaatagggagaggagataaaagaagaagggcagaagcagaaggatcataaggagggtctataaaatatagaacaaaacatgtaacacgcactatctgagtctaactcgctgctctcgagctcactctctctctctctctctctctctctctctctctctctctctctctctctctctc

SEQ ID NO: 608969 - DNA, 192 bp, Homo sapiens
gatctagaggatcctgtagcgcctttttttgagacagggttcattctgtcaccaggatgcagtgagtggtgtgatcgcagctcactgcagcctcgactcccccagctcaggtgatacttacacctcagcgtcccaagtagcagggcctacaggtatgcaccatcacaccctgctaatttttgtatttttttg

SEQ ID NO: 608970 - DNA, 814 bp, Homo sapiens
agcgggtttctggccctgccagtgtctccgcctggttgaaagctgcgtgtctgcgtcgggttctgtcaggagtgcgttcggtgcgccgtgggtccgcgctgtttccagccaagttcctgtatagttaactctcctgtcacaatggcatgatctacggctcactgcgaccctctgcatacctgggttcacaggattctcctgccttcagcctcccaagtagcttgggattacaggaatctcaccagtgataacgcgtttgtgaaaaatgcttgttgaagtacttcagtagccacagggttaaacctcggtacaagaagcgagaaccctgctgggaagaagcaaagtggtgacctggcaacggagtagttgagggcccggtcatagtaggagaaccatgttggaagtgtacatagggctcagacgaatcacgcaggtccatggtgaacggccctgcaatattccgtaggccaaaggaccaaggttgccatctgctactatgaggtcgcactcaattgtcagccaggctagcactaggaagagtgctttggcatgaaaatcagcctagtgaaacaacactacgtagagcggaatatacggcaaagcaagcaatgggcatggggctactaaaagaacgacaactggagataatctcgacagcggtagaaagaaacccaaagggatccataacatgagaacgaaaccgccaattgacacgttgagacattatttaggagacgataattcaagaaactcaacaatagacacaaaacgtacaagggaacatggagaaccgaaagcctccaattatgagtaa

SEQ ID NO: 608971 - DNA, 1262 bp, Homo sapiens
  misc_feature (30)..(30): n is a, c, g, or t
  misc_feature (38)..(38): n is a, c, g, or t
  misc_feature (41)..(41): n is a, c, g, or t
  misc_feature (51)..(51): n is a, c, g, or t
  misc_feature (77)..(77): n is a, c, g, or t
  misc_feature (80)..(80): n is a, c, g, or t
  misc_feature (89)..(89): n is a, c, g, or t
  misc_feature (102)..(103): n is a, c, g, or t
  misc_feature (118)..(118): n is a, c, g, or t
  misc_feature (124)..(124): n is a, c, g, or t
  misc_feature (127)..(127): n is a, c, g, or t
  misc_feature (136)..(136): n is a, c, g, or t
  misc_feature (142)..(142): n is a, c, g, or t
  misc_feature (144)..(144): n is a, c, g, or t
  misc_feature (147)..(147): n is a, c, g, or t
  misc_feature (150)..(153): n is a, c, g, or t
  misc_feature (161)..(161): n is a, c, g, or t
  misc_feature (164)..(164): n is a, c, g, or t
  misc_feature (168)..(168): n is a, c, g, or t
  misc_feature (170)..(170): n is a, c, g, or t
  misc_feature (175)..(175): n is a, c, g, or t
  misc_feature (183)..(183): n is a, c, g, or t
  misc_feature (187)..(187): n is a, c, g, or t
  misc_feature (196)..(196): n is a, c, g, or t
  misc_feature (199)..(199): n is a, c, g, or t
  misc_feature (201)..(201): n is a, c, g, or t
  misc_feature (210)..(210): n is a, c, g, or t
  misc_feature (213)..(213): n is a, c, g, or t
  misc_feature (218)..(218): n is a, c, g, or t
  misc_feature (220)..(222): n is a, c, g, or t
  misc_feature (226)..(226): n is a, c, g, or t
  misc_feature (229)..(229): n is a, c, g, or t
  misc_feature (232)..(232): n is a, c, g, or t
  misc_feature (266)..(266): n is a, c, g, or t
  misc_feature (269)..(269): n is a, c, g, or t
  misc_feature (271)..(271): n is a, c, g, or t
  misc_feature (282)..(282): n is a, c, g, or t
  misc_feature (286)..(286): n is a, c, g, or t
  misc_feature (289)..(289): n is a, c, g, or t
  misc_feature (298)..(299): n is a, c, g, or t
  misc_feature (305)..(305): n is a, c, g, or t
  misc_feature (312)..(312): n is a, c, g, or t
  misc_feature (315)..(317): n is a, c, g, or t
  misc_feature (322)..(322): n is a, c, g, or t
  misc_feature (340)..(340): n is a, c, g, or t
  misc_feature (357)..(357): n is a, c, g, or t
  misc_feature (361)..(361): n is a, c, g, or t
  misc_feature (378)..(378): n is a, c, g, or t
  misc_feature (381)..(381): n is a, c, g, or t
  misc_feature (383)..(383): n is a, c, g, or t
  misc_feature (389)..(389): n is a, c, g, or t
  misc_feature (398)..(398): n is a, c, g, or t
  misc_feature (429)..(429): n is a, c, g, or t
  misc_feature (437)..(437): n is a, c, g, or t
  misc_feature (443)..(443): n is a, c, g, or t
  misc_feature (445)..(445): n is a, c, g, or t
  misc_feature (502)..(502): n is a, c, g, or t
  misc_feature (542)..(542): n is a, c, g, or t
  misc_feature (555)..(555): n is a, c, g, or t
  misc_feature (559)..(559): n is a, c, g, or t
  misc_feature (563)..(563): n is a, c, g, or t
  misc_feature (566)..(566): n is a, c, g, or t
  misc_feature (569)..(570): n is a, c, g, or t
  misc_feature (575)..(576): n is a, c, g, or t
  misc_feature (578)..(581): n is a, c, g, or t
aagagttttgggtagtatactcaacgctantacagttnctncagcaatgtncatggttctcacaccaacacaaaaanacncttatgtanttcctttttcccnncaaatggtaccatgnccaatnacnacaaatatnccctcncnacnccnnnnaatccctntcncccncnccccnccaggtgnaacncattccccncancnaataatctnaanccaanannnaaanacnccnccccatccctccattctattcactaataatgaanccntncctggaggttnccanccncctattccnnccaggnattatcnaannnaaatngatattccagttaaattnattttttgttgaattantttnaattttttcttcatttnagntncagatnatagaggcntgttggatatgtgcggctttgatactggagntctggatntaattngnaatttcacattagatatgatttaaccataagcagcagcacgatccagagatccattnccatcagtgatctcactaaaaatatacagctacttcccanctaatctccaccnaatnaatnatnatnntatannannnncataatggaaagttaccttactgaaaaaaaaaaaagaaggaacaattaagatgggcccaaaggtctatctactaaactagctctgggggaaatagcttcaggatactgtagttcctctatctaatagacgaacttttggttaaccagacactgtaaacatagtttggcttggtggaatacttccttgtgttccctaaaagaggtacgagcaaacaagtgtacattccaccatcagtgtcaccttgagcaagtgcttaagcgtttacttacagtgttcttcattggggcaaaggcacagcttgcgatcaatgtccaaatactctgaaatgcacttagaccatatacctgtgcatgacactatgaacatcatctgtaaaccttttataccaagggggtaaacaacgacagacacgcataggggactttggacctcaaattatgcaatgtagattttaacacaattccccttttcccaggaagtgttagactttaaagaaatacagcaccaaaatttaaaaccgggggttcgcatataaatcccggttggcaacaccacgaattcttgtacaataaaccggcaagtggatccatatatgtggcactcggggcgcacaattttcggtgtccgccaatatatagcaggaggacaccactattgggcaacgcccccgttaagagaat

SEQ ID NO: 608972 - DNA, 459 bp, Homo sapiens
tgggggacagctttgatccatcaatttgtgaaagcatgcgtttgcactgtttctgttgcctgtgttgccaggtgagacaggtggcactaactccagcatgttatggaaggcatcccaagggcgtcttcttacagttggagcagacctcccttttccagcccttgtggccattagaccacgtgctggaactagcattgttcaattcccattcccagtttccactcccctttatgtgaaatcctttcctttaaggtgacagtaaatcttaaaattcatggtctctttatgaacttttcctcagtttcttctctgctgaaattgtaggccatgctactttttactgtatttggaatttggtgccctttggaagttgatatgctattgcctcccccaccccccgccagacttttctttttttccttggtcttgtgtttacgggggtaggctgggcatgcttgc

SEQ ID NO: 608973 - DNA, 3164 bp, Homo sapiens
  misc_feature (6)..(6): n is a, c, g, or t
  misc_feature (8)..(8): n is a, c, g, or t
agcggngngggctggcggagcccgggaggcggagaaggctgtcgttgccttggccgtcgcatccccgagggagtcgtgtcggcgccaccccggcccccgagcccgcagattgcccaccgaagctcgtgtgtgcacccccgatcccgccagccactcgcccctggcctcgcgggccgtgtctccggcatcatgtgtggtatatttgcttacttaaactaccatgttcctcgaacgagacgagaaatcctggagaccctaatcaaaggccttcagagactggagtacagaggatatgattctgctggtgtgggatttgatggaggcaatgataaagattgggaagccaatgcctgcaaaatccagcttattaagaagaaaggaaaagttaaggcactggatgaagaagttcacaagcaacaagatatggatttggatatagaatttgatgtacaccttggaatagctcatacccgttgggcaacacatggagaacccagtcctgtcaatagccacccccagcgctctgataaaaataatgaatttatcgttattcacaatggaatcatcaccaactacaaagacttgaaaaagtttttggaaagcaaaggctatgacttcgaatctgaaacagacacagagacaattgccaagctcgttaagtatatgtatgacaatcgggaaagtcaagataccagctttactaccttggtggagagagttatccaacaattggaaggtgcttttgcacttgtgtttaaaagtgttcattttcccgggcaagcagttggcacaaggcgaggtagccctctgttgattggtgtacggagtgaacataaactttctactgatcacattcctatactctacagaacaggcaaagacaagaaaggaagctgcaatctctctcgtgtggacagcacaacctgccttttcccggtggaagaaaaagcagtggagtattactttgcttctgatgcaagtgctgtcatagaacacaccaatcgcgtcatctttctggaagatgatgatgttgcagcagtagtggatggacgtctttctatccatcgaattaaacgaactgcaggagatcaccccggacgagctgtgcaaacactccagatggaactccagcagatcatgaagggcaacttcagttcatttatgcagaaggaaatatttgagcagccagagtctgtcgtgaacacaatgagaggaagagtcaactttgatgactatactgtgaatttgggtggtttgaaggatcacataaaggagatccagagatgccggcgtttgattcttattgcttgtggaacaagttaccatgctggtgtagcaacacgtcaagttcttgaggagctgactgagttgcctgtgatggtggaactagcaagtgacttcctggacagaaacacaccagtctttcgagatgatgtttgctttttccttagtcaatcaggtgagacagcagatactttgatgggtcttcgttactgtaaggagagaggagctttaactgtggggatcacaaacacagttggcagttccatatcacgggagacagattgtggagttcatattaatgctggtcctgagattggtgtggccagtacaaaggcttataccagccagtttgtatcccttgtgatgtttgcccttatgatgtgtgatgatcggatctccatgcaagaaagacgcaaagagatcatgcttggattgaaacggctgcctgatttgattaaggaagtactgagcatggatgacgaaattcagaaactagcaacagaactttatcatcagaagtcagttctgataatgggacgaggctatcattatgctacttgtcttgaaggggcactgaaaatcaaagaaattacttatatgcactctgaaggcatccttgctggtgaattgaaacatggccctctggctttggtggataaattgatgcctgtgatcatgatcatcatgagagatcacacttatgccaagtgtcagaatgctcttcagcaagtggttgctcggcaggggcggcctgtggtaatttgtgataaggaggatactgagaccattaagaacacaaaaagaacgatcaaggtgccccactcagtggactgcttgcagggcattctcagcgtgatccctttacagttgctggctttccaccttgctgtgctgagaggctatgatgttgatttcccacggaatcttgccaaatctgtgactgtagagtgaggaatatctatacaaaatgtacgaaactgtatgattaagcaacacaagacaccttttgtatttaaaaccttgatttaaaatatcaccccttgaagcctttttttagtaaatccttatttatatatcagttataattattccactcaatatgtgatttttgtgaagttacctcttacattttcccagtaatttgtggaggactttgaataatggaatctatattggaatctgtatcagaaagattctagctattattttctttaaagaatgctgggtgttgcatttctggaccctccacttcaatctgagaagacaatatgtttctaaaaattggtacttgtttcaccatacttcattcagaccagtgaaagagtagtgcatttaattggagtatctaaagccagtggcagtgtatgctcatacttggacagttagggaagggtttgccaagttttaagagaagatgtgatttattttgaaatttgtttctgttttgtttttaaatcaaactgtaaaacttaaaactgaaaaattttattggtaggatttatatctaagtttggttagccttagtttctcagacttgttgtctattatctgtaggtggaagaaatttaggaagcgaaatattacagtagtgcattggtgggtctcaatccttaacatatttgcacaattttatagcacaaactttaaattcaagctgctttggacaactgacaatatgattttaaatttgaagatgggatgtgtacatgttgggtatcctactactttgtgttttcatctcctaaaagtgttttttatttccttgtatctgtagtcttttattttttaaatgactgctgaatgacatattttatcttgttctttaaaatcacaacacagagctgctattaaattaatattgatatattcagtattctctt

SEQ ID NO: 608974 - DNA, 917 bp, Homo sapiens
  misc_feature (6)..(6): n is a, c, g, or t
  misc_feature (8)..(8): n is a, c, g, or t
  misc_feature (917)..(917): n is a, c, g, or t
agcggngngggctggcggagcccgggaggcggagaaggctgtcgttgccttggccgtcgcatccccgagggagtcgtgtcggcgccaccccggcccccgagcccgcagattgcccaccgaagctcgtgtgtgcacccccgatcccgccagccactcgcccctggcctcgcgggccgtgtctccggcatcatgtgtggtatatttgcttacttaaactaccatgttcctcgaacgagacgagaaatcctggagaccctaatcaaaggccttcagagactggagtacagaggatatgattctgctggtactttaaaaaaaatactatggatttcgcatgattctttaaatagatactatttttattgttattaggagactagactattaaagtctgttggattgagtaagtgtaaactggaagaatttttgtcttttatcatatttaaaggatttatttatgtaatctcaacagtgttaccatttatgtggagtattgcttatgatgatctcttaagaatattattgtaaaaacatcatatgggggattatcgtggtaaaacaaaattcgtgaaggtcttactctaaattcttttttctttcctataactttaattttgtatccatgtgatttcatgctttgacacataaacttgcctcagattcttttttcttatttttattatttattttagagatagggtctcactctgtcaccccagctggagtgtagtggtgcggtcatagctcactgcagtctcaaactctgggctcaggcaatcctccctacgtagcctcctcagtagctaggactatagctgtgtgcaccatgcccagctaatttaaaaagttttgtagacacgagagtctacactatgttgactgggtggtactcaaatccctggcttcaattgatctcn

SEQ ID NO: 608975 - DNA, 3218 bp, Homo sapiens
  misc_feature (6)..(6): n is a, c, g, or t
  misc_feature (8)..(8): n is a, c, g, or t
agcggngngggctggcggagcccgggaggcggagaaggctgtcgttgccttggccgtcgcatccccgagggagtcgtgtcggcgccaccccggcccccgagcccgcagattgcccaccgaagctcgtgtgtgcacccccgatcccgccagccactcgcccctggcctcgcgggccgtgtctccggcatcatgtgtggtatatttgcttacttaaactaccatgttcctcgaacgagacgagaaatcctggagaccctaatcaaaggccttcagagactggagtacagaggatatgattctgctggtgtgggatttgatggaggcaatgataaagattgggaagccaatgcctgcaaaatccagcttattaagaagaaaggaaaagttaaggcactggatgaagaagttcacaagcaacaagatatggatttggatatagaatttgatgtacaccttggaatagctcatacccgttgggcaacacatggagaacccagtcctgtcaatagccacccccagcgctctgataaaaataatgaatttatcgttattcacaatggaatcatcaccaactacaaagacttgaaaaagtttttggaaagcaaaggctatgacttcgaatctgaaacagacacagagacaattgccaagctcgttaagtatatgtatgacaatcgggaaagtcaagataccagctttactaccttggtggagagagttatccaacaattggaaggtgcttttgcacttgtgtttaaaagtgttcattttcccgggcaagcagttggcacaaggcgaggtagccctctgttgattggtgtacggagtgaacataaactttctactgatcacattcctatactctacagaacagctaggactcagattggatcaaaattcacacggtggggatcacagggagaaagaggcaaagacaagaaaggaagctgcaatctctctcgtgtggacagcacaacctgccttttcccggtggaagaaaaagcagtggagtattactttgcttctgatgcaagtgctgtcatagaacacaccaatcgcgtcatctttctggaagatgatgatgttgcagcagtagtggatggacgtctttctatccatcgaattaaacgaactgcaggagatcaccccggacgagctgtgcaaacactccagatggaactccagcagatcatgaagggcaacttcagttcatttatgcagaaggaaatatttgagcagccagagtctgtcgtgaacacaatgagaggaagagtcaactttgatgactatactgtgaatttgggtggtttgaaggatcacataaaggagatccagagatgccggcgtttgattcttattgcttgtggaacaagttaccatgctggtgtagcaacacgtcaagttcttgaggagctgactgagttgcctgtgatggtggaactagcaagtgacttcctggacagaaacacaccagtctttcgagatgatgtttgctttttccttagtcaatcaggtgagacagcagatactttgatgggtcttcgttactgtaaggagagaggagctttaactgtggggatcacaaacacagttggcagttccatatcacgggagacagattgtggagttcatattaatgctggtcctgagattggtgtggccagtacaaaggcttataccagccagtttgtatcccttgtgatgtttgcccttatgatgtgtgatgatcggatctccatgcaagaaagacgcaaagagatcatgcttggattgaaacggctgcctgatttgattaaggaagtactgagcatggatgacgaaattcagaaactagcaacagaactttatcatcagaagtcagttctgataatgggacgaggctatcattatgctacttgtcttgaaggggcactgaaaatcaaagaaattacttatatgcactctgaaggcatccttgctggtgaattgaaacatggccctctggctttggtggataaattgatgcctgtgatcatgatcatcatgagagatcacacttatgccaagtgtcagaatgctcttcagcaagtggttgctcggcaggggcggcctgtggtaatttgtgataaggaggatactgagaccattaagaacacaaaaagaacgatcaaggtgccccactcagtggactgcttgcagggcattctcagcgtgatccctttacagttgctggctttccaccttgctgtgctgagaggctatgatgttgatttcccacggaatcttgccaaatctgtgactgtagagtgaggaatatctatacaaaatgtacgaaactgtatgattaagcaacacaagacaccttttgtatttaaaaccttgatttaaaatatcaccccttgaagcctttttttagtaaatccttatttatatatcagttataattattccactcaatatgtgatttttgtgaagttacctcttacattttcccagtaatttgtggaggactttgaataatggaatctatattggaatctgtatcagaaagattctagctattattttctttaaagaatgctgggtgttgcatttctggaccctccacttcaatctgagaagacaatatgtttctaaaaattggtacttgtttcaccatacttcattcagaccagtgaaagagtagtgcatttaattggagtatctaaagccagtggcagtgtatgctcatacttggacagttagggaagggtttgccaagttttaagagaagatgtgatttattttgaaatttgtttctgttttgtttttaaatcaaactgtaaaacttaaaactgaaaaattttattggtaggatttatatctaagtttggttagccttagtttctcagacttgttgtctattatctgtaggtggaagaaatttaggaagcgaaatattacagtagtgcattggtgggtctcaatccttaacatatttgcacaattttatagcacaaactttaaattcaagctgctttggacaactgacaatatgattttaaatttgaagatgggatgtgtacatgttgggtatcctactactttgtgttttcatctcctaaaagtgttttttatttccttgtatctgtagtcttttattttttaaatgactgctgaatgacatattttatcttgttctttaaaatcacaacacagagctgctattaaattaatattgatatattcagtattctctt

SEQ ID NO: 608976 - DNA, 111 bp, Homo sapiens
aggcgctagcgccttagccaggatcgagcacgctacccttcgtatacgcggtgtgcacgacgtagcgcggctattcttccgtacgtcatcatcgccgagcgaccgggtacg

SEQ ID NO: 608977 - DNA, 3327 bp, Homo sapiens
  misc_feature (6)..(6): n is a, c, g, or t
  misc_feature (8)..(8): n is a, c, g, or t
agcggngngggctggcggagcccgggaggcggagaaggctgtcgttgccttggccgtcgcatccccgagggagtcgtgtcggcgccaccccggcccccgagcccgcagattgcccaccgaagctcgtgtgtgcacccccgatcccgccagccactcgcccctggcctcgcgggccgtgtctccggcatcatgtgtggtatatttgcttacttaaactaccatgttcctcgaacgagacgagaaatcctggagaccctaatcaaaggccttcagagactggagtacagaggatatgattctgctgatttatctcccaagctgtattctaggcctcctacaagtttcttcctagatagaccatgatattttaaactttgcatgttcaaaaattgaactgaggccgggcgtggtgactcacgcctgtaatcccagcactttgggaggctgaggtggatggatcacttgaggtgtgggatttgatggaggcaatgataaagattgggaagccaatgcctgcaaaatccagcttattaagaagaaaggaaaagttaaggcactggatgaagaagttcacaagcaacaagatatggatttggatatagaatttgatgtacaccttggaatagctcatacccgttgggcaacacatggagaacccagtcctgtcaatagccacccccagcgctctgataaaaataatgaatttatcgttattcacaatggaatcatcaccaactacaaagacttgaaaaagtttttggaaagcaaaggctatgacttcgaatctgaaacagacacagagacaattgccaagctcgttaagtatatgtatgacaatcgggaaagtcaagataccagctttactaccttggtggagagagttatccaacaattggaaggtgcttttgcacttgtgtttaaaagtgttcattttcccgggcaagcagttggcacaaggcgaggtagccctctgttgattggtgtacggagtgaacataaactttctactgatcacattcctatactctacagaacaggcaaagacaagaaaggaagctgcaatctctctcgtgtggacagcacaacctgccttttcccggtggaagaaaaagcagtggagtattactttgcttctgatgcaagtgctgtcatagaacacaccaatcgcgtcatctttctggaagatgatgatgttgcagcagtagtggatggacgtctttctatccatcgaattaaacgaactgcaggagatcaccccggacgagctgtgcaaacactccagatggaactccagcagatcatgaagggcaacttcagttcatttatgcagaaggaaatatttgagcagccagagtctgtcgtgaacacaatgagaggaagagtcaactttgatgactatactgtgaatttgggtggtttgaaggatcacataaaggagatccagagatgccggcgtttgattcttattgcttgtggaacaagttaccatgctggtgtagcaacacgtcaagttcttgaggagctgactgagttgcctgtgatggtggaactagcaagtgacttcctggacagaaacacaccagtctttcgagatgatgtttgctttttccttagtcaatcaggtgagacagcagatactttgatgggtcttcgttactgtaaggagagaggagctttaactgtggggatcacaaacacagttggcagttccatatcacgggagacagattgtggagttcatattaatgctggtcctgagattggtgtggccagtacaaaggcttataccagccagtttgtatcccttgtgatgtttgcccttatgatgtgtgatgatcggatctccatgcaagaaagacgcaaagagatcatgcttggattgaaacggctgcctgatttgattaaggaagtactgagcatggatgacgaaattcagaaactagcaacagaactttatcatcagaagtcagttctgataatgggacgaggctatcattatgctacttgtcttgaaggggcactgaaaatcaaagaaattacttatatgcactctgaaggcatccttgctggtgaattgaaacatggccctctggctttggtggataaattgatgcctgtgatcatgatcatcatgagagatcacacttatgccaagtgtcagaatgctcttcagcaagtggttgctcggcaggggcggcctgtggtaatttgtgataaggaggatactgagaccattaagaacacaaaaagaacgatcaaggtgccccactcagtggactgcttgcagggcattctcagcgtgatccctttacagttgctggctttccaccttgctgtgctgagaggctatgatgttgatttcccacggaatcttgccaaatctgtgactgtagagtgaggaatatctatacaaaatgtacgaaactgtatgattaagcaacacaagacaccttttgtatttaaaaccttgatttaaaatatcaccccttgaagcctttttttagtaaatccttatttatatatcagttataattattccactcaatatgtgatttttgtgaagttacctcttacattttcccagtaatttgtggaggactttgaataatggaatctatattggaatctgtatcagaaagattctagctattattttctttaaagaatgctgggtgttgcatttctggaccctccacttcaatctgagaagacaatatgtttctaaaaattggtacttgtttcaccatacttcattcagaccagtgaaagagtagtgcatttaattggagtatctaaagccagtggcagtgtatgctcatacttggacagttagggaagggtttgccaagttttaagagaagatgtgatttattttgaaatttgtttctgttttgtttttaaatcaaactgtaaaacttaaaactgaaaaattttattggtaggatttatatctaagtttggttagccttagtttctcagacttgttgtctattatctgtaggtggaagaaatttaggaagcgaaatattacagtagtgcattggtgggtctcaatccttaacatatttgcacaattttatagcacaaactttaaattcaagctgctttggacaactgacaatatgattttaaatttgaagatgggatgtgtacatgttgggtatcctactactttgtgttttcatctcctaaaagtgttttttatttccttgtatctgtagtcttttattttttaaatgactgctgaatgacatattttatcttgttctttaaaatcacaacacagagctgctattaaattaatattgatatattcagtattctctt

SEQ ID NO: 608978 - DNA, 3721 bp, Homo sapiens
  misc_feature (6)..(6): n is a, c, g, or t
  misc_feature (8)..(8): n is a, c, g, or t
  misc_feature (3553)..(3553): n is a, c, g, or t
  misc_feature (3556)..(3556): n is a, c, g, or t
  misc_feature (3558)..(3558): n is a, c, g, or t
  misc_feature (3566)..(3566): n is a, c, g, or t
  misc_feature (3585)..(3585): n is a, c, g, or t
  misc_feature (3613)..(3613): n is a, c, g, or t
agcggngngggctggcggagcccgggaggcggagaaggctgtcgttgccttggccgtcgcatccccgagggagtcgtgtcggcgccaccccggcccccgagcccgcagattgcccaccgaagctcgtgtgtgcacccccgatcccgccagccactcgcccctggcctcgcgggccgtgtctccggcatcatgtgtggtatatttgcttacttaaactaccatgttcctcgaacgagacgagaaatcctggagaccctaatcaaaggccttcagagactggagtacagaggatatgattctgctggtgtgggatttgatggaggcaatgataaagattgggaagccaatgcctgcaaaatccagcttattaagaagaaaggaaaagttaaggcactggatgaagaagttcacaagcaacaagatatggatttggatatagaatttgatgtacaccttggaatagctcatacccgttgggcaacacatggagaacccagtcctgtcaatagccacccccagcgctctgataaaaataatgaatttatcgttattcacaatggaatcatcaccaactacaaagacttgaaaaagtttttggaaagcaaaggctatgacttcgaatctgaaacagacacagagacaattgccaagctcgttaagtatatgtatgacaatcgggaaagtcaagataccagctttactaccttggtggagagagttatccaacaattggaaggtgcttttgcacttgtgtttaaaagtgttcattttcccgggcaagcagttggcacaaggcgaggtagccctctgttgattggtgtacggagtgaacataaactttctactgatcacattcctatactctacagaacaggcaaagacaagaaaggaagctgcaatctctctcgtgtggacagcacaacctgccttttcccggtggaagaaaaagcagtggagtattactttgcttctgatgcaagtgctgtcatagaacacaccaatcgcgtcatctttctggaagatgatgatgttgcagcagtagtggatggacgtctttctatccatcgaattaaacgaactgcaggagatcaccccggacgagctgtgcaaacactccagatggaactccagcagatcatgaagggcaacttcagttcatttatgcagaaggaaatatttgagcagccagagtctgtcgtgaacacaatgagaggaagagtcaactttgatgactatactgtgaatttgggtggtttgaaggatcacataaaggagatccagagatgccggcgtttgattcttattgcttgtggaacaagttaccatgctggtgtagcaacacgtcaagttcttgaggagctgactgagttgcctgtgatggtggaactagcaagtgacttcctggacagaaacacaccagtctttcgagatgatgtttgctttttccttagtcaatcaggtgagacagcagatactttgatgggtcttcgttactgtaaggagagaggagctttaactgtggggatcacaaacacagttggcagttccatatcacgggagacagattgtggagttcatattaatgctggtcctgagattggtgtggccagtacaaaggcttataccagccagtttgtatcccttgtgatgtttgcccttatgatgtgtgatgatcggatctccatgcaagaaagacgcaaagagatcatgcttggattgaaacggctgcctgatttgattaaggaagtactgagcatggatgacgaaattcagaaactagcaacagaactttatcatcagaagtcagttctgataatgggacgaggctatcattatgctacttgtcttgaaggggcactgaaaatcaaagaaattacttatatgcactctgaaggcatccttgctggtgaattgaaacatggccctctggctttggtggataaattgatgcctgtgatcatgatcatcatgagagatcacacttatgccaagtgtcagaatgctcttcagcaagtggttgctcggcaggggcggcctgtggtaatttgtgataaggaggatactgagaccattaagaacacaaaaagaacgatcaaggtgccccactcagtggactgcttgcagggcattctcagcgtgatccctttacagttgctggctttccaccttgctgtgctgagaggctatgatgttgatttcccacggaatcttgccaaatctgtgactgtagagtgaggaatatctatacaaaatgtacgaaactgtatgattaagcaacacaagacaccttttgtatttaaaaccttgatttaaaatatcaccccttgaagcctttttttagtaaatccttatttatatatcagttataattattccactcaatatgtgatttttgtgaagttacctcttacattttcccagtaatttgtggaggactttgaataatggaatctatattggaatctgtatcagaaagattctagctattattttctttaaagaatgctgggtgttgcatttctggaccctccacttcaatctgagaagacaatatgtttctaaaaattggtacttgtttcaccatacttcattcagaccagtgaaagagtagtgcatttaattggagtatctaaagccagtggcagtgtatgctcatacttggacagttagggaagggtttgccaagttttaagagaagatgtgatttattttgaaatttgtttctgttttgtttttaaatcaaactgtaaaacttaaaactgaaaaattttattggtaggatttatatctaagtttggttagccttagtttctcagacttgttgtctattatctgtaggtggaagaaatttaggaagcgaaatattacagtagtgcattggtgggtctcaatccttaacatatttgcacaattttatagcacaaactttaaattcaagctgctttggacaactgacaatatgattttaaatttgaagatgggatgtgtacatgttgggtatcctactactttgtgttttcatctcctaaaagtgttttttatttccttgtatctgtagtcttttattttttaaatgactgctgaatgacatattttatcttgttctttaaaatcacaacacagagctgctattaaattaatattgatatattcagtattctcttcaactttgtcacgaggaagaatttcctgtagttaattttaactttccttcattacattgttgcataaaactagtcccttagtgccagtttggaagttacttgcaattgtttggaagatttgcaggtcgctgacctcatcatttcactctaagtatatgtggtaggctaagctcagaaaaaggtatgtatgctttacactgataggcaccaaatttagtattgtatcctaagtatttttcctcttctgtattttctgtgctctacccctgaaatatatttaggaataaagaagatataaataaagtgatattggggtatgttcagcttgtaagtgtcagaaatggaagttggacaaattggattaaacatatttaaagtagaatgttatnatngnataccccnaaaattgtgagtaataatntcttaatggagcttactggccagatctncagggctataggagagtagtgtaagtaaaaggagaagtccttctttacaaaggttttcacttttaaatagtgaagataagctataaagcacaattatttaagtaagct

SEQ ID NO: 608979 - DNA, 113 bp, Homo sapiens
agttcgacggagactctcatgtcccagcgagctcagcagcccgggcccgtgaggcctctctccccactgatgtcagccagtccaggatggagtcactctccctggcgccagca

SEQ ID NO: 608980 - DNA, 2905 bp, Homo sapiens
  misc_feature (6)..(6): n is a, c, g, or t
  misc_feature (8)..(8): n is a, c, g, or t
agcggngngggctggcggagcccgggaggcggagaaggctgtcgttgccttggccgtcgcatccccgagggagtcgtgtcggcgccaccccggcccccgagcccgcagattgcccaccgaagctcgtgtgtgcacccccgatcccgccagccactcgcccctggcctcgcgggccgtgtctccggcatcatgtgtggtatatttgcttacttaaactaccatgttcctcgaacgagacgagaaatcctggagaccctaatcaaaggccttcagagactggagtacagaggatatgattctgctggtgtgggatttgatggaggcaatgataaagattgggaagccaatgcctgcaaaatccagcttattaagaagaaaggaaaagttaaggcactggatgaagaagttcacaagcaacaagatatggatttggatatagaatttgatgtacaccttggaatagctcatacccgttgggcaacacatggagaacccagtcctgtcaatagccacccccagcgctctgataaaaataatgaatttatcgttattcacaatggaatcatcaccaactacaaagacttgaaaaagtttttggaaagcaaaggctatgacttcgaatctgaaacagacacagagacaattgccaagctcgttaagtatatgtatgacaatcgggaaagtcaagataccagctttactaccttggtggagagagttatccaacaattggaaggtgcttttgcacttgtgtttaaaagtgttcattttcccgggcaagcagttggcacaaggcgaggtagccctctgttgattggtgtacggagtgaacataaactttctactgatcacattcctatactctacagaacaggcaaagacaagaaaggaagctgcaatctctctcgtgtggacagcacaacctgccttttcccggtggaagaaaaagcagtggagtattactttgcttctgatgcaagtgctgtcatagaacacaccaatcgcgtcatctttctggaagatgatgatgttgcagcagtagtggatggacgtctttctatccatcgaattaaacgaactgcaggagatcaccccggacgagctgtgcaaacactccagatggaactccagcagatcatgaagggcaacttcagttcatttatgcagaaggaaatatttgagcagccagagtctgtcgtgaacacaatgagaggaagagtcaactttgatgactatactgtgaatttgggtggtttgaaggatcacataaaggagatccagagatgccggcgtttgattcttattgcttgtggaacaagttaccatgctggtgtagcaacacgtcaagttcttgaggagctgactgagttgcctgtgatggtggaactagcaagtgacttcctggacagaaacacaccagtctttcgagatgatgtttgctttttccttagtcaatcaggtgagacagcagatactttgatgggtcttcgttactgtaaggagagaggagctttaactgtggggatcacaaacacagttggcagttccatatcacgggagacagattgtggagttcatattaatgctggtcctgagattggtgtggccagtacaaaggcttataccagccagtttgtatcccttgtgatgtttgcccttatgatgtgtgatgatcggatctccatgcaagaaagacgcaaagagatcatgcttggattgaaacggctgcctgatttgattaaggaagtactgagcatggatgacgaaattcagaaactagcaacagaactttatcatcagaagtcagttctgataatgggacgaggctatcattatgctacttgtcttgaaggggcactgaaaatcaaagaaattacttatatgcactctgaaggcatccttgctgccttgctgtgctgagaggctatgatgttgatttcccacggaatcttgccaaatctgtgactgtagagtgaggaatatctatacaaaatgtacgaaactgtatgattaagcaacacaagacaccttttgtatttaaaaccttgatttaaaatatcaccccttgaagcctttttttagtaaatccttatttatatatcagttataattattccactcaatatgtgatttttgtgaagttacctcttacattttcccagtaatttgtggaggactttgaataatggaatctatattggaatctgtatcagaaagattctagctattattttctttaaagaatgctgggtgttgcatttctggaccctccacttcaatctgagaagacaatatgtttctaaaaattggtacttgtttcaccatacttcattcagaccagtgaaagagtagtgcatttaattggagtatctaaagccagtggcagtgtatgctcatacttggacagttagggaagggtttgccaagttttaagagaagatgtgatttattttgaaatttgtttctgttttgtttttaaatcaaactgtaaaacttaaaactgaaaaattttattggtaggatttatatctaagtttggttagccttagtttctcagacttgttgtctattatctgtaggtggaagaaatttaggaagcgaaatattacagtagtgcattggtgggtctcaatccttaacatatttgcacaattttatagcacaaactttaaattcaagctgctttggacaactgacaatatgattttaaatttgaagatgggatgtgtacatgttgggtatcctactactttgtgttttcatctcctaaaagtgttttttatttccttgtatctgtagtcttttattttttaaatgactgctgaatgacatattttatcttgttctttaaaatcacaacacagagctgctattaaattaatattgatatattcagtattctctt

SEQ ID NO: 608981 - DNA, 976 bp, Homo sapiens
accatagctgccaacagctaaagcccctggtccctctgcagtctctataccaataaagtgaccctgctctcaaaaaaaaaaaaaaaaaaaaaaaaaaaaaaaaaagcgaacaaaaaaaaaaaaaaaaaaaaaaaaaaagctgtgtcgtgggccgcgtccgcgcgcgccccggcaggaagctttttcacacacacccctggtggggcggccgccgcggcccacatatgagtgcaatcatcacacccggcgccacacggccgtgctacacagcagaaccccgtgtctcaacacacagggtcgtgggtcgctccccaccaccaaaaaagaaaagcgccgccgcgcgcacacgggcggcgctctttcgcgaaacaacacaccacgagaagaggcgatctccagaagcgcgagctcaacagcgaggcggcgctaatcatacacacggagagggggagcaccacgaagaagcgcaccactacaataaaataatatagaggccgccgcgcgaccgcgagaggcgacacgaccccacacaccgacgacagcacacagagacgaacacacacacacccacatcagaacaccacgacacgccgatgacgatcgaccgaccaacccacgcgaaccgatcaaccagccaccgtacagcgagaagaaaaacgaagcggacatcgaccagaccgacggaaacacacatgaaggccccgaaggaggaacgggaacgagagccggaggcgagagactacgacagcagcgagccagcagaagacagacacacacagaacaaaccggcgcgagacagaagcacgaccagcgaccacaccgcggacgcacacgcaagcgcagacggagcagagcaagacaacagcgacgacacatcgacgcatcgaccacagacccacgaacagccacgcgaggccaccacacaacacaacaccgctgccagacacacacgcagacaacgacaagagcggacaca

SEQ ID NO: 608982 - DNA, 3248 bp, Homo sapiens
  misc_feature (6)..(6): n is a, c, g, or t
  misc_feature (8)..(8): n is a, c, g, or t
agcggngngggctggcggagcccgggaggcggagaaggctgtcgttgccttggccgtcgcatccccgagggagtcgtgtcggcgccaccccggcccccgagcccgcagattgcccaccgaagctcgtgtgtgcacccccgatcccgccagccactcgcccctggcctcgcgggccgtgtctccggcatcatgtgtggtatatttgcttacttaaactaccatgttcctcgaacgagacgagaaatcctggagaccctaatcaaaggccttcagagactggagtacagaggatatgattctgctggtgtgggatttgatggaggcaatgataaagattgggaagccaatgcctgcaaaatccagcttattaagaagaaaggaaaagttaaggcactggatgaagaagttcacaagcaacaagatatggatttggatatagaatttgatgtacaccttggaatagctcatacccgttgggcaacacatggagaacccagtcctgtcaatagccacccccagcgctctgataaaaataatgaatttatcgttattcacaatggaatcatcaccaactacaaagacttgaaaaagtttttggaaagcaaaggctatgacttcgaatctgaaacagacacagagacaattgccaagctcgttaagtatatgtatgacaatcgggaaagtcaagataccagctttactaccttggtggagagagttatccaacaattggaaggtgcttttgcacttgtgtttaaaagtgttcattttcccgggcaagcagttggcacaaggcgaggtagccctctgttgattggtgtacggagtgaacataaactttctactgatcacattcctatactctacagaacaggcaaagacaagaaaggaagctgcaatctctctcgtgtggacagcacaacctgccttttcccggtggaagaaaaagcagtggagtattactttgcttctgatgcaagtgctgtcatagaacacaccaatcgcgtcatctttctggaagatgatgatgttgcagcagtagtggatggacgtctttctatccatcgaattaaacgaactgcaggagatcaccccggacgagctgtgcaaacactccagatggaactccagcagatcatgaagggcaacttcagttcatttatgcagaaggaaatatttgagcagccagagtctgtcgtgaacacaatgagaggaagagtcaactttgatgactatactgtgaatttgggtggtttgaaggatcacataaaggagatccagagatgccggcgtttgattcttattgcttgtggaacaagttaccatgctggtgtagcaacacgtcaagttcttgaggagctgactgagttgcctgtgatggtggaactagcaagtgacttcctggacagaaacacaccagtctttcgagatgatgtttgctttttccttagtcaatcaggtgagacagcagatactttgatgggtcttcgttactgtaaggagagaggagctttaactgtggggatcacaaacacagttggcagttccatatcacgggagacagattgtggagttcatattaatgctggtcctgagattggtgtggccagtacaaaggcttataccagccagtttgtatcccttgtgatgtttgcccttatgatgtgtgatgatcggatctccatgcaagaaagacgcaaagagatcatgcttggattgaaacggctgcctgatttgattaaggaagtactgagcatggatgacgaaattcagaaactagcaacagaactttatcatcagaagtcagttctgataatgggacgaggctatcattatgctacttgtcttgaaggggcactgaaaatcaaagaaattacttatatgcactctgaaggcatccttgctggtgaattgaaacatggccctctggctttggtggataaattgatgcctgtgatcatgatcatcatgagagatcacacttatgccaagtgtcagaatgctcttcagcaagtggttgctcggcaggggcggcctgtggtaatttgtgataaggaggatactgagaccattaagaacacaaaaagaacgatcaaggtgccccactcagtggactgcttgcagggcattctcagcgtgatccctttacagttgctggctttccaccttgctgtgctgagaggctatgatgttgatttcccacggaatcttgccaaatctgtgactgtagagtgaggaatatctatacaaaatgtacgaaactgtatgattaagcaacacaagacaccttttgtatttaaaaccttgatttaaaatatcaccccttgaagcctttttttagtaaatccttatttatatatcagttataattattccactcaatatgtgatttttgtgaagttacctcttacattttcccagtaatttgtggaggactttgaataatggaatctatattggaatctgtatcagaaagattctagctattattttctttaaagaatgctgggtgttgcatttctggaccctccacttcaatctgagaagacaatatgtttctaaaaattggtacttgtttcaccatacttcattcagaccagtgaaagagtagtgcatttaattggagtatctaaagccagtggcagtgtatgctcatacttggacagttagggaagggtttgccaagttttaagagaagatgtgatttattttgaaatttgtttctgttttgtttttaaatcaaactgtaaaacttaaaactgaaaaattttattggtaggatttatatctaagtttggttagccttagtttctcagacttgttgtctattatctgtaggtggaagaaatttaggaagcgaaatattacagtagtgcattggtgggtctcaatccttaacatatttgcacaattttatagcacaaactttaaattcaagctgctttggacaactgacaatatgattttaaatttgaagatgggatgtgtacatgttgggtatcctactactttgtgttttcatctcctaaaagtgttttttatttccttgtatctgtagtcttttattttttaaatgactgctgaatgacatattttatcttgttctttaaaatcacaacacagagctgctattaaattaatattgatatattcagtattctcttttttaaattttgttcaccgagtgataggaatatttcccttgttattttaaaattttcttataccttttctcccttttccaatat

SEQ ID NO: 608983 - DNA, 433 bp, Homo sapiens
gaacaacacatcccctctgaatgtatccattggttgttaagcctatgcatggctgttataaaaatggggttaaaccgtgaaagttggccttataataatttccagacacaacccaagtttttaaagcagtggatatgcccttagctatatcccttttgagaaatgtatataaagaattttacaggctggaggcagtggctcatgtctgtaatcccagcattttggaaggccaaggcgggcagatcacttgagcccaagagttccagagcagcctggccaatatggcaaaaccccatctctaataaaaattcacaaattagccaggcatggtggcacacacctgtaatcccagcttctcaggaggctgaggcatgagaatcgcttaaacccaggaggtggaggctgcagtgagccaagattaagctctgtctca

SEQ ID NO: 608984 - DNA, 298 bp, Homo sapiens
agagtatacccgtcgcacttctgaatcccatgtatttatcacatcctagtagagctatggagtgtaacaagtattgtgcattttaacagtaatatttgaagatttgtataatattcacctttaaaactagttagtatgcatttatacattttatcagaaatatactaactaacaattcaacagctgatgttctttgcatttgtggggagatgtgtgatgttcttggttttctggtttggaatggaacgtttatagccttgcctgtaaaaatgtgccccagcgacttaatgagtgaccg

SEQ ID NO: 608985 - DNA, 442 bp, Homo sapiens
tgtaagagattagaaaggtcaaatgttggccattagaggtctcaggtgcaaaagcgaacgctagtggacacgttcattgctttaaccaagatcctagacagaatacaggactttgtgcattggagctctggtgctcctggatacaaaaactagtcaaggctcataagattagaagcatcgcgtaagggaccagagctacattaagagggtagggctgggctcccctactgctacattgcttgggcatttaggatgcagccacggtctcgggatctttatgcactaattctggcggtcaatttgtttttaacacacacatcagttaaacatacccggcggtcttctttttgaaatatttacgcaggaaattgtgtcttgcactcaaggtggtataatactaaagtacttcctcttcaattatgatcttcagtgaaagccctca

SEQ ID NO: 608986 - DNA, 237 bp, Homo sapiens
tatatatactgaccatgagtgctatatcagagagcaagatagactagtacggacaataatattatgaaactcgctcctcgtgtatctttgtgatctgtgtcaccatatctcacgaagtccagccacttgactggcacacacccctccggacatccagcgtgacgaagcccacacagccacctaggggccgcctgagaccctcgcgccccccgcgccccccgcgccgtcgcctaagca

SEQ ID NO: 608987 - DNA, 118 bp, Homo sapiens
ttattgagatgtttctacaaactagggggagaaataagagaaaaatccttattttaaaacacaagtgaaaagcaccaagcaatcgcacataccttgatgactcagagtctgttcagtt

SEQ ID NO: 608988 - DNA, 487 bp, Homo sapiens
cctttgtacgcaaccggtgcagagtctgcttgtccagcagggtgtgcagaacccgtgaggtattctgcggaccagcagaatactaccggttcctgtgcgtgacgtacccgcgttaccgactccggtatcagaaattacgttgctgcatgcctgaccgcaactggtccagcccttgccggatcactgtatcgctcaggtgcaataactgatctccgacataccattcaaacatactgcgattgggcaggcttgcgtgcactgcctgattgaacaaccagataccttgttccgccgcaatctgattgcgcaaatggattgccgtatctttatccatcgggagatgcagatgaagcatgttcacctgtggtgtagccgggttggtttggagctctggatagttctgcaaaattctgaatacatccctggttctggcaaggtaggcgggcatttgtgccagttgctgatcaaactgcattgccgcagcgac

SEQ ID NO: 608989 - DNA, 445 bp, Homo sapiens
  misc_feature (33)..(33): n is a, c, g, or t
  misc_feature (302)..(302): n is a, c, g, or t
  misc_feature (307)..(307): n is a, c, g, or t
  misc_feature (372)..(372): n is a, c, g, or t
  misc_feature (396)..(396): n is a, c, g, or t
  misc_feature (408)..(408): n is a, c, g, or t
  misc_feature (427)..(427): n is a, c, g, or t
attgtgccaatgctggcgatgagtgatgcccgncgcgcgcgattatccgccgctggctggcagggcagaatgcaccgatgccttcccgcgacgcgttggtgaggatctggcaggaagtggcgctggcgcgggaagatgcctcaccctgtttacgtttgggcgcgtttgaaatccgacgctatcagtcgcaactgtggtggattaaatccgtcaccgggcaaagcgaaaacattgtgccgtggcagacgtggcttcaaccgctggaattaccggcggggctgggaagtgagcttaatgcgggnggcgntattcgccctccgcgtgcagacgaagcggtagcgtgcgtttcaaagcgccaggttctgcatattntcgggcgtaacggcggacgtaagntaaagaaatctngcaagagctgggcgtgccnccgtggctacgtgacacc

SEQ ID NO: 608990 - DNA, 343 bp, Homo sapiens
  misc_feature (41)..(41): n is a, c, g, or t
gagctcgcgcggcggaggtataaagtatgcgatgtgccctntggatcaactgccacggtcggaaagcttaagggatgttctggagagactccttccctattggaatgaaggattgctccgaggtattacgtggcaaaaccattctgatatctgctcatggaatagcagtagggcactcctaaacacctggaggtatctcagatgagacatcatcacattactcttctactggagtcccattcttctggaattggatgaaacctcgtctgttggcctatcagttctggtgacagagcgatcagcagcattaggaggtgagttcaggaaagtgacaagctaaaat

SEQ ID NO: 608991 - DNA, 137 bp, Homo sapiens
ggctctgggcatgggggagtggagagagaaggggtaggtggagttgagggaactgggcaggcacagtcacatcctggctgggatccgtgtagtgcttcaccgtggcatgtccacccggacttgccggctatggcact

SEQ ID NO: 608992 - DNA, 181 bp, Homo sapiens
tgggaaggagatgaacacatcaattgacatctttatggcatgatgaaactggagtcgactcacatccccaccggtgcagcttctccaagcatcaccttaccccccttgctgactcctaggtcctgaagcatgaaattcgggagggcacggctaaactcttagagaaacgggccctcctcca

SEQ ID NO: 608993 - DNA, 258 bp, Homo sapiens
tttccccccccaaactgtgtgtttgaaccccagccaaacaaatgtgttccattggtccaatatataagccttacccccccccccaaaaaatttaaaacaagtaaattaatgcattcccatgatccctttttgaaaatggttcaaagcatgttttcctgatggtgggattgtttaaatgccatgttttaaagtttttaatcctttattagttatgaagggcttcttttatatgttaagtttaggttgccaggactcata

SEQ ID NO: 608994 - DNA, 259 bp, Homo sapiens
  misc_feature (2)..(2): n is a, c, g, or t
  misc_feature (27)..(27): n is a, c, g, or t
  misc_feature (99)..(99): n is a, c, g, or t
  misc_feature (136)..(136): n is a, c, g, or t
  misc_feature (179)..(179): n is a, c, g, or t
  misc_feature (222)..(222): n is a, c, g, or t
tncccctcaaaaaatcctatcaatagnacctaattaaataaactctgtcccattatatagtcatagaaattaatgaagagcccaggcacagtgctgaancctgtaatccccagcactttgggaggatcacttgagncccggagttcaagaccagcatgggcaacatagggagaccccanttctacagggaaacccaaaaatgttagcaggatgcagtggggnaagcctgtggccctagctactagggagggtgatgtag

SEQ ID NO: 608995 - DNA, 211 bp, Homo sapiens
atctctttggtatttatatttttgacttattttttcacacctccattggtccctattcacgaactgctaaatttaaacagccccgtcctgttctgggaccagacacctagagttctcaagtgctaaaggcaacgacctccttcccatcctcactcaccagtaattccacagggccaggctcagtgagatctgtcaaggcaagaggggtgct

SEQ ID NO: 608996 - DNA, 107 bp, Homo sapiens
ccaaccccaccccatgagatgaagcatgagatatgcggtagcgcaacagagagctagaagcgggctccaggtggatctgcaggactgaaggctcacaccgcctgcct

SEQ ID NO: 608997 - DNA, 843 bp, Homo sapiens
tcctgcaggtacgctccggattaccgggtcgacccacgccgtcggtttctactatggggagctgaatggacaaaggggcctggttccatccaacttcctggaaggccctgggcctgagtcaggcagcctagagtctgggacatctcaagccgagagtcagagaacgaggaggagaagagtccagtgctagatggagctagtgtagagacatgaccccagaatcaccatacaagggcctccagtgcccccaggctggcactgtgccctcagctctggaagttcctccaggaccaaactgggggagtcacagagcatagctgagaagaagcagggtctcctcgccaaagcaaaggaacttctcaaaaggctgggctccaggaaagactgaggctgccgtccgtctgtcctgcagacagaagtggccctggatcaactcactggctggacagggaaacccaactcctgatctctgagcagactggcactcaaaggagcccaggggacctggtgagggtggggttacctgcacccttagtgaggagtcctctagatgggctcttccagagggaactgagccccagagtaagtaatcaagcaccaagcactgtcagatcaggactggacccacgcctctggattcccagtctgttctcatctactcctgctttgctaccacagctctgtaggtcccttcttggccttccctgctccaaggataggccctgggtgggagatagggaccactctaacgatggctctggctgtcctcccgatggatcgtttgcactggactgtccccctggggcgggggcagagccatgtacttactccagggtatatatg

SEQ ID NO: 608998 - DNA, 886 bp, Homo sapiens
catgttagcacgtgacaagaaagttaattattaatagtctgtaaacgtggatgctggctcttacgaagctcctacttcacagtgaaccctatggttgaattagaacagaacttgctagtcgtccacgaacagggaagtggacaatcatcacactatgctactctctcgttttcatgctaattgtggtcacagacagtaaggtattcaaggttaagtctaatccaagtcttagagatctttaagtatccgtaaaatagcagcctaagtagtcatcatgtaaagaagttgactttcaggaatgtcagcattgaccgtctgccttgccactgttactcagctaaagcataacttgccattcttaaaaataaaaaagctcccagccagaaactctagtgatactcagttttgacctcttactgcttccatgtgggacttcttttacagcttataagccattggaattttctacctgctatgttcctctctggaagaatatcaatttggaaactgcttgctttcaaatcaatgccatgatcatccatattgtgagttggtagtgggtgtcccagaagtgtccccatttgacaactttatgcacacacctggcaaatcattaacatgagcattcaacagtactgggatgggtggggtgggggtagggggctcaccaacatgaactggccagttgacattgcctgaagaaggcaccacctttacagggccagtagtggggttgggtaagcccagttttgaaaatttctatctagacctccgtattgaatggttcttaaagaaactgtcgtatattggagggatggaaatggcttaatcatattatcgaacaaatcctttttatgtgacacattataaattaattggtatatta

SEQ ID NO: 608999 - DNA, 177 bp, Homo sapiens
aagatggctgatattacgctgctactgatcatcctcccagcataaacagcacatgttatgcgtatctacacaaaacagcaccatcataagaaacaaaaatcaggtgagcaataatagtacctgatcttaacttcatatcactgaaagaggcacagaaggggaaagacaatcttgaat

SEQ ID NO: 609000 - DNA, 416 bp, Homo sapiens
  misc_feature (50)..(50): n is a, c, g, or t
  misc_feature (72)..(72): n is a, c, g, or t
  misc_feature (79)..(79): n is a, c, g, or t
  misc_feature (108)..(108): n is a, c, g, or t
  misc_feature (240)..(240): n is a, c, g, or t
  misc_feature (307)..(307): n is a, c, g, or t
  misc_feature (330)..(330): n is a, c, g, or t
  misc_feature (342)..(342): n is a, c, g, or t
  misc_feature (357)..(357): n is a, c, g, or t
  misc_feature (371)..(371): n is a, c, g, or t
  misc_feature (391)..(391): n is a, c, g, or t
  misc_feature (398)..(398): n is a, c, g, or t
tcgacccacgcgtccgcagattcatgggtgatttagcctatctgtcccangccagcgtggctgagtgtgctngctggangcttctctctctgctttcgaagggtaagntgagatccaaccccggaaaaccggcaggatgaaagggggcaagttaagagaagctggccatctgttgttccaaacctggtcactgtgttttgaagaaaaagcaaggaccccagaaagcaagcaccccagaangcccaagaaggctaagaaggacgtgcatcaaccgcccctgaatgcaagccttccccgaattccccangaccaacgggagaaaacgaattntcgggggaaagnccttggggtcttganccccaggacaattnagcaaggaggtacttgaacntccctgnaagaaaaaacttgttcca

SEQ ID NO: 609001 - DNA, 190 bp, Homo sapiens
aacccgacctgagcgggcgcacagagctggtggtgaccaatgtcacgctgcgcctgcaggaaatcacggtgaaagcctccaatgtgctgtcagaggggcgagcagcgcgcgttgggggatggctaatgttcctcggccggagctcgaaataccctagccacattactttcgacccgtttatttttcgacc

SEQ ID NO: 609002 - DNA, 166 bp, Homo sapiens
gctcacttcatttcccagagaactccagcctgggtcacacaccaacacacttgtctcaaaaacacacaaacaaaacacacagtagcatagaacagaccttcccctccctgactctggactttatacctttgttactacgatgctgtcacacacacacacactgatc

SEQ ID NO: 609003 - DNA, 388 bp, Homo sapiens
tctggatgcaagtgtctagcttatgtgacttttcctttctttatttttttttcttttgagatggagtcttgctgtgtcacccacaccggagtgcagtggcgtgatctttgcttactgcagcctctgcctcaaaggttcaggtgactctcctgcctcagcctcccaagtagctgggattacaggcgcccgccaccaccacgccaggctaattccaccacagtcattaccaacttgcactggaggttgtttattcatctaggacacgtccttaaagcttaaggcgctcctcccccagcagcctggcttgagggagaggcctgcctctgttgtgctcgctgtggtgggtggtaggcaccctaggtccttaagggacactttgcatccagag

SEQ ID NO: 609004 - DNA, 245 bp, Homo sapiens
gggggggggctttaaaaaaaccccccccccaaagggcccgggggcccaagggcccccaaaaggggtttggggggggttttaaggaccctggccgggccccccccccccttggccctttggggggacccgttttttttgtggggaaaaaacccttttaaaggcctttgggttttggggtcccccaaaatttgggccccagggggggggggggggtttttttccaaaaaaatttttttcccccccca

SEQ ID NO: 609005 - DNA, 424 bp, Homo sapiens
cagaagtctatttacactatactgtaatctaagtgtgcaatagcattctaaaccatgtacaaactttaattaataaacactttctagctaaaaaaataaaactgctattaatcatctgatggcttcatctgagttgcaatatttttgctggttggaaagtcttccttaatgtcaaaggttgctgactgatcagcggtggtggttctagaacataggggtggctattggtaatttcttaaaataacaataatgagcatcacttgctgcactgattgactctttcttttgtgaaagattcccctgtagcatgcaatgctctttgattgcattgtacccatagtagaacttctttcagaattggagtcaatcttcgcaaatagctggcactgctttatcaactaaaattatgtagtattttaaatcc

SEQ ID NO: 609006 - DNA, 432 bp, Homo sapiens
  misc_feature (240)..(240): n is a, c, g, or t
ttcagagtgtaaagtaatcttggaatataaagaatttcttcaggttgaattacctagaagtttgtcactgacttgtgttcctgaactatgacacatgaatatgtgggctaagaaatagttcctcttgataaataaacaattaacaaatactttggacagtaagtctttctcagttcttaatgataatgcagggcacttactagcataagaattggtttgggatttaactgtttatgaagntaacttgatttccgtgttttgttaaaatttcattgttctagcacatctttaactgtgatagtttgtccgtttcattgcagttacttggtcttgggctatggattaaaaagtgttcttcatgagcctgtaagactactgtactgtgggctctaagaagagatagaatcctaataaaatctatccttggccttc

SEQ ID NO: 609007 - DNA, 415 bp, Homo sapiens
gggaaagacccgagccagcgggcgcgtggacgtgggtaacgcacggtccaataagggaggtctgtatggcccgttctggcagcgacgaggacgcgcctgagcagagcaggaatcacgaccgtcgtcgactccaggagcgcggagaggagagacatgaggctgagctgattacggattctgacagtactgtccatctgcctgagcgccgtgatcacggacacgtaggccgtgggccggaagctgcagatccatgtcaagatgcggatggaccactgtaccatcacatagcacatagtggatgttctgcacatgcactacacacagaagctggaatatgggacagactatgacgagatggctgactagccagccctatgacttcgagctagacgcatgccaggtgatccgggctggg

SEQ ID NO: 609008 - DNA, 179 bp, Homo sapiens
attgcagcctcaaacccctgggctcaggtgattctcccacctcagcccccctgtagttttggcactcaggaggctgaggtggaaggataacatgagcccaggagtttgaagttacagtaactatgatcatgctgctgtattccagcctgggtgacagaacaagacactgacttaaaaaa

SEQ ID NO: 609009 - DNA, 982 bp, Homo sapiens
taccgtcacatcgatgtgcccatgtgtgccacaatgagaatgaggtgccggtggccattgcaggagaaggtcagggcaccagtgtggtgaagcgtgaggagctcttcattcgttcaggcaaacgtccgtggtgcattgtaccatgagaatgatgcctgtgtgaagattgtagtgtgtgccaagacagtacactcagtgacctgaaagctggaactagctggcacctgctagcttatttcactgtgcgactttgtgtatagagccttgggaaggaattgcttccccattggtgtgactccgggtcgaattgtggtgtcccaagttgacactcaaacattctgtgaaaccgttgggctggccgatgcgaaagatgctgcatggatcgacaggggctggtggaagagctatttgtgatctcccataatttcacatcggatctcctcacgcgtgagatgatcttgtacaaacagaaccgtggtttggacgtataacgcgctgcagattaataccgcgtagttgatgtagccaacccataatctcactcagggagaagtttactcgcagtacttgcaggtcccaacatgtggatcggttgttgaccgttctagagccccctccgtgttgtacgtgagagggtctgggtcaaatggcgcgtagtgacctgtctctgcctgtaagggatcccaggatcagggggatcggcaggcaaggtccataggatgtacaggccatggtgctgatacggttaccgcattgcgcggaacttggtggtggtcccaagtttgtgaaacagacagctttggggggagcaaaaggtctctgagattgaggtgggaaccgggtttgccccttttccgtttactcggattgggagcgtggctgtggttggctccaggaatcctcagagagtgaggggtgggcctgcccagacatactgtgggcgcatcagcaatattatggacagagaaatagacgcgttata

SEQ ID NO: 609010 - DNA, 244 bp, Homo sapiens
tagtttaataatgggggaaaaaaaattagggtgctcctgaaactgactgtagagcatgtaaaatgattttactggattttgttccactgtaatcaatgaaaaaaatgtacgttgtagacaaagttgcagaattaaaaaaaaaaatttgcttttaatttattctttttgtattaaaaatttggataggatctttcccttttgcaaaacagggttgtccacccttattaaagccttttcaaaatga

SEQ ID NO: 609011 - DNA, 224 bp, Homo sapiens
  misc_feature (25)..(25): n is a, c, g, or t
gatcgagctcggtaccttccagccnacgccaaacactgtgtcccacgtctgactcagactgagcagctgtgaccaggacagctctccgagatgtgatgagccacaaccccaccatagcactaagaggaaacctaaatgtcctgaagacggaagcttcagagagaaaacatacctgacacacagtggacacagccgagaattcacgcaacgcatttccatatgca

SEQ ID NO: 609012 - DNA, 912 bp, Homo sapiens
  misc_feature (57)..(57): n is a, c, g, or t
  misc_feature (101)..(101): n is a, c, g, or t
  misc_feature (702)..(702): n is a, c, g, or t
gttttcatcctcctcatatacttcagcaggttctttgctttcaagattggaagcatngccaaagacagccatgaagaaggaagctgtagaggtgtttttgntgtgtttattttgctttgtggttgagggaaggacaagagataagaggtgttacctcagtaaaaaccttcaggccacaaagcaaaaagttgcatagccacaacgaagatctagtgggatatagttttgatttaagtggcagttatagccaatttaggctaatgcttggtttggagcttttatacacaacgttttgttaggcatcacagtttgcaacctctgctccaaagagaaaaatagaatgagttttctttctttttttttttttgggagttcagagtctcgctctctggtccaggctggagtgcaatagcgcgatctgggcctcactggaacctccgcctcccgggttcaagcaattctccggctggcctcctgagtagcggggataacaggcgtgtgtcaccacgctcggctaatttggtattttagtagagacagggtttcaccatgtcaagcgggtctgggactcctgacgtcgtgatccacccgcttggcctcccaaagtacgggattaccgggcgtgagccattgtgcctggccgagtttctaaaagtgagagtaatttctggactcttagtggatccatattgtgtccataantctggatccattgctatgtggccatcaggaccttatataatgggggttattcaatattaggggatcaggcggaagggataaaaataagggtagttgaaacattgatttttgcaggagaccaagaggaatggaagagagaacaaaatcctgaaatgggagaccgaaaagtgtttcaattttaaaagtgggtgagtgttttgataagtttct

SEQ ID NO: 609013 - DNA, 876 bp, Homo sapiens
tcgctgtctccatattggcccctgttctccgctcccgagcccaaattggggcagagtgttagatcggggtccccctgccagtttccccgttgcccaccgtgacacagtgttaggggcgtaacaccacacgttgtgcagcactgttgggcgtctatacccaacgtagctctcgaagtgtgcggcgcttgtcgcctccaagtcactttggggcgtcataaatatggtagcactcgggggtcactacaacacacaacacttgcgttttgcggcacaatgtgttgaccccaccgcttttgtgcaaacgccaatcacattattgcctcccggggccccacaaaaccccaaacctttacccactgggaccccaccaaatttcgcctaatatgtgagggacttcttcctcaaacccaataaccgtcgtcaacctgtcaaaacttcccctctcaccaacatgcgcaagcctatccatcatttgcacgcggaaaccctcttgtcctccaccaaacgggttttatcctcccccaacaacccctctctcatctcttaacccgtactgcttcttgatctcacaaaacctattttccccccgggccaaatttccacttcacaatatataatcccgcccccgaagccaatttgtctcaaccccgttactgcttagattagtctcacggccgcttattaatacctaaacgctgccccgccccaatatggagtcccctcccggagatctaatacccttacaccccttttgccttctatttaaaattaattccacgcttcctacacctatttattaaaggttatcgcccccccccccccccttaaatttttttccccccccccccaaccttcccccctctaccccccaaaaaa

SEQ ID NO: 609014 - DNA, 125 bp, Homo sapiens
taaaggtgtagcagtcatcgataccagacataatagagcagctatctatagagcacagcgtgcggagacgatagccagtgcccctgggtagcagggatagaggcgtaccagcacatgagccgcag

SEQ ID NO: 609015 - DNA, 306 bp, Homo sapiens
gtctctagcacggatcccctatcgtcgaagaacaacggcagataggcaaaggtgatagcataggcactgctctttacatatacagcagtgtaagatgaaaggaaacgttattggctattctcatttcaggagtcaagttgcctggttgcatgacatgtgtaatcacgctattcctaccagattcccagataccaaagttggccacactttgtgggctagaagtgtgtttttgtagtcttgtatatattatatcttagcagagtttctatcattggagagaatttgaatattctgtcaaatcgctta

SEQ ID NO: 609016 - DNA, 108 bp, Homo sapiens
gcggacataagcttaacacaagggtataatcttcattttgtaattaataccatgtggtttacagcgtactgaactaaatctgtggaatgcattgtgaactgaaatgag

SEQ ID NO: 609017 - DNA, 134 bp, Homo sapiens
gtgccgacctgctgcgtgccaccgcctacgcgggcaagcgtgctcatcaggctgtcggaggatgcgcatcagcgcgcaccacgtagcccaacatggtggccaccggaggtgtgggtgccggtgacggggatcct

SEQ ID NO: 609018 - DNA, 259 bp, Homo sapiens
ccggaatgtagatactgtgaagaatgtcattggtagtttgataggaatagcattgaagtttgtattttgctgtgggcagatatggccattgttaacaagtattgattcttctatatccataaaacatggagatgtttttccgtgtggtttgtgtcatctctcgatttcttacgtgcagtgattttactgattctcattagtagatggtttttcaccatccacagtttatctagcatttccgggtggtaccgaggctcga

SEQ ID NO: 609019 - DNA, 312 bp, Homo sapiens
gagctctgtttaaataaatattgtcctttcatgtaaattattctggatgtagattgagcttattaaatgttcacacaaagtattcatgcatggtgaatccaaattgtatactgtaaatttacatacgttgtctagaagtaccatagggtttaaaaacctgggctggcattggtcacaccaggcctaagaaggcagaagttgaatcaattgaactagggcactaaactgaatagttgacagtgtcattttatgttggattattaattcctgtttttctttctgctatctgttggtgcctgacttgatggcaga

SEQ ID NO: 609020 - DNA, 149 bp, Homo sapiens
tataccagcctataccactctgcataccaccttttaccacaccttaaaactcactaccagtctaagctacacaagttcaccattttacagtataatgaaaagcactacctccatgagaattcacgtgtggatggtatagacctcgtggt

SEQ ID NO: 609021 - DNA, 146 bp, Homo sapiens
agggctcatgtatctatgcagagtccaagtttcatcagcactgaaatcaaccatgccgtcgtaacggtctccaggtctccctcgtctgtcataagccatgaggtctccccctctaggtggtggtggtggagagagcctcatgtgta

SEQ ID NO: 609022 - DNA, 536 bp, Homo sapiens
  misc_feature (465)..(465): n is a, c, g, or t
  misc_feature (467)..(467): n is a, c, g, or t
gcgaattcactagtgattgtgagctgagatcgcacccggtccaagcactggctttgagataagcaatattaaaaacattttcagcttcatcagatgctgactaactgacctccaaccactgttccaccagccataactacagctttggttggacaagtgactgatttcagtaactttttcctgacaaggtgactacccatcatggactggttctggctggcttacagagctcctgcacttgcatgtctttgtgtcctgaaaagaccttttgccatatagggcctaattataatacatttaaatgttaagtctccaccccaaagtgaccatgggttgtatgttgcatgcatgtttgttcaatatgcatgtgtcagaaccactttcatgaatattcatagctcctcatgtaacctgttgaatgtgtatgtttagtcaatccattgagcatgaagctcctaccctaancnctccttctttgaagtgcctgtctctggtcttggctggagacatgcttcccagcaggtctcactcccttt

SEQ ID NO: 609023 - DNA, 256 bp, Homo sapiens
  misc_feature (8)..(8): n is a, c, g, or t
tcctcgtngggtactaggctcgagtatggactctatggtgggggaaacagagaccccctgacagtctttaaagaggggagagatggatcaggcctgtaccgtaccctcagggaggttataaagcatatacagaggtacagacccatctcctgtgcttatatatgtcatggggcctttgcacatacttggacccttgaatttcattcctgtgcttccccacagcacttcccatggttcactgcacgcagctctattc

SEQ ID NO: 609024 - DNA, 261 bp, Homo sapiens
catgagctggaggacatgaagatgaagaactctgtccttaagagtgaaatccacaaggggaaagcccaccaagggcagagccgggccatcgagcgcctgaagaagaagaagtttgagaatgagttcctgctggtggtcaacttccccacaattccgttcaggatccacaatcggaatggaaagagttacctggtcctactggcctcggactaccaaagggcaaagtggagaaaaacaattcaaaaacttctctggaaagtg

SEQ ID NO: 609025 - DNA, 409 bp, Homo sapiens
  misc_feature (237)..(237): n is a, c, g, or t
  misc_feature (378)..(378): n is a, c, g, or t
aagtgctcatcgactcatgatgtgcgccctccttgcttgggcagaccgtgcagtatttaacacatagtagcagaatatttactgttgaagcttgaaaagatgtgagctctttgtgtgcaatttttcatttatgcatgtgagaaggtttttggtttttggttatttttaagtatttttacattgtagtactcgtttttgcttgttggtggtgtttgcttatttaatacattccgtcanggacagaaattacatgctttttctcttaggaagtgtgtattgggtttttccctccccctctccccttggtggtgatggtggtgatgtttaaatgaagttgcttttacagcaccaaagacttaatcatccatttccttatantaaaaaggtagctactttttgcatagacccc

SEQ ID NO: 609026 - DNA, 166 bp, Homo sapiens
cgttactacattttaaatggatggaagaggtagagtaggcggtataaagtgtaaggtctgaagtggagggtagtataatattacctccaaatagactctggtaagtaggtgatacatatcgttacagctctacacactgagctactacaacaacactacaaccgac

SEQ ID NO: 609027 - DNA, 1012 bp, Homo sapiens
ggcgaaacatgctttctagaaattgttttcagtggcagacatagtcatttgctcttatgttgtcttcgagcaacacaaatcacaatcttgtcattgatttgctcgctccatattcttcacgcacattgaccaatgcagtataacaaacatgtgagcttatgggagtgtattttatcgatctattgtaactggttcagacaacggggcataagcactttgtcgactacgaagacccaaaaacctaccatatttcgagaggtctccctcataaaccaggatctaatcttccaaattgtgtctataacttctagcaattatcatgaacgtagttataatggccatggggggcaacaacaggcgatgcgagacgagccaacaattttggaacaccagccaagaacggcacccccacaccccgattgacgcaccactcttggcattacaacgtcaccctacactttccttcacacatctacctctcccccgcaccaccgccgcattgattccctcgctgcacgacacgcaaattctacagtccttgctccgtcatcacctatgtacatttcaacttcttaaattcctaccaaaccaccgagcctcacctggcttcttccaaacgacgccgcaacaatacttccagcatattccaatacgacgctataattcacttattgcccccaatcagcatcatcacgcggcattcaatcccgcaacatatatttaaaaacattagaatttaacaacacatttctgcccgtcttcgggccccacttccacaacgtgggcgacaacctctagcccacacaacccaacccagggaggccaccaaatagcacgtgctgagccggcactaggatcggagggcacataaggcgctacagatgtcccccgatacgtgggcggcctaatatccgtcaaggaacccggggaacacaaggtacacaccgtaggcatactcgcggggggaaacgaggggaaaggcacaccacaccgaccgccccagtcaccccgg

SEQ ID NO: 609028 - DNA, 446 bp, Homo sapiens
  misc_feature (124)..(124): n is a, c, g, or t
  misc_feature (158)..(158): n is a, c, g, or t
taaacggagctggactttctcttttaataatcatatagttgtattgaatgtaaaacacgaacagctgtctggcgtacgacggtgtgagtgatctgcagagtcgcacagtcctcagtgtagctanagtcagtgcctgtgtggtgaacccggggactccnccagtgctccaggcccagtgtggctgacttcaagataaaggcagcggtttcttccactcctcctgctgccccttccagcagaggctctggggcacccaccagcagatgtgtccaaggtcctgcaatgcctaggaaccttgggagccatcttcctccctctgctcatcctcttcctcagaccgtgcgctggccctagatgaacttgacgcacttggtcttgtcatggggcaggcgtgtcttgaagagcacagaatccgccctgaaatgcgtgtacaggaggggcctgta

SEQ ID NO: 609029 - DNA, 384 bp, Homo sapiens
tgcaggggctctgtggctgtaatcatagcgcattaggaaaggccaagggtgggggtggatggctgtgagtcgtcaaaagttcaagaccagcctgggcaacagggcaaaactccattctctaaacaaccatataaaaatgagatgggcatggtggcacagaacctggtagtcccagctagcgtcacgaaggctgaggtcaggaggacccgcttgaggcccgggaggcagcagaatgtcgagtggagccgagatgagcgcccatagggaactctagacactgggagacacgagcggagacatccgtcttagaaaaaaaaaagagaaaacaaaacaaagaacaaacagagcgaaaggatacgcccaccccaaaagggttccaaaaca

SEQ ID NO: 609030 - DNA, 149 bp, Homo sapiens
ttccccccccccccccccctccccccctctcccccccccctgcccccccctcccctcccccccccctccccccccccccccccccccccctccccccccccccccccccctgaatagacttcactatagggcgctagcctctgtttgca

SEQ ID NO: 609031 - DNA, 303 bp, Homo sapiens
ctgaattgtctctagttacagccgggggtgcgtacggaatcatcctcacctatgatgtgaagttaccgctcagaagctggctaaagctgtcggaccggatctcgggcctgacagacacatacagcaaagactgcctcttcaccatcgtgaggaacaaagtggacctcactgaagagggggccttgcgcgggccaggagaaggaagagtgcagtcccaatatggacgctggggaccgtgtctccccaagggcacctaagcaggtgcagcctggaggatgcggtaggccctctataaaaatgatc

SEQ ID NO: 609032 - DNA, 734 bp, Homo sapiens
ttccacttgctttttaaacttagttcttcacctccattgacactcgttttttggttttctccctatagtgtgggttggtgctagacaccagtctgacccacagaatgggagttatttcatccatctttcctcctccttccaaaaaccacatatctacacaaggaataatttaataccatctaggacattctctctcttctttcacattacaagcctatttaaacgagatgcaatgtggccaaaggttttaccacaatgtgaaacatacaccgtaaaacagacggcatgtgtttaaacctgagtttatcaggcatggcaggacagttgcaggagagagaggcagtgacccaagccagtgcacttgatgtccatggacatatatttttctttacaataataaattacacaccattttaaactagaagcctacctggacgtcgtccgtcggcgctgagatactgcccacggtgaaccaacagcttggacatagtcaccggtccggtctactcttcttcagggcgggacggggggccacgtcggggctcgcgacagaaacgcttaccctgaacgtgacccctgagcgtgacacggtatatgaacaggccttgccaatggtccacaccacgaaaaaaccaacacaaatacacaaccacacacacctataagcacgttgaaaccaacaactgccgtcccggccgttatactattacagtgaacactggacaactaccggc

SEQ ID NO: 609033 - DNA, 392 bp, Homo sapiens
tgtcagcggacattcactgtactgggatacaggcatgagccactgtgacctgcatgtgtcccgtgtatttgatacaaataaatttgagtagccaaagcaaaaaaaaaaaaaaaatccctcaagttcccatctttatttctcctgtgaaaaaataaaaaacctattacctaaaacataaaaatataaaagattaataggacctcaagtaactttatgtgccaataattcaaatgaagatgatcccaattaaataataagggggcatagattggtaagtagaataacatcttctaacctggccattagtacacattatttcaatccaactggcaccacattcacagtaaatcatgcccccagggataaaggtttaaagaaaatgtgcatgtata

SEQ ID NO: 609034 - DNA, 182 bp, Homo sapiens
gagctgctatagcttaccatctatgcgtgggttcaacaggaactgataggtctgccaagcccgtgccagctcacgtccagcaatgtctgtgtgcagctcatctggacgctggtgtgacagaagccagactgcatatgcgatctgtgtgtggcgaatagatgtcacctacgagcttgctagga

SEQ ID NO: 609035 - DNA, 550 bp, Homo sapiens
gctgtgcggtttaatctgacgcagcttatgcggaggagaatgtatatatgtacttatactaacattatacttctatagggtgatagattggtccaattgggtgtgaggagttcagttaaatgtttgggattttataggtagtgggtgttgagcttgaacgctttcttaattggtggctgattttaggcctactatgggtgttcacatattttactctctctacaaggttttttcctagtgtccaagagctgttcctctttggactaacagttaactttacaaggggatttagagggttctgtgggcacatttaaagttgaactaagattctatcttggacaaacagctatcaccaggctcggtaggttagtcgcctctacctataaatcttcccactatattgctacatagacgggtgtgctcttttagctgttcttaggtagctcgtctggtttcgggggtcttaactttggctctccttgacaagttatttctagtaaattcattatgcagaaggtataggggttagtccttgctatattatgcttgg

SEQ ID NO: 609036 - DNA, 766 bp, Homo sapiens
gccagtcgttcgccggaaagcatttgtctcccacctcatcataacaacaattaatttcctctggggcctgaggagggcagaatttcaaccttcggtgtgcttgggagtggcgcatgtgatttacacgacaaaatgccgaggtgctcggtggagctcatggcagtgcccttgtgtggaagacttgggacttggtgcaacaccctgggagaaggtgcctatggagaacgttcaacttgctgtgacatacgagtaactgaacgaagcagtcgcagtgacagatcgtacgatatgaagcgtgccgtcagaccggtccagaacaactattacgaaagagatctggtatcaatacaactgctacaatcactgacacatgtagctacacattctatggtcacaggagcgaacggcaatatccacatatccatcttctgcgcagtactgtagccggaggagacgcttttggcacagaatagaagcagacataggcatgcctgaaccagaatgctcacgacgatcttccatcaactcattgcgcaggggtggtacatctgccatggtatggcactaactcacaggggattttacagccagaaaaatcttctggtggcatgcacgggctacacctccaaatctaagacttgggtgggcaaccaggattccggaatcataattggtgacgtatgtgcacccgactgtgtggacctaccctatgtgctccgaacctctgtgacgcaagacttctgcgaccaccgtcgtgtgccgtgaa

SEQ ID NO: 609037 - DNA, 909 bp, Homo sapiens
cagataggaggctactgcggtagtacagtgaagaaatggacatggatgtttgtaagcagaacatgaagatgaggaaaagtgagcagatccagacaggttggggagtgccgcggtcttgactagatgtattggaagtgcttcctaacgtttggatcttgatgcagccactggccccaccccagaccaatgcacgaagaacccagcggaagcagaaaccacaaaacggcaaaactctcctgctccttcaaatacgactagaagcacgaaaccgtcccctagatcgtccattagctccgttcgatagagaacccttcacactaggaaagaaacctacctatttggcatgagctagagccctcgtagttccacgcgggtaatggtctacgtcgcgggagcaatttacccaagattcagaagccgtcctctaccaccgagcacggaagagacatgaaaggagccggcccgctgtccgagggcaacgaagccaccgtgtgccacataggcatggagtggtggaccaggacagacgaagagaagttgatgaccgaatgatgtgcagtcatagatgacgcttgttgcccgcaagaacatgcatctatttgcctagtgaaggctccaaacaacttatcacgcgttcaaggagtcctaactaaagtgctacagatcaccatggaaccactcataccatacactcgtcgacaatgcctgtgagccatgcatccagactcgtacacaagcaagatttcccacacatgaaagtgcccttctcctggtccctcgcattgacttttctgcatcaagggtaccctattcaactaagatccaccctattacacgagacgcgcaatggcaaacatctaccctcattgcacactttacaaaatgaaaccatcggcaccacaaatcaca

SEQ ID NO: 609038 - DNA, 660 bp, Homo sapiens
  misc_feature (149)..(149): n is a, c, g, or t
  misc_feature (181)..(181): n is a, c, g, or t
  misc_feature (233)..(233): n is a, c, g, or t
  misc_feature (276)..(276): n is a, c, g, or t
  misc_feature (361)..(361): n is a, c, g, or t
  misc_feature (375)..(376): n is a, c, g, or t
  misc_feature (592)..(592): n is a, c, g, or t
gtagctgggcgtgaaaacagtacgaaaagcctgacgcagggtgagctggaagagattacagtgaaacagtgctactttacatagtgtggtcttaagaggggatagcgaggagtctagtgaacttagcgtgtgcatagaagctctgtagnctcaatattagagcattggcagcgcgaagagnagaattctgtagtttcaggttactgaaaagccagaatacgcagggtggacantaccatgagaggtactgttatgtgggactcagagtcaatggantggagttcaccaacgcctgatacgttcccactaagtcacatttgaggacggccggacgcgtggtgtgcgaaaatcactcccttgngtgtgcaactccannggagttcaacagaccccagccttgtggcaaacattggcaggaaacttccaatctttctacaaaaaacaattaacgaacaaattttagctgggcagtgtttggtggccctgtagtccacagcatactacagagcaggctagcaggatgagaagcgcggcaggcagggcttcgcagtggaggtccaggcatacaatgggccactggcacctcccaagnccctggtggcaaccaggaagtcaaagaccccctggtctacagaagaaacaacaaaaagagatatagaa

SEQ ID NO: 609039 - DNA, 759 bp, Homo sapiens
  misc_feature (53)..(53): n is a, c, g, or t
  misc_feature (61)..(61): n is a, c, g, or t
  misc_feature (66)..(66): n is a, c, g, or t
  misc_feature (81)..(81): n is a, c, g, or t
  misc_feature (127)..(127): n is a, c, g, or t
ggaggaggtggcggcgctggagctcctcccggggaccagcgacccggggagcnagcacgtngttcngcaccgctcttcctncagccgctgagccgtcccttctcgccatgtcccagagcaggcacgngccgaggccccgcccttggagccgaggacagtgggaccttcagtttggggaagatgataacagctaagccagggaaaacaccgattcaggtattacacgaatacggcatgaagacctaagaacatcccagtttatgaatgtgaacagcatctgactgtgcaaatacacgtgcccactttcaccgttcagcaggtaaccgcttggtgacataacctgcacagtgtgacacggtacaacgctacagaacgcctggccgacaacactagagctgcacgaggctgccataaacattctcgcaaacgccaatgcacagctatacgcttcgcagcttcctgaccccttaactgcctgacccttccaagcaaccaaagaaccagcttaatcctattggttcattacaggaacttggctattcatcatggctggagacttcctgaactataccctttcccaggagggagcgacctgctcactaagagcagaatatactacacatttgcacgggctagcagtcactttatgcgaacactggcaacgcgcggcccctcacaaacaagcaatgccacacagcgcatgctgctgccgaacctccctcgcccacatctagctcctatctctccagagtaaccacc

SEQ ID NO: 609040 - DNA, 829 bp, Homo sapiens
agcgggggtgcggcgcggcgcggggcggggccgggcgggacgctcggtcatccccgccggcctcgccccgggccatggccgccggccccgcgccgccccccggccggccccgggcgcagatgccgcatctgaggaagatggagcgggtggtcgtgagcatgcagggaccccgaccagggcgtgaagatgcggagccagggcctgctggttaccgtcattccccacgcggtgacaggcagcgacgtcgtgcagtggttggcccagaagttctgcgtcctcggaggaggaggccctggacctgggcgccgtcctggtgccaggcgtggttacatctacccgctgcgcgaccccgcgtagcctcatgctccgtgcagacgagacgccctacaggttccagggtcaggctcgggggttgcacggtgggagccggtggggacccggaagagaacgagagcgagccaaggctttacacaagtcgggggaacacagggagggggccggacacgaaggcttgacagcgaaatcgggcacggggggaataccgggccaacggatgggccagcacagacatcgactgagtgcacacaagacacaggcataagcgaaaaagaggtcccagggaaaccgcacaaggaacgggaataaagggatgaagaaacggggaacccccagtcatagcagggagacatacagacagcccacacaaaaaagtgtcaaccgagagcgaacacaaacgagacaagaggggccccaaacacaaggagggaccagaaaggctgccagaaggagaatgcctagaacaagtcattcccataaggaggggaacaca

SEQ ID NO: 609041 - DNA, 1092 bp, Homo sapiens
  misc_feature (308)..(308): n is a, c, g, or t
agagtgctttcttttctcctccacccatgtgggtgtgtcttctcttcttgtgttgccatcattttctggtggaatttgtggctgcctttcccgcatatatacctggtgatcttctaacgacgggggtgatgtaactacgacccacacaattgtgggccacatttggttgatacccgggggcacttccctgggggctttcaccggtttagtgacccgcggactccctccttgtgaagaatttctggtgttgttccactttgtgggtcccccttgtaacctgtcccccagggggatctctttctcccctnaaggcatacagtcttgacttccttaacctgatggaagtgttgtaaggaaaaaggatttttcccctgaagccattggaaatcgccaatgatcacctcttgagtacatggttttgaaagaaagtgcccgattgtaattgaaaattccacatctggaccaatgtcctaaatgtggggaacttgaaaagaagtcagctgttgccagataaacatgaattgctcaagccttgccagcagccaatcatttggggaagaatcacacgttgctgatggacacgagtggatgaaatgagccacagaaatagttaaaaaccacacatacactgaggaatactagtaaaccacagcagcaggaacactcagtatcagcagcgtcgccagcacggagaaaaatgcagcgccagagccgaggagaacccccggctccctgaggaggacctggccaaactctttcaaaccaccaccagccgcctgccacggatggactcgctgctcattgcaggccaagatataacaccttactgccagaacatcaaggaggttcacctgccccaaaacttaggcaagcttttcatggcccaggcttcttcaagaataccacacactaagaaaaggaagtttccagaaaagaagttaacactgaacttcttgaagtcacacccacgggcaaattcttggaagaaatatatttgcatattgaaaagcaccagaggatttctttagtgtcattgccgattttggctataacagtgtctttctagccataataaaataaaaccaaatctta

SEQ ID NO: 609042 - DNA, 1131 bp, Homo sapiens
gccaaccccaggccaagtcaagaaggagctcagccactatctccccaccgagccagctcagcgggcagggctgggagggagtgggacagattctgggagtgcagcggggaggagtcccggctgggctgagcgcagggagctgcttggcagtgccagagcccaggccccagagccctgctggagaggaggcagactgaggcagcaggccccgccagcaggcgaagcagggagatgtcagactgctacacggagctggagaaggcagtcattgtcctggtggaaaacttctacaaatatgtgtctaagtacagcctggtcaagaacaagatcagcaagagcagcttccgcgagatgctccagaaagagctgaaccacatgctgtcggacacagggaaccggaaggctgcggataagctcatccagaacctggatgccaatcatgatgggcgcatcagcttcgatgagtactggaccttgataggcggcatcaccggccccatcgccaaactcatccatgagcaggagcagcagagcagcagctagagacccctttggccacaccttccaggcactggcctgatgccccgccctggtgctctccccaggctccctcctcagcctcctgcccacccagggccctttactctcttctccctccagaccttcctctgacccttgctgaactggggtccctttgtgagtgtctcagtctagaggtacctccctccctggggggtctcagctcctggagtcgcaggcccttggggcccctctgtgagatctcaatgctgtctggggaccctaagagttttctcacctgttcagtctcatctaaccttccaatgtctgatgttcctgccaaattcctgcctgattctgggtccgtcctgacctccaaaggtcagcttggtgcatagaagggtactccccatgcatccttggtggcaagggggtacgcaagaaaacaggcagcatgcaggtcggcaggctcaggaagcatgcagcagagcctagtccaatattacacaatagacccattagcagaggcatgaagagaggactatcaaggacgttccctccagcatactaccttaatctgggaattgacataagacgagggtgagccttctc

SEQ ID NO: 609043 - DNA, 1074 bp, Homo sapiens
  misc_feature (29)..(29): n is a, c, g, or t
aatctaggctaggtacgaggctgggtgtnggtgagagggtgacgcatgtgccctctggcagtctgctgctgtgtccagagtccgactccagctgggctgtaactgggcttggcccccgccttaggccccgccagcaggcgaagcagggagatgtcagactgctacacggagctggagaaggcagtcattgtcctggtggaaaacttctacaaatatgtgtctaagtacagcctggtcaagaacaagatcagcaagagcagcttccgcgagatgctccagaaagagctgaaccacatgctgtcggacacagggaaccggaaggctgcggataagctcatccagaacctggatgccaatcatgatgggcgcatcagcttcgatgagtactggaccttgataggcggcatcaccggccccatcgccaaactcatccatgagcaggagcagcagagcagcagctagagacccctttggccacaccttccaggcactggcctgatgccccgccctggtgctctccccaggctccctcctcagcctcctgcccacccagggccctttactctcttctccctccagaccttcctctgacccttgctgaactggggtccctttgtgagtgtctcagtctagaggtacctccctccctggggggtctcagctcctggagtcgcaggcccttggggcccctctgtgagatctcaatgctgtctggggaccctaagagttttctcacctgttcagtctcatctaaccttccaatgtctgatgttcctgcaaattctgctgattctggggtcagactgactccaaggtcagttggtgcttgagggttcctggtctgggggagtggacaagaccagagcacagagagacagagagaactctcatttcttaacccctgggggaaaagggctcagggagtcctcaatggcctcacgggagagcacaagtgagccccggcgggaagagagcaaggagagagagggccggaccgagggaaaacacccctggaaaaaaacagaaacgacgcgccgggaagaaaggcagacggaagagcaacaacagagacgg

SEQ ID NO: 609044 - DNA, 842 bp, Homo sapiens
tcagtctactagcatattcagatccctggaacagcccagttggaaatcagcttgacccgattcagagagaacctgtgtgctcagctcttaacagtgcaatattagaaacccacaatctgccaaagcaacctccacttgccctagcaatgggacaggccacacaatgtctaggactgatggctcgatcaggaattggatcctgcgcatttgccacagtggaagactacctacattagctatgcaatttcaagagctcacacttatattcgtggcatatagtccacatggaagtagaccagctctgctgatttcgaacatttcagatctttaaacttcatgtacctggggaccaggtttcatgtcgctttcacacttgcttccctagtttacacgcatgatgccacatgatttttctaacctagtggttaggagaaaccttatttctccatactttaaacctcttagattgtctaagagttcacatatttactgcatttccaggacgttcacaattgatccatcaccaaaatcctttacaacacattacttaaaagaaaccaaaaattcctggctttctctcgtgggggcaacggccgaccagaaggggaacggacactcggacccacgtcgcgtcgtgcagtcaagccatcgttgggtcaattgttacacgtttcccaaaatttggggagcactatgttccgaccacccccaatgccgcatattctaagacatttcaaatcacggggtacaccttgccaccaattgagtaaacatcccgcaccaggtgtgcacattactaccgtgtctgacgggcaaaagcaactcttaaacatgagtacccg

SEQ ID NO: 609045 - DNA, 138 bp, Homo sapiens
cgacacacttgattaactttatgttatatttacggactgttatcatcatcctttggataccatttgaatgtcgtggctaatggaaacatatcatattctcgaagttcactagttgtgctttctagttactttgagcaa

SEQ ID NO: 609046 - DNA, 1688 bp, Homo sapiens
gccaaccccaggccaagtcaagaaggagctcagccactatctccccaccgagccagctcagcgggcagggctgggagggagtgggacagattctgggagtgcagcggggaggagtcccggctgggctgagcgcagggagctgcttggcagtgccagagcccaggccccagagccctgctggagaggaggcagactgaggcagcaggccccgccagcaggcgaagcagggagatgtcagactgctacacggagctggagaaggcagtcattgtcctggtggaaaacttctacaaatatgtgtctaagtacagcctggtcaagaacaagatcagcaagagcagcttccgcgagatgctccagaaagagctgaaccacatgctgtcggacacagggaaccggaaggctgcggataagctcatccagaacctggatgccaatcatgatgggcgcatcagcttcgatgagtactggaccttgataggcggcatcaccggccccatcgccaaactcatccatgagcaggagcagcagagcagcagctagagacccctttggccacaccttccaggcactggcctgatgccccgccctggtgctctccccaggctccctcctcagcctcctgcccacccagggccctttactctcttctccctccagaccttcctctgacccttgctgaactggggtccctttgtgagtgtctcagtctagaggtacctccctccctggggggtctcagctcctggagtcgcaggcccttggggcccctctgtgagatctcaatgctgtctggggaccctaagagttttctcacctgttcagtctcatctaaccttccaatgtctgatgttcctgccaaattcctgcctgattctgggtccgtcctgacctccaaaggtcagcttggtgcttgaggtctccctgctcttggtggcagtggtagcagcaacagcagcagcagcagcagcagcagcagcagagacctctccactttcccttagcccctctgctgggtagagaggcactttcagggacttccctccagctgcctcttcatctgggaatgagctaagcaaggctgagcctcctcctgttgcttgaaataatgatgatataaaggctggatttggagtttgtatcccctggtccctctgggatgctcattaaaaccttcccactccttggaaaaaaaaaaaaacaaaaaaaaaaaaaaaaaaaagaaaaaaaaaaaaaaaaaaaaaaaaaaaaaaaaaaaaaaaaaaggaagagaaaaaaaaaaaaaaaaaaaaaaagagaggagggggggcgagccaccgacaaaaaatgtcaccaacgcgaagcagcggccggcacaactcaaggcaaggccacacacatccttaaaagaacaccacggcgcggcgcgccgacgcacaacaagcagaccaatcctctaaacaacaggacgcacacgcgccggctgcactcatacacccgggggcagcgaaaggcccaccaaccccgcaacaccgcaggagcccaactgtcgcggagagccaccaccccgacgatgagggggaaagccccaacaaggccaaaaaccacaacagacagccgaccacgggcgcggccaacacagacacaccacgccagggcgaacgacgcaccaccgcagaaatagcagaggaacaaccaccgcgcaacaa

SEQ ID NO: 609047 - DNA, 692 bp, Homo sapiens
gataaaatgatgagatgaaatgagatgaacgatgagatgaaatgatgagatgaaactgagatgaaaaatgatgagactgaaaaatgacgatgaaactgacaataatgaaatgagatgaaactgaaatgaagtaatgaacaggaaattatgaaatgtaatgatgaacattgaaatgaaattgaaactgagatgatttgacatgactgagatgtaatgactgaaatgaaatgatgaaactgagatgagactaaaatgagactgaaataatgagactgaaatgacgactaatgagacttggatgagataaaactcatgagatgaaactgaaaatgacacactgactggcctgacacctcgactgacgactgacaactcggacgacttgacaaactgtaactgacgcactgcaacacctgacacactgaccattacatgcaaattgaaaactacctgacacactgccgactgacaccataactcacacactgaccaactcgaaatggaactgactgagactgacgcagaacctgactgacgactgaacacatgatgaaaactgactgaccaactgagactacaactgcggctgaccctgatgacaactggacatgagactgaccctcctgacgactgacactgatgagatgccacataccatactgactacgaatgccactgccttctgctgaccc

SEQ ID NO: 609048 - DNA, 1665 bp, Homo sapiens
ggagtatgggatatgtcgaccacgcgtcggcagctcagcgggcagggctgggagggagtgggacagattctgggagtgcagcggggaggagtcccggctgggctgagcgcagggagctgcttggcagtgccagagcccaggccccagagccctgctggagaggaggcagactgaggcagcaggccccgccagcaggcgaagcagggagatgtcagactgctacacggagctggagaaggcagtcattgtcctggtggaaaacttctacaaatatgtgtctaagtacagcctggtcaagaacaagatcagcaagagcagcttccgcgagatgctccagaaagagctgaaccacatgctgtcggacacagggaaccggaaggctgcggataagctcatccagaacctggatgccaatcatgatgggcgcatcagcttcgatgagtactggaccttgataggcggcatcaccggccccatcgccaaactcatccatgagcaggagcagcagagcagcagctagagacccctttggccacaccttccaggcactggcctgatgccccgccctggtgctctccccaggctccctcctcagcctcctgcccacccagggccctttactctcttctccctccagaccttcctctgacccttgctgaactggggtccctttgtgagtgtctcagtctagaggtacctccctccctggggggtctcagctcctggagtcgcaggcccttggggcccctctgtgagatctcaatgctgtctggggaccctaagagttttctcacctgttcagtctcatctaaccttccaatgtctgatgttcctgccaaattcctgcctgattctgggtccgtcctgacctccaaaggtcagcttggtgcttgaggtctccctgctcttggtggcagtggtagcagcaacagcagcagcagcagcagcagcagcagcagagacctctccactttcccttagcccctctgctgggtagagaggcactttcagggacttccctccagctgcctcttcatctgggaatgagctaagcaaggctgagcctcctcctgttgcttgaaataatgatgatataaaggctggatttggagtttgtatcccctggtccctctgggatgctcattaaaaccttcccactccttggaaaaaaaaaaaaacaaaaaaaaaaaaaaaaaaaagaaaaaaaaaaaaaaaaaaaaaaaaaaaaaaaaaaaaaaaaaaggaagagaaaaaaaaaaaaaaaaaaaaaaagagaggagggggggcgagccaccgacaaaaaatgtcaccaacgcgaagcagcggccggcacaactcaaggcaaggccacacacatccttaaaagaacaccacggcgcggcgcgccgacgcacaacaagcagaccaatcctctaaacaacaggacgcacacgcgccggctgcactcatacacccgggggcagcgaaaggcccaccaaccccgcaacaccgcaggagcccaactgtcgcggagagccaccaccccgacgatgagggggaaagccccaacaaggccaaaaaccacaacagacagccgaccacgggcgcggccaacacagacacaccacgccagggcgaacgacgcaccaccgcagaaatagcagaggaacaaccaccgcgcaacaa

SEQ ID NO: 609049 - DNA, 217 bp, Homo sapiens
gagaggatggcgcgcaggaccagagggaagacaggggcccctgttctcagcagcttgtagggacctttcctcatcacaggtgacgtgagagatgatgcaaaggccatggggtgcccacggggcacagaccccgaggctgggctacaaggcagggtgaggccagagatgaagcttggcgacctgtcccagggttctccctgatccaggggcacgcagc

SEQ ID NO: 609050 - DNA, 250 bp, Homo sapiens
aaccccgaagtggcccaaatgagtgcagtggcaccgtcatgcctcactgcagcctcaaacccctgggttcaagtaattcttctgtctcaccctcctgagtagctgggactcttggtgtgtgtcattatgcccagctatttttctagttatttgtagagattgagtccagcttacttgcccaggccagttgtgaactcctgggctcaagtgatccgcctgccttggctttcccaaatgctgggatccaggt

SEQ ID NO: 609051 - DNA, 1452 bp, Homo sapiens
gccaaccccaggccaagtcaagaaggagctcagccactatctccccaccgagccagctcagcgggcagggctgggagggagtgggacagattctgggagtgcagcggggaggagtcccggctgggctgagcgcagggagctgcttggcagtgccagagcccaggccccagagccctgctggagaggaggcagactgaggcagcaggccccgccagcaggcgaagcagggagatgtcagactgctacacggagctggagaaggcagtcattgtcctggtggaaaacttctacaaatatgtgtctaagtacagcctggtcaagaacaagatcagcaagagcagcttccgcgagatgctccagaaagagctgaaccacatgctgtcggacacagggaaccggaaggctgcggataagctcatccagaacctggatgccaatcatgatgggcgcatcagcttcgatgagtactggaccttgataggcggcatcaccggccccatcgccaaactcatccatgagcaggagcagcagagcagcagctagagacccctttggccacaccttccaggcactggcctgatgccccgccctggtgctctccccaggctccctcctcagcctcctgcccacccagggccctttactctcttctccctccagaccttcctctgacccttgctgaactggggtccctttgtgagtgtctcagtctagaggtacctccctccctggggggtctcagctcctggagtcgcaggcccttggggcccctctgtgagatctcaatgctgtctggggaccctaagagttttctcacctgttcagtctcatctaaccttccaatgtctgatgttcctgccaaattcctgcctgattctgggtccgtcctgacctccaaaggtcagcttggtgcttgaggtctccctgctcttggtggcagtggtagcagcaacagcagcagcagcagcagcagcagcagcagagacctctccactttcccttagcccctctgctgggtagagaggcactttcagggacttccctccagctgcctcttcatctgggaatgagctaagcaaggctgagcctcctcctgttgcttgaaataatgatgatataaaggctggatttggagtttgtatcccctggtccctctgggatgctcattaaaaccttcccactccttggaaacaatttgagttatagtattgtgtatacagggtccaaatatcaatacaagacacataagcaagagagggcttaataaaggggttaaccaattccataaagaagactggaatttattaaagaggcattgtagccactcggggatcaataattttgatttgatttttaagtacttgtagattttcttttaactagaggcattaatccgaaagcagcatgtttcattgaaaactgcatcactaaacccaataaaaagtcctagca

SEQ ID NO: 609052 - DNA, 1939 bp, Homo sapiens
  misc_feature (16)..(16): n is a, c, g, or t
agccggcatgggagtnggaatggccacaagtggccaacggaaagcaggtggcaggacaggaggctgtggtggggcctgaccgagcagcctttccttccaaatctgactgtggcttgctcaggcccctatggtggctgtgaccctgttttgtccatctcctttcaccaggacccgccgggtgagggtgactggagcacattcctgggcttgggggtgggaagggagtctgatttgcctggggttgatgtgggggggtttgggcatgggccgtgactcacagagtagatccagatccgcctgctcccctcatatcctgttattcagaaggctgtatccgcttagaaagtgtcttttgtcctggggtgagagggtgacgcatgtgccctctggcagtctgctgctgtgtccagagtccgactccagctgggctgtaactgggcttggcccccgccttaggccccgccagcaggcgaagcagggagatgtcagactgctacacggagctggagaaggcagtcattgtcctggtggaaaacttctacaaatatgtgtctaagtacagcctggtcaagaacaagatcagcaagagcagcttccgcgagatgctccagaaagagctgaaccacatgctgtcggacacagggaaccggaaggctgcggataagctcatccagaacctggatgccaatcatgatgggcgcatcagcttcgatgagtactggaccttgataggcggcatcaccggccccatcgccaaactcatccatgagcaggagcagcagagcagcagctagagacccctttggccacaccttccaggcactggcctgatgccccgccctggtgctctccccaggctccctcctcagcctcctgcccacccagggccctttactctcttctccctccagaccttcctctgacccttgctgaactggggtccctttgtgagtgtctcagtctagaggtacctccctccctggggggtctcagctcctggagtcgcaggcccttggggcccctctgtgagatctcaatgctgtctggggaccctaagagttttctcacctgttcagtctcatctaaccttccaatgtctgatgttcctgccaaattcctgcctgattctgggtccgtcctgacctccaaaggtcagcttggtgcttgaggtctccctgctcttggtggcagtggtagcagcaacagcagcagcagcagcagcagcagcagcagagacctctccactttcccttagcccctctgctgggtagagaggcactttcagggacttccctccagctgcctcttcatctgggaatgagctaagcaaggctgagcctcctcctgttgcttgaaataatgatgatataaaggctggatttggagtttgtatcccctggtccctctgggatgctcattaaaaccttcccactccttggaaaaaaaaaaaaacaaaaaaaaaaaaaaaaaaaagaaaaaaaaaaaaaaaaaaaaaaaaaaaaaaaaaaaaaaaaaaggaagagaaaaaaaaaaaaaaaaaaaaaaagagaggagggggggcgagccaccgacaaaaaatgtcaccaacgcgaagcagcggccggcacaactcaaggcaaggccacacacatccttaaaagaacaccacggcgcggcgcgccgacgcacaacaagcagaccaatcctctaaacaacaggacgcacacgcgccggctgcactcatacacccgggggcagcgaaaggcccaccaaccccgcaacaccgcaggagcccaactgtcgcggagagccaccaccccgacgatgagggggaaagccccaacaaggccaaaaaccacaacagacagccgaccacgggcgcggccaacacagacacaccacgccagggcgaacgacgcaccaccgcagaaatagcagaggaacaaccaccgcgcaacaa

SEQ ID NO: 609053 - DNA, 1607 bp, Homo sapiens
  misc_feature (29)..(29): n is a, c, g, or t
aatctaggctaggtacgaggctgggtgtnggtgagagggtgacgcatgtgccctctggcagtctgctgctgtgtccagagtccgactccagctgggctgtaactgggcttggcccccgccttaggccccgccagcaggcgaagcagggagatgtcagactgctacacggagctggagaaggcagtcattgtcctggtggaaaacttctacaaatatgtgtctaagtacagcctggtcaagaacaagatcagcaagagcagcttccgcgagatgctccagaaagagctgaaccacatgctgtcggacacagggaaccggaaggctgcggataagctcatccagaacctggatgccaatcatgatgggcgcatcagcttcgatgagtactggaccttgataggcggcatcaccggccccatcgccaaactcatccatgagcaggagcagcagagcagcagctagagacccctttggccacaccttccaggcactggcctgatgccccgccctggtgctctccccaggctccctcctcagcctcctgcccacccagggccctttactctcttctccctccagaccttcctctgacccttgctgaactggggtccctttgtgagtgtctcagtctagaggtacctccctccctggggggtctcagctcctggagtcgcaggcccttggggcccctctgtgagatctcaatgctgtctggggaccctaagagttttctcacctgttcagtctcatctaaccttccaatgtctgatgttcctgccaaattcctgcctgattctgggtccgtcctgacctccaaaggtcagcttggtgcttgaggtctccctgctcttggtggcagtggtagcagcaacagcagcagcagcagcagcagcagcagcagagacctctccactttcccttagcccctctgctgggtagagaggcactttcagggacttccctccagctgcctcttcatctgggaatgagctaagcaaggctgagcctcctcctgttgcttgaaataatgatgatataaaggctggatttggagtttgtatcccctggtccctctgggatgctcattaaaaccttcccactccttggaaaaaaaaaaaaacaaaaaaaaaaaaaaaaaaaagaaaaaaaaaaaaaaaaaaaaaaaaaaaaaaaaaaaaaaaaaaggaagagaaaaaaaaaaaaaaaaaaaaaaagagaggagggggggcgagccaccgacaaaaaatgtcaccaacgcgaagcagcggccggcacaactcaaggcaaggccacacacatccttaaaagaacaccacggcgcggcgcgccgacgcacaacaagcagaccaatcctctaaacaacaggacgcacacgcgccggctgcactcatacacccgggggcagcgaaaggcccaccaaccccgcaacaccgcaggagcccaactgtcgcggagagccaccaccccgacgatgagggggaaagccccaacaaggccaaaaaccacaacagacagccgaccacgggcgcggccaacacagacacaccacgccagggcgaacgacgcaccaccgcagaaatagcagaggaacaaccaccgcgcaacaa

SEQ ID NO: 609054 - DNA, 1636 bp, Homo sapiens
aagctattagtgacactatagacccctgggtcaaaaagcaggctggtacggctccggaattccgggatatcggctgagcgcagggagctgcttggcagtgccagagcccaggccccagagccctgctggagaggaggcagactgaggcagcaggccccgccagcaggcgaagcagggagatgtcagactgctacacggagctggagaaggcagtcattgtcctggtggaaaacttctacaaatatgtgtctaagtacagcctggtcaagaacaagatcagcaagagcagcttccgcgagatgctccagaaagagctgaaccacatgctgtcggacacagggaaccggaaggctgcggataagctcatccagaacctggatgccaatcatgatgggcgcatcagcttcgatgagtactggaccttgataggcggcatcaccggccccatcgccaaactcatccatgagcaggagcagcagagcagcagctagagacccctttggccacaccttccaggcactggcctgatgccccgccctggtgctctccccaggctccctcctcagcctcctgcccacccagggccctttactctcttctccctccagaccttcctctgacccttgctgaactggggtccctttgtgagtgtctcagtctagaggtacctccctccctggggggtctcagctcctggagtcgcaggcccttggggcccctctgtgagatctcaatgctgtctggggaccctaagagttttctcacctgttcagtctcatctaaccttccaatgtctgatgttcctgccaaattcctgcctgattctgggtccgtcctgacctccaaaggtcagcttggtgcttgaggtctccctgctcttggtggcagtggtagcagcaacagcagcagcagcagcagcagcagcagcagagacctctccactttcccttagcccctctgctgggtagagaggcactttcagggacttccctccagctgcctcttcatctgggaatgagctaagcaaggctgagcctcctcctgttgcttgaaataatgatgatataaaggctggatttggagtttgtatcccctggtccctctgggatgctcattaaaaccttcccactccttggaaaaaaaaaaaaacaaaaaaaaaaaaaaaaaaaagaaaaaaaaaaaaaaaaaaaaaaaaaaaaaaaaaaaaaaaaaaggaagagaaaaaaaaaaaaaaaaaaaaaaagagaggagggggggcgagccaccgacaaaaaatgtcaccaacgcgaagcagcggccggcacaactcaaggcaaggccacacacatccttaaaagaacaccacggcgcggcgcgccgacgcacaacaagcagaccaatcctctaaacaacaggacgcacacgcgccggctgcactcatacacccgggggcagcgaaaggcccaccaaccccgcaacaccgcaggagcccaactgtcgcggagagccaccaccccgacgatgagggggaaagccccaacaaggccaaaaaccacaacagacagccgaccacgggcgcggccaacacagacacaccacgccagggcgaacgacgcaccaccgcagaaatagcagaggaacaaccaccgcgcaacaa

SEQ ID NO: 609055 - DNA, 441 bp, Homo sapiens
ctggaggctgcagtgcatattgctatcccagcagatctttttattccttattttttattttcgcgatgacaggatctagcatctgtcacccagtgctagagtgcagtggagtgatcatagtcttgctgcaaccttgaactcctggcctcaagagatcctcctgccttagcctccccagtggctgcgactataggcgcattgcaccgcacctggctcaaagatctttctgaagctcactctacttttcctgtggttctagccctttccttcctgtttgaggctcccttagggtataaaagtcactctgcagcgtctccactagagtaaataaacaattctcttgaggtccttttctgccccaaccatttcaccttctctgtgtctttatgagcttgacttaacaggaagttcaccttctggcttctgtttaatagtattgtc

SEQ ID NO: 609056 - DNA, 1664 bp, Homo sapiens
  misc_feature (16)..(16): n is a, c, g, or t
agccggcatgggagtnggaatggccacaagtggccaacggaaagcaggtggcaggacaggaggctgtggtggggcctgaccgagcagcctttccttccaaatctgactgtggcttgctcaggcccctatggtggctgtgaccctgttttgtccatctcctttcaccaggacccgccgggaggccccgccagcaggcgaagcagggagatgtcagactgctacacggagctggagaaggcagtcattgtcctggtggaaaacttctacaaatatgtgtctaagtacagcctggtcaagaacaagatcagcaagagcagcttccgcgagatgctccagaaagagctgaaccacatgctgtcggacacagggaaccggaaggctgcggataagctcatccagaacctggatgccaatcatgatgggcgcatcagcttcgatgagtactggaccttgataggcggcatcaccggccccatcgccaaactcatccatgagcaggagcagcagagcagcagctagagacccctttggccacaccttccaggcactggcctgatgccccgccctggtgctctccccaggctccctcctcagcctcctgcccacccagggccctttactctcttctccctccagaccttcctctgacccttgctgaactggggtccctttgtgagtgtctcagtctagaggtacctccctccctggggggtctcagctcctggagtcgcaggcccttggggcccctctgtgagatctcaatgctgtctggggaccctaagagttttctcacctgttcagtctcatctaaccttccaatgtctgatgttcctgccaaattcctgcctgattctgggtccgtcctgacctccaaaggtcagcttggtgcttgaggtctccctgctcttggtggcagtggtagcagcaacagcagcagcagcagcagcagcagcagcagagacctctccactttcccttagcccctctgctgggtagagaggcactttcagggacttccctccagctgcctcttcatctgggaatgagctaagcaaggctgagcctcctcctgttgcttgaaataatgatgatataaaggctggatttggagtttgtatcccctggtccctctgggatgctcattaaaaccttcccactccttggaaaaaaaaaaaaacaaaaaaaaaaaaaaaaaaaagaaaaaaaaaaaaaaaaaaaaaaaaaaaaaaaaaaaaaaaaaaggaagagaaaaaaaaaaaaaaaaaaaaaaagagaggagggggggcgagccaccgacaaaaaatgtcaccaacgcgaagcagcggccggcacaactcaaggcaaggccacacacatccttaaaagaacaccacggcgcggcgcgccgacgcacaacaagcagaccaatcctctaaacaacaggacgcacacgcgccggctgcactcatacacccgggggcagcgaaaggcccaccaaccccgcaacaccgcaggagcccaactgtcgcggagagccaccaccccgacgatgagggggaaagccccaacaaggccaaaaaccacaacagacagccgaccacgggcgcggccaacacagacacaccacgccagggcgaacgacgcaccaccgcagaaatagcagaggaacaaccaccgcgcaacaa

SEQ ID NO: 609057 - DNA, 148 bp, Homo sapiens
atgaattcatacttggtaccagttgatggaatcactttccaacaatatataatatatttggggttgttaggtagttgtgttggcttatagttcattgtgagatttctaagtagatcagattgcttcctagttagtatctcgaattaag

SEQ ID NO: 609058 - DNA, 1299 bp, Homo sapiens
gccaaccccaggccaagtcaagaaggagctcagccactatctccccaccgagccagctcagcgggcagggctgggagggagtgggacagattctgggagtgcagcggggaggagtcccggctgggctgagcgcagggagctgcttggcagtgccagagcccaggccccagagccctgctggagaggaggcagactgaggcagcaggccccgccagcaggcgaagcagggagatgtcagactgctacacggagctggagaaggcagtcattgtcctggtggaaaacttctacaaatatgtgtctaagtacagcctggtcaagaacaagatcagcaagagcagcttccgcgagatgctccagaaagagctgaaccacatgctgtcggacacagggaaccggaaggctgcggataagctcatccagaacctggatgccaatcatgatgggcgcatcagcttcgatgagtactggaccttgataggcggcatcaccggccccatcgccaaactcatccatgagcaggagcagcagagcagcagctagagacccctttggccacaccttccaggcactggcctgatgccccgccctggtgctctccccaggctccctcctcagcctcctgcccacccagggccctttactctcttctccctccagaccttcctctgacccttgctgaactggggtccctttgtgagtgtctcagtctagaggtacctccctccctggggggtctcagctcctggagtcgcaggcccttggggcccctctgtgagatctcaatgctgtctggggaccctaagagttttctcacctgttcagtctcatctaaccttccaatgtctgatgttcctgccaaattcctgcctgattctgggtccgtcctgacctccaaaggtcagcttggtgcttgaggtctccctgctcttggtggcagtggtagcagcaacagcagcagcagcagcagcagcagcagcagagacctctccactttcccttagcccctctgctgggtagagaggcactttcagggacttccctccagctgcctcttcatctgggaatgagctaagcaaggctgagcctcctcctgttgcttgaaataatgatgatataaaggctggatttggagtttgtatcccctggtccctctgggatgctcccatcattgatgtggtgcgatcgggctactacaaagtgtctgggcaagcgaaagctcaaaaagcacactgtcatcgtgaaggccaaattcttcagaagaagagctgaagagaagattaagagtgtttagggggc

SEQ ID NO: 609059 - DNA, 857 bp, Homo sapiens
  misc_feature (16)..(16): n is a, c, g, or t
  misc_feature (33)..(33): n is a, c, g, or t
  misc_feature (37)..(37): n is a, c, g, or t
  misc_feature (39)..(39): n is a, c, g, or t
  misc_feature (42)..(42): n is a, c, g, or t
  misc_feature (54)..(54): n is a, c, g, or t
  misc_feature (76)..(76): n is a, c, g, or t
  misc_feature (84)..(84): n is a, c, g, or t
  misc_feature (86)..(86): n is a, c, g, or t
  misc_feature (90)..(90): n is a, c, g, or t
  misc_feature (93)..(94): n is a, c, g, or t
  misc_feature (101)..(101): n is a, c, g, or t
  misc_feature (106)..(107): n is a, c, g, or t
  misc_feature (111)..(111): n is a, c, g, or t
  misc_feature (126)..(126): n is a, c, g, or t
  misc_feature (137)..(137): n is a, c, g, or t
  misc_feature (164)..(164): n is a, c, g, or t
  misc_feature (172)..(173): n is a, c, g, or t
  misc_feature (176)..(176): n is a, c, g, or t
  misc_feature (181)..(181): n is a, c, g, or t
  misc_feature (186)..(186): n is a, c, g, or t
  misc_feature (188)..(188): n is a, c, g, or t
  misc_feature (207)..(207): n is a, c, g, or t
  misc_feature (211)..(211): n is a, c, g, or t
  misc_feature (218)..(218): n is a, c, g, or t
  misc_feature (238)..(238): n is a, c, g, or t
  misc_feature (246)..(246): n is a, c, g, or t
  misc_feature (258)..(259): n is a, c, g, or t
  misc_feature (267)..(267): n is a, c, g, or t
  misc_feature (281)..(281): n is a, c, g, or t
  misc_feature (303)..(303): n is a, c, g, or t
  misc_feature (305)..(305): n is a, c, g, or t
  misc_feature (322)..(322): n is a, c, g, or t
  misc_feature (329)..(329): n is a, c, g, or t
  misc_feature (337)..(337): n is a, c, g, or t
  misc_feature (362)..(363): n is a, c, g, or t
  misc_feature (365)..(365): n is a, c, g, or t
  misc_feature (367)..(367): n is a, c, g, or t
  misc_feature (388)..(388): n is a, c, g, or t
  misc_feature (395)..(395): n is a, c, g, or t
  misc_feature (401)..(401): n is a, c, g, or t
  misc_feature (412)..(412): n is a, c, g, or t
  misc_feature (419)..(419): n is a, c, g, or t
  misc_feature (422)..(422): n is a, c, g, or t
  misc_feature (426)..(427): n is a, c, g, or t
  misc_feature (433)..(433): n is a, c, g, or t
  misc_feature (440)..(440): n is a, c, g, or t
  misc_feature (445)..(445): n is a, c, g, or t
  misc_feature (447)..(447): n is a, c, g, or t
  misc_feature (456)..(456): n is a, c, g, or t
  misc_feature (458)..(458): n is a, c, g, or t
  misc_feature (488)..(488): n is a, c, g, or t
  misc_feature (502)..(502): n is a, c, g, or t
  misc_feature (526)..(526): n is a, c, g, or t
  misc_feature (533)..(533): n is a, c, g, or t
  misc_feature (538)..(539): n is a, c, g, or t
  misc_feature (548)..(548): n is a, c, g, or t
  misc_feature (555)..(555): n is a, c, g, or t
  misc_feature (610)..(610): n is a, c, g, or t
  misc_feature (706)..(706): n is a, c, g, or t
  misc_feature (731)..(731): n is a, c, g, or t
  misc_feature (810)..(810): n is a, c, g, or t
caaccataatagaaanaatggagaactattaancacnantcntcagtaggagcngagaattacaaaaagggaaaanaaaaaaanangtanaannaaaaaanaaaannaaangaaaaaaaaaaaaanagaaaaaaaantatagaaaaaaaaaaaaaaaaaaaggnaagtaaannagnaattnaaaanancaaaaaaaaaaagaaaaanaaantaacaangtaaagcagcaaaaaccttnctaagcanaataataataannttaaacanacagaggaaaaaantggaaatggtgggaaaaaaaananaaaagaaaagaaaaaanaaaaaanaaaaaaanaaaaaaaaaaaagaaaaaaaagaannananaataaaaaaaaaaggaaggtngagaaanagaaanaagaaggaaangaagagnaanaaannaagagnagaaaanaatananggagaaaananaataagagggaaggaaaaaaagaagggaangaagaaaaaagaanaaaaaaagtaaaagaatatgaaantggaaanaaaannaagatatanttaaaanatggagaattaaaagaaaaagaaatggagagagaatgaagagtatgaagaattgnggttatcgatattaaaaattgaagtgaagggttatgaggatggagggataaatataggagtgaaggtaaaatggatggtaaaaaaaaaaaaaatanagtggagagaaaaaaagggagaganaataaaggatgtggaagaaaatgtggttgaagatggagtgggaatgtatgaagtagaagaatatgtgataatgagaggnagatattggtggggggtgtataatgaataataagaaattaaataata

SEQ ID NO: 609060 - DNA, 206 bp, Homo sapiens
agcccatggcacggcctccaggtgcactgtttgggagaccggacacgccgggctcagaccggtggaaaccattgggtgactggtttgtaaccccaactcaggagcatcttaaaatagttagagaatcacaagtcgaggaacacgtggacacacagaagggagaccccgcgtagcatagattcgcagtgtacggctctggatgccag

SEQ ID NO: 609061 - DNA, 974 bp, Homo sapiens
caggcctgtggcgtgcgcgggaagagcactgcagatctcaggatgatggggcgcagccctgggtttgccatgcagcacatcgtgggtgtgccctacgtacttggttcggagtgggcctccttggaagggacctcttcatgaccaggactctctgcagcccaggcccaagccatgccctggagagaaaagacctgagtgagtgtggccctgtgtgtgctgcaccacctgctcccagcacttgggaagagccctggtgggcacaatgcattcatgcaactgatgcgaactccacatgccaagacttggtgtgtgacagatatgaacgagtttgtttggactcacctggaggttcgagaggcccatgtggaaatggtgacagagtgctgagaaagtgttcattggtgtgctctgaggtgcttgtcccgagaggctcgggagcgacttgtgaagttcaccaggccaagctgaacggatggtgatgtggacctgttggaccgtgtctccagggaggacagtcagtacttggaactggctacatctcgagcacaggatgctgcggacggaggcagaggcttcgcgaccagcctatctgcgtgcagacgactctgagcgagagaaagttctccctcttactctgcaagcctgtgcgtgaaagtcatgagaaaggagcgcacaaggggcttgacgagggacgcaagcaactggtccctcgattgggtcagcactggggggccctgatttgggtgtggatggatcaacactatggtgaaccggtggtgcgagtaacagggggctgaagggatctacatcatagggaggacggcagaaaggggcatgtgagtaaccaaggaggcaggtaagcgagacaagcagatacaaaatccacagcacagacaggagtgcgtacccaataaattggtgactaaagaggcaggcaatgcatgcagaacgaatagcaatggagagcaaagaag

SEQ ID NO: 609062 - DNA, 147 bp, Homo sapiens
gtgctccactctccctgtcacctatccaaaactgtatctacgctaattggagccagatgtggtagctcacacctgtatcccagcactttgagaggctgagggggaatggatcacatgaggccacgagtttgcgaccagcttggccgc

SEQ ID NO: 609063 - DNA, 314 bp, Homo sapiens
tgtgctgcctgttttagtataacctggatgcttaaaaggggttttaagtccggccggggtgactcatgcctgtaatcccagcactttgggaggctgaggcgggtggatcatctgaggtcaagagttcaagaccagcctggccaacatggtgaaaccccgtctctattgaaaatacaaaaatggtgcacacctgtaatcccagctactcgggaggctgaggcaggagagttgcttgaacctgggaggcagaggttgcagttagctgagattgtgccactgcactccagcctgagcaacagagcgagactccgtcc

SEQ ID NO: 609064 - DNA, 291 bp, Homo sapiens
gtgccattccccttaatgaaatagatttgagtctttttttcatgtaacccccaaatgagaatcatctacctgattcttgtaccaaaaaaatttttttcagtcttttttttttttagagagggtctcggtcaacgcagacgggagtgcaggggcacgatcttagctcactacaacttctgcctcccaggctcaagcaattctcctgcctcagcctcctgagtagctgggattacaggcatgcaccaccacgcccagctaattttggtattttcagtagagacagggtttcac

SEQ ID NO: 609065 - DNA, 165 bp, Homo sapiens
agctgatcataacagctgtgtataagggaaagtggctggttacgagtgatcatacttgtgagcatacaagccagactccacatctccaaactatattcgtacatttgatggtctacaggtagcttacgagctgcgaaggatcgttgaagaattgggacattatat

SEQ ID NO: 609066 - DNA, 1168 bp, Homo sapiens
atcgacggcagcgcgctcggggtcccggtcgcgaggagtgaggatggatgtcggacgcgacggtaggggacatgtggctgcctgaaatactaagtccggacagatgatcatgggaacagtcaattagctagtcatgtaaataatctttgttatcccgacaaatagcatgcttgagatgtctgccgtaaatgttcaagtttaccagaagagaggcaccgctggaacactaatgagagcatcatgatgcagccgtccttatgtggatttcttctttaactaatgtgtgacccttcacctttgatcccctgacctgcgattaccttgagtaaccactgttcattgtgttgtaattctagagtttgcattttgtataatattcggtgtacaagctgtaacatgtcatctttcaccagtgtaacacgctgatttcctcaaatgagagataccccgtttgagtgataaattgtggcaaaatgctgtcttcatgttctgtattaaaattcatttcagttcttaagaaagagaataaaacagaaagaaaaaaaatatacagaacgacgataacaagactacaacaaaccaaggtgaggcgtggggacatcgacaaatcactctcactggggctcctcatacccaattggaccaattctatgaccctagtggaaggcaacttaacctggtgacgccttcactgtacaccactcgaatgacaccattgctgccgtctgtattacagccctggcggcccagctgtggaaaacccgttggccctccggcgggaatgacactagcggcgaaagaaggccaccaatcccaccgcgaggcagggccaccatacagcggccaccaaactggtccacccccaggagcatttgaacaggctccaataagggggaacggttccaaaccaccggcgcagaagcgatcaatccgggggacaccaatcccggcacctgtttatccgagcgtatacaacgccttggcaaccagcaggcattatcgcgacaggatttaagggggttcctcatccactgcaccagaccaccgccgcccagcagcagccgacatcgaacccaaagcacctcacctcgaccgacgttacggatccaccccggccccgttacctagccctcgcacggctccacatctcccagaatcgtcgatacag

SEQ ID NO: 609067 - DNA, 515 bp, Homo sapiens
tgtggtttttttggaaacagtctcgctctgtcgcccaggccggagtgcaggggtgtgatctcagtctcatcggcaaccttccaccttccggggtttcaaggcaatttcgtggtttcaaccttcccaagttagcgtgggatttataggcacatgtgccaccacacccagcataatttgggaatttttaagtaaagacagggttcacacccagtgttgtggccaggtgtggggtcttcaaaattcgcgtgacctcaggtgtgatcacacccggccttcagcccttcttaaaaagtggcggggaatttacgggcattgagagccaccagtgccgcgggccttcccccagatttacacaggatagtggaggaaagtgtggagttgtctactcttataaaaatgtgtgacccccagaaaatttaaatctttgtagagagtgagatatttgtgcgctcttctcaaagaggggcaatacaaaaaacagcattttctcttaaggggcctttctctcacacccc

SEQ ID NO: 609068 - DNA, 191 bp, Homo sapiens
  misc_feature (150)..(150): n is a, c, g, or t
gtatctctaaagcgtcacgtcacacccactacctaaacatccatacatatcactgaactcctcacacccatttgtaccaatctatcaccctatagaagactaatgttagtataagtacatgaaaacattctcctccgcataagcctgctncatgattaaaacacttgaactgaacatgagccggctcattt

SEQ ID NO: 609069 - DNA, 834 bp, Homo sapiens
cggtattgatgagagcattcacctccagctgccgggagaaatatggggacgagatgttcgggcagtgcagaaaggtgacccacgaagtctatgagagaactttctcagttactcctgccccaagttcctgtacgccattgtgtgtgcccaactatgataatgtgcaccccaactaccacaaagagcccttcctgtcagcatgctgagggtgttgtgcctgatgaatgtacgagcaatgtcggagagcccgagcatttcaaacccatccgcaagaccttccatgcaagcttcttatcgaccatcgcgatgcctgttgtgctcaagcttggctggcttccatgagacctccaccagatcaggagttccggatcccagccttgcttgtcttccaaacacacagcatggaacgaagctcggtgctggaccaagtggtcatcttcagtccactggtagtggcttcgacatttcacgtcacgcactacgaagcaggttcgactatcatacattcgataaggacatgatccacatcgcggacaaccgaaggtcgccaggcgtaatgggcgatttcttcatccgtctagatccacaaatttgaggtgagcttaagtcgaaccctgaagaagatgggacagagaccttgatgatattcacgcacattcaggaacctgtatcgatgtattatacggcaggaaagtgtcttggctaccgtgaagagctttaccttagatcagtccatcaggcgtgtcgagactcagtgaagcaaggttaaggaccgaagtgtttcagagtggatctcagtaaaggatctgtggagccagagaacaaaggcgcttg

SEQ ID NO: 609070 - DNA, 649 bp, Homo sapiens
  misc_feature (82)..(82): n is a, c, g, or t
  misc_feature (142)..(142): n is a, c, g, or t
  misc_feature (153)..(153): n is a, c, g, or t
  misc_feature (164)..(164): n is a, c, g, or t
  misc_feature (170)..(170): n is a, c, g, or t
  misc_feature (213)..(213): n is a, c, g, or t
gcccggataggctaatcaatacccttggcactgatgggcactggaaaacatagagtagacctgagatgctggtcaagccccntttgattgagttcatcatgagccgttgctaatgccaggccagtaaaagtataacagcaantaaccatggtnaatctggactnattttnggacttagtgcacaggttgaggctaaaacaaatctcagacagnctgaaatacccttggcccttgggataccctctgggctccctttcagcaagctagaggctcagtatactaccgcctatctataagattcatagctattagagatattccattaagaaaacccgacaaattctgcagtgtaggaggcacatgatatatcaaaaatcctaagatctagctctgggatgcaggctcagcccgctggagcatgagctcgtgtgtaccgagaaggggtgatgtttacttttcacagaggctacacagcagctgtcacagataatatgcacaacgaaccgctaaggaatatccggaaatacgacatatatgaagtctggatgaatcatgtggatgtgcctgagcacccttagagtaggaccatttggatcttttaattagtatagatgaatatgttcatgagaatcctgctacgaacagttgt

SEQ ID NO: 609071 - DNA, 262 bp, Homo sapiens
ctgagatggtgccactgcactccagcctgggcaacaaagcgagactctgtctcaaaaaaaaaaattggtgaaggcttctctgatttttttttcccaccagtggtcctgaatctttagcatgtccagtaatttttcaaaaactttttatacttgtggtacaaccttcaaattactgatcttacccatatataggtgtacaatagggtcaatattcaaccatattattcaaaaagtaatcagaatataagagcatttaagtgcg

SEQ ID NO: 609072 - DNA, 341 bp, Homo sapiens
  misc_feature (82)..(82): n is a, c, g, or t
  misc_feature (142)..(142): n is a, c, g, or t
  misc_feature (153)..(153): n is a, c, g, or t
  misc_feature (164)..(164): n is a, c, g, or t
  misc_feature (170)..(170): n is a, c, g, or t
  misc_feature (213)..(213): n is a, c, g, or t
gcccggataggctaatcaatacccttggcactgatgggcactggaaaacatagagtagacctgagatgctggtcaagccccntttgattgagttcatcatgagccgttgctaatgccaggccagtaaaagtataacagcaantaaccatggtnaatctggactnattttnggacttagtgcacaggttgaggctaaaacaaatctcagacagnctgaaataccctgcctggtaccctggtcctcagcagtagggtcagtatactatgcccctctcggggggttcatggtcttggggtatttccccttaggaccccccaccattttccgggtcttagggccc

SEQ ID NO: 609073 - DNA, 153 bp, Homo sapiens
cggtattaatatataatagatctggtgagcttgaactagagaaagctgcaaataagtgtgtttggagatgcattggcagtggccttggatgaagggctaattagaatgcaggtccctttgccccaagaccctactagagaagccctatttagg

SEQ ID NO: 609074 - DNA, 427 bp, Homo sapiens
  misc_feature (424)..(424): n is a, c, g, or t
acaagtggctgtaagtatttatacatttccactaagcaacagtatgagagattctaattttctccacatctcttggggcacgtttttattttgccccttaagaaaatatccaagccacctttgatgggtgatgaaagtggatatcttcactggatactttggtgttgtgctttgatagacggagtgatgtcgatcaccacctttttatgtgcgttgtaaagccatcttgtatatcttcttttggggagaagtgtcctatttaaagtttcttgcccactttttaattggcgttggtgtgtcttgttttttgtttttttttcttctctgagacagagttctcactcatgtcatcctgagagttgtgccacatgtactccacgcctggcgcaacaagagcgagactaaccgtttgccaataaaaaanaaa

SEQ ID NO: 609075 - DNA, 488 bp, Homo sapiens
  misc_feature (290)..(290): n is a, c, g, or t
  misc_feature (373)..(373): n is a, c, g, or t
  misc_feature (438)..(438): n is a, c, g, or t
  misc_feature (475)..(475): n is a, c, g, or t
  misc_feature (487)..(487): n is a, c, g, or t
cactcccctagttcaagttctcatcagctcttgcctgggtttaccacagtattctctcaacaattctttggccccaccacaatgtaaccaggagaatccatcttaaatacaaacccagggaaatcactggcttgtttgaaacactttggtggccccccagtactcttaggataatgtctttaaatggcttaggggaacttgcgtcatctgagttgtttaccctgttagtctcacttggagggttttctgacgattagcatgggtatgtgtcaatgcatggtatgcatggngcacaaaataaatgaggattcctgcacctgttacctggaaccccatttttacagataagggaaaatgaggactcactgagggntaaggcaacatggccctaatttcacacagctagtttaattaacagctattgttgaggggatattntgaggcacgttttttccacagggcagtttaaaatttncaggggaaaacnt

SEQ ID NO: 609076 - DNA, 447 bp, Homo sapiens
caagcccaagggggtgagaaaatttccaaaaaatcccccctggggggcgttttttgtttgtgaaaataaacaaacaaatcgggggggggtcctcaaaacagggggcaaaaagggggggtgggggggcaagggcccccagtttgccccaaaaagccaaaagggtaaaaaaaaattatccccaaaacccccccccccccttttaaaaagggggggaaaaaggggttcaaaaaggtttgtttcaaatggccccttaaatttaggaggaaaaaaaggggtaaaaaaaacaaagccttggtaaaccccccaaaagaaaaaaaaaagtttttggggcccccttgggtttttttttttggggggggccggtttaaagtaataggttttaaaaacaggactttttaaagggaaaaaattggcccaaaaattgttccaaaatttttagacccccta

SEQ ID NO: 609077 - DNA, 184 bp, Homo sapiens
cccacctcggcctcccaaagtgtgggattacagacatgagccaccgcgcccagccacacactgtcttgattactgcaattttatagtaagtcctccaactttgtttttctccttcaatattgtgttgactatttggggatttttttgcctctccatttaaacttcagaattagtttgttgatgt

SEQ ID NO: 609078 - DNA, 152 bp, Homo sapiens
gatccactaaaatcaagagcgtattatcacgaactaatttgcatggcgcgtgcctcatgcaacaatggagtcattgatatttgaaccctggcgccatggatttcgggtggatttttaacgaatttctgccagtagcaacgtaatgtcactgt

SEQ ID NO: 609079 - DNA, 774 bp, Homo sapiens
  misc_feature (256)..(256): n is a, c, g, or t
  misc_feature (323)..(323): n is a, c, g, or t
ggcaccatgtatcgagcacttcggatcctcgcgcgctacgcgtcccctcgtgcgggctccagccggcaggcttagtttcggttcccggcttgtggtggagcgggcgtgccctcggttaatgtgctctccgagacagcggttcgacatggaaagccaatagattcctaccgggatagaaacttcaatgattagccgtctttgggtggagactcagacagcgatggcgcaccaagttgtgatgagagtatgtatgagncgtcccagcacccgtggacgactcctcacggatgcaaactgtgtgaagagttggcagtgatgtgcanatgaagcgcgagtgccaacccccaggttattgaaatgcttttggcatctatggagaggcgaggcggaccgctggaaggtaaaccagggattatggtcttgatccaaagtattgctaatgcaatatatgaaggcagcagatgaggtagcttgaaggtaaattaaattgatcattttcctctcgatggatatggcagactggatcaggagactcagactgagatatgaagtgtaaaatgagagtcattagccaatagagcaatttgagaatgttaggaggtgaactgtggcagcaagataccgtgtgcattccaatcgatccattgttcacataagacggcagagctcaaatgatacttttcccaccagcaatggcacatttgctgcttgcgacttaagaacgttcactgaaagtactgttaccacggaactaccaggcccgttacatgattg

SEQ ID NO: 609080 - DNA, 147 bp, Homo sapiens
gcaaccgcacggagaggggtacctctggcgcgggcggtgaggagggcgcccaagcccctcagccgcagggacgcccccggcgcctgccccgacgcggccccggccccggccccgcccctctccggccccgcccccgcccggcggccg

SEQ ID NO: 609081 - DNA, 1404 bp, Homo sapiens
  misc_feature (780)..(780): n is a, c, g, or t
  misc_feature (824)..(824): n is a, c, g, or t
atctgcacactatattgatgcaaccgaggtgtgccttgtgtgtacaacatacttatgtcccacacgaagtgttgtgtcttgcttttgtggactgctctcccctaaggttggttggaaaataaattggtggcgtctctctcagcaggagacgaccatgttttgctttccgttggggggggaggaaacaataaaaaatgttcgttggttacccgcacccgtctttttgtttaagcaacaatctcgctaagaaagggggggtattaaaccatacacaatgtccccaccggagcaaattaaagcaggtgtttttgcctcgcagaggaggcgccttgctcgcacggctaagggaagtagttaaattggcttgcctgtgtacgacgtgccacaaacgcgccgtcgggttttaaaatagtgttgtgtggagccttttagattaattgccaactaaatataagcggagacactttgtttgtttagggcccaaactctccccttcggggcggaaaaaggagtagccgtgggccctcccccccgcgccccttcccaacagtggaagtaattgtttgtctctctttggagagagaacccacacttctttcttgtgtataggaagcctctgtggtgcgtgttttctctatgagagagaaacaacactcgttcttaaggtgacacacacactcggttatagggttgggagcaccggagaggttataggtcacacagctgttatattggggctcgtgggctaaaggccttatcccaacacacgacccacagggnggtttagagatgcccacatgttgtagaaaaagactcttttttgngcactattttgtgtccttccacattggggcgcacatagagaatacccacgagaccctctttgttatatatgtttagagtgtataagatgttgtgtgttacgcacagataaggagagggcacacaatggcacacacagtggctccacactggtgaaccacaacccctcttaagcacgctatgggaatgtgatattagataccgagccacgtgtatacttaaatttttctatagagagttacacggcgccttcttgggagtcacaccccccacgaactgggaccacgaaatgttaagtgaaaggttttatattgtgacccgcgttggagggaataaacgctttctttgggtaactctatttgttgggttgcacacaatgagaactcacaattgccaccacagttcttaaaactggtgtaaatcaaagcttgagacttaaatgtgagttgttaactgttaatatccacgcctatatctggctagcacgctgctcaatactgcacgtcacaattatctggagaagcggaatatattttcctactgccaaaactgttttaacaattaaatgagctatgctacaga

SEQ ID NO: 609082 - DNA, 117 bp, Homo sapiens
ctgctggaaacgaacccttgataagtggtcagagtcttctggttcttattttttgtcttattcttagttgtgcttgatgacatcattccctctgcctggaatttcctccctatcttc

SEQ ID NO: 609083 - DNA, 142 bp, Homo sapiens
tgccgatcttgacgattcttgatgaactcctgggtctccaatatcgcaatatcacctggtggctctcctggtcatatgtcacaccagagacatgtagcattatcccaagcttcagcacggatccatccagtctctgacatta

SEQ ID NO: 609084 - DNA, 116 bp, Homo sapiens
aggccacttttgtgtcatggcaaccttccctggcagattcctgcctgtctcccagcagcctaacaggcccaggtcttgcctcacacatggtcctctctacatgcagctgtacctca

SEQ ID NO: 609085 - DNA, 886 bp, Homo sapiens
  misc_feature (130)..(130): n is a, c, g, or t
aggtcgcggagatggaatggagcagagagaagggaccatggcagcgtgggcttgaggagttctcagcgccgccaggcctcagagttgggtgcctcccctatttgtgtggccacatcctgagagcgagctngagacggaagtgcagttgtgtcaggtggtctggcggctcagggctccgggagcgagatgaagaggaagaggcagcccgggtcggcggcggcgccaagggggaataaatcgcagaaagtaccaggcactaggtcggcgctgcggaagatcgagcaggtgaacgaggggtcctgaacgggctccatcaggggccagaggatacctcggaggctgcagccgggaacggagggtcctcatgagagtgctggactccataacgggatgactacgggccagccaagttccaccatggtggcctggaaggatgagggcagccaggcacccggtttggccccaacccaggaaatggggaaatgggctcccagagaaagagaattggcccggccaagaaggactctgacccacaagaaacggggagcacaaggccccgggggagggggcccagtggcggaagaggcgcggagtgccacgggatgggacgcccgagaggaaatggcgggactccaagaggtggcccggtcgcgatcaagggtcgcggacactgggttgaagaaagagccggatcccggggctcccgggcagacaatggggctaccgactggaaagcgacctgatgagatgcaaaaatggccattcataaaaaaaaaaaaaaaagtggggcggcgcccagaaattcaacacgtgggcgcgccaggagaaagtaacgcgcgagcggagagggtccaaacgggcgggcaaaggggatagcgaacagaga

SEQ ID NO: 609086 - DNA, 928 bp, Homo sapiens
ggagagggtcgttgtgcgcctgcgccaggtgggggttgccgtcgcgcctaggcctttccctcaggttttcctcttccccatctgcgggtccccagtcggggcttggcggtagaactcatgcgctgaagattgtctaaagtccccaggtaaataatggtggaacatagtttcaccgtcgccattgccagaataggagcgatcttatggcttcgttcttttcttaagctcccaattgggcttcatactttacctcgtgtgtgggcctgttattcctgaatcttggctaagatctctttaggtgttatacctattggtcctcagtaacatattgggcagttgctttacctgtctacctccttattgctataggtaagttggctacgtgcgttcttggttagggatgtaacatgagtgaggtaccgtctcctactcgaactccactccaatactatgcactagataaagtatgcaataaagattcaacagcagaggaaataccaagaggaggccatttccagccttaagagatatttctagttagtgaaagtaaaccaaatgtcctttcttgcaagccaaagaatttatgacaaaaattgaactgtgttgtaagcatagtaacaccaagcacgtatgtgttataacgtttggcattactagtttggaccctaattaatttggccctctctcttattactggagaagtgccaatgtacttgacctctctaagcttgtccatgaattgcctgtgccggctcgtacgcatgattgttccattgcttcgcgccaaaacagaacaaaaaaacatggggccgcccaaactaacctctgtggggggccaaacgaaggcagcccaacagggcgcgggggcccaaaccggcggcgacacgcgtgtgctcaccgtccccccccgggcgaacccaaccatctt

SEQ ID NO: 609087 - DNA, 125 bp, Homo sapiens
ggaggcagtcatagctgggagttagctgatgcattctgatgaatactcatggagataagtatatagaaaggaaaggaggacagccagcctgtaaaaggatggagtggaagcagggccccgatcca

SEQ ID NO: 609088 - DNA, 380 bp, Homo sapiens
  misc_feature (379)..(379): n is a, c, g, or t
cgggggtctcaggcatcatagaaaagtcacattgggatgggaccttgaaatttttttttcctaattctaagaagtaatacaaggggcggggcatgggggctcatattggtcatctcaacacttggggatgcccaggcaggcagatcacttaagcccaagaatttgagacaacatggcaaacccccgtctctacaaaaaacaaacaacaacaaaaaaacaaaacaacaacaaaaaatcaaaacaaaacattcgcggggggtgtagcacgtgccggtggtcccagctacccaggaggccgcgggggcaggctcatctgagctcagggaggcggaggctgcagcgagctgggatggtaccaccgcactccagcctgagcaana

SEQ ID NO: 609089 - DNA, 244 bp, Homo sapiens
ctcttagaggcacaaggaggaaatgaacaaactgttggcaagaggagaaaagcagcctcccagatagacaagccagccgagaaagaaggaagggggaagaagggagggaaggaagaaaggaaaagacggagagagggaaaaaaagagagatgggggaagaataaattggggctttcttctcaaagtacgaggcagtatgcgttagtggttggacggtgcaacagttggcattgacgtggacaca

SEQ ID NO: 609090 - DNA, 385 bp, Homo sapiens
  misc_feature (35)..(35): n is a, c, g, or t
  misc_feature (242)..(242): n is a, c, g, or t
gaccccctttttcccccttttttttgttttgtccngcagctcctggaatgaggccgcccatgggaggccaaatgccaataatgcttgggcccccaataataaaacctcctgcccgtcccataatggggccccctgggcccggaatgattcgcccaaacaaataaggataaagggggggccttattgtatcggttttaaattccctgttttgcttcaccaggagatcaagcggctgggaaacngagttttttaaacagcaaaaggaaaacttgctcccctgtcctataaaaaaaaaaagttttggaggggaaaagtgggccaaaaaaaaaccagttttcctttgtattgggaaatgtgaaaaaaaaattgtcaactttttcagtta

SEQ ID NO: 609091 - DNA, 353 bp, Homo sapiens
ggcatgggaaacactgcagtatactgcaagtgtctatctctttacgtaaattgaatttgtattttattgtgtcttttttcaggtctagccttaggaattttataatatggccaggcgcggtgtctcacgcctgtaatcccagcactttggcaggtcgaggcaggtggatcaccaggtcaggagatcgagactatcctggccaacatggtgaaaccccatctctataaaaacacaaaaaattagccaggcgttggtagcacatgcctgcaatcgcagccactcggggactgaggcaggagaatcgcttgaacctgggaggcggaggttccagtgagctgagattgcgccattgc

SEQ ID NO: 609092 - DNA, 100 bp, Homo sapiens
ggaagcgctgatcctgttatttggcaggaaacgagcaatccagcagccagaggacaggtgattaatctcctctcgtgtctccagcccagcccaccggccc

SEQ ID NO: 609093 - DNA, 604 bp, Homo sapiens
  misc_feature (9)..(9): n is a, c, g, or t
  misc_feature (116)..(116): n is a, c, g, or t
  misc_feature (127)..(127): n is a, c, g, or t
  misc_feature (132)..(132): n is a, c, g, or t
  misc_feature (600)..(600): n is a, c, g, or t
ccgcggcanccggcagagaggggggagcgcaggggcccgcgggggcgccgccggcggcccggccggcgggagagggcggcgccccaaagcaggaaaaggcgggccagggggggggngacagcaacgnggcancggccggggaaaggaggggggggcacaggagcgaagacagggagcgggaaggagacagccaaagagcgggcgcagagaggagcgcgaggagagggagcgggccgggagggggaaaagggggaagggggggccaaagagagccagaccacgacagggaaccagcaggggggggggcggaaacgggaccgggcggagacgaaggcgaggcgagcgggggcgaagggcggcggagcggaggaaaagcaccgccacggggggagcaacaaggcaggagggaggagggggccggacgcgaagacaacagagggcggggagaggcacagaggaggcaaccacgggggcgcgggcgggacgacggaggcgggacacccgggcacaggccaagcggaacgggggcggcacgcagcgggcaggagagggaggggggggcgcggcgcgccgggggcagcaagacgccgcagcatgganccca

SEQ ID NO: 609094 - DNA, 461 bp, Homo sapiens
tggaacaactttattgagatataattcacatagcatacaattcactcatttaaaaggtccaattaaagggttttcagtatatgcagagttttaaatacaaccatcagcccaatcaattttggaacatttcatcaacccaaaatgaaacctgtccccattagctaacctactttatgcccttagatttagctattctgtccatttcatgtaaggggaatcgggaaaggtagggtctttgggtctggcttctttcacttagcataagggctttaacgcccatccccattatagcacatgtccatacttaattccttttcacaggtgaacaagattcccttttggggatatatcacattttgtttatccattcatcagaagagggggggtttaattttataagggaagaaactaaggtaaataagggcctgggttgggaccattcaaagccaggtcccctggct

SEQ ID NO: 609095 - DNA, 317 bp, Homo sapiens
gagtgactcaccgatctatatacacgggatgtctgctcaacattaggtcgtaaacctattgttgatatggactctagaataggattgcgctgttatccctagggtagcttgttccgattggtcaagataaaatggatcaatggagtaatagtagttcgcttagactggtgaagtcctagcatgtactgctacggaggttgggttatgctcacgaggtcgccccaaccgaaatttttaatgcaggtatggtagctataggacctgtgggtttgttgaggtactgtttgcattaataaaataaagatcatagggtctag

SEQ ID NO: 609096 - DNA, 118 bp, Homo sapiens
acccatcgctacaatgttatgagacctgagcaagccaggcctggcttgctcaggtcttgctgattcttttttttttcctttgtagcgtgggagtccggcgggaatcgatctagatgat

SEQ ID NO: 609097 - DNA, 939 bp, Homo sapiens
caaagttaaacatcctcaacagagttttatttataattttgaattgtcaatttgtattttgctactgatctgtgatcaaccattttaactttcatctctagggatgtttaacatttataattgcaaaataaaccaactataaaaaaagaaactaagagagaattggtactttaattacttgtgtgtttgcaaataggctccattttccatgttgagtagattataacctttcttaggcctatgcatagttaataaggttgtaatctactcgaacatgtaaattggagctgattacgtatgtgcgagtacggttataaggtgatactctatgcatatgattctatataatgtgattcgaatgctaattgaacagactcagaggtgctgccatatgactattttctactgttagagcgtgctattgagaaaataattcccatagtccttgctttcgtaaagttggtaatatcactatgcatttctacacatttcataacattctgatttatgcagattttgataccactggactgtttctgtagaaattgtatagtattcaacacattttcttaggcatacaatttgacgaaacttacgtatatcttcattctgggatgcttgttgtaattaggttgacaaactagttaaactacttggtatttctaacaaacagaaagaacaagaggaaacgctcccagagtattcggcgaaggggccccagacttaccgggtacccaagcttttgttaacagtggtcctcataaaaaggtgaatataagctaggacatgccgagtcgttgaaaacgcgggactgcgaacacgatgctggacattgttaaggaacaaaatttggtaggaaacatgtacaacaacacaaaattaagcaagacttaacgtaaggttaataaacaaacattattcacaattgagtgattaata

SEQ ID NO: 609098 - DNA, 1286 bp, Homo sapiens
  misc_feature (696)..(696): n is a, c, g, or t
ctcgctgtgggtatgtggtgcgcgcccttttgatgtgtgggctctctttgttgcggcgtttttgtcacggtcgtgctctgctttggccactgatctgttccaaagcctggtggcccggtggtttccggggtttgttcaccccgccttctgtgtttctggtctctcccgctctgatttttccgccctccaaattccggcgttcgccaggcgtcttctgtttcgcgccaccagaggggggttataggatagcccgggttcattttgccgccctctgtgtgggccgccgcttgtcggcgctcctgccccctccccaccgggggtgtttctcgtcgtaatccgtcggatccaacacggggttggttgaccgggtcctcgcctctgttcgactccggctatttgtttctcttttgtgggcctctctggggtgtttctctagtagcacgccctttcgttgttcccagaacgatcatgttctgtttgagcccgctcttcgcccggcggtgggggggttttctctccccctcgggcggcggctttttaatcccagtggtgtttgtgggctctcttctgctctctcccgcggggggttctcccctcctcgccctctggtgcctctctctctgtctttcccctcggggggagtgttttggctcccacaaaagcacaccccgctctttctcacgcgggccctcccanatgcccgtgtctccccactggtgcccaccgctcccgctcgtgtgtaacactcttccccacacgagggggtctttttcttcttggtgatttttccctcctgagtttgtcccccccgcgaaagtcttgtctttttcctcctcaagagaagacaccactcttggccctctcgggtgaacctcctctctattttttttcgccccgcccaaagataaagacgcgagaaatcaccccccctctccctctagagggggacttttttccaccccacgccctataaaagtgcgccctctcttgttttctctttcctatgttctcccacaaagaatttctcttttctcacacgttaatttctttttctccctgtggccacactctcctttttcttttaaaaatcactttttcttgtgttctctcccacacaaagattgttttcaacacttcccctgatcctctttttttccctctgtggaaaaagtaatataaagattgttgtgaccccacccggggggggtgggggaaataatttgtgtgtgtcctctcccccccgttcgccccttataataaaattggatagacccttttttttttta

SEQ ID NO: 609099 - DNA, 100 bp, Homo sapiens
acactattctacatttaagtgtctcataatgagactgacacatgaagagatctgagcgcaatctcatgtagtctaccatgaacctgcaattgatatggta

SEQ ID NO: 609100 - DNA, 451 bp, Homo sapiens
cacacaaggcgactaaaatgtctcaccttctaaatatggatggcttggcaggtattgagtcagctctgtgacgccagtgcaataatcccgatcagcatcagattattcaccattaaacatgttctaacttgattggcaacaagccttatattatttagagggatccacggagctggcagagggggcagaggtgtccgcaggcctcctgcccttccaggcttaatggatgatcatcttccctgctaaaaaggcccattcactaggtgagtgatgtggaactgtttaatgaaagcaggaagatgatgtgaatgccagttcacttgagtgttacaaacggtttgggcactatagccttaaagtttctcctgctctttgcagatgaatgaaggggcgctttctggaatctttgtggctggggctgctgctctgcactgctatggctctttttcaa

SEQ ID NO: 609101 - DNA, 129 bp, Homo sapiens
cacacacaatggggccgctggagctggcggatttcatcgtggctggacacctgcctcgccatcatgaacgtgctgcacgaagggctggcggatacgaagtatcggccctgccgctgctgacgaaatatg

SEQ ID NO: 609102 - DNA, 439 bp, Homo sapiens
ccaccaacctgacttgttcggacaccccccgggacggccgctgtctgtccccttctccattgccctctcccagatatagctccggtgcttggaccagctagagtctgagaaaggggagaggcgcgaacgccattccataaagagaagggttatccgagggctaccctccacgatacgcttgactttctagtggctggggtgagtgagcggggccgggaggacgaccccggacttggtgggagctgcataaacgtgctgaaaactctcagaatccatttcccccacgtaaacttggtaccgcagcagcagcatttgatagagtggcactaggctgctggcgtgcaactcggctcacggaaaagagcaagagatgcgaaactgaggcttaggacaaagtgtgcctgatattggtgggtcagaacataaggcgtaccgagct

SEQ ID NO: 609103 - DNA, 218 bp, Homo sapiens
caaccagcttaatgaatgttgtcaactcagcaatattgatttaaggttcatcattgacaggtaagcttgaaatgccctgaaatcttgcagctcagatatgaaagaaacttgatagagctttccccaaatttgacaacaaccttaaggatttatctactgtcatttgtaatgagtcccccagctgaaaataataaagacaaaatttaatcaatcacaaa

SEQ ID NO: 609104 - DNA, 1003 bp, Homo sapiens
gtgagtttctggagggctgaacacatggtagtgcaatactggaaggtgacgaagaatttatcctatcaccgatggatggtcctgttgctcaggcgatcgtgtccgatggacgtccccgaatccgaactgtacgagatcccttcctctcaactctcatccggtggtgtgaagatgacggacatatttcttcacagaatgacaggcgggccattgtgtgatatgggcacttacaagcattgtggaaaggcgctccgctgaacttctcaaacgccatggggccaaccgtgcttgatgtctcagggacctgcgtgataacagcgttaactatagtgagaacttgggattattatcaagactagactcatggattcttgtctgcgcattgatagcttggggtcctgcatgggacagtcatccacttcgcaggcaggttaagggtcttccctggatctgtacaggtcagaatgggtgtctggattccctagttactggataagagatgtgtacatctatctagtagatgttcttccccacttcaactacagagccattgttggatgttcttatatatctgggtcccctcctcatggaaggtacactggaaacaccaaggagggttgaggcataatggtctgaacccagataccaattaatccccatacgatccaagcattcggcgccttgtacatgtccaatgggcctgttttgatcgagcaatggtccttgttcctggcattcgctccaccttgggacctttcttatctcctctgggatgtaggaaacttaataagacgggtgccccatttgctacataataacacatgtgttccctggacttactagatagtagaggaaatctggatcaccctttcatctaacgccatacgggagattccatgtaggaattgggggatcagggcaagttgcgctggcaaattaattacaaacccgggatggtgttggacgaaatttcatggcaagtcgttggaatctcggggaaaag

SEQ ID NO: 609105 - DNA, 1240 bp, Homo sapiens
ggccctgtgttcgtcagacggcttgtagattaactagtagagcaggcagacacacgcttagtccacaagctatgaggccaaggcttaccacctagtccctcccactcggtctggctagctatgtgcacatggcctgttcacgagaccagtgcactatcaccccaatgctcgggctactagacgctgagccccaagagcaccgagccttacggacccttagaccaacactcccaccttagcgccgtctcgtgcgtggcccttttccttgtccatgacgcacttgcgtcgtcatccccttgcgagaaccggcggctacaccttagacgactatgtctgcacccgctctcctctctctcaccccctcggctcacatgaattcgttccaagcctccctgtctcgctcaacactcgtaccacctcacacttccgcacaccttctgactcgccccgcaacacccagctttctcctcctggaacatccaaaacgttcctctacgctcctttgttttccaacgtcacaccacgccccgccgcaccccggcaccctgcgccccacgcctcccctctacccccccgcctctccccaccccccccccgccctacacacaccccatccaccatcgactccaccaataccaactcccaccacacacacaacacacccacccccacaccgccccccctcccactctacccctctcctgccccgcgcttttacgtctgcctcacacccacaccccccccacctcccatatattctccttattccccccttcccccgctcctataccactcacaaaaatacctcttactctacttacttgcctccactcctctccctccacctaccacatctatcgagtcctcctcgtgcttcccctcttcacacaatagctctcctgccgataccaataactactatccccgttatcccgcccaccatcccaacctcaccaatcccccttctccatgacccacactcggacgcatcacttccacccccatcctccatcacaccccctcgcctcccacacatatcacttactctcctccactcacctccgtcgctccccctcatcctctcccccccccctcctccactctactcatgttcaccctccctccctcccgtatccctctcctcttcatgccttaccaaacccacatactcaataccatccaccagttcctcacttcccgtcgcctcaccccttctcctttcctcctactccatttcctt

SEQ ID NO: 609106 - DNA, 810 bp, Homo sapiens
  misc_feature (36)..(36): n is a, c, g, or t
  misc_feature (207)..(207): n is a, c, g, or t
  misc_feature (240)..(240): n is a, c, g, or t
  misc_feature (245)..(245): n is a, c, g, or t
  misc_feature (259)..(259): n is a, c, g, or t
  misc_feature (264)..(264): n is a, c, g, or t
  misc_feature (269)..(269): n is a, c, g, or t
  misc_feature (359)..(359): n is a, c, g, or t
  misc_feature (435)..(435): n is a, c, g, or t
ggtattgtagtattgaatttccagtcattctttctnccctggctataaccttagtcactgaagaaaataactatccttttattcaaacaacttccttggtacaatcccagcaatatgttttttttcttgcaatattaaaaacctccgatgtaagtggaaaaagagttatttccaagcagaatgagaataatcatagcgctgggcacngtggctcacacctgtaatcccagcactctgggnggccnaggtaggtggatcncctgnggtcnggagttcgagaccagcctggccaatatgatgaaaccccatctctagtaaaaatacaaaaaattagctgggtgtggtggtgggcgcgtgtnatcttagctacttgggagactgaggcaggggaatcgcttgaacctgggaggtggaggtctcagtgagctgagatcncaccgctgcattccatccagcctgggcaacaagagggaaacttccaacctcaaaaaaaaaaaaaacaaaaaaaaaaaaaaacatgtgtgggtggcgcgcgcgccctgcgccccagcggaaaagtttctaaagcacacatctcggttgggggcgcggcgggcccccagttgggtaagcggtgcacactgtggccaataggtggttccagaagaaaaatcggggccaggacattaggggctgggttttcccccacatgtaaaaaagggccgtgggaccccggcgcgggttttgtgaacaatcccaagggatacagagcgcaaacgggggccttaccaggggtccacagaaccggaatataaatacggcggggtgagg

SEQ ID NO: 609107 - DNA, 190 bp, Homo sapiens
ccgatctagagtatccccctcgataatagcacgctggttgacgcgataccgtgtagtgtgcgccagatgtcctaattgcaggaaggtgggtagagagtacatgtgatgatcctgtactatccttttacaactgcatgtgaatttacacttctttgcatacaatccatgtgttagtacaacctgccggtag

SEQ ID NO: 609108 - DNA, 1372 bp, Homo sapiens
  misc_feature (448)..(448): n is a, c, g, or t
ctaaaaatacaaaaaaaaaaaaaaaaaaaaatttagcccagcgttggtggttgtcccagcctgaaagtcccagctactcaggaggctgaggcaggacgaatgttgtgtgaatctccgggaggcggagctttgctgttgagccaagaatcgcaccacttacacttccagcctgtgggcaacagagcatttctggaattttatcagatatagcaggtgggccgtggtcagcatttcgaggccgttggaccaggggacctcatagccttcgggaattgaattgacaaacgggggacgcgtgatatgtggattcagaaaaaacttaaccccaagaagtgtgtgttatttcagaagaaacacagtttcgaaggaaaaagcggcgtattacataccgtataccttcgtgtcaaagacgctgtatatattaaggcaccgttgtgcacaccgtggnaagggcggaaataccatatgtgtctggcattttacacattaacacgcatgtgcgagcaccccggagaagcacagggcgcacatagggcacatacaacgggggcacccagggaaaattctccagccagcattcttctatcaaccgctttagagaccccaggtgtgggaacccccgcggacacacaagtttcacctgtgaacaccgtgggtatataaaggggcaatattctccataaagggccccaaaaagttttgtcaccaaacgagacacaaactttcttttatcacgatttgaggcccctttttaacaaaaaggtgttaacccgagtatatattcacacagcggcgtataaacacaacgcacaaggagggggaggggattctcaatcaaacttaggagagctttcacccgcaataggttgtctcaattaccagactatcaaaggctctcccaactttagttttttgaccaacaacgtttttctgttcccggcaatttgctcatttaaacggtcgctaattcagatattcaggaccgagcgtttaggagcatcggcggcaacaaatttgccagagaaatttataggacgatccatgagcaccctcatcaacaaggcgcggggataccatcacccattccacgtaggagaaggggggagtctgcccacgaaagggcgagcccaactgagcgcatggaactataacccactgcgagaagaaaagacggggcaatcaccagacagcgcaaaactctaggggacgccaacagaacagactggtcagacaatagcacaagagacgaagtaccagaacaggcatgcaaacgaagccacatagatccaattgagctagcacacgaagacaaccagatgggggcgtcgaccccaaaaccacacagacacatgagcaggcacaaacatagcgg

SEQ ID NO: 609109 - DNA, 130 bp, Homo sapiens
atccttagcctttccggcgggtgttcaaaaaataccaggagtctccctcacctgctccctgccaaggggaagggagacgccccgacagtgacagacacacacacacacacagacacacacagtaaatgca

SEQ ID NO: 609110 - DNA, 157 bp, Homo sapiens
tctagaggatcccatcccaggtctagactgctggcatcactatactactacagaccgcaactcaagcaccatcttctacgacccggccggaggaggagaccccattctataccaacacctattcatgattattcggtcaccactgaagtgtcaaggt

SEQ ID NO: 609111 - DNA, 103 bp, Homo sapiens
ggctggtctctcgatagacgtcctggaggcgtgcgcgctgggtatcggtcgtcatatacacagttcatctatatatttttgacatgtagcaacacctctccat

SEQ ID NO: 609112 - DNA, 938 bp, Homo sapiens
  misc_feature (543)..(543): n is a, c, g, or t
agtggtcagtgggaaggggagtgtaatggcaaacgaggtcacttcccattcacacatgtccgtctgctggatcaacagaatcccgatgaggacttcagctgagtatagttcaacagttttgctgacagatgggaacaatctttttttttttttcccaatggccatctatacaattcttcttacaagattgtcacaaggcacgtctagttatatataagctttctggtgcacctggtgatattttccaaggactggaactggctccatcgcctagtcttaattaccatattcaggggtacgacaactgggaggcgctggtggtgtaacgcttctgaatgggcaatgggaggcggaagtgggtcgtgcctgtgtgtatcaagaagggataggtatcgtggcctcctgtttctcgtcaggcagtgcaaattcaccccgtggtggaagaaccgattggacaggaaggatgtgttacacactggctatacccgtgagtttaatgcaggggtttggtttccattcgtggaacccatactatcaatgggncgacagactgttccgtccacccccccgtgaagttatcagtgccccgggtgtgaaatagtatcaaggcagagattggctttccttggttgtggggcttgacccggcgtggtggacctcagttcctgacattgcgaggaatcctagaattttttggaacccttccgtagaagcgttgttcccctcctagatcaagggctcaacagcttcctgggaggctgttttagcccttagattgttggtccccccaactgtgtagtgtgggggagactcctcacgagaagaggtgggttcctccccgcggagagacgggtggtgcgcgcgttttagggtgtggcttcccagggtgtctataggagggaacgcgccgcgtgttccccaaggggaggggcgctctg

SEQ ID NO: 609113 - DNA, 102 bp, Homo sapiens
  misc_feature (12)..(12): n is a, c, g, or t
ctggcataatanttgagtagaactcactcattgccacatgtgagggcaccaccattcatatgggatccaccctcatgacccaaacaccacgacacatgtgct

SEQ ID NO: 609114 - DNA, 545 bp, Homo sapiens
ctggcacgaggagatgatgccattcatgaacgacaacctgtaactatccgtcactataaaggttcatgaccaaccgactacttcagtaggaaacaaatggtcattgatgtccttcaccccggcgcaaggcgacaggtgccttaccgaacacgcataattcgggaaaaactagcctaaatgtacaagaccacaccggatgtcatctttgtatttggattcagaactcattttggtggtggcaaactacaactggctttggccatgatttagtgattccctgcgatttatgctagagaagaaaaattgaagcccacagacatatgacttgcatagatcgactggcgctgtatgatcaatgaaaaagacctcaagaagagcgacgaacaggaacgcaagaacagaagtgaagaaagtcagggggactgcaaaggccaatgttggtgctggcaaaaagccgaaggagtaaaggtgctgcaatgatgttagctgtggccactgtggatttttcgcaagaacattaattataactaaaaaacttcaaaaaa

SEQ ID NO: 609115 - DNA, 426 bp, Homo sapiens
tcagcaaactcagcacggggctctgcctccttgagatgtatcagtaagaatcttagatttcttcctcatatttatcttctttttgagagtacttctccgcctgagcctcaagagacttgaggttagtaggtgacatacttcagctcctcctccagctcagaagagttgagactctgccagctcatctcgtacctctgtgcgttccaagtctccttcaatgatcagcaacttacgagccacctcttcatacttcctatctgcctcttctgcaatgtgcttaggttctttgagttggatttcctggagtgccagctgtggttcatcttgtaaggcccggtgtgcaataaccttcatacctctctcagtctcatcagcagcttcggcagcttcttccagcttttgcagggcagtggcagataggaagta

SEQ ID NO: 609116 - DNA, 215 bp, Homo sapiens
gactctacaggatcttatcccggctctgggtattcgtatttgttctaataaagagaagtacaggccacagtggctcatgcactttgggaggccgaggcaggtggatcacttgtggtcaggagttcaagaccaacctggccaacatggtgaaaccccgtgtctactaaaaatacaaaaatcagcagcatgtagtggcacgtgcctgtagtcccagc

SEQ ID NO: 609117 - DNA, 477 bp, Homo sapiens
  misc_feature (50)..(50): n is a, c, g, or t
  misc_feature (117)..(117): n is a, c, g, or t
  misc_feature (426)..(426): n is a, c, g, or t
  misc_feature (446)..(446): n is a, c, g, or t
aattttatttgtacccacatctgctccagtggtctgtttgacgaattggntctaaaaagagcgattacattaagctctatgtgcgccgtgttttcatcacagacgactttcatgatntgatgcctaatttcctcaattttgtcaagggtgtggtggtctcagatgatctccccttgtttgtttcccgcgagactcttcagcttcataaactgcttaaggtgattaggaagaagcttgttcgtgaaacgcattgacatgatcaagaagattgctgttgatcaatacaatgatcctttttggaaagaatttggttccaacatcaagcttggtgtgattgaagaccactcgtatcgaacacgtcttgctgaacttcttaggtttcccggcttctcattatgcaactgacatttctagccttgaccagtntgtggaaagcgtgaaggcgnaacatgacctcttctacttaatggcttggtc

SEQ ID NO: 609118 - DNA, 175 bp, Homo sapiens
accaccagagtctagctgagattccctgcttgccaatattctattgtcacacattgttgcgtgggagaatttagcactgttgatgactccactggaagaggacagctggaagctctgtacttggaacttcctgaactttgtcctatagtgtctcttcccctgggctaatccgagg

SEQ ID NO: 609119 - DNA, 131 bp, Homo sapiens
ttcaacatttttttgaaaaatttccccagactatttaagccaattatactacactgattacgttatactaactctacgtaatcaaatactactaacccacttaactgacgtacatactacctacaatacaa

SEQ ID NO: 609120 - DNA, 834 bp, Homo sapiens
agcgggccgccggcccggggagccacacgccgctgccgccgtttgggccgggaagcgatgtagtagctgccaggactgtccccacgccctgagccggacagagacccacgaagggccgaacgacgcacagcgaacgacacatgaagaagcagattcaaaccgacatgaaagcacgcatgggtaaaccagaacacgatgagagacagagactgacgaaaaccagacaagtccgttcagcatgacagcatcgtacattacacggaatcgcacgacagaccgaccgtgaaagcaacagagagacggccacaagactggcccaccacaaatacacccactaaggcagccatcatgggcagaagcaaatggataatagcccagcggggaccacaacgagcaatgcgtaaaccccgcaaacaggacacgcagcacagggcaggacacaaacacactgaggcaaaccccacacaccatccaccaaaagaatacaccatacaagtgaaaaccaccaaccataagccccaacgcgggcagacccactgtcccccaaacaccgaacacgcaaaccagatacgcaaacgctgaacacaccctaccacacggggcgcaccacgccaggaccatctgccggccaactgccacaacggacagccggaggcgacaccagctcaccagtcacgcacccacggcaacaccccacgcgaggcccaccaaagcggggacgtacccgacagcactcgatcggcccgcgacacaggccacacccacactccgcataccacccgacaccccctcatccacaacctaccgagggaccccccacacaaacacacacac

SEQ ID NO: 609121 - DNA, 331 bp, Homo sapiens
caagaatatcagaaataagtaagcaataaaactaattctggcaggaatcagggtggcaataggactagcagcaccctggggtggctttgctaccatgagttaacgctaaagaacttggctcagatcctagaatccttagccaccaacggagatcaggcattaaagagaattcaagagttccccagactctgggaaaatgtagttgttgataacagactaggcattgggattatttactaggctgaacaaggtgggggtcttgtgcagttattaattaaaacctgcttgcacatatttttaactctgggacaggttgaggtttaacattcca

SEQ ID NO: 609122 - DNA, 347 bp, Homo sapiens
  misc_feature (20)..(20): n is a, c, g, or t
  misc_feature (48)..(48): n is a, c, g, or t
ttttttgaggtggagtttcnctgttgttgcccaggctgtagtgcagtngtgcaatcttggctcactgcaacctcggcctcccaggttcaagctatcctcctgcctcagccttccaagtagatgggattacaggcacccgccaccatgcccagctaatttttgtatttttattcaccatattggccaggctggtcttgaactcctgactgaggtgatccacccaccttcccgccttggcctcgcaaagtgctgagattacaggcatgtgacaccgtgcccggccagtgccaacgtgtttaaacaaagaagttgctttgaaagaaatgtgtctttacagccacaaggac

SEQ ID NO: 609123 - DNA, 407 bp, Homo sapiens
caagagcaaaactctgtctccaaaaaaaaaagtggattttggatcttgaagaggtacttatacacttatgttcattacagcattattagcaatagccaagaggtggacgcaagctaaatgtccattgagggatacatcgaggaagaaaatgtggtctctacacataacgcaatattattcaatcttaaaaaagaaagaaatcctgtcctatgctacaatatcgatgagccctgaagatgttatgctaagtgaaataagccagtcgcaaaaagacagtattgtatgatccgctgataagtatctaaaatagttaaaccttgcttgagcccaggagttccaggctgcagtgaactgtgatcacaccactgtactccagcctgggtgacagagcaagactccatctcaaa

SEQ ID NO: 609124 - DNA, 907 bp, Homo sapiens
  misc_feature (693)..(693): n is a, c, g, or t
ggagctccaatcttcttgttctcttgctttgttcctatcttaacattttctggctgactctgaacttgaggcgccagagtacacatttttcttactagtctgatccattcacaacttctagttcacctatcatgtctacatccgcccgccgccgtctcatgcgggacttcaaggtacggattcatatcacaacgttgccatacgggctttcatcgaaccttggaagttatatttgaatatcttctctctgaatccgatatccgttcattgcttgataatctacccctctttcaaccccatttccaaagcatttttttgaggactatcgcccccgctaaccttctcatgtctgcagcgcatgcaaacagatccacctgctggtgtctctgcctctccagtagcagacaatgttatgacttggaatgccgtcatcattggccccgccgatacaccttttgaggatggcacattccgcctggtgatgaactttgaggagcaataccctaacaagcctcctggtgtgacatttatcagccaaatgtccaccctaatgtatacggaactggtgagctgtgtctcgacctttgcagaaccgttggagtcccacatatgaccgtgggcagtatcttcacgagtattccaaagtctactgaattgagccccaataattgattcgccaggcaacgtcgaggnctccaacctttacaaagacaatcgcgagaatatatccaacgtgtcgtgcacccggcacaaacctggcacactcacgcggccacgtcggggggggctccttatggccacgggacatgacggacaggggggggccggcaataacggagattggagcggctcaagggacggaaaaaggcgaatggtgtctaaagaaacaagcggcccgcgcgcttga

SEQ ID NO: 609125 - DNA, 331 bp, Homo sapiens
  misc_feature (32)..(32): n is a, c, g, or t
  misc_feature (153)..(153): n is a, c, g, or t
cgtctctagaggttcccccctcgtacacgtcngggaagctgtcgggttcgtcgccgggcaagggttgggcgccgatataggcggtgatcagttcgcgggcgcaggcggcctggtcgttgtcgacctccagccccagcaagccgaatatcggcnactcgcccgtgccgccgagcaaatggcgccccaccaggtgcgcctcgataccttcactggcaagcatctgctgcaacaactcgccctccatcagattttccggttcgtagattcgctgcatgggcgtacctttttattcgttctcgctgcgcattattcattttcgctgcgggtttca

SEQ ID NO: 609126 - DNA, 532 bp, Homo sapiens
agaccttctctcctcccacctctctaaaaatacaaaaaaaaatagctggggatgatggcgcgtgcctgtagtcccagctactcaagaggctgaggcaggagaatcacttgaacccgggatgtggtggttgcagtgagctgagatcacgccactgccctccagcctgggtgacagagcgaagctccatctcaaaaaaaaaaaaaaatttaacgattacccaggtatgataacggcagctatttggggagccccaggtgggtgggaagatcacttaaaccctgggaggtcaaggctgcagtgataagcccgtgatggtgctgctgcactccagcccgggtgacagaacaaaactctgtctgaaaaatagaaataggacggatttgacaaggctgccataaaattgaattgccctgttactccttggctccactgaaactgacacttgcatatctgagcgcgctgttggcaaggcgcccccatgaatcttctcgcccttctttcccttttccccgccaaaaacattcctgaggtg

SEQ ID NO: 609127 - DNA, 191 bp, Homo sapiens
ccgggggcccggctctgccccggctgcccgccctgcgcgcggctctccggctcccgctcctcggggccggggcctgggtggggcgcgcctttttccctttccccctggcgggccccggtgcccggcgcccgcccgcgtttcccgccgcggcgcggctgtggttccccgcgtgccgtcgggggccctggtgg

SEQ ID NO: 609128 - DNA, 752 bp, Homo sapiens
  misc_feature (707)..(707): n is a, c, g, or t
  misc_feature (715)..(715): n is a, c, g, or t
ggaatacggggtgacagcttgtgggtgtggagctctgtggtgataaatatgtctggaatgagatagtggtgatggttgcacaattctgaatgtgtagtactaatagccagtgactgtgtattttaaacacgtgaattttacggtatgtgagttatctgccaatttttcatagatggagcgctttgtcaacatggcataatagaagcattagaagctgtgtgtgctggtggtgccagtggtcccagctactcatgaggtggaggtaggaggattgcttgagctcatgagttcgaggctatagtgaactatgatcacgccactgcactccagtctgggtgacagagtgagaccctatctctcacatatatgtagtcggggcctgttggctgacatctgtaataccagcactttgagagtccaaggtggacgaattgcttgagctcatgagttcgagaccagcctgtgtgacatggtgcccactctctaccacttgggaggctgtgctaggaggattgatcgagcctgagagatagatgctgcactgagccatgactgtgcctctacaccccaacctgggcaagagtgtgagactccgtctcataatatgaatgaatgaatgaatgaatgaacgactgagtgattaatattatgatagtagcattagagagtatgatcacagtggacgctaggcgggcgcggaggctacncctgtatnccacactttgtgaggcgggatagaggtgcactgaggt

SEQ ID NO: 609129 - DNA, 942 bp, Homo sapiens
  misc_feature (45)..(47): n is a, c, g, or t
  misc_feature (806)..(806): n is a, c, g, or t
  misc_feature (918)..(918): n is a, c, g, or t
aagagtggtatcaacgcagagtgcccattacggccggggacagcnnncctttccgtctggcggcagccatcaggtaagccaagatgggtgcatacaagtacatccaggagctatggagaaagaagcagtctgatgtcatgcgctttcttctgagggtccgctgctggcagtaccgccagctctctgctctccacagggctccccgccccacccggcctgataaagcgcgccgactgggctacaaggccaagcaaggttacgttatatataggattcgtgttcgccgtggtggccgaaaacgcccagttcctaagggtgcaacttacggcaagcctgtccatcatggtgttaaccagctaaagtttgctcgaagccttcagtccgttgcagaggagcgagctggacgccactgtggggctctgagagtcctgaattcttactgggttggtgaagattccacatacaaattttttgaggttatcctcattgatccattccataaagctatcagaagaaatcctgacacccagtggatcaccaaaccagtccacaagcacagggagatgcgtgggctgacatctgcaggccgaaagagccgtggccttggaaagggccacaagttccaccacactattggtggctctcgccgggcagcttggagaaggcgcaatactctccagctccaccgttaccgctaatataagtaaagtttgtaaaattcatacttaataaacaatttaggacagtcaaaaaaaaaaaaaaaagctgcccgcgaatttgggctcatttgccaattcccctatagngggccgattacaaataatgcccgcgtttaacacgtgagactggaaaccctctgtgtccacaatataaacgtgtggagcaaatcctctgtcgcaggtgcgtaatccgagcccnccccgaccgctttccggtgtgcgg

SEQ ID NO: 609130 - DNA, 1046 bp, Homo sapiens
  misc_feature (45)..(47): n is a, c, g, or t
  misc_feature (883)..(883): n is a, c, g, or t
  misc_feature (951)..(951): n is a, c, g, or t
aagagtggtatcaacgcagagtgcccattacggccggggacagcnnncctttccgtctggcggcagccatcaggtaagccaagatgggtgcatacaagtacatccaggagctatggagaaagaagcagtctgatgtcatgcgctttcttctgagggtccgctgctggcagtaccgccagctctctgctctccacagggctccccgccccacccggcctgataaagcgcgccgactgggctacaaggccaagcaaggttacgttatatataggattcgtgttcgccgtggtggccgaaaacgcccagttcctaagggtgcaacttacggcaagcctgtccatcatggtgttaaccagctaaagtttgctcgaagccttcagtccgttgcagaggagcgagctggacgccactgtggggctctgagagtcctgaattcttactgggttggtgaagattccacatacaaattttttgaggttatcctcattgatccattccataaagctatcagaagaaatcctgacacccagtggatcaccaaaccagtccacaagcacagggagatgcgtgggctgacatctgcaggccgaaagagccgtggccttggaaagggccacaagttccaccacactattggtggctctcgccgggcagcttggagaaggcgcaatactctccagctccaccgttacttcagcatggctggggaggccttggaaaacttataatcatggtggaagaggaagcaaacatgtccttcttcacatgacggcaggaaggagaagtgctgagcaaagggaggaaagccccttataaaaccattagatcttgtgagaactcactatcatgagaacagcatgaaggtaaccgccccatgattaanttacctcccatgggctccctcccgcaagacgtggagattatggaaactacaactcaagatgagatttnggtggggacataggcaaaccatatcaatgtacatgtgtctttatggtagaatgatttatattactttaggtatatagccagtattgggaattgct

SEQ ID NO: 609131 - DNA, 387 bp, Homo sapiens
cctctttgttacttttttttgagacggagtctcacctctgttactcgggctggtgcagtggcatgatttcagctgcactgcaacctccacctcctgagttcaagcgattctcctgcctcagcctcccaagtagctgggattacaggtgcccaccaccacgcctgactaattttggtaatcttagacagggtttcatcatgttggccaggctggtctcgatctcctgacctcaagtgagctgtccaccttagcctcccaaagtgctgggattacacgcgtgagccaccgcacccagccacagctgacatttctgacggcttggctagatacagtccttgcctggaggttcactttcccttggtagcacttcaccaactatgctgtacg

SEQ ID NO: 609132 - DNA, 185 bp, Homo sapiens
gtgagtgcagaacatgatgtctgcttctaccccttgtgtctggtgagatggtgcagcagggctgaagagggatgagtggggtcatgtccactgaagaactgtactatggggacagaaaaccaagaaatgtggagactgaacgggtatcccagagagtgaacgaccctgggcatcggcgcacaggg

SEQ ID NO: 609133 - DNA, 344 bp, Homo sapiens
  misc_feature (59)..(59): n is a, c, g, or t
gtcactctaaggatctctacaggagagagaactggagctctcccaatgctagcacgcantgaacagcaatacaacaaccaggttcttcacgaaacttaattttcacaagacttaaaccagtcatacaacaatctggttggataggtggtgcacccatcattcaaaagggccatcaagaacatggataactttcttttctccaccagagtagtgtccataagttgcttcacattactctttactattgtggtaactccatactatcttaagtttcctctataaattttgtttaaggtccgcattggttggactgtgtttaataaaggaaactctcatgttcctgt

SEQ ID NO: 609134 - DNA, 122 bp, Homo sapiens
catcttcctaaatccattattttcagtttttcagttacgtcatatgggggctgactgtgtgtcatgcagtgtcccagttctctctcttcctatctctttcctatattctttctcttttttct

SEQ ID NO: 609135 - DNA, 1736 bp, Homo sapiens
  misc_feature (1)..(2): n is a, c, g, or t
  misc_feature (77)..(77): n is a, c, g, or t
  misc_feature (79)..(79): n is a, c, g, or t
nntctctgcttgctgtgtctgatgttctgcctgctcgtccgtttgtctggtctttcgccgacgcgatcatcgccgantnttcttgttgttgtgcttgctctactagtcttactcaggatgggctgtccctgctctgctttgtgctgtgtgtattatcttcctcgccgtgctgtcgtgtcttttttgcatctggcttggtttgagttagctgtcgctcgtcggtctcttttctttcatctcgttcgtgcggatctgttgttgttgtctcaccctccctctgctctgcgtctgtggtttgacttgaatctcactatcggtggggtgttggtgtggtgagcctctcctctccctgcctgttgtcggttcgcttctttctatttttcttctctctgtgtggtggatgtttctttcctgcctccctcgtgtctgttctttcctccttcttctggtgttttacaatgcagggtggttgtgcttacatttcttgccttctatcggtcgttctcccccttcgtgtggtcggtcgactaagatttttttttttttttcttcctccactgtgggtgggtgggtctccttcttgccatgcttctctggctgtttttttctatcttcttttggctggcttctcttctctgttgggtccctcctcccttctttcttgtggcgggagtttgttctttgtttctggctccttcgtgtcttttcatttctctctgtctgtgttgatgggagaagaggcttttcttccttcccttcttctctctctgctccttcccccgcctgagtgggtgtttttttttttttttgtgtctcgccacagttgttttttttcttctctctcccacgttctttgtgtgggttgtctccccctctttcgcgattgttgtcttctttcctttttttgtcctcccgtgttctcttctctccaaggatgtgtttgttgttcacggttcgttcttattttttcttgcggtgttctctccttttccacatgccttttggtgtgtgtgtcctcctcctctctttgtttcctgtctgtgtgtttctgctcccccccgctcttcccgccctgcggtgtgttttttcccgcttctctctcgtagagggttgtgcatggggccgcgcccctctctttttcttttcttgtggattcttcttcgggtggggtgtttctacatacctctcttgtggcgccttctttttttttttctcccatgatgttttcccgctcgcggggcctccgctcgggtgctcccccctctctcgttgggctgttcatcgctctctgttggtggcctcttcctcctcctttggtgcttcttatttatgtttctctccctcccccctcttgtgtggcgcgccccctgtgcgcgcccccgcgcggcggttggtggagtgtgctccctccccgcacactgatacactttctttctttgtgtgtgcgtgcgcgcatgtataattaatttttcgcgcggctcctcttcactatatctcctcgcccacactatccggggcgtcttctgggcggcgtttttatattgtggttctttttcttctctctctctctcccccgggccccctccttctttttctttcccccccccccctcttttttttttttgttgtttttttaattaattgtggtggggcggggggggtacagggggcggctgcgtggccgctgtttctttttttttatatatataaaattgtgtgtgatgaaccaccacata

SEQ ID NO: 609136 - DNA, 718 bp, Homo sapiens
  misc_feature (28)..(28): n is a, c, g, or t
  misc_feature (92)..(92): n is a, c, g, or t
  misc_feature (102)..(103): n is a, c, g, or t
  misc_feature (108)..(108): n is a, c, g, or t
  misc_feature (116)..(116): n is a, c, g, or t
  misc_feature (118)..(123): n is a, c, g, or t
  misc_feature (161)..(161): n is a, c, g, or t
  misc_feature (188)..(188): n is a, c, g, or t
  misc_feature (202)..(202): n is a, c, g, or t
  misc_feature (206)..(206): n is a, c, g, or t
  misc_feature (210)..(210): n is a, c, g, or t
  misc_feature (215)..(215): n is a, c, g, or t
  misc_feature (246)..(246): n is a, c, g, or t
  misc_feature (258)..(258): n is a, c, g, or t
  misc_feature (260)..(260): n is a, c, g, or t
  misc_feature (262)..(262): n is a, c, g, or t
  misc_feature (268)..(268): n is a, c, g, or t
  misc_feature (270)..(270): n is a, c, g, or t
  misc_feature (296)..(296): n is a, c, g, or t
  misc_feature (298)..(298): n is a, c, g, or t
  misc_feature (301)..(301): n is a, c, g, or t
  misc_feature (318)..(318): n is a, c, g, or t
  misc_feature (353)..(353): n is a, c, g, or t
  misc_feature (384)..(384): n is a, c, g, or t
  misc_feature (388)..(388): n is a, c, g, or t
  misc_feature (395)..(395): n is a, c, g, or t
  misc_feature (440)..(440): n is a, c, g, or t
  misc_feature (452)..(452): n is a, c, g, or t
  misc_feature (462)..(462): n is a, c, g, or t
  misc_feature (518)..(518): n is a, c, g, or t
  misc_feature (562)..(562): n is a, c, g, or t
  misc_feature (575)..(575): n is a, c, g, or t
  misc_feature (622)..(622): n is a, c, g, or t
  misc_feature (635)..(635): n is a, c, g, or t
  misc_feature (657)..(657): n is a, c, g, or t
  misc_feature (702)..(702): n is a, c, g, or t
gcggggagaagaaacggaacagcaaganccccaatcggggcaggaaagaagtttctgaggactagacatctcttcatttaatgacaattttntggcgcaagnntcggngcccagancnnnnnnggggctcaggaggtggcgggccggggcccagggctgangcagtgggcggcagttcatgggcagtnatgtactttttgtnagcntcangaatnatcttgaaggctcgagcagtggcatagggtntgtttgttacangntnccggtntngggctggacgatgggtcactggacananctnacgaacagggacttttnggggccgcccttgggggaaccatttctcgaaagtngcttcatcactaaaagtgatgaaggtacgtnagcngcgagcnggggggttgacgggtccagttccagcatgaggagttaatgcaganaccgagggagcnggatcaagtncttctatgttaacgttctcttccttggggcctgggtccccaacaagtggcactgtnactgaatgaaaggtgattatgggcccggggcacttccgcttctnatgaacctgcttntttttatcagcctcgagccgctcatatgtttccagtgaccgtaaatnaagcccttctgtnatcttggcctcccggagcagtncctcctgggttagtggccgctcacagtggggcccctttcgccgtnttgactggccctgcct

SEQ ID NO: 609137 - DNA, 424 bp, Homo sapiens
  misc_feature (220)..(220): n is a, c, g, or t
  misc_feature (322)..(322): n is a, c, g, or t
  misc_feature (394)..(394): n is a, c, g, or t
  misc_feature (415)..(415): n is a, c, g, or t
attcggcacagttgtactcagcaggtctgcaatgttcaaaccctatgctttccaaaaaaaggtcttttgcaaagaatgctttggctcttgaccagctcttgggagataatctgtaagcccttggaagtatcctgcctgatcagagtgtctttgtttactgtggccttggccacactggatagtttgtgctaacagtgtgatttgtggtgtgagccttggntgagagatactagtttaacctctgcatggactagagactgaataactaaggtcaaccacacaggtgctccatgcctatctgactgaaccccaaaaacaactntggggcaccaagggcttgggtgaacttccctggttgacagtatttcatacatgttttcacacatcattgttnggggggaatttatggcacttngcccataac

SEQ ID NO: 609138 - DNA, 899 bp, Homo sapiens
aaatatgtacttatgggaagtaatatcaaactgtatggttgataaagtatggttgaatcttatggtttaaaggggaaaatagagcctgtgccttatatattacaaacacaggccattgggtgtgtgcacaaagggcaaacctaagggtattctagaacctatacttagaagacaggccatccagtatttgtgcttttctaagataatatgccccaaataaacaatgacctagagggggccttctggtgctggtgtaggggaatttaaaccccaaacttttccagggtggttccaaggggaggctcaaaactattattgttaaacacacacccaaaggtttgacgcacagcgggttattggcttattcctagccccgggtaaattctcctggaatccctatctcctaaaaaaacccattttggaaaataaggcttcaattgtggattccaaccatttccaattaaaattggcaattctggtgggtaggagggtagaaaaagcaaggcacccttttcctaaattgggcaacaatgggatccggacctaaatgttgtgcctaaagtggttgtacctttcccataggctttacaaggtcaaggattcaagctaatttttatcctcccaacagctgggcttaacctctgggtgtctgccagcgacgggtttaacgccattacaggataagcgaaagcgcagggaccatttgtgattgtgcctctaacattttcagacaaattattattcccttaaaaatttaacccatgcaataccgcggtggtaactgattaactttggacgccacactgtcatctacttgtggtggacattttcgcgtattatgaagattttccgaaataggaccttcaagaaccagggggagacgggggctccaattcggc

SEQ ID NO: 609139 - DNA, 663 bp, Homo sapiens
ttgatataatcccccagtaaacagatgctgtaggagcagacatgtatataggaatctacagaaattgctttgctataacaacagccgccatatcatgaagggcttaagaagtggcaatgagcaaagttttgtcttcagtgactccagagaaacggtatgagaccatggatactcactgtcagaatgagatgagcactggaactggacagagtaatacagtacagaacatccttgaacctttctacgtgttagatgtgtccgaaggcttctctgttctgcctgttattgctggcacacttgggcaggttaaaccatacagttctgtggagaaagaccagcatcgtattgctctggacctcatatctgaagccaatcactttcctaaagaaacacttgagtttgggctgagacatgtggaggatgaatctgctatgttacaaaggccaaaatcagacaagttatggagcataattatattggatgtcattgagccatctgggctcattcagcaggaaataatggaaaaagctgcaatatccaggtgtttactacaatctggaggcaagatctttcctcagtatgtgctgatgttggggtcgcttgtggaatcacagacactcctagaggagaatgctgtccacggaaagaacgtactctggatta

SEQ ID NO: 609140 - DNA, 248 bp, Homo sapiens
ttcgattggcgggaacttagtgagagcctgtcaacaaacatagaaaaattagttgggcttggtgatacacatctgtagtcccagctatttgggaggctgcctttatatcaggcagtcgaggctgcagtgagctgactgccctactggtatacaagcctgggtgaccccatctcaaagaagataagttaccagatgtcatgggtaaaggttggtcttcaaggggcctcataagttgcccggcaatcgaa

SEQ ID NO: 609141 - DNA, 1299 bp, Homo sapiens
  misc_feature (719)..(719): n is a, c, g, or t
  misc_feature (738)..(738): n is a, c, g, or t
  misc_feature (758)..(758): n is a, c, g, or t
  misc_feature (1160)..(1160): n is a, c, g, or t
  misc_feature (1166)..(1166): n is a, c, g, or t
  misc_feature (1191)..(1191): n is a, c, g, or t
ggccgccatttcgtggacgccgggtgagtgagagagttggttggtgttgggccggaggaaagcgggaagactcatcggagcgtgtggatttgagccgccgcattttttaaccctagatctcgaaatgcatcgtgattcctgtccattggactgtaaggtttatgtaggcaatcttggaaacaatggcaacaagacggaattggaacgggcttttggctactatggaccactccgaagtgtgtgggttgctagaaacccacccggctttgctttgttgaatttgaagatccccgagatgcagctgatgcagtccgagagctagatggaagaacactatgtggctgccgtgtacagagtggaactgtcgaatggtgacaaaaacgacgtagcaaatcgtggcccacctccctctgtgggggtcgtcgccctcgagatgattatcgtaggaggagtcctccacctcgtcgcagatctccaagaaggagaagcttctctcgcagccggagcaggtccctttctagagataggagaagagagagatcgctgtctcgggagagaaatcacaagccgtcccgatccttcttctaggtctcgtagtcgatctaggtcaaatgaaaggaaatagaagaccagtttgcaaaagtggtgtacaggattacttcatttgacaggagtatgtacagaaaattcaagttttgtttgagacttcataagcttgngcattttaagatgtttagntgttcaatctgttgtctctngaacagtgacacaaagtgtaattctctatggtttgaaatggatcatacgaggcatgtaataccaagaattgttactttacaatgttcccttaagcaaaattgaatttgctttgaacttttagttatgcacagactgataataaacctctaaacctgcccagcggaagtgtgttttttttttaaatttaaatacagaaacaactggcaaaaattgaactaagatttacttttttttccatagctgggatataggctgcagctatagttgaacaagcagtctttaaaaactgctgtgaaacacaggccatcagggaaaacgaaaatgctgcactattaaattagaggttttttgaaaaaatcccaactctcatcctgggcagaggttgcctagttggtatagantgttangtttcaagaaagtttacctttgctntagttcataagttccttatttgattgctgtatatggaaacatggctgttcgtgacattctttatgtgcaaatttgtgatttcaaaaatgtcctgccagtttaaggtac

SEQ ID NO: 609142 - DNA, 124 bp, Homo sapiens
cgcagagtgactgcatacgttttcctgacactgtggcatcgtctttgctctttcctcttccttcttccgggcagcctcctcccgctgtttccggatgatggccagccgggccaggtcagccttg

SEQ ID NO: 609143 - DNA, 886 bp, Homo sapiens
  misc_feature (881)..(881): n is a, c, g, or t
ggccgccatttcgtggacgccgggtgagtgagagagttggttggtgttgggccggaggaaagcgggaagactcatcggagcgtgtggatttgagccgccgcattttttaaccctagatctcgaaatgcatcgtgattcctgtccattggactgtaaggtttatgtaggcaatcttggaaacaatggcaacaagacggaattggaacgggcttttggctactatggaccactccgaagtgtgtgggttgctagaaacccacccggctttgctttgttgaatttgaagatccccgagatgcagctgatgcagtccgagagctagatggaagaacactatgtggctgccgtgtacagagtggaactgtcgaatggtgacaaaaacgacgtagcaaatcgtggcccacctccctctgtgggggtcgtcgccctcgagatgattatcgtaggaggagtcctccacctcgtcgcagatctccatcatgtctcttctcagcaccctctgaatctgcattagccagtcaactagccctttcagcgtcacttgtgaccagcggcggcccattcagcttggctggtgtcgtttcacatgacccagtgctgggcaagtcgtcacggtagcacagaccttaggttcccgagcatgctgtaactctcagccttctctacaacttaaccaaatcggcagcacagcacctcgaccgacacacaaattctggcaaacagctcacctgatcatctaccacatcgtctcacacaacaatcacagcacgcgccttccgcgtaacaacaaacacgaacaatcaccaaaacccccttcgcatcacaacttaatccacgcacattctcgtacaaacttgacaccaaatctccagggccgaccnccgga

SEQ ID NO: 609144 - DNA, 204 bp, Homo sapiens
tgaacatcggtcttcgtgtctgaacattcgtgtccacattcgtgtctgaacattcgtgtcccgccagctttgttaaaagccaccatgtggagggtagcctagtgaagggatgtaagagtgctgactttggcctggcccgggtcattgaggacacgaatgttcagggtcaccgcagctcgcaattcgtcacatccatggtccatc

SEQ ID NO: 609145 - DNA, 131 bp, Homo sapiens
gcctgcgcgcccgcatcgatatgcaggccgaaaatatgtggctgcgcgacccagtcatgtaccggatccgacaccaagcccaacaatccaccggtaccgagtggtgcatctaccccaagtatgactgggca

SEQ ID NO: 609146 - DNA, 187 bp, Homo sapiens
attctccgagatacgtatggcaataccacctgcacacgctatctataatgccgatgaattaatgggcgaaagactgctctaatatagtgcgatatcgaatcaaaaaacaagcatggcctcacaccactgttacttggagtacataagcaaaaacagcaagtcgtgacactcttcattacgacaacag

SEQ ID NO: 609147 - DNA, 1408 bp, Homo sapiens
  misc_feature (1010)..(1010): n is a, c, g, or t
  misc_feature (1013)..(1013): n is a, c, g, or t
  misc_feature (1046)..(1046): n is a, c, g, or t
  misc_feature (1089)..(1089): n is a, c, g, or t
  misc_feature (1100)..(1100): n is a, c, g, or t
  misc_feature (1107)..(1107): n is a, c, g, or t
  misc_feature (1115)..(1115): n is a, c, g, or t
  misc_feature (1120)..(1120): n is a, c, g, or t
  misc_feature (1122)..(1122): n is a, c, g, or t
  misc_feature (1126)..(1126): n is a, c, g, or t
  misc_feature (1135)..(1136): n is a, c, g, or t
  misc_feature (1141)..(1141): n is a, c, g, or t
  misc_feature (1143)..(1143): n is a, c, g, or t
  misc_feature (1153)..(1153): n is a, c, g, or t
  misc_feature (1171)..(1171): n is a, c, g, or t
  misc_feature (1176)..(1178): n is a, c, g, or t
  misc_feature (1185)..(1185): n is a, c, g, or t
  misc_feature (1187)..(1187): n is a, c, g, or t
  misc_feature (1189)..(1189): n is a, c, g, or t
  misc_feature (1207)..(1207): n is a, c, g, or t
gagtcctttacttattttaaaataacgcatttgaattttattatagatactcccttaacaatgtgaaactagtacacaaactttctggcgtttctgattgatagaccccaggaattttgaagacgacgtaaattacttggaaatcctaatttaaacaacctgcgttttggtattatatacttaacagacaaatagcttaaaattaaaaaatccctaaagtagaatgtcgttcctttatctgtatattaactttaacttcttttaacatagggtgtttaatgactgtgatgattttcacctagtatggagtacataaatatatagttgtgacattctgtgttgaaatattggcatgttaacccatttgtcctgtttaattaggaaataaagacggtagagctagtcggaaaatgaatagttaatcgtggaggaggagaaaacatagctcagtactttgactagaggcagctgggaaagtgacgtcctgtagcatttgctgttctagaaagtacagagacacgtagtgaaaatgggaggatctagaaggaggctgtctcctgtgtagtgtatatttatctgtaagtgagccgttggggaaggattgaatacagagacgctgtctgcttgctgccttaagacagctagctgaattgctgattaacttttaaaatacccagcttggtttatttttcttagaatctgttgctaagactggggacgctgttttcttttacaaagggaaatctaagttaatttcaaggcattcgaaatggggaaagactattattgcattttgggaattgagaaaggagcttcagatgaagatattaaaaaggcttaccgaaaacaagccctcaaatttcatccggacaagaacaaatctcctcaggcagaggaaaaatttaaagaggtcgcagaagcttatgaagtattgagtgatcctaaaaagagagaaatatatgatcagtttggggaggaagggaggtactgatggacaaggaggtaccttncgntacacctttcatggcgatcctcatgctacattngctgcatttttcggagggtccaacccctttgaaagtttctttngaagacgaagnggggggnggagagantcctnanaaantggaaaaanntggtnancctttatgtncctttggtttacgcactnagtgnnnatccaananancggaattctgtggggacnctcccgcctcaaacaagatcctccagttattcatgaacttagagtatcacttgaagagatatatagtggttgtaccaaacggatgaagatttctcgaaaaaggctaaacgctgatggaaggagttacagatctgaggacaaaattcttaccattgagattaaaaaagggtggaaagaaggcaccaaaattacttttccaag

SEQ ID NO: 609148 - DNA, 1207 bp, Homo sapiens
  misc_feature (1010)..(1010): n is a, c, g, or t
  misc_feature (1021)..(1021): n is a, c, g, or t
  misc_feature (1026)..(1026): n is a, c, g, or t
  misc_feature (1028)..(1028): n is a, c, g, or t
  misc_feature (1056)..(1056): n is a, c, g, or t
gagtcctttacttattttaaaataacgcatttgaattttattatagatactcccttaacaatgtgaaactagtacacaaactttctggcgtttctgattgatagaccccaggaattttgaagacgacgtaaattacttggaaatcctaatttaaacaacctgcgttttggtattatatacttaacagacaaatagcttaaaattaaaaaatccctaaagtagaatgtcgttcctttatctgtatattaactttaacttcttttaacatagggtgtttaatgactgtgatgattttcacctagtatggagtacataaatatatagttgtgacattctgtgttgaaatattggcatgttaacccatttgtcctgtttaattaggaaataaagacggtagagctagtcggaaaatgaatagttaatcgtggaggaggagaaaacatagctcagtactttgactagaggcagctgggaaagtgacgtcctgtagcatttgctgttctagaaagtacagagacacgtagtgaaaatgggaggatctagaaggaggctgtctcctgtgtagtgtatatttatctgtaagtgagccgttggggaaggattgaatacagagacgctgtctgcttgctgccttaagacagctagctgaattgctgattaacttttaaaatacccagcttggtttatttttcttagaatctgttgctaagactggggacgctgttttcttttacaaagggaaatctaagttaatttcaaggcattcgaaatggggaaagactattattgcattttgggaattgagaaaggagcttcagatgaagatattaaaaaggcttaccgaaaacaagccctcaaatttcatccggacaagaacaaatctcctcaggcagaggaaaaatttaaagaggtcgcagaagcttatgaagtattgagtgatcctaaaaagagagaaatatatgatcagtttggggaggaaggtaagtattctctggatatctttctgtctnttcagctctgnctctntntttttttctctctctctgccagcctttntcccctctctctcagcttgttaaggttatccttaaattggattctcagtcatatcgagtattgcagagccatgaatgaaatgtccttggttgcctttttattttagcattttggattatacatattttatcattggactaccaatgttaca

SEQ ID NO: 609149 - DNA, 691 bp, Homo sapiens
atagctactctcataaccctcaacagcccactccctcttagccaatattgtgcctattgccatactagtctttgccgcctagcgaaggcagcggtgggcctagccctaactagtctcaatcgtccaacacatatggcctagactacgtacataacctaaacctactccaatgctaaaactaatcggtcccaacaattatattgactaccactgacatagacttgtccaaagaaaccacataatttgaatcaacacaacaaacccgacagcctaattattagcatcatcgcctcttactattttttaaccaaatcaacaaggaaccatatttagctgttccccaacctttttcctccgaacccctaataagctcccttcctaatactaactagctgactccgtacccttccttgtagctatccgctatggaaggcattactgtataacaagctcgcagtctgaccttacggacaaaatgagagcataaaaatcggctgcaattggataactacttcgaggtacggtgcatataggcccagcgttagataatcatgccattgctcgatccaagagactccactggaaggcttacacccggcgacaagtgcattcatcataaagtcgtgccacggaacatttacgatcctacaatgtagctaaatctggtctagcgaaaattccaaagtaggaa

SEQ ID NO: 609150 - DNA, 991 bp, Homo sapiens
  misc_feature (552)..(552): n is a, c, g, or t
gtatttccagaggtggcttggaggccctggggtggtggggccctgcctgaggcgagagctgaagctgtcgagtccatcttccaccggggcacgagcgcttccgcattgctagcgcctgcctggacgagctgagctgcgagttcctgctggtggggccggagtggtgccgtggcggggtcccggcctggaccgcatctccccccacgggggtcggtgcctggggatcctgtccgcatccactgcaacatcagggagtaataccctgttgtgcccccccaatctgatcggtggaggtcatgatgaacccttaacttgggctgctgtcttggagaggctggtggcccatagaagcagggggaatactcttggttatttgcagcatctgaagaggactcactcctccgatccggggggtaaccttcctataacctcctctcagcatcccagaatgttggagagtgctggaatcaaccttttgccagcaagacgcggggccacacgcgcggagggaacggtgtcttccagacagactgagagattgaggagaatgcnctgaagggagcccaggaaaagaagtttagattcacttatgaccttgcaagggagggaagagcccaggctgagcggcaaaagaaaatcgtgaaggattgatgggcttgggacaaaagaaaatcgttgggcattcctaaggaagaacacattaaaaggcacccagaggcacgaatttacttacacttgcgggcacgtgtccggatcgtgacggcccatgtacgggcggattaagagaccacgggattatggcggtcccgagttccacgggggaactatgcgccaactcgtgacataacggctggttatagtgggatgcaccccaaagtgacccgacaaggttggcaagatatcaaacccaagaagagacgggtatcactaagggcttaaggaatccctgcccccgtagggggttcgcactccgcatatgtggggcacatta

SEQ ID NO: 609151 - DNA, 1125 bp, Homo sapiens
gagtcctttacttattttaaaataacgcatttgaattttattatagatactcccttaacaatgtgaaactagtacacaaactttctggcgtttctgattgatagaccccaggaattttgaagacgacgtaaattacttggaaatcctaatttaaacaacctgcgttttggtattatatacttaacagacaaatagcttaaaattaaaaaatccctaaagtagaatgtcgttcctttatctgtatattaactttaacttcttttaacatagggtgtttaatgactgtgatgattttcacctagtatggagtacataaatatatagttgtgacattctgtgttgaaatattggcatgttaacccatttgtcctgtttaattaggaaataaagacggtagagctagtcggaaaatgaatagttaatcgtggaggaggagaaaacatagctcagtactttgactagaggcagctgggaaagtgacgtcctgtagcatttgctgttctagaaagtacagagacacgtagtgaaaatgggaggatctagaaggaggctgtctcctgtgtagtgtatatttatctgtaagtgagccgttggggaaggattgaatacagagacgctgtctgcttgctgccttaagacagctagctgaattgctgattaacttttaaaatacccagcttggtttatttttcttagaatctgttgctaagactggggacgctgttttcttttacaaagggaaatctaagttaatttcaaggcattcgaaatggggaaagactattattgcattttgggaattgagaaaggagcttcagatgaagatattaaaaaggcttaccgaaaacaagccctcaaatttcatccggacaagaacaaatctcctcaggcagaggaaaaatttaaagaggtcgcagaagcttatgaagtattgagtgatcctaaaaagagagaaatatatgatcagtttggggaggaaggattcagaggagaacaatgcaagttctagatggaacactaggttattttcagggtcaccttttatggtccatttccattgacatgattgtttgactttttttgtatggtttcaacccaaatcgctatatagtttataaaagaact

SEQ ID NO: 609152 - DNA, 209 bp, Homo sapiens
atctacagagcttatttgcggtgccttccttctggtgtacgtatggcagtgcggcagcccttccccattgcggttccattgcgagcaagttggcccagaatttcatcaccatctgctacagtctgatctcctcttctgaggcaccctcttttaaaaatggggccccaaagacggagaagagctcatccccgcggatctcctactcaccg

SEQ ID NO: 609153 - DNA, 277 bp, Homo sapiens
ctctaatggctgtagtccagctgtacaaaataataaatttctagcagcattatcataatactaaagaatggaacaaccaaatgttgtcactgaagaagagacaataaaagtggtaatccatacagtaaaacactattcagctttaaaaaggatcgtagtgctgacatatgctaaaacatggatgaaccctgaaaacatgctaagtgaaagaagccagacaccaaagaacacaaactgtataattccttttatgtgaaatttctagaacagccattta

SEQ ID NO: 609154 - DNA, 1371 bp, Homo sapiens
  misc_feature (973)..(973): n is a, c, g, or t
  misc_feature (976)..(976): n is a, c, g, or t
  misc_feature (1009)..(1009): n is a, c, g, or t
  misc_feature (1052)..(1052): n is a, c, g, or t
  misc_feature (1063)..(1063): n is a, c, g, or t
  misc_feature (1070)..(1070): n is a, c, g, or t
  misc_feature (1078)..(1078): n is a, c, g, or t
  misc_feature (1083)..(1083): n is a, c, g, or t
  misc_feature (1085)..(1085): n is a, c, g, or t
  misc_feature (1089)..(1089): n is a, c, g, or t
  misc_feature (1098)..(1099): n is a, c, g, or t
  misc_feature (1104)..(1104): n is a, c, g, or t
  misc_feature (1106)..(1106): n is a, c, g, or t
  misc_feature (1116)..(1116): n is a, c, g, or t
  misc_feature (1134)..(1134): n is a, c, g, or t
  misc_feature (1139)..(1141): n is a, c, g, or t
  misc_feature (1148)..(1148): n is a, c, g, or t
  misc_feature (1150)..(1150): n is a, c, g, or t
  misc_feature (1152)..(1152): n is a, c, g, or t
  misc_feature (1170)..(1170): n is a, c, g, or t
gagtcctttacttattttaaaataacgcatttgaattttattatagatactcccttaacaatgtgaaactagtacacaaactttctggcgtttctgattgatagaccccaggaattttgaagacgacgtaaattacttggaaatcctaatttaaacaacctgcgttttggtattatatacttaacagacaaatagcttaaaattaaaaaatccctaaagtagaatgtcgttcctttatctgtatattaactttaacttcttttaacatagggtgtttaatgactgtgatgattttcacctagtatggagtacataaatatatagttgtgacattctgtgttgaaatattggcatgttaacccatttgtcctgtttaattaggaaataaagacggtagagctagtcggaaaatgaatagttaatcgtggaggaggagaaaacatagctcagtactttgactagaggcagctgggaaagtgacgtcctgtagcatttgctgttctagaaagtacagagacacgtagtgaaaatgggaggatctagaaggaggctgtctcctgtgtagtgtatatttatctgtaagtgagccgttggggaaggattgaatacagagacgctgtctgcttgctgccttaagacagctagctgaattgctgattaacttttaaaatacccagcttggtttatttttcttagaatctgttgctaagactggggacgctgttttcttttacaaagggaaatctaagttaatttcaaggcattcgaaatggggaaagactattattgcattttgggaattgagaaaggagcttcagatgaagatattaaaaaggcttaccgaaaacaagccctcaaatttcatccggacaagaacaaatctcctcaggcagaggaaaaatttaaagaggtcgcagaagcttatgaagtattgagtgatcctagaggtactgatggacaaggaggtaccttncgntacacctttcatggcgatcctcatgctacattngctgcatttttcggagggtccaacccctttgaaagtttctttngaagacgaagnggggggnggagagantcctnanaaantggaaaaanntggtnancctttatgtncctttggtttacgcactnagtgnnnatccaananancggaattctgtggggacnctcccgcctcaaacaagatcctccagttattcatgaacttagagtatcacttgaagagatatatagtggttgtaccaaacggatgaagatttctcgaaaaaggctaaacgctgatggaaggagttacagatctgaggacaaaattcttaccattgagattaaaaaagggtggaaagaaggcaccaaaattacttttccaag

SEQ ID NO: 609155 - DNA, 1205 bp, Homo sapiens
  misc_feature (269)..(269): n is a, c, g, or t
  misc_feature (455)..(455): n is a, c, g, or t
  misc_feature (904)..(904): n is a, c, g, or t
  misc_feature (929)..(929): n is a, c, g, or t
agcggaagacaaggcgggtatcggacacacgcagcgacgaggagggcactggggtattgtccggctccgcgcggcggcagtgctggagctagcgaagaagctgcgccggtgggagcgccgctgagcgatccggccatgctgcggaggtggctgcgctgagaccgagacaggaatggcaggtatgttcaggtctgccagatgaacagtggtctgaggaatgaacagaggttagtgacacggaccaagtggcgaaggaagcctccaatggnctttataggctagtcatcctcgacatcaacgaggtatgtacgcttgggtcgttacaagtttattcgcctagttagagaggcgcgtctaggtccgacttcgcatcattcgttggaaggacttcagcacctgcctaagagccatcgggcacagggggatggggattgctctaacataggcgtcgactncggtggttacaagctcgctagcttgtatatcctaggcaggttaacacttcaaagctttgactacgtacgtgtcgtccttgtggagactcgcgtcaagtggtaaaattgcctctactaaatggcattctcaagcacttataaagcggtattcatcttcgcggactggctcagcctttgacgatgacttgtgccatattgccagtgtgggtcgactggacaaggaaggtacgcggtactttcatcattgagtacaatggcccttactcaataaggtcgtggagaggagactagaggtcgtgtgaatccctccttcaacaaatctctatcaatagaatcttcgtgaatttggggaaacacgaaatgggtggaccacgcccaggaaacacatcgtagcgttttaagaagcgggaatgcttttataagaaacgaaaacactcgtcgtatacctntcgctctccagtacgaatatagttnacgttggtataaagcttggtgaaacaaatgaaaggacaaaatcagatggagaggaatgatttgttggccaaaattatttccaaaggcggaaaacaatggaatagagaattgggtatcatacttcgaattaggaatccaagtggtaagcatggttaagaacgagttgaattagaaataagcaaggaagaatcttggttactggtttcggttacgaacttttcagaaaagtttgtggaatcaatagaatgtagccctttttccatggttggaaaggaa

SEQ ID NO: 609156 - DNA, 777 bp, Homo sapiens
tctacgaatggcggctacttcaatgaatggagatgtatgcatttgcgattcttcatccgcctgtagatgacccacagagtggagaactgccttctagaacaggtggataatcctagctcacaatgtgaggactatcctattaagtgtaatctcactgcttaattgatgcccaccatccttctccccatgccaattgtcgacttgctgtcagattgtgatgttcacggaacatggatagacagctacaaggaaaagacaataggaatatgtctgaagagttacttaggaacattgacgtttcagccacttaaggccggtaagtcagaaaaggatggagtgaatggtccccagcttacctcctggcggaatactgcattcaaaatctaaagttgccttccagatgtacatacgagcttcacgatttgctttatcgacagacgttgttatgagtgtacgatctacttgtacctgatgataggatgcaggaggtaggaagagtgccgactgtatatgaatgatgatgattctggcgttaatgaggacgtcgtgactgtagctccttgccagtgcccctgtactgccctgccatctcaggccaaaggagaggggagcaagtggggacctggccatggcccctcagaaaaagctattcacagcgggtggggaaacactacacagctcctgctgactccccttatggtctcagtttgtccttttttggactttatggagaagagtacctccgaaagtctggaacttgttttaactttctcattt

SEQ ID NO: 609157 - DNA, 343 bp, Homo sapiens
ggaatccagcagtggggaggcagcaggcagtcacttggctgcaggagtttgaggccaggagttgagaccagcctggccaacatggtgaaaccccatctctactaaaagtacaaaactgagctgggcattacagcagacacctgtaatcccagctacctgagagctgagaggctgaggcaggagaataactggaatccgggagatggatgttgcagtgagctgagattgcaccactacactccagcctgggagacaaagcaagattctgtctcaaaacaaaacaaaacaaaacaaacaaacaaacagaaaaagagggactcagagagccagggaccagggaagg

SEQ ID NO: 609158 - DNA, 1037 bp, Homo sapiens
atctgctttactgtctttagggtgtgtatgaaataaacatgacaggctttctggagccctcaaggtgcctacttgccggttccctttccagcagctcccccactcgccttagacacgctcctctgggagctctctgctctagatgagtccgctccacgggtaccagcacccatttaacaccagacctgatagaaaaacatgacaaacaggacgagaatataacatcggaagaggaatctaaaacaccagaacaatggactagtgccagggagggaagagaacataaaggcgggtagggtgcaacacgcatcaagaaacaggccagggagcatcatcgaataaaggccatccaaattcagaaacgatcagcatcgcaggagaggacgcaacaaaggaaaccacacacatgacataactcgggggagctaggcatagagggaaaacctcacccttacggaatcagcaactcccatgggaaagaagtataaggattagaccagaacaaagctgcaacaatgaacaccagctgaagcatacagagaatcctcccataaaaagagaacgaagcccaaacagacacacaggatggcagggacccacgaaaacggaaaaggaatacatactaggacgtcaagcgaagagaaaccaaaaagaggagagcgatggatcggaaacgaacaaggcacgacagcgagtacaccaacacaggcaatcgggcacgacacgaccacccgggaaccaagagaaagacaacaacatagaacaataagccataataccacgaagaactacagcgtccagagacatgcagacaaaaaacaaggagaggaaaaagaaacgaagaaacccaaacggcgactactgttcacggctaaagacaaggacgatagaaggagaaaaaacaatacgaggcgacagaaacacaaacacaacaacaaccagcaccacaacgagacacagacaataagcacaagatcaacaccctagaacaaaaacacatgacaaccaacaaaaacagaagacagatgccgacaacc

SEQ ID NO: 609159 - DNA, 122 bp, Homo sapiens
cagctaggaaggtatggtgacacatcgtaggaaccagaacgggatttcactgagtttaccaaatcaactgtgtgacgtttctgcacgctgctactggtttcatctaataaatgtttacttat

SEQ ID NO: 609160 - DNA, 1291 bp, Homo sapiens
ccaactaagcaggatcctccccaaacgccatgagagtgcggccgagatcacagatctagcctggcggcttgcatcttcatctacagactcagcaggaatctggtacacttcaggccacctgcgccaccagacgtgttgtaggggactctatgaatggactggcactgtgtctgtccatactcatgctccgagaatccaagaaaggttgaacgctgagcgcgccctcaccgtcattcacgtccatcattggccgcgtgctgacctttcaccatcctccatgctgtgctaagagcggtagcgggcatacgatgtgtagtgaggtgcgcgagaaagctgccgctttccgtgggggtgtgggctgcagccggtctggctgggcgatcgacagcgcggtgggctgggtaaagtgctgggccacgaacgcccagtccctgacgtgagccgaggacctaatggataaatctctaaatgctacatattagctgtgtgtggcggcttttgtcgccagaatagaaggggcgaagcgtctcccagtgagggtactctcagcgttagtggccacactaaatgtgagcgtccgaggcgttgtgggcagaataaaattggcctgagaacaaagcacacacaatcccaacatccgagcgtggtgttccagggttcgccctagagacgactgcgggcgcactcggtagggcgcacacaaattgagcgccaactctatagagaccccttccccaggggacacgttcggcgtgggcgtgataaaggcgagaaagaacgccctggggcacaaaggggcccctttctggcgcccttttatgaacgcctgggtgggtttcgcaacaatctccccaactatttagggcgcttgcgctatatgcggtgctgtgggtagacccccccaaagaacccttccaacgtttgccaccttcttgtcttggaggacaaacttacccggttatgaaaacgaacgttcccaagaggcggtccggagagaacacgaccggctcgacaaccgaccagcgccggacacgcggggaggacacccacggggccctaaagccacgcaacgacactttcggccaagattaacacgaggccggggcacttgggccaaagactcgccccaagtcgccccaaagcgcagggaaccccccgcgttcggcgggaaacccactcggacgacggcacgggtatgagctcggcgcagcaacggcgataaccactcgcggacaacccacagacccccctgcccttgggggcaacacaggggcacaaaacaatttccacg

SEQ ID NO: 609161 - DNA, 459 bp, Homo sapiens
  misc_feature (204)..(204): n is a, c, g, or t
atgcaccattctacagactggacgactggacattctgaagactcatgaataccaggcttcaggatcgctgacccaggaggagccacggtggctctaagtgtactgcttcgtgttcctgcgtcaccagcccactaaggtcctctgacttttgtgtagtagcatttttctaaggacaatctgcagagcagctgcttcagaactatntgtgttgccgcgccatcccaaaaaaacctggatgaggacccttgcattctgggcctggaaatcttcattctagaaagctccttttactagacagaataatggtccccaaagatgtccacatcctaatccctggaacctgtggctatgttaccatagttggcaaaagggcccttcagatggagagatgatcctggattatccgggtgggcccagactaatcacacaagttctcagcagcagaagagaacctttcct

SEQ ID NO: 609162 - DNA, 121 bp, Homo sapiens
cgagctggccaccaagctgagccggcggcttgcagatggagggcgagggctggtcggcgatgaccccggagcagcccgggtctgaacggggcagcggcggcggcggcgggggcacccgacg

SEQ ID NO: 609163 - DNA, 151 bp, Homo sapiens
ctgtgcaagaagttgcggaaagacctggaagaccaggtgcagctcatgcgccgcttcggaccccctggacctgaggtctgctgaccttgcaagcatcccatggggctggggcgggaccagggcgaattcataaagttttggacttttgcta

SEQ ID NO: 609164 - DNA, 183 bp, Homo sapiens
gtaggaggagtcctccacctcgtgcaggtacttgagagaaagcttgtaagaggtatgggtgtaatggagtagctagtaggagcaggtatttctcttaagttggtgggtgggttttaaagtttggaagaatcggaggtttctgtgaaacattggtggggtgtaatttggggtatgtgagtggtg

SEQ ID NO: 609165 - DNA, 521 bp, Homo sapiens
  misc_feature (11)..(11): n is a, c, g, or t
  misc_feature (18)..(18): n is a, c, g, or t
  misc_feature (23)..(23): n is a, c, g, or t
  misc_feature (28)..(28): n is a, c, g, or t
  misc_feature (34)..(34): n is a, c, g, or t
  misc_feature (41)..(41): n is a, c, g, or t
  misc_feature (45)..(45): n is a, c, g, or t
  misc_feature (48)..(48): n is a, c, g, or t
  misc_feature (50)..(50): n is a, c, g, or t
  misc_feature (53)..(53): n is a, c, g, or t
  misc_feature (99)..(99): n is a, c, g, or t
  misc_feature (108)..(108): n is a, c, g, or t
  misc_feature (118)..(118): n is a, c, g, or t
  misc_feature (129)..(129): n is a, c, g, or t
  misc_feature (132)..(132): n is a, c, g, or t
  misc_feature (135)..(135): n is a, c, g, or t
  misc_feature (139)..(139): n is a, c, g, or t
  misc_feature (142)..(142): n is a, c, g, or t
  misc_feature (148)..(148): n is a, c, g, or t
  misc_feature (154)..(154): n is a, c, g, or t
  misc_feature (156)..(156): n is a, c, g, or t
  misc_feature (161)..(161): n is a, c, g, or t
  misc_feature (175)..(175): n is a, c, g, or t
  misc_feature (198)..(198): n is a, c, g, or t
  misc_feature (205)..(205): n is a, c, g, or t
  misc_feature (208)..(209): n is a, c, g, or t
  misc_feature (220)..(220): n is a, c, g, or t
  misc_feature (236)..(236): n is a, c, g, or t
  misc_feature (240)..(241): n is a, c, g, or t
  misc_feature (247)..(247): n is a, c, g, or t
  misc_feature (252)..(252): n is a, c, g, or t
  misc_feature (259)..(259): n is a, c, g, or t
  misc_feature (262)..(262): n is a, c, g, or t
  misc_feature (265)..(265): n is a, c, g, or t
  misc_feature (270)..(270): n is a, c, g, or t
  misc_feature (277)..(277): n is a, c, g, or t
  misc_feature (295)..(295): n is a, c, g, or t
  misc_feature (297)..(297): n is a, c, g, or t
  misc_feature (305)..(305): n is a, c, g, or t
  misc_feature (317)..(317): n is a, c, g, or t
  misc_feature (330)..(330): n is a, c, g, or t
  misc_feature (339)..(339): n is a, c, g, or t
  misc_feature (350)..(350): n is a, c, g, or t
  misc_feature (367)..(367): n is a, c, g, or t
  misc_feature (383)..(383): n is a, c, g, or t
  misc_feature (387)..(387): n is a, c, g, or t
  misc_feature (389)..(390): n is a, c, g, or t
  misc_feature (393)..(393): n is a, c, g, or t
  misc_feature (396)..(396): n is a, c, g, or t
  misc_feature (425)..(425): n is a, c, g, or t
  misc_feature (428)..(428): n is a, c, g, or t
  misc_feature (439)..(439): n is a, c, g, or t
  misc_feature (455)..(455): n is a, c, g, or t
  misc_feature (459)..(459): n is a, c, g, or t
  misc_feature (510)..(510): n is a, c, g, or t
taaataaatanttagaanacganttggntcctanaagcatntggnctntnggnctcagttctggggtgtctcacccatgggccccacgcaggggcgccngggttcccncccaccccgngatcaagaaanggnatngggngcngggggntgggtngnaatgngccccttttctagngccttccccggccatctacaggnagggtgnggnngggaaaaaganaactgggatttctcgnaggnngggggnccgcncggttgnggnttntacgnggttttnttggttccccgggggggngngtgtgtgnggggggggccgnggcccttagatcnccttcttgngcccgtggtanaggaccagcccgaaggngccccccatgccccgnaggngnnggnccncgcccccctgaagaaggccttcccccccncanctctgaggatnttcctccaacagtggngggngcccgtgttcatgatgttagcccctttgcgcccgggctgcatcatcatgcnccgccgccccg

SEQ ID NO: 609166 - DNA, 303 bp, Homo sapiens
  misc_feature (45)..(45): n is a, c, g, or t
gacttagaggatcccccaacaagagcagcttattttattgcaggnaagctaggaaggaataggacaactgagggtctcgcaggtacaccatcacccggcatgactgccaagtcccagggtctgtctggaggcagcgggaggatcagcatcctgccccctttggtccatcctgtgtgctgtggggaccaggcccatgctactcaaggccaaggtaggaaacagtctttcctgttttcttcagggttgcaagcagagtgtcccatgctgtgctcagattcaatgcagaccttcttgttgggagct

SEQ ID NO: 609167 - DNA, 1039 bp, Homo sapiens
  misc_feature (410)..(410): n is a, c, g, or t
ttgaaactatactgctgtgtctgcgtggtattctcgcgcggcttcggacgggccgcctaagttaacgtatgacgcaagaggtgagaggacgccggtggaggggctctgcgacacagaacatacgcatgagatagcaccacgagtgtagtgattctcgggggtccaagggcaagacacgaggacgtggtccgaatgcgcaagagcgtgccgtgacgagctcgactatctttagctctttgtctagactcacacgacttagcgtgatgaatgaagatatcgtgtatacgggaccgttttcccaagctaatcaatcctgtattgagcccttacgcgtgtgcgtctcctgaggacgactgaacgcactctcagagagctcacactgtgctcaggggcgagttccctttcccggnagtcctcgctgtttggtacatggatctggatgagcaccgtggtctattaacagtcctggaagtgggtcatatggtagaattgtaacaaccgcgataacattgccatgggggctggaggaattggactcacttgggcgtggcgtgtggtggaccgtatgtggcagtggagagttggggtttccagaacgcaaggatggtataattctgggcacattccattctcccaacgtgtcttgtttcattgcttcggatcatacccttcagagtatggcattgggtgggggggcgcgcctcctgaaagaggggggttactggcctggtaggagggcgacccgcacaatgcgttccgggggtttttccccggcacctgtgatgggctagttgtgacaacacgaagggtatcaccccagtacttaggggggcgagctcgggggactaataagacatgacagtggaagcgacccctgagccggccgccgtgtttttgaccgactgcactgggcgggcaacagtgcgagacatgggacggaacaaccggctggggaggacttcaatcgttgcagatagccagcggtgagggtccagggcgtgagcaggacctatattaagggtcaaaggaacaaacgaag

SEQ ID NO: 609168 - DNA, 206 bp, Homo sapiens
tacttttcacagggcacacaaatggaatccgtgaaggtatggtccatcctaaagagaatattacaagagtcctaacagaaactgaccctgtataaagggtagatggcagatccactagaagcagactttaaaacagccatcttaataggtatgctctaaataactatccggtaatatgtgggaaacacgtcaatgatccaggatat

SEQ ID NO: 609169 - DNA, 141 bp, Homo sapiens
atagaaaaagaaaaatggtactctttggctataggggaatcatcagcaaggcagtggttgggatggtatgtggcgtatctaatttagtaaatcaatacatactggtaaaactggaagtttggagcctttggcgagcgatag

SEQ ID NO: 609170 - DNA, 1167 bp, Homo sapiens
cgtgggttattaaccaacatcaacaacaacctattttagctgtttccgccaaacctatttccgtccgacccccataacaacccccctccctaactactagactacctgcactccgtaccccgtcacaaatcatggacaagccacacgccactgtatccagctgaagccacatatcaacgaagaaaacacgtctaccctcctcgtactaactaatcatccctacaacactctcccttacactgtactaaccacttcacacgccacagacaccctaactcactacttctctactactcttctctcgaacacccaccatctctattccaccacccattgagcctactcactcaaccacgaactgcagcgcacaccagaccaagaacaccgccctgcaaccgccaagggcccaccactaactatccctagttcctaacaccccatacgctagcgccatcccacttctccccacctacctcactccgccacttaacatctctaccaccttcacaaaacaccccaatagcgcttcaccttacaaacactacctacaataacctcaactcctcaccttgccccaaaggcacacctactccaacaccctcccgtgcagcaccaaacccaacccctctacactactgcaccttacgcctttaacaaccaacctacgcccttacccacctacgctacaaccgaactaccgcatcatatcaaccgggcacctcaccaccgtctactgacactcctcttacaagcccccaattgctccgacaagcccacccccaatctcgccctgcagggctcaaactaagacttaacttctgacccggcaagacaaccatcctgagcacacacctacgcgccgagcctactgcgctacttcacctaacagaccctcaacatcttcagtttacttcaaacaccacctccttgaccctcacccacgaataagacccacttaaccccccatttacacatagatcaacttaatatcacctaattgcaaggccatttacactcactaaaccaaagccctcccactcttgcccttacgaaccacaaacagataccttacacacatccccctccactctggcactacctctccttcacacatcatgccacacataagacctatcgactacacaaacgcgaccaattcttcaactc

SEQ ID NO: 609171 - DNA, 281 bp, Homo sapiens
aaatctgccgtggaattaactaataagtagtaacaataaacttcatatttagaatgcaaagtctataaagaataattttacatgatcctcaatatcaactccagtttaaaaagtgttatttttaaacatttgaacccaggtctgttaatttccatcaggaggtgccaataccatccttggtctatggttggatttgcctatcatatatggagggggttgccctcccaggcacaacacttagcttgagatctcacgggtgctcccacgggcattgggcacat

SEQ ID NO: 609172 - DNA, 321 bp, Homo sapiens
tccaccggggggcaaacccctgactcggggacttgggatgttcctcttggtgtcatattccaactcagattgagccctacattgtgctgcccctggtcaaacgaagtttaatcagactttggttcccgcctcccccaagggtcatggtccttggaggacccgttgcagggtgaggtcaaaaaagttttgacctggatggcccataaacctgacgtcccagaatccatgcttttcatttgcaaaatgaaaatgtcaaaacttactttttagccctgttgaaagggttacttacaaaaaggaattttggtgaaactgcctcca

SEQ ID NO: 609173 - DNA, 338 bp, Homo sapiens
  misc_feature (312)..(312): n is a, c, g, or t
agaggactccgtacgtatgtagacaaactacgctaaatcatttcactaatcataattcatccggcggtaaaatctaaactttcttcccaacaaaaatttctcgggctaattcggaaaggcccggacgtactcggactacccgatgcatacaccaaatggaacatcctatcatctggagggctcattcatttctctaacagcagtaatattaataaattttcatgatttgagaagccttcggttcgaagcgaaaagtcctaatagtagaagaaccctccataaacctggagtgactatatggatgccccccancctaacacacattcgaagaacccgta

SEQ ID NO: 609174 - DNA, 1066 bp, Homo sapiens
ggcaaaggcacgggcggcgtggagtggcggcgcggagtggcgcagggcccgggagccagtgaagcgacgcggtggcgccctggacagcgacaggagatcatgctgccgctggtgggccgacacccgactcgcgcctggacactcgctggggcgccgaccatggcagggtgtgccaaaccagtgctcctgcacacctcgtctgtgctgccccctagagccatgcccatcccagccatgaccaagtgtccacagccagggagcagccaatcattcaagcaacacagggcgcacgtgttccaaaattgacccagacacaccaagcagaaactggatacccagcagggcaagcacgcactacactgatctcctattaactacgatgaccacccgcaatgtgtaccgagatcatacagacatcggaggcgcacaaggccatcatcaacagaacatgtcacacccaacatgagctataaccaaaacatatcccagaagtacgggcagatgggccgacaagtcgcgccaaacacagtctacagagccattggaggcttatgccatctgaacagaaatatctgcacacgagattgccgagaaagatccaggaagtgcaggcaagcaaccaaggctggccagggcagacatctcaagggatggcgagggagctacaaaacagatacacagaccatgggagacacgacacatccaaggcaaggatgcccaccgagaagcacctactcgacaggaagccacacgggcaccggaagaggaaacacggaccagcgacagagcgatgatgccccaggccacagagcgcgagcggataagaacactgcggacaggggacacagagaacacggacagagagaaacagaaacacagaactgaagagacagcacaacaaaggtggaagagcccatgcaaaggccaacgcgacggagccaatagaggacagagaaggacaggagaaaagcgaggaggaacaggaggagcagagagaccggacaaacgggccgcacgagaagccggacacgagacacaagcaaagaaagacagagaccagcgcaac

SEQ ID NO: 609175 - DNA, 552 bp, Homo sapiens
gctctaaggatccccattggatagcggagagggtcgaaataagatgtcttgaagcaagggaacaagacacaacataccagaatgtctggacgcattcaagcagtgtgtggagggaaatttatagcactaatggccacaagaggaaagcagggaagattccaaaatggacaccctaacatcacaattaaaagaactagaaaagccagagcaaacacattcaaaagctagcagaagggaagaaataactaaaatcagagcagaactgaaggaaatagagacacaaaaaacccttcaaaaaaattaatgaatccaggagctggtttttttggaaggatcaacaaaattgatagactggtagccagactaataaaaaagaaaagagagaagaggaaaatagacaccattaaaaaatgataaaagggatatcaccactgatcccacagaaatacaaactaccatcagagaatactataaacacctctatgcaaataaactagaaaatctcgaagaaatgggtaaattcctggacacatacaccccctggccccccca

SEQ ID NO: 609176 - DNA, 1067 bp, Homo sapiens
  misc_feature (4)..(4): n is a, c, g, or t
tctnccccctacagatgcaggaatgacaggccacagaccgagaggtacgaaaaaaaataagacagggtgttgttcaccgcctcattatatgatgccctctctttgggtgtcgattcttcctgaatagtgcttcacacgaagaaactcgggtcttcccccttagagtagttccccctcccccctggctcgctccggagacccgcgtgtgttccccctttcggttttttacttcccggagtatctccggggggccccacagcttctggtggggacaagtccaccgacctgacccttctagtgccacaactcttggggccttgtcctctgaccccccagggttgactcccccttgagctgggctcggttcctggcccccccgcggtgcaccttcaagccctctgggcacccaccatgatcggtcactgttagcgtcacacattgcctggggtcccgaccagaccagcctgaggtccagctgtcccgcatgactatgggcgcccgtttcagcccccagatggcttctcccggggaaggccctgcgcacgcagctggacctgccccggttccgaatctattcccacccttctgccctggagtccctggctctgatccccattacaggcccctctgaagaccctgctgccagattggggtgatagccccatagctccaatgagcggacctggcctggggtcccagatccccactacctgagggcatcaacatttgtgcatcgaggtggtgacgaaccctgcgggattcctcaccatcggggctgatctcccctttgcccaagggcttcgagaggtgatttgagaagaaccggcctgctgatgtcacgggcggtcccctgcccccacaccgtccacagcagctgtctgagccctccatcccccagctggcagctgtcattcaggagcccccacccctctcagcccctcttttcccacattcatagcctgtagtgccccctttaaccccccgtgcccccgagaagacgggatttgaagctgtaccccattttattccataaatccatctatccattcccgtccgtccacccccca

SEQ ID NO: 609177 - DNA, 137 bp, Homo sapiens
tctagaggatcccgggaggtgagtagaaaactcagggatgctttctggtatggacagcattgaaccctgggaacagtgatatttaaggatggggttttatacataggaggattctagggaggaagctaagcctagaa

SEQ ID NO: 609178 - DNA, 947 bp, Homo sapiens
  misc_feature (819)..(819): n is a, c, g, or t
agctgggttgctaggtacttgtccgtcatatacatcattgaaactagcgcgtgatcatgagtataagtattgactctcatattcaatgactcaagcccctctgtacatacaatcacatatgtcactatgcccttctcttgtatgtattgcctcatgtaggctataatttataacaaagatcctatcattgacatactgaacaatactacgagcatgaatacatcgcatctttggcaatcagtcttgcaaatcatagctgccatgagccactcagtcattaatccagccatatgctcctatccataacctcactgatacgcttcaccatgaagcagaatcgatgcttcaataatctgcctccactgactttatcatcacttcaattgagtcatctcctagtgttagactagaacatcctaaagtagactgaaacggcactcaacgaggcggactatcaataatcacatcttcctcaaagtgacactttcccaccacatcttaacttcctcaacataacatagctgtatttgcatgaactcttcctgagacgatgtgcatcgactttgaagcttcgtcacttaccgcactccgaattatctcacaccttcagtggtgaagtaaactcatcatgctggcatgaaataatccatggatttctcctttgaatcgatactatcacatcatcgctatttacaggaactcaaacattacctagatcagtaggacctaatactcacctctaacactgatttaccaaaaaggaggagatgtgggcatcggagtccaacggcaccagcaatgtatacgaaggataaaaanccctcagttcacatcgagaaaatagatccttcatgtttcattaccaccttatcccccctatggatcctatgcgtatcggcttaaaccccgatagtcatttaccgggtattttcctcctaagaccaaag

SEQ ID NO: 609179 - DNA, 182 bp, Homo sapiens
gcggccgcctactactactactactgctcgaattcaagcttctaacgatgtacggggacatgtgtgagcctcagtttcctcatctgtaaggggggcaatgatacctacctcacaggggtgttgcgaggattaaatgtgaggaggattgtgcctaaaattaaaaaaaaaagttgtgctgcacc

SEQ ID NO: 609180 - DNA, 770 bp, Homo sapiens
  misc_feature (518)..(518): n is a, c, g, or t
  misc_feature (521)..(522): n is a, c, g, or t
  misc_feature (563)..(563): n is a, c, g, or t
  misc_feature (569)..(569): n is a, c, g, or t
  misc_feature (601)..(601): n is a, c, g, or t
  misc_feature (660)..(660): n is a, c, g, or t
  misc_feature (714)..(714): n is a, c, g, or t
  misc_feature (763)..(763): n is a, c, g, or t
  misc_feature (769)..(769): n is a, c, g, or t
tcctttaaaacagtagcatcttaacttgtggcacaaaaggcaccaacattccctttccaaaccatccatcaccatgggtggaaggcagcgccacctgctggccatcatattatggctcacatacccataatttccttgcggtgctgaattccaagtggggattattagagacccctcagagccaaaaggggaccttagaggtcttctagatgagtcccctcatttgtaggtggtggtttctggataactcagagtggcagggacacagacgagcctgtggaaaggtatactgctttaagattgagaagaaaaccatttggcgctctaattttgcctggatggtgctctgtcagtcaaagaaagggaacaggctggggagggggtaagggcaccctgattcctgttccatcacttcccaggcagtagaaggctgtccaaggaacagtcccatccgcagctgggcatgtgttggtcttacacaagagacttaatttacttgaagaactaagagtaattgntanntttaaatacggggttcaaggggtgaaggactatcaaagaancccaantacagcataaaattatcccaaagtaaaggcantaatctcccaatggcctttctccctcatgccccacagagacttcgaaaaggcctaattngccagcacacaacctgcgtgttccctaagtactgtgccgtccaaggggtgacantgcctggcatggaagggacccaacccaactcccaacctttcaagacaancaaaanc

SEQ ID NO: 609181 - DNA, 1175 bp, Homo sapiens
  misc_feature (430)..(430): n is a, c, g, or t
  misc_feature (597)..(597): n is a, c, g, or t
gtgcccaccagccttgtcctaataaaattaagttgtatcatttaaaaaaaaaaaaaaaaaaaaaaaaaaaaatttaaaaaaaaaaaaaaaaaaaaaaaaaaaaaaacgaagaaaaaaaaaaaaaaaatataaaaaaaacaaaaaaaaaaaaaaaaaaacaactagtgccggcggccgcgcccgcacccagaagagaatatttcaaaacaaacatcgtgggggcggagcgcggcggcgcacagtagaagaagcaagcagggcactaccagtcgttccagaagaacgatcgtcgtccggccaacatacatcggacgggtgagcgatccacacccaacaaaagaagaaaacggcgcgcgggggagaaaacaacgcgattgatctatcggaaaaacaaccccacaagaaggaggttgcaagcaggggactactnctagagcggacactaataatcaacaagagagcagcgcacaacagccgacgcagaccaaagtaaaataaactatcagcccgccccccgcgcgggtggaataacacagaaaaagacagcagagaagaacagaacgagaagcagacaacaagcacacagcagacaacagnaacgagaggacgcagcagtcaagacagcatgacagcgagcggagagacacgaagagagaagagcaaagaacaacgcggagcgaagactaaagcgcggagccggaggaggacacggaggagaagaagcacggacgaggcgcgcagagaagagaagtgagcgagagaagaaaggcgaaaacaagagacgggggcgccaagcagcaaacgactaagagacgatgtatcacacaacggcaaggcgacaagagcagaagagatcagacgccgagacaaggacgcaagctgccaaaggaaaagaagacaagagagcgaaggcagaggacagagaccagagagcgaacagcagggagacaaaggcagtagaagcgagacgaggaggagacgaaagagacgaacaataaaacgacatagacgagaaaagcaagtaacgcaaacaagaagaaggaacaaggaaacacagagaacaaacaaggacagagagaacatagagaaaagaaagaaacaacagagagacagaaacagcacaaacagcacgaagacacaaacaaagagaaatagaagaacaacacaacgaaaag

SEQ ID NO: 609182 - DNA, 160 bp, Homo sapiens
  misc_feature (114)..(114): n is a, c, g, or t
tattgaggatgctaaggcgggtacagtgcagacgaatggcgtagtggtctggtacggttcttcctggttggtgatgaccgtgtcgacagatgaccacgtgccccccattggggngtccgccgaatggcggagaaggctggcctcggttggtccttgatgt

SEQ ID NO: 609183 - DNA, 334 bp, Homo sapiens
ttattttaattgggaggaacagggtaagggtgggggacccaggattccccctccccttcccaaataaaaaagaggggacaaaaggggtcgggggttttattttaaaaaatttttttccttttccaggaaaacgggctgttctttaaaaaaaggggattttaaaaaaaaaaaaagccaaaagggtttttaaaaaaaagcaacccccccccctgggtttggaaaaagtcagcttatttcgggttcaattgtttgatttttacaaaaaaaagtggaaaaagctgtatcaaggggggggttagctgggcctttccaaaaaaaatgtgagaagcttcca

SEQ ID NO: 609184 - DNA, 369 bp, Homo sapiens
gcctgcccgcccccccctggccccccggcccccccccttggggacaaggtccccccccctcatccttccccccacagttcgggtcccccagccccagtccctgtaacagactgccccaaaccccctgggtttcccccccccccggggggtttgggtccgttccatttgggttttttactttccaggggcagttccgcttcccccccctttggatggggttccctcccgggggtttccccccccgcccccgtcctggggccccccgcccccgccgttgtgaaacccccccccaagatttatgtttttttttttattttttttgataaaaatttttataaaatttttatggaataaatttttaagaaatga

SEQ ID NO: 609185 - DNA, 315 bp, Homo sapiens
tgccgtgtgactgtgtactcaactgataggacaaatttcagctgatcctcactattgtgggcaccatcgctggcgttgtcatactcagcatgataattgcattgattgtcacagcaagatcaaattacataacgaagcatattgaagaaaagaacttgattgacgaagacattcaaaatctaaaactgcggtcgcacaggcttcaccaatctatggagcataacggagcgtcttccctcaggtcaggattacggcctccaagagaccgcctagatgcaaatatccctattcccgacgacagtcggcactgcaccc

SEQ ID NO: 609186 - DNA, 99 bp, Homo sapiens
gtgagagaaggagtgggttgtgatagggaagcatcaaggaaagcttgtggaatgtcagtaaggtcatagtgcttgaacaatataatgataatacaagtg

SEQ ID NO: 609187 - DNA, 290 bp, Homo sapiens
  misc_feature (258)..(258): n is a, c, g, or t
agtcttccgtatagattgtcagagataagaaggaggtggtttggggataacaaataagcagtgtgtgctagttcaagacaaacaaagaggtagataaggatacgtgtcttttccctcaaaatagaatcctgccctaaagcaacgcaaggtagagcatacttcgtgtgcaaagccagagatagacgaagcagccttgccagcagtcactgagagatgaattaaagggcttataaagagaaaacttgagccttaacagangactacattgggatcatggcagataatacatt

SEQ ID NO: 609188 - DNA, 1305 bp, Homo sapiens
  misc_feature (316)..(316): n is a, c, g, or t
agcggatgtggcgcagtccggagggaggagcaaacgtgacgaatcatagtgtgggtatcgggagccgtccgccaggcgtcgagccgccaggcgccactccggctgccgtgccctcgcgaaatagtaccagcaagacctccagacgcgtatgcaggtgcacatataaaacgtccagcggccgactcgtaggcgcacggccgtccctgcatgttactgaccaggacaagcccatttggcgcctgaactgacagacagagtttcgagggccggggcgcgctggcatcttctcacgacttcctggccgtagctctgaatnggaactggtggttcacgagaccagtccagccgcaggtagtcgaatggaccgactcgtctggtgtcgcatcgagtttgggctccgtcaatgccaccagatgcctggtggttgaggcgtacgagcgacgagacgcacgggaaagagaggcacttctaattggtagagaatcgactttgtgtggcgaaccgcatagcccccaggcaacctcgaggttgggtagccagaacccaactcaataagccacgccgtgggcggcgagtggccactccctgggcctgacccagagtcgccaggcagagtaactcggaaacagagaccgtgggaagaaagcgcccacacatggtaaagcctgtgaggcaaggggaagacccgttcgctccctggcacaacaacacggcctcaatttacgcccatcggtcatcgttcattgcaaaggttgggtcccctcggcgcggaggaagggggcaagaggcgtcccagtgggggctcctgttggccccggggagccaaacgacacccgcaaggtgccacccttttctcgtgggtgggggccactttcctcccccgtgcggggttccctcaccttggaagtttgcgtcctccctttctggaggccctttcttcgatcggcggggtgacttccggtctctgggaagggggcggaccaaaaaggggtgggcgttgtagggggcaccaccgcgccattatcgcgcccccagaggaggtctcctctgtaccacggggggaggcgttcttctcggcctgccggtgtcgccccgcggctcgttgtgttgtggagtgccagtggccctttgtgctgggaccggaaattcgcaatttccatctccttgtggcccatttaaccattttgtgaaacacccgatcccgcgagtgtggccccgggcgtttgtcccgcgttcgcgcccccctatttgacctacccttggctccggttgtccccttcaccaaaaaggattttggcggccctt

SEQ ID NO: 609189 - DNA, 358 bp, Homo sapiens
cagcactcagaatattgcttgtcagcctcgctcatgcactgttctgcgtgacttgtccttgagatagtcggacttcttaccctaccgtgtgtccacctgctcggatgttacgttctgtcaaccagatttcttgagcgaactgttgagccagtcttactctggctcgtaggtccatgagacgagatgtctgagaacacaagatgctgtcttgttgtttaaaaatgacataatgtgcgatcccacgcaccgatgtctatttttcagcgtggagaatgagtctttgtacattcctcacttgaggtaagcagctcagttgggtatgaacgctgtggctctgacaggagagtggatacctagg

SEQ ID NO: 609190 - DNA, 164 bp, Homo sapiens
atgctgatgtgatctagaggatccctgtggagagggggttaggtgcaactctaggtcagggggaaatgagctgtgagaacagggctcccccgatcttgttggcccagagcatatgtgtggtgaagtgtctgtgcagtagggttgggattaaatgttctgttggg

SEQ ID NO: 609191 - DNA, 1151 bp, Homo sapiens
  misc_feature (207)..(207): n is a, c, g, or t
  misc_feature (222)..(222): n is a, c, g, or t
  misc_feature (399)..(399): n is a, c, g, or t
  misc_feature (535)..(535): n is a, c, g, or t
gtaggcgttgggcgaccatcgtccgttcgcttagctctacaagtccagatgggatctgaggatactcatattcatgattcgtcgatctctcggccatctgcttaatatccgcagctagctccaccaactagcagagccatcattcaatcgtagttgaaatgtcgcgcagtgtcatcagaattgacatatgcaaccgaataagataanacattatcggccaanggagaatcgcctgcttgaacgaagtgggaatgtggggctgcccccatatgcatatgcccgatagcgtatcatataggcatcatagcttcgacacgacatggttagacagatgagggcagctggtataaatcaacacatgtgtagacttaatcattctctcatgtggcgttcacctgngatgtacgagcccggacctcgcatatcctatggttggcacctatttgacctatgtatgtgccccaagggtctaacttgtatagtacgtatttatctcagatagccaacatctcgcacttatatcacaggggatacncactacattgagcgtcttgcctttcgagtcgacgacgatctcgtgacacattgctacgtacctgtcttagacattgtttcagtagatgggtcatcgccaagccatagcgagtaatccctctcaaattatgctcgggggaacgaactcccgtaagaaaggccattgacagcataccataggagctttggacagggccatggacggtcgttgcaccttgcgacttccaattcgttcatggaggcactcaaagcacatcactagtgtatttccccaacttgccaggccaatggcttacattgaggtccacccgaaaagcacgcagcatcgatccgtagcactccgaattgaggcgccaggaataccaagcgaactattccttctcttgtaacaagtaaaacaccatcgagcgattaattactacttcacaggccaatctgggatagctttttgacgataggaccccgtatcacaaaggatccgagactttggcgcgcgcaccacgggtgtttctcgcgtaagtctaaagtagacctagcgtggcgggcggacacacctggggcagtccgcgtctgttacgaccacgttggggctgtggcattcccgttcctgtataaac

SEQ ID NO: 609192 - DNA, 865 bp, Homo sapiens
  misc_feature (19)..(19): n is a, c, g, or t
  misc_feature (109)..(109): n is a, c, g, or t
  misc_feature (114)..(114): n is a, c, g, or t
  misc_feature (118)..(118): n is a, c, g, or t
  misc_feature (122)..(122): n is a, c, g, or t
  misc_feature (124)..(124): n is a, c, g, or t
  misc_feature (130)..(131): n is a, c, g, or t
  misc_feature (139)..(139): n is a, c, g, or t
  misc_feature (153)..(153): n is a, c, g, or t
  misc_feature (157)..(157): n is a, c, g, or t
  misc_feature (171)..(172): n is a, c, g, or t
  misc_feature (175)..(176): n is a, c, g, or t
aggcgagctcgccgcgttntcagtgtggcagcaaccgcagccgagcccgagcgggtgcggcgccatggcgtcgcggggctgctcaccgtgtcctgctccggccgcccgngcccnagcncagncncagacnncgcggcanccccagctcgcgcncganccggggcccgcggnncanncgctcttccaggacgttttccgcagagcagacaagaatgatgatgggaagctctcatttgaggaattccagaattactttgccgatggggttctcagcctgggggagctgcggaactgttcagcggcattgatgggcatctcaccgacaatttagaaacagaagaaactgtgtgactacttctcagagcacctgggatgtctaccggcctgggtgctggctgccattggaatcgctgaaccgtgcagctgctcgctgccatggatgccaccaagctggagtacgagagggcctccaaagtggaccagtttgtgacacgctatcctgctgcagggaggacggtgagccagctgcaatgccacttcaggagctcgcctggagcggggcgtcaagataccctggatggcccaggcccattggctgcgcggtcagatgcagagagcgtggagcgcgcacacgcaggctctgtggacagccggatgggcaggagtgccagaagaccctttgaggacgtgtcatgcactggttcattccacccgtgagtacccactgagatctaccttgacacaagcggctgcactatcacagtgccgcaagatcgagttgagcgcctaccaaggacgacacctggcatacgaggaggtcatccaacccagctcaaagtgaacgggccacccgagctgacacccg

SEQ ID NO: 609193 - DNA, 385 bp, Homo sapiens
ccaccacgccgaaagctcattcagtacacgcttcagaaccgttttctcacacacagtggcaaagagagtgaggttgccatccagggaagccatgagaggccggagtacactatctgcatactgagccgctgaggccctggcgtctggagatgcattccctgtgccccgaacctggcccaggatgtcggccatttgtcgaacacactcatcaatccgtacctggaaactgttttcaaacaccatgctgagctcatccagaaccgtattcagtttcacctgcagctccttcagactgtctgcagcttcaaggtccagctccttgcctcccatggcctcaaacattttctccggctggaccctcagttgctgcaacgttgtcatcaag

SEQ ID NO: 609194 - DNA, 154 bp, Homo sapiens
acaggcacactacacctatccctactagttattatcgaacatcagctactattcaaccatagccctggcgtacgctaaccctaacattcttcaggcaactactatgcacctattgagggccaccttgcaatttaaccattaccttccatattaa

SEQ ID NO: 609195 - DNA, 1089 bp, Homo sapiens
cgcgtccgcggacgcgtgggcagcatggctggagtataagcaggcagaaaaatgtgaaaagagagacgggcctagcctcccagcctacatctttctcctgtgttggatgcttcctgccctcgaacatcagactccaagttctttagttttggaacttggactggctcttcttgcctcttagcctgcagacggcctattgtgggaccttgtgatcgtgctagttaatagttaatatcccctttatataaatattctattacttctgtccctctagagaaccctaatagagattttggtacaaggagtgtggttctagaggaacggagtattaaggatggagtttcttagtttgtttgggggtttctggagtttgctgcttaatatgattagaccctaaaatattaaggactctacttctaatattgtggagaacactgatagtcgttgctgcgaactgtttagagagtttgcaaaataaatgcatttgacactcctgattcaccgctaatgagaggcaaggagtttagtgaccctatacataataataccttttgaccatatatggagaaccaaggaaccataatgaagctggttggtttgctcctaaattcagtggacaagtggtgacccgacaatgatgggccgggcgcgggggctcacgcctgtaatcccagcacttggggaggccggagggggcggatcacgaggtcagggaatcgagaacctcctggctaaccgggaaacctgtttttaataaattccaaaattagccgggcgaggtgggcgggcctggtgtcccataaacccgaaaggtagccgcggagagggtgaacccaagggggagagcccagcgaaccgacatgggcacgcgcacaccgcgggaaaggaacagcatcccaaaaaacacaaacacggcggggccgccaaaatcacaggggccattgtcacactctagtaagagcgccatcagcgatacaagaacgccgccacaacaccgacgacaacaagtgagaaaccacgggtcgccaccccgacgagacaagaaccgtcgactgaaaacaccaatagtcgagtcccccaccagcaccc

SEQ ID NO: 609196 - DNA, 216 bp, Homo sapiens
tcagccagtgtcataaacacccgacgtcatgtatttgagcatatcagtaaccccctctaaatttaataccagagtaccttatcgttgacaatattgatatgggaaaacatttgcgtgccattacagacggtattaaaagctaaagtttcacatactagtattgagctaacatcaatatacacaattaggcgtactgtggtatagaattctgagtgg

SEQ ID NO: 609197 - DNA, 834 bp, Homo sapiens
ggcagacactgaccttcagcgcctcggttccagcgccatggcgccctccaggaagttcttcgttgggggaaactggaaaatgaacgggcggaagcagagtctgggggagctcatcggcactctgaaggcgtcaaggtgccggccgacaccgaggtggtttgtgcttcctccctactgcctatatcgacttcggacccggctatgcaagtcgtagactcccaaggatagctgtggctgccgcaaaactgctaaaaagtgactaatggggcttgtactggggagatcagccctgggatgatcacagactgcggatccaacgtgggtggtcctggggcactcacagcacgaaggcatgtcttatggggatgtcagtattgatgctgattgggcatgaaagtgcgcccatgctctggtacagggactcggagtaatcgcctgcattggggaacaagctatatgtaatagggaaactgtcgatcacgtgagaaggtggtttgcagagcacgacgaaaggtcgtcgcagatagcgtgatcggactggagcagctgtcgtacctggcctattgaggcctgtgtgtggcccattggtacttgtccagtactgctaacacggcaacaggctcaggaagtacacgaaaagcttcgaggatggctgaagtccagcgtctctgaagtcaggggctcagagcacccgtttcatttgttgcagggctgggactgggccaccgcaagaaactggcaccccgccgatgtgaccggctactgaggggggaggggccctcaaacgcaagtcggacactataagccacaatgagcatcctttcttcctcggga

SEQ ID NO: 609198 - DNA, 627 bp, Homo sapiens
tagaagagctacgagctgcgtgacggccagtgtcaatcaccatgggcacctgagcggttccgctgccctgaagcactcttccagccttccttcctgggcatggagtcctgtggcatccactgaaactaccttcaactccatcatgaagtgtgacgtggacatccggcaaagaccgtgtacgccaacacagtgctgtctggcggcaccaaccaatgtacccgtggcattggccgaccaggatgcaacgaaggagatcacttgccctggtgaacccaggaacaatgaaggatcaagatcatttgctcctcctgagcgcaagtactccgttgtgacatcgggggctcattcctgggcctccgtgtccatctttccagcaagattgtgggatccagcaagcaggagtaatgaacgacgatcacggcccttcctatgtgttccaaactcgcaaaaattgctttacttaagggcgggattaatggaactttaagttgggccgttaaacacccactattcctgtgaccaataacctttaaatttgggcgtcaaggagacaaacaaaggatgggagaatttgggcatgggcattttgaattatgggtaacaatatgggtagggggtaaagggagc

SEQ ID NO: 609199 - DNA, 259 bp, Homo sapiens
ccccgcggcttggcccgtatttggggtgtcttctgggccctacaggatgcgatccgcttccttcagagcggtctgtgtggtcccctcgagaagttgctcgatttattcttgcagttgatctggagcgcaattcaccatggaagcttccagatgctgctttgtctggagctgcagtctaatcctgcctcctgttcaccatgattccctccgtcctcccatccttctgttttatttattgcatagcacttccagctctctg

SEQ ID NO: 609200 - DNA, 453 bp, Homo sapiens
  misc_feature (1)..(1): n is a, c, g, or t
  misc_feature (185)..(185): n is a, c, g, or t
  misc_feature (309)..(309): n is a, c, g, or t
nggccatgtggaaatggtcagttaatatttcaggcaattaaaaaaaacctaaattatatggggttttttgaaaaaggctactttacattttatgacttttcatcctcaactctgaaatcacttcatgtgacttctttacagacctttcactgtggtctcttgaatcagtgggatgctgggcgcgngtgtcccgcctgtggtctcagtgcttttgggaggctgaggcgggcggatcacgaggttgggggatcgggaccatcctggctagcgtggtggaaccccgtctctgctgaaaatacggagggttgnccgggcgtggtgcggacgcctgtggtcccggctactcgggaggctggggcaggacaatggtgtgggcctggggggtggagcctatcagtggctatcgcgccactgcactccagcctgggggacggagtgagactctgtctcaaa

SEQ ID NO: 609201 - DNA, 169 bp, Homo sapiens
  misc_feature (47)..(47): n is a, c, g, or t
  misc_feature (57)..(57): n is a, c, g, or t
  misc_feature (66)..(66): n is a, c, g, or t
  misc_feature (164)..(164): n is a, c, g, or t
tgaatatctagcggtatatatcttccagctggagattagctaaactngctggtgtanaaccgcaancagctagtgaacatctttcaaaattagtagaagctaatttaatttcagtaaatacatggggacgacatcgttattataaaattgataatgataaagtngttga

SEQ ID NO: 609202 - DNA, 1453 bp, Homo sapiens
gagcagaagaaggacggacccctggagcacacgccagcaagttttatgcgataggggagcatctacagtatctggttccaatcgtcacacagagcactaactaaacaggagcgaacacatgatgatgacgatgactggaagcccctgcaaagcacgccaggggtgtgcctcactgcttctggcgcagcctgactgctgaatgcatgacgattgtgcccaacatgtactccccgttctattgaagtgagacacagtcacgaagccagatgtggcggtaccggtgatgcgagcagtgatggtcttgtggcttggtatctttgggacaggatccacgcaggccgcagtcgagcctgcaaaaaccaacgtgatgattcatcaatcaggtgcgtgaatgcacgcgatcccgtatacttagtagatcttaatggtacatacgtagcaccccagtgataagtaagtctccgaggcatcacaggctggccatgggaactcgtacgggcaagaacttaagtggaggctcggcgttccttgcagagcttgcaccattcacagtggatcgtgctagcttttgtgactcccctcttgctgacgagtcggtcgtagaatttcgcaggggtacttctagttggcttgacacgcgcagtaggctcggctgttcaaacaattgtcgtggctcgggggttgtatacttcgcaaggttctcgaggctgagagccttcgcgtatacttgacaacggcgttgactcagtaaccggtttggcttgcagtgaagttccaccgggagacgtacaaacccatgtccttagtttttaccctggggtttaattccttgtcgttgtacgaggttgtcagaaaccttgcggagtaagcatctcaaggcaaaggctttgcccgtacagaagcaccgtcacaagtaccccacgagcccttggagttgggcaccaaccgcaagtaaacccaaccggctggacgggcacggtttccttcgccacattaatttgaagattcgttcattgaagtgggcaaagaactttgcgtggcacaccatccagtctagggttgccacgacacgggaatttggttgacatccctgagctcgattcacacggaaagagaccgcaccctaagtggggtcgcatcccaattggggcaaacagcacattggacacaccaagcggtggtcctttcgacgacatggcgcagggtccaaccagtcaattaccagcgaaggtcagaaattcgcggaactaggaaagtccccggtttccacatgcgacccgttcaactccatatgtatcttacgttgttgccaaacttcctgtccacacacattgtgtactttccgtgcacaaggtggccacaacgctccaaaagtattgcgcttttggcaggacatctcttggacgtttgggttgtatggggcctccccctgtgtttaaaccgaattggtaca

SEQ ID NO: 609203 - DNA, 453 bp, Homo sapiens
agtatattagaaaaacaaagaaaaataagccttatccctttacaagtgaaacaacacaatatgcatatacaatattatatatacatatatttcaaaatgtattcacaaaagacagattatagatacaaatattagaataccaccacacaagctcaagactcaaggaattgacagatctctgtaaggtgtttcaatataaataatgtaatacctattacaaagtttccaaggtaactactttccagaagtaatgaacagaggctattctttcactagcaacataggaacacttaggcttataatcaagtacagctgtacaaacgtaagttttgtctacaatgtagagtttgttcgattaatagcaaatgctccaatatatgccataattctacattttatgtacacagtacatacacagcgtattattgtactgatggtttacacagtccaatt

SEQ ID NO: 609204 - DNA, 117 bp, Homo sapiens
gtagaagttataaacacacacttgtggtgccaaataataatcttatttactgctgcagtcagaaggacatgtttttcacctgtgacttcctcccttgtacgctggattgtaattgtc

SEQ ID NO: 609205 - DNA, 104 bp, Homo sapiens
agcggcagtgcagaggttgatctcaggccactctgtttcaggcacagactccgttgctgtggctagcatctaggttagctctgcagaatcacctaaccaccagc

SEQ ID NO: 609206 - DNA, 529 bp, Homo sapiens
  misc_feature (6)..(6): n is a, c, g, or t
  misc_feature (13)..(13): n is a, c, g, or t
  misc_feature (262)..(263): n is a, c, g, or t
  misc_feature (281)..(281): n is a, c, g, or t
  misc_feature (284)..(284): n is a, c, g, or t
  misc_feature (335)..(336): n is a, c, g, or t
  misc_feature (357)..(357): n is a, c, g, or t
  misc_feature (362)..(362): n is a, c, g, or t
  misc_feature (364)..(364): n is a, c, g, or t
  misc_feature (383)..(383): n is a, c, g, or t
  misc_feature (396)..(396): n is a, c, g, or t
gatgantgaaccngttcaactaacttttgcactgaggtccctgaacttctttacaaaagccactccactctcttcaacggtgacactcagtatgtctgcagatgtaccccttgttgtagagtataaaattgcggatatgggacacttaaaatactacttggctccccaagatcgaggatgaagaaggatcttaggcattcttaaaattcaagaaaataaaactaagctctttgagaactgcttctaagatgccagcatatgnnccacgcggacacacgccnccntctgtacctctaagtacatatgtagatattgttttctgtaaataacctatnnttttctctattctctgcaatntgttnanagaataaagtccaaagtcngatctggtctagntaacctaaagtatttgtctcttaaaatacttgtgatttttataatacaaaagggtcttgactctaaatgcagttttaagaattgtttttgaatttaaataaagttacttgaatttcaaaacaaaaaaaacaac

SEQ ID NO: 609207 - DNA, 278 bp, Homo sapiens
  misc_feature (84)..(85): n is a, c, g, or t
  misc_feature (106)..(106): n is a, c, g, or t
  misc_feature (111)..(111): n is a, c, g, or t
  misc_feature (113)..(113): n is a, c, g, or t
  misc_feature (132)..(132): n is a, c, g, or t
  misc_feature (145)..(145): n is a, c, g, or t
ataggttatttacagaaaacaatatctacatatgtgcttggatcgtacgtttttccatgtagtccgctagtggtaccacctatnnttttctctattctctgcaatntgttnanagaataaagtccaaagtcngatctggtctagntaacctaaagtatttgtctcttaaaatacttgtgatttttataatacaaaagggtcttgactctaaatgcagttttaagaattgtttttgaatttaaataaagttacttgaatttcaaaacaaaaaaaacaac

SEQ ID NO: 609208 - DNA, 229 bp, Homo sapiens
  misc_feature (15)..(15): n is a, c, g, or t
  misc_feature (52)..(52): n is a, c, g, or t
  misc_feature (60)..(60): n is a, c, g, or t
  misc_feature (66)..(66): n is a, c, g, or t
  misc_feature (84)..(84): n is a, c, g, or t
  misc_feature (100)..(100): n is a, c, g, or t
  misc_feature (154)..(157): n is a, c, g, or t
  misc_feature (176)..(176): n is a, c, g, or t
  misc_feature (205)..(205): n is a, c, g, or t
  misc_feature (207)..(207): n is a, c, g, or t
  misc_feature (211)..(211): n is a, c, g, or t
gttttaatgtatctnttccacttattatagttatattcctacaatacaattntaaaattntctttntatattatatttatgctnctgtgtcatgattttntcaagctgttatattagttgtaaccagtagtattcacattaaatcttgcttttnnnnccctttaaaaaagaaaaanttaccaaacataaacttggctagaccttntnttgnggatttacaagacctttg

SEQ ID NO: 609209 - DNA, 288 bp, Homo sapiens
ggcgaggtgtaccagtgcttcggggcatacttgtacagcctgtcgcagatccgttgccagctcctcaaccctatggtagcatgcacgatgacagttggaaagctggctgttactgaccagcaaagacaagaatgcagaagtccacggatacatggatacccttcaccaggctaaaaaacaacttttatatgcagacggttcagataagactcttgggatttctaaaatcccagccctctctgtcttagttagcacaaaccgatagagatcatcaaacagcactttaat

SEQ ID NO: 609210 - DNA, 221 bp, Homo sapiens
gacttacctaccacagaaggactaagcaaaaggaaaaactctggaggcatcacataatctgatttcaaactatatataataggccaaagtcaccaaccagcatgatcctggcataaaaatacgaatataccccactggaatagaatagacaacccagaaataaacccaattacttaacagccaattgatctcagacaaagggaaacaccggggatcctcta

SEQ ID NO: 609211 - DNA, 854 bp, Homo sapiens
gtttctttaagaatgttgaatattggcccccactctgggggctgtagagtttctgctgagagatcagctgttattctgatgggcttccctttgtgagtaacctgacctttctctctggctgcccttaacattttttcgttcatttcaaccttggtgaatctgacaattatgtgtctgggggttgctcttctcaaggagtatctttgtggcgttctctgtatttcctgaatttgaatgctggcctgccttgctaggttggggaagttctcctgggggataatatcctgaagagtgttttccaacttggttccattctctctgtcactttcagatacaacaatcaaacatagatttggtcttttcacatagtcccatatttcttggaggccttgttcgtttctttttactcttttttctctgaacttctcttcttgcttcatttcattcatttgatcttcagttactgataccctttcttccacttgatcgaatcggctactgaagcttgtgcatgcgtcacgtagttcttatgccatggttttcagctccatcaggtcgtttaaggtcttctctgtgctgtttattctagttagccatttgtctaatcttttttcaaggttttagcttcttggcgatgggttcgaacatcctcctttagctcggagaagttggttattaccgatcttctgaagcctacttctgtcaactcgtcaagtcattcagaggaaggagtttggaggaaggagagactagggagggttcgttgtgtagagaaggatgttggcaggcgcgtggctcacgctatatccagcactttggagcagtgcaggcgatcatgaggtagagattgagac

SEQ ID NO: 609212 - DNA, 116 bp, Homo sapiens
gctggaggcctgggctcgagatgaacccggggtatgaagtagctccgaggtctgatagtgaagaaagtggctcagaagaagaggaagaggaggaggaggaggagtagccagccagg

SEQ ID NO: 609213 - DNA, 144 bp, Homo sapiens
cctgactttgctcctccggtattctatgagcatccaaggctctgatgggaaggatgaaggagtgcgtgccgtgctacgaacgctaccaacgagataccagctgatatgactgtagcccagtacatacctgggacaagatcgacg

SEQ ID NO: 609214 - DNA, 815 bp, Homo sapiens
ggcccaaggaaacatcagcagcacacacaggcggctgcagctggttggtcaacaagctggtggctggtgccaagggccttacagctccttgtagcgctggtggcttctgtgcgagtccctgggcgcgcgttctgctccgccgcggggtgcccggctcccgtggcgcaggacacctcgggcggacggacgacgggctggcacggccgtgacgggagacggacgcgcgagacgccttcgaggagcccagagggatgcttggatggagcccgagaacgcacgtagcagcaagcgggtcgccatgtgatgaaattcaagaaacacacacagtgaaacaagccatgagcacttggacaagtacgtggcacggacgcatgggtcattcaagcgccttggaagtaaagcctaggacaggacattgacgcacggaagccattaccagacggaagtggtcaatatacatggaacacatcgtgacacctgaaccacggggatgatcattagcatcactagacctggaccttggacgccgatgaaccaggacaaactagtgtggatgagaaagcgaaagccccacacgaagcacataacataagcgacgcctgggagactaacctggaaaaaagagcagaaaagtaacacagagggaagcgcgggtggagaacttgacagggcgaaggaaaaaccagggatacgcaagacaccgttgaacacgcatagggagaaataccggaagccaatcacaaacggcacagcacttgaacacccggacatgcgaaatacgagagcacaggaatgaaaccccgtgaaaccctagg

SEQ ID NO: 609215 - DNA, 144 bp, Homo sapiens
tacaggagctctgtgtgccccagaaccggaaggatacttaagctggttcaccagcctggactgaagaattgaacctgggaggtcgctggacccacggagcagctccagatgagcatggtcccgaggttactgacctgtggtgca

SEQ ID NO: 609216 - DNA, 1064 bp, Homo sapiens
aaaagtaggctaaggtacgaggccgggttaatcggcagaggttcttactcattctaatggggttgggatcccaatatggtctggtcaatctgcatcttgtgtgtcccaagaccctatctcctccccaacattcttatgccttggtcccagtaaggaacgaatgggggccagggaggagaacaggggggatcaagaagggaaacccaattcccccttgaaagtgggttcttgaactatgtgttgggggaagttcctctggatactaattgaatttatatacctcatgtttgggggttgacgtatatatatatatatatatatatgtgtatatatattacattatatggggcagggtgtgggcgctagaaatgtggaagcgagagactctttcaaatgtggtaatagatgggaagtgggggccactcttaatagagcgagccatataggtgcgtggtgagaggcgagagaattggacaggggggtgggatacgtcgataacagtcgtgtcgtgtggaggcgaccaccatcgtgtcgtgtcacccagcgtggtgtgtatgtggcggggtggtgagtctgtgctctcttctccatggggccccgggggtgtgtagcctcatgcctcccgccgagggggcgctctgcgtgaaggaaggaagcgctcgggccatctgtgtggcgcgtgtgtccgccgtggcgggagggacggccaggtatctcaccaagcagaccaagagagtggtcccagggtttgcgagcaccagggggcatttccgggccaagtggtaaggaaggacaccggaaatatgcgggagagacctccgggggggtaaatagcacaccagtgcctggggggcacccgggccggatcatggggagagcgcagggccgcactgcttcgaagggggaacaatgggggttttgcgcagagaggggaaatgcggggcgcatggagaaccaacggggcggggggggacaaacacgccaacgggaggggaggccccacggcaaaggggggggggccacaagaacgcgcgccgagggacacctcgtggtgggtgcgcgag

SEQ ID NO: 609217 - DNA, 146 bp, Homo sapiens
ttaatgaagctcacctagacaactagggaactaaaactgcatgcatattgggtaatgcagttggttagctagtctccccatcctcccaactcactataccaggaggggctgaaaacagaagtggctcccctgaaagtcacagttag

SEQ ID NO: 609218 - DNA, 573 bp, Homo sapiens
  misc_feature (193)..(193): n is a, c, g, or t
  misc_feature (235)..(235): n is a, c, g, or t
  misc_feature (243)..(243): n is a, c, g, or t
tctaacggatcttatcggcatggggtaagatgcacgacatatataaccagccgtttcacaatgagtgactcaatggcctggagcgcccagtcgtgcttcgtgaatctttctacatcttcacaacctgtgcacctcttctggtttcagaatggttcatcgcttcagaagcaaaccccgtacccctcacacagangccccattcccctcggccccaggcaacggtcaccgtcacccncaaacccngtacccctcacacagacgccccattccccttgtcacacaggccctagccactgctcacccgctttctgcctctggatttgccacttctggacagttcacacacatgcggtcacataacatggggtcttttgtgacttgcttcttcatttagcacgatatcaaggcttgtctatgtggatgtctgtgtcagcttcctccttttccgtggctgagtaatacgtggccaggccacatgctgtttcttcatagacagctgagggtcatctgcgccatctccacctctggccgttgtaaataagtacttctctgaaaattcatctacaaacatca

SEQ ID NO: 609219 - DNA, 378 bp, Homo sapiens
  misc_feature (168)..(169): n is a, c, g, or t
tggatgtagtgaggacgtattagtagaatgagtattggttaaaccacctggattcatttgtaaaatggggcacctgtctcttaaattgtaatgaggatttgattagataatctagataaatcacttagcacaagagtctccagcccccgggactctttgactggtacnntggtctgtgtgcctgttatggcacttgggctgcacatgcagtgaggtgagcatgggagcaatgctatgcactagtggcccaaaactcctgccttcctgcctggatcatgtggcagcattatgatactcatatggagcacatgaccctgtttgtgaacttgtgctgtgtgagtggatctagtgtttctgtgctcgcttacaaagaaatct

SEQ ID NO: 609220 - DNA, 317 bp, Homo sapiens
ctctaagggggcgtgtgatatagagaggggaggtcacggttatgtggacttgtgtgggacctgtggtactcttatcccttgtgccaaggagaggttttccgtgtggggtctgagggtgtgagggggcacttagcagtgaaccttaagtctgggtacatgtaaccctgctgaggggctgtgcaggccgctcctacggtcctttgtggctgaggcagggcgggaggcatgcaagccagtgggggaaaacccctcttaagctgggcagccctctaccttggccccgggagccgtgctccttggaacgcaaagggccgagg

SEQ ID NO: 609221 - DNA, 481 bp, Homo sapiens
ctgatgacaccgccaaggtgaatgcggcgatcaccacggtgtctccccagatcgggttcaccttcatcgagcacggcaaggatgccaacggcgttgtctcctggaccggccagtcatccaccgatccctcgctgttcgccaacgtcgtgatcctgcccgccaccaagatgcagcaacagaccatttcggtcgcggtgcactccaccggtcacatcaaggcgaccgacgagaatgcgttcatcgccacggtccatgcccagtaccatgccgccaaggcgtccccgtcgcccaccgatacgtgatcagcggctgagcatcgactggatgccggcgatccactacgggatgccccagaggtcggtgtgaccgggatacaggatgatgaacccggcgatcagcacgccgccaaccccgatgccgtaccacagtgaccggatgaccctgatctgacgatcgctgagatgagtggagctgtcgatct

SEQ ID NO: 609222 - DNA, 101 bp, Homo sapiens
agggtgtaatgagtacggtgggagaactgatgtggacagaatgagggagaagggtggcccgggaggcatatgacatacgatatgacaaggcatgcatgcac

SEQ ID NO: 609223 - DNA, 414 bp, Homo sapiens
gagcacatgctgttggaaaaaaatggcactgatagacttccttgatacagggttgtcacaaaccttcaatttgtaaaaaactcaatacctacaaagagcaataaagcgaagtacaataaagtgtgcctgtaatatgaatgtacaaaatatagtagtttttgagatcttttttgggtattttattattcattttaacttattataaaatattttgaacataagaagtagagaaaatagtttaccaaatcctcatttatttatcacccccctccaggccttatttttaaaaatttggtaatagaacatatacaaattttttgcatttatgggggattttggcataattttgggaacaatttttgcaaggggggaatgatcaaaacccgggggttttagggaaagcccccaacccca

SEQ ID NO: 609224 - DNA, 249 bp, Homo sapiens
tcagcagcagttctactagatctgtggagatgcataatatgtaatacctatattgatagtaacaaaggaactgtagatagtgtgcaggctagatgtgctctggataaggctaccgtgactcctgagtctgtctaaaggtgcaaagcgtaacgatagtgtgtgaggctctgaagctagggcagcgcatcctgcagtgtaactgcctcctactgtctaaaggagaaccagggctactcctacaggggctac

SEQ ID NO: 609225 - DNA, 1038 bp, Homo sapiens
ctcgttttcttgcgctgtcttgttttgcgcttctactctgtagctctttgggtactctccgttctgtctgcctacttctcgtctgtctgacttgttgtcttctcatgtccttgcgtgctgtcccttttgtttgtagttttgttgagctctgttgttttgttatatcctctgcatatcacgtggtcacatatcagtggctcctgatagtggttggcttcttgcctattgtaatcaatccctttggttaattttcccccttctcccaacctttgttcgtgcgcactgttcgcgttcttaccgatcgtttcgcccgggcgtggtattgtcccctttttgtttgtcgcccctctgaaatgccccttccctttgttctgcgccaccctcctcttggggcgctccttgtgtccaccccattgagtgttttctttgtggggtgtccccgctttttgggggccccgtcccaatcccgtactgtcaaggtctcgccatgtgcttcatcccggcgctgttcgcctttttttgatatggatattctaggttttttctcagatgggggcgtttgtctaatagaggtgaatgagggagtcatcttcgttcctatactttgctcgggtgtgtgttggaaggacataggatttttggggggggaatcttcctgccgcctcccccactcccagtgtttatattttgatacccaacatgaattttcagttccctccctcccagcccccccatttcctgcgggcgggtaccaaggaccccttcaaagtccctggagttgggagggaggaatgggggacataaagcctgtcctgtctctattctaggccagagagagtgggttccaaagaatcctgggctcacctcgttagcgctggccccgccccggccttgggaccttggggttggtgatttgggggacaatgctacaatcgtctcccctgtttgttttacttcccccaaatggaccctttttttttttaaagagtccccgagaatggggaattgttccctgtaaatatatatttttccaagtga

SEQ ID NO: 609226 - DNA, 105 bp, Homo sapiens
accaggtaggcagccgcggtcatcgtagttaaagagcattgggcagcagtcatggccagcagtggccagttgcaaagttataagaggagggtttcttagcgatag

SEQ ID NO: 609227 - DNA, 172 bp, Homo sapiens
gggcatcatgagtcaccagatgaaggattcctttagtgcccacaaagatctttctcactttgcacaacttgtacttggccttatcgaggataagccaacagatgtgtaggtaacaaacttgtaaggcacttcaatctccagtctccgcctggcctccttgtacctggtgacc

SEQ ID NO: 609228 - DNA, 133 bp, Homo sapiens
gtaactcgtgtcagtcacaacacacaaatatgacatttatgttgggtgagaataacctaattaaatattgtctaccttctcatgtagccaagctattcaccacagacagaaaaccaatctcctaatgcccggg

SEQ ID NO: 609229 - DNA, 261 bp, Homo sapiens
cacctctgtcctctaagcagtcattctgctttgaatgagatcaagttgcaggtaaactgtagtgccggcattaggcgggtagaagctgagcatgactatcagttcgttctggtcagcaagggtagctaatgcatatcttgctaccttgtggctaattcagaataggagaaaacaggctctgggcagaacgcagcctacgcctacgtacacaaagccctcattttgtacacataccaacatttttctgatgtaacctcatca

SEQ ID NO: 609230 - DNA, 253 bp, Homo sapiens
tgagacagaatcttgctctgtcgcccaggctagagcgaaactccatctcaacaacaacaaaaaaaaaaggaagaagaagttatttaggcgggcattggtggcgggcacctgtgttaattcccagcttacttcgagaaggctgaggcaggagaatgtgttcccaagccaaggggacaaagagaccagacgggacattttgggaagttgaggtggaattctagccatgtgcctctcctgattttttagggtgcct

SEQ ID NO: 609231 - DNA, 118 bp, Homo sapiens
atatatgagcttcaatcactagactcatctttatataatcttcaccctgaaaaataaaagttaccaatgtaagcaatgttttatacgagtcaataaaagtttagattaatactgtttt

SEQ ID NO: 609232 - DNA, 1280 bp, Homo sapiens
  misc_feature (384)..(384): n is a, c, g, or t
  misc_feature (461)..(461): n is a, c, g, or t
  misc_feature (485)..(485): n is a, c, g, or t
  misc_feature (544)..(544): n is a, c, g, or t
  misc_feature (754)..(754): n is a, c, g, or t
catggtagttcatgtctgtaatcccagcactttgggaggctgaggcaggcagatcgcttgagcccaggagtttgacactaggctgggcaacatagggagaccccatctctacaattttgcgaggccaagatgggcagactgcttgagcccaagagttcaagaacagcccgggcaacatagcgaaatttcctctccacaaaaaatacaaaaattagccgggcgtggtggtgcaggcctgtggtcccagctacttgggaggctgggcaggaggattgcttgagcccaggaagtcgaggcttctgagctgtgatcacgccactgtactccagcatgggtgacagagcaagaccctgtctcccctcccccagcatatacacacataanattagcctagcatggtggcacgtgcctgtagtcccagctactcatgaggctgagacaggaggatcgcttgagcctgngaggtccagactgcaatagctgtngatgtaccaccacacttcagcctaagtgacagagtgagaacttgtctcaatcattcaantaaaataaaatgaaataaaatgcagagtacagccagcacttcgtatccatgatgtagaccttgagatccaagaggcaactgtaaactcttcaaaatccactgaagaggaaggcttttgacacccactctaattcaaagtcctaactcttaaggaggagttgaaaaaatgctagggcttacacaaggtactactcattattgcaaatggancctttaatcctaaaagaaatgcaaaaaactggagcagtcccccaggagttatcacagccttgaccttatctggcccacgtttaatcaggaccacacaaagctgggcacgtggctaacacctggactcctggcctttggagaaccaggcacgcaattcctcggggtgggagtcggacacactctcccacatgggaaaactctttccactaaaataccaatttcgcgccctacgggtgtcgccttgatccacgactcagaaggcttggggagagtatttgtgccaccgataaaagaggttttgccacaatcgatatatgattccgcacacgccacaggtgaacctttttatataaacacacacatttctgggttaatataggctcaataatgggccaacatctgtgtgacaccactggcgcgcaaaaagcgggttctttttttttatctgtgtcacaaaacatgcgacactatgcggtatggagacgcgtttctactcccacgagatatcttctcctccccccaggtc

SEQ ID NO: 609233 - DNA, 131 bp, Homo sapiens
ccacttcttcgaccccgccggaggaggagacccattctataccagcacctattctgatttttcggtcacctgaagtttatattcttatcctaccagtgcttcggaatcatctcccatcttgtaacttacta

SEQ ID NO: 609234 - DNA, 182 bp, Homo sapiens
gatcagcgatacaccgagcacgctggacaccaccattgtcgccgaccactggcgcaggaacagcgccatgaccccgatcaccagggccactgcgatcatcagggtcagttccacttcgtgcagcgaggcgcggatggtctgggtgcggtcctgcagcaccgacacctcgaccgaggccggca

SEQ ID NO: 609235 - DNA, 877 bp, Homo sapiens
  misc_feature (4)..(4): n is a, c, g, or t
  misc_feature (6)..(6): n is a, c, g, or t
ggtncncttgagaataagagagagagaagaaaagcaaagcacagacacacacgcaggcagagggtcgctcatggctgacgaggctcctacaccaggtctgacccaagtggcttcggcactggactcaggctgaggacttgggacacctgggaaccaaagccccctagcggcggccccgccccgggttcgcgcccccgccagtggcgccgttcccgatttggggccacacggggacaatacacaagtcgccttgggcgaagaagagcgtggcccgcttgtgtgaagccgggaaggtgcgccaattcttgcagttgggagcccccccctgataaaggggcccggccaaagcccaacgagtgtgagagccttcccgagccaaccaacacccatgcggccactctccttgcgcagataagacaagagacccccccggggggggggtacccacaaagaccacggggacacaaaaagtgggcgccggcaatgacaacggcaccccaccaagcgggccccgacacgtacaaacagcacgaagagaattctttgcccctaacgcgggcccgccccgtctgaaaagcactggggcaagaagccgctcctcaacactcatgtgtttttcacaacgcgccctctttaagtctacattgtcaaaagagcttctgctttagattctaaccacacgattcggccgaccctctactaaaagcaaatgggacaattttggggggaacacgcctgggatttatcttgtgtcgatgagcgcaccgcatgtagatatgttgtctttacaaacccgcagcaccttggttattagggccatggccccacaattgtgccagatgttgaaggcccccttaaaaattacaccaacataaaa

SEQ ID NO: 609236 - DNA, 862 bp, Homo sapiens
gctgaaccttgtggatctggacgtcctagggaatgtacgtggccgtggacgattggacaacagtgtgtacctgtggagtgcatacgctctggtgacatcctgcacccttgtgccaactggagcagtctggggaatatatatcctctgtggccatggactcaaagagggcaagtactctggctagtgggcaccagcagatgcgtgaggtgcagcgtatggagatgtgcaagtcaggcacgaaacggacgtatcagagaagtaatgcacctaggtccacgtgcttgcccggaagtgtgcgctccactaacgctgcgacacagcgtagtatccgtgtccagctggttcacgattctggccacatccatcaccatgactgttcggagtagcagaacaccatgtggccacactgacgtggccacagtcaggaagtgtgtgggctgcgctgggccccagatggacgacattgggccagtggtggtactgataacttggtcaatagtcgtgcctagtgctcctggagagcggtggctgggcttcctctggagacgattcgacccaagatcaaggggctgtcaagggaccgctagcatggtgtggcctggctaggtaccaactgtccgtggcaacagagagggcggcacatgtgatctgatacattcgcatctggaagtgtgtcgctactgagggccgtgactgaggtgacagcgcagtgcccacttcccaaggtgttggctccatcactctgggtctcaccgtatttgacaacggagcctcactcctcaggccaatggattcgggcacagaacacagagtagcttatctagggacagtaccgcatccatggtcgaaaggtggctgacac

SEQ ID NO: 609237 - DNA, 167 bp, Homo sapiens
agcccgtgccgtgggtgccctccagtcctgcagcccaaacacacctacccagaggcaccacagaatgcggacccaaagccagccgtacctccgagcccttagcacaactactttaatttgggaccacaatttagctttcaaaagttaagtttgcagtttgagcccgg

SEQ ID NO: 609238 - DNA, 120 bp, Homo sapiens
caggcgtggtggcggtcgcctgcaatcccagctacctgggaagccgaggcaggagatatctgctgtgaactcgggatagcatgaggctggactaagccgaaatcacgccactgtactcca

SEQ ID NO: 609239 - DNA, 447 bp, Homo sapiens
ctctaaatcgatcagtgcatgtgactgacatctgtatgctaggaatagtgtagtagggagaggttaatttccagaacttctcactgcatcaaactctaatctttaacgtgaactgtgctcttgggggaagtccttccagctagagataatgtgccacctgtttagaaatggagtcccattttaatgtaatggcgcccttcagtaaaaataccctcccgtgacacaggcagtgcatgtgacagagagctcacagtgtactagctctttgtcttctctcctgcctccggaggtggccctggccccctttacaggaaggagacactggctcagaaagggttaagaccacgctcagctggagacagaatcaggactagaactaagacctccccatggcagccaaagaaggatgccaggtgtgcaaagttcttatcacaatggcacgtggat

SEQ ID NO: 609240 - DNA, 110 bp, Homo sapiens
cgtttaatttgggcgcgccgctgatgatcatcatctgcctgggcgccctgacctgggccggcacccacctgctggacccctatcgtccgatcgaccggatcaagccgggg

SEQ ID NO: 609241 - DNA, 248 bp, Homo sapiens
cccactgtccacataagagacaaggcttggaagcaataagacacccagcccagggcctggatacttacgctgacagctgacaggtgattaaacaaattgctagctcagttctactcccgaaaggttatcacttctttgatctgctctgagatgggagccaacaaatcggaaagcttattttctggctggctgtcgaccctgagaagctgtaaccaacaggagctacggtccaacttcaaacctgtgtg

SEQ ID NO: 609242 - DNA, 400 bp, Homo sapiens
ccctccgcaccactgaggatgctatcgattatctgatgcatggcatactggaatacggcagactccattgcataccacactatgaatgtctgagttaggttttataactattaatttatatggttcacctctaacacagtttctgtgtgtcctgttcccccctgagaaagattagaaatggctcctgtgtaccaaattagcttcacagaagaacatgactattttcctcccactttttcttcttttttttttccacggcggagcctttgcaccttagggaccttttgcttttagcatcacctaattcaccattctttactcctagcctgatttcttatggcgggcggaagggggtctcgggaatccggtttttcgtgaattaaattcctccatggtgccg

SEQ ID NO: 609243 - DNA, 377 bp, Homo sapiens
gcctaacgaggtctctatattctgtgaatacgtgagacagatcgaggatcactaaagtgcataactctgatgagattcatctactgcccctaatctctggcttgacactacctactgttgtccagttggagacacactagaatgcactgaatgactattaggattgctgcctcctaatttatctcagcctcgcgctgttgatgtgaatgaggaactgcttggttgttaaaggagattttgctccctgctggcccaaacaggtccttatctaggtttggtccccactgacccacacaggtctggctggattggttacaatgatctccagaggctcaaccattccccttccctatccttgcttgggacatttcatcaca

SEQ ID NO: 609244 - DNA, 188 bp, Homo sapiens
ttcttgagtatcccctgtgatcaaaaaagagcctgaatagcaaggcaattctaagcaaaaagaagaagttggtggaggcatcatgctaaccgacttcaaactatactacagggacacagtgaccaaaacagcatggtactggtacaaaaacagcattgattgaagtcggttagcatgaaagcctctgc

SEQ ID NO: 609245 - DNA, 471 bp, Homo sapiens
atattatcctcgtctgcttgtcgaacagagaaaatgccaatgtgaaaaggtgaaataaaacacacaggagaaaacctaaagcacctagtatccatcaagcaactgtgtatcagttttggtataataggcaagacaacctacaaaagaaatccacatcccttttgagtccctatatgccagccatgctgataaatttcagattcagtttgacaattatcctttgaaacatgttaacacccagtatacagtatggaaaccagggctcaggagtgaaatgcccaacaagaccacacagaaaagtccatcagtattcatcaactttcagtcgaaggtccccgaattaaatgagaaacccattttacattcaaatctagtacacaaacatcaatcctcacgtaaaccatctctatgctgacctgcaagatgccctgttaatcttacagttatattaacgaattaaagtacctgttg

SEQ ID NO: 609246 - DNA, 132 bp, Homo sapiens
tgtggcagcagtaacagtgggtgtctgactggatagaggcaaactgagtgagcagcagatagtatccaacactgttagttctgagccctacatgactggctgtcttgctcattcttgccaattcattttttg

SEQ ID NO: 609247 - DNA, 1255 bp, Homo sapiens
gatcggagtctgcaaccggaggaccagaagttcgcctgtacactgacgtagtgtgcagattacattctgtcatatcactaccgttctgcatcgcgctatagctcgctcgttgttaacatatctcatgtgaggacctgtgcataaggtcgatgtcgcagaatgtgacggagcaataacactgtcgtgtcgaatcaatttcaaaactggggaaacagtcctatcactaatggatgagagaaatcgagctgtacggcacgagatcaccttggtgtcaatccttgatgacatcgttggcttacccgttggagtcctgtagcatttggcgtagagatcctaggagagatagcgtacggcaacgctagaagatccgtagctaaatcgacgagaaaatgccgtacgagctgcgaagctgtggcttgtgggcccgttgcatcccggcggtcgttggcagaaccacacatcttcctagctagtccacattgtatctgctacatgtcttgtaatcagtttgcgcggtataccattcaaattcgagggcaagagtgaactagtcatgtgaggacgctggtcgcctttgtcgagggctcgttccagtagtagtagcatagggatgaatagaggcacgctagcaatgctaggacgggacttgcgtacacttagttggaacttttgcacctgaaaagtaagtcctgagcctaacccaaagaggggaacagtgtggcacgaacatgttactatcccatgacgtgctccatagatatgcgacctccaggggataggatcataacgtggtacctatacgatcaatctggggacgacgtcgaccctagattagagcgaaatgactcgattggccgaatccatcgggccagggtcccgaaaaagcgacaacgtggaagggatgagttgccagaaggtatggggagcacaggttccctggggtttcttacccacaaaagagaatcgatccttgcttgtctaatgatcattgaatggcttctgggttcaccattcgcagtgaaccagcatgaggatttggagttgacgatgtgggttccatatgggtagaaggggcctaaagacaatggtagaccctgtggaaatatggagaaagggatcaatgaaagtagtcttttcatagaagggcttaaagggctaatgtaggtaaagggtgaagctggatttaggaaaagcacaggaaggaaagcgtaatttaataaagaggtcgggatataagcatgaggtcaaatgagaa

SEQ ID NO: 609248 - DNA, 336 bp, Homo sapiens
ccagggttttttgggggggggtttggttttattttccaaaagccaggtagggcttatttttttttttaaaggtcctcccggaaagaataaaaggggtttaaaatttggccctttgccttcgggaaaaaaaggcccgccaaagggtttttaaaacccccccccttgggggtttaaaggttgggggtgccccccggggttccaaaaattaaactgccaaagggcccccggggccaaaaaaaccccaaaaaaaggggtgggggtggtaaccatttccttccaaaagccccccggggaaggttggtttttaaaaccctttggtggtttttttttcctgga

SEQ ID NO: 609249 - DNA, 103 bp, Homo sapiens
ggctgggtcgcgtcggcgctggggcgcgaagcgggtcttgctggccgcaagaaccgcacttactgggaattcctcgcttcatggggaactaattgcaactccc

SEQ ID NO: 609250 - DNA, 203 bp, Homo sapiens
  misc_feature (123)..(123): n is a, c, g, or t
  misc_feature (139)..(139): n is a, c, g, or t
ttgctctgtggtctcctccgcagcacatcaccaaatgttgaacctcgtcctctcgtactgagcaggataccatggcaacacacatcatcagtagggtaaaactaacctgtctcacgacggtcntaaaccgcagctcacnagttccctatatagttggcgtgaacaaaatccaacgccttggtgaaattctgcgttcacaaatg

SEQ ID NO: 609251 - DNA, 157 bp, Homo sapiens
ttcaggaaaggggtgcaatccagaccccaagagaggttcttggatctctcacaagaaagaattcagggcaagttcacagagtaaagtgaaaggaagtttattaggaaagtaaaggagtaaagaatggctactctggctgggcacggtggttcacacc

SEQ ID NO: 609252 - DNA, 154 bp, Homo sapiens
tcgcgatatgattgcaaaatgtactacgaaactatggtaaccaaaacagcatggtactatcataaaaacagacctaaaccaatggaacagaataggaagcccataaataaagccttacttttatagtcaattgatctttgacaaaggtatcaag

SEQ ID NO: 609253 - DNA, 358 bp, Homo sapiens
  misc_feature (344)..(344): n is a, c, g, or t
ctgagcacagcaatttggcaatgtatcacagaaagcaacgtcacacaatcttttttggtaccccagtgcatacagaatggtgcatactttactgtagtctatcaagcgtgcaactagcatcatgtctaaagaatgtacttactttaggttgggcgtggtggtccacacctgtaatcccagcacttagagaggctgaggcaggcagattacctgaggtcagaaattcgagaccagcctggccaacatggtgaaaccccatttctactaaaaataccaggtgtcgtggtgggcacctgtaatcccagctactgaggaggctgagataggagaatcccttgaacccnagaggcagaggttg

SEQ ID NO: 609254 - DNA, 529 bp, Homo sapiens
  misc_feature (113)..(113): n is a, c, g, or t
  misc_feature (299)..(299): n is a, c, g, or t
  misc_feature (305)..(305): n is a, c, g, or t
  misc_feature (354)..(354): n is a, c, g, or t
  misc_feature (507)..(507): n is a, c, g, or t
  misc_feature (515)..(515): n is a, c, g, or t
gaggggctgagagaggaagagcagggtcagggataacactaggttccttccaaggggcctgaccagcaggcaaggtgtggggcctgagaggtggcaagctgtcaagaaagcancacaggctttgcagccaggaggacctggttcaaattctgtttctcattttctcagcctgtgccctgaagtcaagggtaagtcacctttccagaccccagttttctcgcctgtgaaatgggtgtgatgttacttatctcacacatattgaagtgggaagtatttaattaaagcacatgtctcaggcnggtaangctcaaatgaagtagttattagaagcgagctatgcacagagcttgttanccattaagtcttattgtcgctggacgctgagcactgtgacggcaaggaatgtagtcacctcacagacttctacgttcctaaggcaaggcttgatgagtccagttccttaacatcttcagctacaatccagcacagttggcttaggactcaggntcacagangtcaccagagcctc

SEQ ID NO: 609255 - DNA, 532 bp, Homo sapiens
cttgctgccggggtcttgctgccggggaggcccagatcctgagtggagggagtgctacagtgactgggcctctccctcagcaagaccccggcactccccgccaggcccagggatggggtggatgggcccaaaggcccagcacccaacacatcctttcccatgtccacattgtcaccataccatatccccattatcggttttgtataggagtaaatcgtctttccagattgcagtggacacagacccacgatctacgagccccggaccccggattctgtcatggacattgcatcgaccatagatttatctatactttaaaaaaaaaaaaaaaaaagatcaaaaatagaaaattaacatcaaaaaaaccaaaccataccgaaaaagaaacagtagaaaaaattataaaccagatcataagggaaagataaataataataaagaggaactccaaataaactggaaagaaaagaggaaaagaagaaatataacaataggggaaaaaaaagaagaaaatcactattataaagataca

SEQ ID NO: 609256 - DNA, 2302 bp, Homo sapiens
  misc_feature (180)..(180): n is a, c, g, or t
tctttttgacgctccagggaccgcagggtctgggaaagttcctggttactccggcgaccggccggccgtcacatgacatgtgagccctggcggaacgcccaagaggcttccgtagtcgggtggcaggtcacgtgtcgaaggcttgcccgcggggaccccttccaccctggctccagcgtnacatgaccggctttaagcaacatggcggctgccgtggtgcagcgcccgggctgagcgacagcaagtgcagcgggctcctaccccgggtgaggggtggcctccgcgtgggatcgtgccctcttcagcccgctcctgtccccgacatcacgtgtattccgcacgtcccctccgcgctgtgtgtctactgagacggggaggcgtgacagggcccgggtcccttctcagtggtgctctgtgcttcagggcaagctccccgtctccgggcgcacttccctcgcctgtgttcggtccatcctcctttctccagcctcctcccctcgcacaggcggatgacccggacgacgggccagtgcctggcaccccggggttgccagggtccacggggaacccgaagtccgaggagcccgaggtcccggaccaggaggggctgcagcgcatcaccggcctgtctcccggccgttcggctctcatagtggcggtgctgtgctacatcaatctcctgaactacatggaccgcttcaccgtggctggcgtccttcccgacatcgagcagttcttcaacatcggggacagtagctctgggctcatccagaccgtgttcatctccagttacatggtgttggcacctgtgtttggctacctgggtgacaggtacaatcggaagtatctcatgtgcgggggcattgccttctggtccctggtgacactggggtcatccttcatccccggagagcatttctggctgctcctcctgacccggggcctggtgggggtcggggaggccagttattccaccatcgcgcccactctcattgccgacctctttgtggccgaccagcggagccggatgctcagcatcttctactttgccattccggtgggcagtggtctgggctacattgcaggctccaaagtgaaggatatggctggagactggcactgggctctgagggtgacaccgggtctaggagtggtggccgttctgctgctgttcctggtagtgcgggagccgccaaggggagccgtggagcgccactcagatttgccacccctgaaccccacctcgtggtgggcagatctgagggctctggcaagaaatcctagtttcgtcctgtcttccctgggcttcactgctgtggcctttgtcacgggctccctggctctgtgggctccggcattcctgctgcgttcccgcgtggtccttggggagaccccaccctgccttcccggagactcctgctcttcctctgacagtctcatctttggactcatcacctgcctgaccggagtcctgggtgtgggcctgggtgtggagatcagccgccggctccgccactccaacccccgggctgatcccctggtctgtgccactggcctcctgggctctgcacccttcctcttcctgtcccttgcctgcgcccgtggtagcatcgtggccacttatattttcatcttcattggagagaccctcctgtccatgaactgggccatcgtggccgacattctgctgtacgtggtgatccctacccgacgctccaccgccgaggccttccagatcgtgctgtcccacctgctgggtgatgctgggagcccctacctcattggcctgatctctgaccgcctgcgccggaactggcccccctccttcttgtccgagttccgggctctgcagttctcgctcatgctctgcgcgtttgttggggcactgggcggcgcagccttcctgggcaccgccatcttcattgaggccgaccgccggcgggcacagctgcacgtgcagggcctgctgcacgaagcagggtccacagacgaccggattgtggtgccccagcggggccgctccacccgcgtgcccgtggccagtgtgctcatctgagaggctgccgctcacctacctgcacatctgccacagctggccctgggcccaccccacgaagggcctgggcctaaccccttggcctggcccagcttccagagggaccctgggccgtgtgccagctcccagacactacatgggtagctcaggggaggaggtgggggtccaggagggggatccctctccacaggggcagccccaagggctcggtgctatttgtaacggaataaaatttgtagccagaca

SEQ ID NO: 609257 - DNA, 2066 bp, Homo sapiens
  misc_feature (180)..(180): n is a, c, g, or t
tctttttgacgctccagggaccgcagggtctgggaaagttcctggttactccggcgaccggccggccgtcacatgacatgtgagccctggcggaacgcccaagaggcttccgtagtcgggtggcaggtcacgtgtcgaaggcttgcccgcggggaccccttccaccctggctccagcgtnacatgaccggctttaagcaacatggcggctgccgtggtgcagcgcccgggctgagcgacagcaagtgcagcgggctcctaccccgggtgaggggtggcctccgcgtgggatcgtgccctcttcagcccgctcctgtccccgacatcacgtgtattccgcacgtcccctccgcgctgtgtgtctactgagacggggaggcgtgacagggcccgggtcccttctcagtggtgctctgtgcttcagggcaagctccccgtctccgggcgcacttccctcgcctgtgttcggtccatcctcctttctccagcctcctcccctcgcaggtgggatcgtcggtgggaccggagcgcgggcgggcgcggccccccgggaccatggccgggtccgacaccgcgcccttcctcagccaggcggatgacccggacgacgggccagtgcctggcaccccggggttgccagggtccacggggaacccgaagtccgaggagcccgaggtcccggaccaggaggggctgcagcgcatcaccggcctgtctcccggccgttcggctctcatagtggcggtgctgtgctacatcaatctcctgaactacatggaccgcttcaccgtggctggcgtccttcccgacatcgagcagttcttcaacatcggggacagtagctctgggctcatccagaccgtgttcatctccagttacatggtgttggcacctgtgtttggctacctgggtgacaggtacaatcggaagtatctcatgtgcgggggcattgccttctggtccctggtgacactggggtcatccttcatccccggagagcatttctggctgctcctcctgacccggggcctggtgggggtcggggaggccagttattccaccatcgcgcccactctcattgccgacctctttgtggccgaccagcggagccggatgctcagcatcttctactttgccattccggtgggcagtggtctgggctacattgcaggctccaaagtgaaggatatggctggagactggcactgggctctgagggtgacaccgggtctaggagtggtggccgttctgctgctgttcctggtagtgcgggagccgccaaggggagccgtggagcgccactcagatttgccacccctgaaccccacctcgtggtgggcagatctgagggctctggcaagaaatcctagtttcgtcctgtcttccctgggcttcactgctgtggcctttgtcacgggctccctggctctgtgggctccggcattcctgctgcgttcccgcgtggtccttggggagaccccaccctgccttcccggagactcctgctcttcctctgacagtctcatctttggactcatcacctgcctgaccggagtcctgggtgtgggcctgggtgtggagatcagccgccggctccgccactccaacccccgggctgatcccctggtctgtgccactggcctcctgggctctgcacccttcctcttcctgtcccttgcctgcgcccgtggtagcatcgtggccacttatattttcatcttcattggagagaccctcctgtccatgaactgggccatcgtggccgacattctgctgtacgtggtgatccctacccgacgctccaccgccgaggccttccagatcgtgctgtcccacctacctgcacatctgccacagctggccctgggcccaccccacgaagggcctgggcctaaccccttggcctggcccagcttccagagggaccctgggccgtgtgccagctcccagacactacatgggtagctcaggggaggaggtgggggtccaggagggggatccctctccacaggggcagccccaagggctcggtgctatttgtaacggaataaaatttgtagccagaca

SEQ ID NO: 609258 - DNA, 1945 bp, Homo sapiens
catccatcgcgctgctcaagctccatccatccatttatccatccatccatccatcctttattgagagtaaaaagccgccaaccagaccctgggaggaagacaggatggttcccgagaactagggctgctccttggcttttagagccaggcggatgacccggacgacgggccagtgcctggcaccccggggttgccagggtccacggggaacccgaagtccgaggagcccgaggtcccggaccaggaggggctgcagcgcatcaccggcctgtctcccggccgttcggctctcatagtggcggtgctgtgctacatcaatctcctgaactacatggaccgcttcaccgtggctggcgtccttcccgacatcgagcagttcttcaacatcggggacagtagctctgggctcatccagaccgtgttcatctccagttacatggtgttggcacctgtgtttggctacctgggtgacaggtacaatcggaagtatctcatgtgcgggggcattgccttctggtccctggtgacactggggtcatccttcatccccggagagcatttctggctgctcctcctgacccggggcctggtgggggtcggggaggccagttattccaccatcgcgcccactctcattgccgacctctttgtggccgaccagcggagccggatgctcagcatcttctactttgccattccggtgggcagtggtctgggctacattgcaggctccaaagtgaaggatatggctggagactggcactgggctctgagggtgacaccgggtctaggagtggtggccgttctgctgctgttcctggtagtgcgggagccgccaaggggagccgtggagcgccactcagatttgccacccctgaaccccacctcgtggtgggcagatctgagggctctggcaagaaatcctagtttcgtcctgtcttccctgggcttcactgctgtggcctttgtcacgggctccctggctctgtgggctccggcattcctgctgcgttcccgcgtggtccttggggagaccccaccctgccttcccggagactcctgctcttcctctgacagtctcatctttggactcatcacctgcctgaccggagtcctgggtgtgggcctgggtgtggagatcagccgccggctccgccactccaacccccgggctgatcccctggtctgtgccactggcctcctgggctctgcacccttcctcttcctgtcccttgcctgcgcccgtggtagcatcgtggccacttatattttcatcttcattggagagaccctcctgtccatgaactgggccatcgtggccgacattctgctgtacgtggtgatccctacccgacgctccaccgccgaggccttccagatcgtgctgtcccacctgctgggtgatgctgggagcccctacctcattggcctgatctctgaccgcctgcgccggaactggcccccctccttcttgtccgagttccgggctctgcagttctcgctcatgctctgcgcgtttgttggggcactgggcggcgcagccttcctgggcaccgccatcttcattgaggccgaccgccggcgggcacagctgcacgtgcagggcctgctgcacgaagcagggtccacagacgaccggattgtggtgccccagcggggccgctccacccgcgtgcccgtggccagtgtgctcatctgagaggctgccgctcacctacctgcacatctgccacagctggccctgggcccaccccacgaagggcctgggcctaaccccttggcctggcccagcttccagagggaccctgggccgtgtgccagctcccagacactacatgggtagctcaggggaggaggtgggggtccaggagggggatccctctccacaggggcagccccaagggctcggtgctatttgtaacggaataaaatttgtagccagaca

SEQ ID NO: 609259 - DNA, 2126 bp, Homo sapiens
  misc_feature (49)..(49): n is a, c, g, or t
  misc_feature (70)..(71): n is a, c, g, or t
gccaacgatggcgtgctgccccgttggtgcatgcgcccggggcctgagngcgggaactagcagagtggcnnagcggggcctctaccccgggtgaggggtggcctccgcgtgggatcgtgccctcttcagcccgctcctgtccccgacatcacgtgtattccgcacgtcccctccgcgctgtgtgtctactgagacggggaggcgtgacagggcccgggtcccttctcagtggtgctctgtgcttcagggcaagctccccgtctccgggcgcacttccctcgcctgtgttcggtccatcctcctttctccagcctcctcccctcgcacaggcggatgacccggacgacgggccagtgcctggcaccccggggttgccagggtccacggggaacccgaagtccgaggagcccgaggtcccggaccaggaggggctgcagcgcatcaccggcctgtctcccggccgttcggctctcatagtggcggtgctgtgctacatcaatctcctgaactacatggaccgcttcaccgtggctggcgtccttcccgacatcgagcagttcttcaacatcggggacagtagctctgggctcatccagaccgtgttcatctccagttacatggtgttggcacctgtgtttggctacctgggtgacaggtacaatcggaagtatctcatgtgcgggggcattgccttctggtccctggtgacactggggtcatccttcatccccggagagcatttctggctgctcctcctgacccggggcctggtgggggtcggggaggccagttattccaccatcgcgcccactctcattgccgacctctttgtggccgaccagcggagccggatgctcagcatcttctactttgccattccggtgggcagtggtctgggctacattgcaggctccaaagtgaaggatatggctggagactggcactgggctctgagggtgacaccgggtctaggagtggtggccgttctgctgctgttcctggtagtgcgggagccgccaaggggagccgtggagcgccactcagatttgccacccctgaaccccacctcgtggtgggcagatctgagggctctggcaagaaatcctagtttcgtcctgtcttccctgggcttcactgctgtggcctttgtcacgggctccctggctctgtgggctccggcattcctgctgcgttcccgcgtggtccttggggagaccccaccctgccttcccggagactcctgctcttcctctgacagtctcatctttggactcatcacctgcctgaccggagtcctgggtgtgggcctgggtgtggagatcagccgccggctccgccactccaacccccgggctgatcccctggtctgtgccactggcctcctgggctctgcacccttcctcttcctgtcccttgcctgcgcccgtggtagcatcgtggccacttatattttcatcttcattggagagaccctcctgtccatgaactgggccatcgtggccgacattctgctgtacgtggtgatccctacccgacgctccaccgccgaggccttccagatcgtgctgtcccacctgctgggtgatgctgggagcccctacctcattggcctgatctctgaccgcctgcgccggaactggcccccctccttcttgtccgagttccgggctctgcagttctcgctcatgctctgcgcgtttgttggggcactgggcggcgcagccttcctgggcaccgccatcttcattgaggccgaccgccggcgggcacagctgcacgtgcagggcctgctgcacgaagcagggtccacagacgaccggattgtggtgccccagcggggccgctccacccgcgtgcccgtggccagtgtgctcatctgagaggctgccgctcacctacctgcacatctgccacagctggccctgggcccaccccacgaagggcctgggcctaaccccttggcctggcccagcttccagagggaccctgggccgtgtgccagctcccagacactacatgggtagctcaggggaggaggtgggggtccaggagggggatccctctccacaggggcagccccaagggctcggtgctatttgtaacggaataaaatttgtagccagaca

SEQ ID NO: 609260 - DNA, 1736 bp, Homo sapiens
  misc_feature (180)..(180): n is a, c, g, or t
tctttttgacgctccagggaccgcagggtctgggaaagttcctggttactccggcgaccggccggccgtcacatgacatgtgagccctggcggaacgcccaagaggcttccgtagtcgggtggcaggtcacgtgtcgaaggcttgcccgcggggaccccttccaccctggctccagcgtnacatgaccggctttaagcaacatggcggctgccgtggtgcagcgcccgggctgagcgacagcaagtgcagcgggctcctaccccgggtgaggggtggcctccgcgtgggatcgtgccctcttcagcccgctcctgtccccgacatcacgtgtattccgcacgtcccctccgcgctgtgtgtctactgagacggggaggcgtgacagggcccgggtcccttctcagtggtgctctgtgcttcagggcaagctccccgtctccgggcgcacttccctcgcctgtgttcggtccatcctcctttctccagcctcctcccctcgcaggtgggatcgtcggtgggaccggagcgcgggcgggcgcggccccccgggaccatggccgggtccgacaccgcgcccttcctcagccaggcggatgacccggacgacgggccagtgcctggcaccccggggttgccagggtccacggggaacccgaagtccgaggagcccgaggtcccggaccaggaggggctgcagcgcatcaccggcctgtctcccggccgttcggctctcatagtggcggtgctgtgctacatcaatctcctgaactacatggaccgcttcaccgtggctggcgtccttcccgacatcgagcagttcttcaacatcggggacagtagctctgggctcatccagaccgtgttcatctccagttacatggtgttggcacctgtgtttggctacctgggtgacaggtacaatcggaagtatctcatgtgcgggggcattgccttctggtccctggtgacactggggtcatccttcatccccggagagcatttctggctgctcctcctgacccggggcctggtgggggtcggggaggccagttattccaccatcgcgcccactctcattgccgacctctttgtggccgaccagcggagccggatgctcagcatcttctactttgccattccggtgggcagtggtctgggctacattgcaggctccaaagtgaaggatatggctggagactggcactgggctctgagtggcctgatctctgaccgcctgcgccggaactggcccccctccttcttgtccgagttccgggctctgcagttctcgctcatgctctgcgcgtttgttggggcactgggcggcgcagccttcctgggcaccgccatcttcattgaggccgaccgccggcgggcacagctgcacgtgcagggcctgctgcacgaagcagggtccacagacgaccggattgtggtgccccagcggggccgctccacccgcgtgcccgtggccagtgtgctcatctgagaggctgccgctcacctacctgcacatctgccacagctggccctgggcccaccccacgaagggcctgggcctaaccccttggcctggcccagcttccagagggaccctgggccgtgtgccagctcccagacactacatgggtagctcaggggaggaggtgggggtccaggagggggatccctctccacaggggcagccccaagggctcggtgctatttgtaacggaataaaatttgtagccagaca

SEQ ID NO: 609261 - DNA, 147 bp, Homo sapiens
ggatcccttactgtttatgctgtgaggctggacttgtactatgcacaccacctgctttttagcatgggtcctcaccacaagcctaatgtccgcaggcaaaaagtacaactcaggaggaatctgcccagtcacacaccacagacaggc

SEQ ID NO: 609262 - DNA, 1865 bp, Homo sapiens
  misc_feature (180)..(180): n is a, c, g, or t
tctttttgacgctccagggaccgcagggtctgggaaagttcctggttactccggcgaccggccggccgtcacatgacatgtgagccctggcggaacgcccaagaggcttccgtagtcgggtggcaggtcacgtgtcgaaggcttgcccgcggggaccccttccaccctggctccagcgtnacatgaccggctttaagcaacatggcggctgccgtggtgcagcgcccgggctgagcgacagcaagtgcagcgggctcctaccccgggtgaggggtggcctccgcgtgggatcgtgccctcttcagcccgctcctgtccccgacatcacgtgtattccgcacgtcccctccgcgctgtgtgtctactgagacggggaggcgtgacagggcccgggtcccttctcagtggtgctctgtgcttcagggcaagctccccgtctccgggcgcacttccctcgcctgtgttcggtccatcctcctttctccagcctcctcccctcgcaggtgggatcgtcggtgggaccggagcgcgggcgggcgcggccccccgggaccatggccgggtccgacaccgcgcccttcctcagccaggcggatgacccggacgacgggccagtgcctggcaccccggggttgccagggtccacggggaacccgaagtccgaggagcccgaggtcccggaccaggaggggctgcagcgcatcaccggcctgtctcccggccgttcggctctcatagtggcggtgctgtgctacatcaatctcctgaactacatggaccgcttcaccgtggctggcgtccttcccgacatcgagcagttcttcaacatcggggacagtagctctgggctcatccagaccgtgttcatctccagttacatggtgttggcacctgtgtttggctacctgggtgacaggtacaatcggaagtatctcatgtgcgggggcattgccttctggtccctggtgacactggggtcatccttcatccccggagagcatttctggctgctcctcctgacccggggcctggtgggggtcggggaggccagttattccaccatcgcgcccactctcattgccgacctctttgtggccgaccagcggagccggatgctcagcatcttctactttgccattccggtgggcagtggtctgggctacattgcaggctccaaagtgaaggatatggctggagactggcactgggctctgagggtgacaccgggtctaggagtggtggccgttctgctgctgttcctggtagtgcgggagccgccaaggggagccgtggagcgccactcagatttgccacccctgaaccccacctcgtggtgggcagatctgagggctctggcaagaaatcctagtttcgtcctgtcttccctgggcttcactgctgtggcctttgtcacgggctccctggctctgtgggctccggcattcctgctgcgttcccgcgtggtccttggggagaccccaccctgccttcccggagactcctgctcttcctctgacagtctcatctttggactcatcacctgcctgaccggagtcctgggtgtgggcctgggtgtggagatcagccgccggctccgccactccaacccccgggctgatcccctggtctgtgccactggcctcctgggctctgcacccttcctcttcctgtcccttgcctgcgcccgtggtagcatcgtggccacttatattttcatcttcattggagagaccctcctgtccatgaactgggccatcgtggccgacattctgctgtacgtggtgatccctacccgacgctccaccgccggggcagccccaagggctcggtgctatttgtaacggaataaaatttgtagccagaca

SEQ ID NO: 609263 - DNA, 368 bp, Homo sapiens
agaactggagaggcggatatgtgggtgcagattgggcggctgctccctgctactgggtggctggcgatgtagctgatcctcagcgggtggtctggtggactgctcgcgggcggagatgaccttgccatcctggactcttccacaatggtacgcacctgacgagtggtcaccggttctttcttgtactgagtcaggtgggaatacctctccctccagcaggcggcggtaggtggcactctcctgttacagccgcgtcttcacatccagcacgaatatgtattcctggttctgctgctccatctcgcagcgaaagcttgggccagctggtcctccacgcttgacaatcaggccctggatctgggacagat

SEQ ID NO: 609264 - DNA, 132 bp, Homo sapiens
attttggttcttagttgatgaatactcaacacccagttcattgttttggctgcacccacgcagtgcagctaatgtgtggcttaagaatgaccctcttctttggcctcacccaccttgggaaggtgcgcaagg

SEQ ID NO: 609265 - DNA, 2250 bp, Homo sapiens
  misc_feature (180)..(180): n is a, c, g, or t
tctttttgacgctccagggaccgcagggtctgggaaagttcctggttactccggcgaccggccggccgtcacatgacatgtgagccctggcggaacgcccaagaggcttccgtagtcgggtggcaggtcacgtgtcgaaggcttgcccgcggggaccccttccaccctggctccagcgtnacatgaccggctttaagcaacatggcggctgccgtggtgcagcgcccgggctgagcgacagcaagtgcagcgggctcctaccccgggtgaggggtggcctccgcgtgggatcgtgccctcttcagcccgctcctgtccccgacatcacgtgtattccgcacgtcccctccgcgctgtgtgtctactgagacggggaggcgtgacagggcccgggtcccttctcagtggtgctctgtgcttcagggcaagctccccgtctccgggcgcacttccctcgcctgtgttcggtccatcctcctttctccagcctcctcccctcgcaggtgggatcgtcggtgggaccggagcgcgggcgggcgcggccccccgggaccatggccgggtccgacaccgcgcccttcctcagccaggcggatgacccggacgacgggccagtgcctggcaccccggggttgccagggtccacggggaacccgaagtccgaggagcccgaggtcccggaccaggaggggctgcagcgcatcaccggcctgtctcccggccgttcggctctcatagtggcggtgctgtgctacatcaatctcctgaactacatggaccgcttcaccgtggctggcgtccttcccgacatcgagcagttcttcaacatcggggacagtagctctgggctcatccagaccgcatttctggctgctcctcctgacccggggcctggtgggggtcggggaggccagttattccaccatcgcgcccactctcattgccgacctctttgtggccgaccagcggagccggatgctcagcatcttctactttgccattccggtgggcagtggtctgggctacattgcaggctccaaagtgaaggatatggctggagactggcactgggctctgagggtgacaccgggtctaggagtggtggccgttctgctgctgttcctggtagtgcgggagccgccaaggggagccgtggagcgccactcagatttgccacccctgaaccccacctcgtggtgggcagatctgagggctctggcaagaaatcctagtttcgtcctgtcttccctgggcttcactgctgtggcctttgtcacgggctccctggctctgtgggctccggcattcctgctgcgttcccgcgtggtccttggggagaccccaccctgccttcccggagactcctgctcttcctctgacagtctcatctttggactcatcacctgcctgaccggagtcctgggtgtgggcctgggtgtggagatcagccgccggctccgccactccaacccccgggctgatcccctggtctgtgccactggcctcctgggctctgcacccttcctcttcctgtcccttgcctgcgcccgtggtagcatcgtggccacttatattttcatcttcattggagagaccctcctgtccatgaactgggccatcgtggccgacattctgctgtacgtggtgatccctacccgacgctccaccgccgaggccttccagatcgtgctgtcccacctgctgggtgatgctgggagcccctacctcattggcctgatctctgaccgcctgcgccggaactggcccccctccttcttgtccgagttccgggctctgcagttctcgctcatgctctgcgcgtttgttggggcactgggcggcgcagccttcctgggcaccgccatcttcattgaggccgaccgccggcgggcacagctgcacgtgcagggcctgctgcacgaagcagggtccacagacgaccggattgtggtgccccagcggggccgctccacccgcgtgcccgtggccagtgtgctcatctgagaggctgccgctcacctacctgcacatctgccacagctggccctgggcccaccccacgaagggcctgggcctaaccccttggcctggcccagcttccagagggaccctgggccgtgtgccagctcccagacactacatgggtagctcaggggaggaggtgggggtccaggagggggatccctctccacaggggcagccccaagggctcggtgctatttgtaacggaataaaatttgtagccagaca

SEQ ID NO: 609266 - DNA, 1800 bp, Homo sapiens
  misc_feature (180)..(180): n is a, c, g, or t
  misc_feature (1617)..(1617): n is a, c, g, or t
tctttttgacgctccagggaccgcagggtctgggaaagttcctggttactccggcgaccggccggccgtcacatgacatgtgagccctggcggaacgcccaagaggcttccgtagtcgggtggcaggtcacgtgtcgaaggcttgcccgcggggaccccttccaccctggctccagcgtnacatgaccggctttaagcaacatggcggctgccgtggtgcagcgcccgggctgagcgacagcaagtgcagcgggctcctaccccgggtgaggggtggcctccgcgtgggatcgtgccctcttcagcccgctcctgtccccgacatcacgtgtattccgcacgtcccctccgcgctgtgtgtctactgagacggggaggcgtgacagggcccgggtcccttctcagtggtgctctgtgcttcagggcaagctccccgtctccgggcgcacttccctcgcctgtgttcggtccatcctcctttctccagcctcctcccctcgcaggtgggatcgtcggtgggaccggagcgcgggcgggcgcggccccccgggaccatggccgggtccgacaccgcgcccttcctcagccaggcggatgacccggacgacgggccagtgcctggcaccccggggttgccagggtccacggggaacccgaagtccgaggagcccgaggtcccggaccaggaggggctgcagcgcatcaccggcctgtctcccggccgttcggctctcatagtggcggtgctgtgctacatcaatctcctgaactacatggaccgcttcaccgtggctggcgtccttcccgacatcgagcagttcttcaacatcggggacagtagctctgggctcatccagaccgtgttcatctccagttacatggtgttggcacctgtgtttggctacctgggtgacaggtacaatcggaagtatctcatgtgcgggggcattgccttctggtccctggtgacactggggtcatccttcatccccggagagcatttctggctgctcctcctgacccggggcctggtgggggtcggggaggccagttattccaccatcgcgcccactctcattgccgacctctttgtggccgaccagcggagccggatgctcagcatcttctactttgccattccggtgggcagtggtctgggctacattgcaggctccaaagtgaaggatatggctggagactggcactgggctctgagggtgacaccgggtctaggagtggtggccgttctgctgctgttcctggtagtgcgggagccgccaaggggagccgtggagcgccactcagatttgccacccctgaaccccacctcgtggtgggcagatctgagggctctggcaagaaatcctagtttcgtcctgtcttccctgggcttcactgctgtggcctttgtcacgggctccctggctctgtgggctccggcattcctgctgcgttcccgcgtggtccttggggagaccccaccctgccttcccggagactcctgctcttcctctgacagtctcatctttggactcatcacctgcctgaccggagtcctgggtgtgggcctgggtgtggagatcagccgccggctctggcagcagcaacactccaggncagaactgaaatgctagagtagttcctccacagcaccccactcacaccttcactattccttcctctggttacctttcctgccattggctacttatcttgagttcccagggttaatggccaatgagggacttttccaataccgtgggtgttgtacatattcttgtggacgagccctgccggccg

SEQ ID NO: 609267 - DNA, 220 bp, Homo sapiens
tgggctggggaagaggtgacggaatcctgagccccaggaaatctggtgagagggctgactctgcagactgtgacttgcttgggcacatgcttctgggggagcccttctctcctcgtggcttgcatggatgctaccatgcttcccacagaccccagtggacagggcacagacagtgctacggccagtgatgactggccatgatctccacagcggtgtttta

SEQ ID NO: 609268 - DNA, 1517 bp, Homo sapiens
cactcctgttggctccttttctctggcataccctggtgttacagtgtacgagtcggaagtatctcatgtgcgggggcattgccttctggtccctggtgacactggggtcatccttcatccccggagagcatttctggctgctcctcctgacccggggcctggtgggggtcggggaggccagttattccaccatcgcgcccactctcattgccgacctctttgtggccgaccagcggagccggatgctcagcatcttctactttgccattccggtgggcagtggtctgggctacattgcaggctccaaagtgaaggatatggctggagactggcactgggctctgagggtgacaccgggtctaggagtggtggccgttctgctgctgttcctggtagtgcgggagccgccaaggggagccgtggagcgccactcagatttgccacccctgaaccccacctcgtggtgggcagatctgagggctctggcaagaaatcctagtttcgtcctgtcttccctgggcttcactgctgtggcctttgtcacgggctccctggctctgtgggctccggcattcctgctgcgttcccgcgtggtccttggggagaccccaccctgccttcccggagactcctgctcttcctctgacagtctcatctttggactcatcacctgcctgaccggagtcctgggtgtgggcctgggtgtggagatcagccgccggctccgccactccaacccccgggctgatcccctggtctgtgccactggcctcctgggctctgcacccttcctcttcctgtcccttgcctgcgcccgtggtagcatcgtggccacttatattttcatcttcattggagagaccctcctgtccatgaactgggccatcgtggccgacattctgctgtacgtggtgatccctacccgacgctccaccgccgaggccttccagatcgtgctgtcccacctgctgggtgatgctgggagcccctacctcattggcctgatctctgaccgcctgcgccggaactggcccccctccttcttgtccgagttccgggctctgcagttctcgctcatgctctgcgcgtttgttggggcactgggcggcgcagccttcctgggcaccgccatcttcattgaggccgaccgccggcgggcacagctgcacgtgcagggcctgctgcacgaagcagggtccacagacgaccggattgtggtgccccagcggggccgctccacccgcgtgcccgtggccagtgtgctcatctgagaggctgccgctcacctacctgcacatctgccacagctggccctgggcccaccccacgaagggcctgggcctaaccccttggcctggcccagcttccagagggaccctgggccgtgtgccagctcccagacactacatgggtagctcaggggaggaggtgggggtccaggagggggatccctctccacaggggcagccccaagggctcggtgctatttgtaacggaataaaatttgtagccagaca

SEQ ID NO: 609269 - DNA, 403 bp, Homo sapiens
ttgtaggtcgaatctacaggataccccattttatctgaaggctgccctggtacagacaacttttaattttcagttctctcagagacctcagttggggttataagcttactgttgggactttcttactgagtatgtcatatgtagctttgtcaaacaagactaggttattgagcttgtcccaaactttgcctttggaccacttcttctttctgtccttgccaccagatttgttcattgggtctctgtctttcttgtctgactttccagtgtctttcttcttcctgtcgtccttgggcagcatcgcgatgcccaggggacagcagcaacgactttaacctcgctaagatgtcagacaaaaagctatttagttttaagatcactttaagttcacagcaacattgaa

SEQ ID NO: 609270 - DNA, 751 bp, Homo sapiens
tttgacaaattggctctctcaaacacacttggcttcaagcgctggtctttccaatgagtctaataaaacacgaatctctcctggcccaaaaaatatttgttcgccccctctcatgatatagtaataccatgtgttcgcgcccaaaaaacaaatatatttctgtcaagacaggtgctacactctctctcgcgacacgactctggttctcctcaacataccagagctagacatacagaaatattgcaagaaacttaaccacgcgctcacatcattcctcagcaatccttcttttgtgcgaattaatttttccggtgcctttacccggctacatcctcctgctcccctgggttatcccttctcctctgtggcggcccgttgctcttccagtgccctctggcgcccgccatcgtgtgttctccgggtgtgcaaagagtgtaccttgtgggtcctgtcggccgccccttcgttttcccgctgtctcccagcgtgcacacggcccgccggcgtcactctgtgtggcgcccgccgtcgttttttgatattcgcctctcactgtatgcccgtgtgcaaccctactgccacccacactcttggagggagtcttcttttcctatcagctgacccacttgttctgccttttcgcataaactcttgtcacccccttctccctagccagcgaccccacgggcggtccccccaagaacccacccagaatcacaatgttccaatttttaaaagaaaccatcaaaca

SEQ ID NO: 609271 - DNA, 1709 bp, Homo sapiens
  misc_feature (180)..(180): n is a, c, g, or t
tctttttgacgctccagggaccgcagggtctgggaaagttcctggttactccggcgaccggccggccgtcacatgacatgtgagccctggcggaacgcccaagaggcttccgtagtcgggtggcaggtcacgtgtcgaaggcttgcccgcggggaccccttccaccctggctccagcgtnacatgaccggctttaagcaacatggcggctgccgtggtgcagcgcccgggctgagcgacagcaagtgcagcgggctcctaccccgggtgaggggtggcctccgcgtgggatcgtgccctcttcagcccgctcctgtccccgacatcacgtgtattccgcacgtcccctccgcgctgtgtgtctactgagacggggaggcgtgacagggcccgggtcccttctcagtggtgctctgtgcttcagggcaagctccccgtctccgggcgcacttccctcgcctgtgttcggtccatcctcctttctccagcctcctcccctcgcaggtgggatcgtcggtgggaccggagcgcgggcgggcgcggccccccgggaccatggccgggtccgacaccgcgcccttcctcagccaggcggatgacccggacgacgggccagtgcctggcaccccggggttgccagggtccacggggaacccgaagtccgaggagcccgaggtcccggaccaggaggggctgcagcgcatcaccggcctgtctcccggccgttcggctctcatagtggcggtgctgtgctacatcaatctcctgaactacatggaccgcttcaccgtggctggcgtccttcccgacatcgagcagttcttcaacatcggggacagtagctctgggctcatccagaccgtgttcatctccagttacatggtgttggcacctgtgtttggctacctgggtgacaggtacaatcggaagtatctcatgtgcgggggcattgccttctggtccctggtgacactggggtcatccttcatccccggagagcatttctggctgctcctcctgacccggggcctggtgggggtcggggaggccagttattccaccatcgcgcccactctcattgccgacctctttgtggccgaccagcggagccggatgctcagcatcttctactttgccattccggtgggcagtggtctgggctacattgcaggctccaaagtgaaggatatggctggagactggcactgggctctgagggtgacaccgggtctaggagtggtggccgttctgctgctgttcctggtagtgcgggagccgccaaggggagccgtggagcgccactcagatttgccacccctgaaccccacctcgtggtgggcagatctgagggctctggcaagaaatctcatctttggactcatcacctgcctgaccggagtcctgggtgtgggcctgggtgtggagatcagccgccggctccgccactccaacccccgggctgatcccctggtctgtgccactggcctcctgggctctgcacccttcctcttcctgtcccttgcctgcgcccgtggtagcatcgtggccacttatattttcatcttcattggagagaccctcctgtccatgaactgggccatcgtggccgacattctgctgtacgtggtgatccctacccgacgctccaccgccggggcagccccaagggctcggtgctatttgtaacggaataaaatttgtagccagaca

SEQ ID NO: 609272 - DNA, 160 bp, Homo sapiens
cggcacgcgcagtgacataccttgcagttggtgtacctcctgaacccgcacatcatcagtgatggtccccacaaccacggccgtcttgtttccccggcgaggaagcttcatctgccggatcatccgggaaagggacagaggcggccggtgggcttcatgt

SEQ ID NO: 609273 - DNA, 151 bp, Homo sapiens
  misc_feature (139)..(139): n is a, c, g, or t
  misc_feature (142)..(142): n is a, c, g, or t
agcagccgctgtctccagtgccgcagcagcaggtagtgctcatagctctctttgtccagtgcttcggccttggtcccagcgctttcttaaggagcgggactcttcaccctgcacagccttgttatctttttttcatggnggnggaacaccc

SEQ ID NO: 609274 - DNA, 177 bp, Homo sapiens
aaattgccatgaagaggatgctgttggtcctattcttcataggcaaaataagaccaacagcatcctcttctatagcagagttctcatccccgtagatgctattagtctgtcactccatttggaagatgttcacctgagagatgttctggtgaaactgcttgctggcaacaactagtt

SEQ ID NO: 609275 - DNA, 433 bp, Homo sapiens
  misc_feature (78)..(78): n is a, c, g, or t
  misc_feature (160)..(160): n is a, c, g, or t
  misc_feature (293)..(293): n is a, c, g, or t
  misc_feature (368)..(368): n is a, c, g, or t
  misc_feature (370)..(370): n is a, c, g, or t
actcaactgggtgggctttccacccctcggggctccctcctgaagcaagtaagtaacccccaggttgaactcttccanggtattttcctgggaaagaaagcttaattacaaacttttcccttgaattacattaggttagaaaacatgcagcccaggcacnggtggctcatgcctgtaatcccaacactttggaaggctgaggtaggcagatcacttgagcttaggagtttgagaccagcctgggcaacaaggcgaaaccccatctctactaaaaatccaaaattagctggggngctcgtgcacacctatagtccccaggtactccggaggctgaggtgggaggatcacctgagcctggggacgtcaangnctccagtgagctgagatcacgccactgcactccagcctggcaacacagtgagacccccatctc

SEQ ID NO: 609276 - DNA, 249 bp, Homo sapiens
gggtttaaggaaagggtggggaaaaaggagagggattctaaagtttaaacgtcccaaaggggctgctttttcaaggaagcttattttgttttaaaccattaaaagatgtggtttgatccgtttatttgtatggaacaggggatgcttttaaaaaccaataatggcctatgcttttaaacaagaaagctttgtttcaaaccccaactggccctttttgtgatggggtttgaaaaaaggattccccgtttt

SEQ ID NO: 609277 - DNA, 430 bp, Homo sapiens
tgtagcagctcgcaatcctggactctaactcatattgaagagagaaaaatagcattaagtgattcaagcgtcttgcccggggaactctagaaaataaaggcactggtgcccagatgcaggtctgcatggtatgcaagcctgggcttcttcccacctcccccacagagagggcactggtatgttggagtgaagagccacgcaagacctctgtgaatgggcagagatgggccagtgacgcaacacagtaaagtgtattttggttataggcatcgtctctaaacttatgtaaaacattattaaaaaatggaaggacaacgatgaaatgatggccaaaaatatagaaaaggataccttgcatgtcctgtgaaatgcaaaggaattctaaagtgtcattatgagttacctcatggaagaaagcaaaaggtgaatc

SEQ ID NO: 609278 - DNA, 113 bp, Homo sapiens
aattttccggggaaagtaaagcctcaggaaagcccacgccttttttccaaagcctttgtttttgagaccttttaagttttaaaattaaaggccccccgcggtttttcctttga

SEQ ID NO: 609279 - DNA, 547 bp, Homo sapiens
  misc_feature (223)..(225): n is a, c, g, or t
  misc_feature (246)..(246): n is a, c, g, or t
  misc_feature (299)..(299): n is a, c, g, or t
  misc_feature (327)..(327): n is a, c, g, or t
  misc_feature (371)..(372): n is a, c, g, or t
  misc_feature (478)..(478): n is a, c, g, or t
  misc_feature (497)..(497): n is a, c, g, or t
atctatgcattaggaatttgacttccatttgatgttaaagcatatacttggctttaaggacacactaaaactattcaaagtttaattacattcagacaaagatcatctaaccactggtgctacatagggaatatttatttaattatcccttgctatctctattaatcagtttcctcaatttatccttaaaattttcctcaaatgcttagttattttattattnnntttttaaaaaattggggggcnaaggcgaaggacacagtttaaataattaagcaggcatactttttcctgtcttncctggttgattctaaattgcaggggctnccatgttaaattttagataatgagaaacaccctttggggggggnncgcggggggcttcagttttacctccataacccggggcaagggtactgggaattttttttcggcaagacccaacgcggtggttaggaagggttttgagagcccttcntcaaattttatagggccgngaagccgggagacctcccataaggatgtggttccctaggtggggtccctc

SEQ ID NO: 609280 - DNA, 273 bp, Homo sapiens
atccgggccctctacaccaagatggttccagcagctgtttcccattcagatttctggcatcggtatttctataaagtccatcagttagagcaggagcaggtccggaggacgccctgaagcagcgggcggaacagagcatctttgaagagcccggttgggaggaggaggaagaggagctcatgggcattttacccatatttccaaaagaggcaaagtttcctttggccaaattttttacattccctgaaggagaacctggcccccagagcccct

SEQ ID NO: 609281 - DNA, 341 bp, Homo sapiens
  misc_feature (77)..(77): n is a, c, g, or t
  misc_feature (113)..(113): n is a, c, g, or t
  misc_feature (151)..(151): n is a, c, g, or t
  misc_feature (277)..(277): n is a, c, g, or t
  misc_feature (310)..(310): n is a, c, g, or t
cctgtctatcgaaatccaggagttgcttcttgtgatcctgatgctggagcatttaggagttgcttcttgtgatcctnattctggagatttaggagttgcttcttgtgatcctnattctggagatttaggagttgcttcttgtgatcctgantctggagatttaggagttgcttcttgtgatcctgattctggagatttaggacgttgcttcttgtgatcctgattctggagatttaggagttgcttcttgtgatcctgattctggagatttaggagntgcttcttgtgatcctgattctggagatttagnagcagtttctgtttcaagaagcaggaactgt

SEQ ID NO: 609282 - DNA, 242 bp, Homo sapiens
  misc_feature (40)..(40): n is a, c, g, or t
tctagtgacctagagtgatcccaagcttaacgagggcttnaacaacagaaatgtatttttttatagatctggaggctggaaggttgagacaaaattaccagcagggttagctttcttcttggcttataaatggctttcctctccctgtgtcttcacatggtctttcctatttttctgtctgtgtccaaatgttctcttcttacagggacactagtattattggattagggccactcctcgtt

SEQ ID NO: 609283 - DNA, 898 bp, Homo sapiens
  misc_feature (571)..(571): n is a, c, g, or t
  misc_feature (892)..(892): n is a, c, g, or t
gcataaaactagccccaaagccactccaccttactacgcagacaatcttagccaaaccatttacccaaataaagtataggcgatagaaatagaaagctggcgcaatagatatagtaccgcaagggaaagatgaaaaattatataccagagcataatatatgcaaggactaacgcgcccgtataccttctgcataatgaattgaactagaagataactttgcaagggagagccaaagctaagacccccgagaccagacgagctacctaagaacgagctaaaagagcacacccgtctatgtagcataatagtgggaagatttataggtagaggcgataaacctaccgagcctggtgatagctggtagtccaagatagaatcttagttcagctttaaatttgcccacagaacccgctaagtccccttgtaggtttaactgtgagtccaaggaggaacagctcttgggacagctaggaaaaaagctggtagagagagtagaaatctaacaagccatagtaggctagaagcagccaccaattaagaaagcgtcatgctcaagaccactactaaaanatccaaaatataactgaagtctcaaacccaatgggacatctatcacctattgaagaactatgtgagtataagtacatgaagaactctctcgtataaggctggtcgattaacactgacgcagttaaggcaatttaataacaaagtttttactgtggaccaaaaggctgcctggggcaagaggccggaattacccgttccaaaaaaaaaaatgtgggcgccaagttaaacgtggggccagaaaagacttagacggtagtgtcaccaccgcgcgaatgtgcgtcgcatacacacacccattagatagcattgctcacatgatgnagaagc

SEQ ID NO: 609284 - DNA, 109 bp, Homo sapiens
ggtatacgtgtggaactgctgcagccatttgcctctttgtcctttagtgtaatctctccagcaggaaaggaacttagttcagtaatcttcacaattaccacacgtcata

SEQ ID NO: 609285 - DNA, 459 bp, Homo sapiens
cgtctctactaaaaatgcaaaaattaactgggcacggtggcgtgcacctgtaatcccagctacttgcaaggctgaggcaggagaattgcttgaacccagggtacagaggttgagccaagatcatgccactgcactccagccagggcaacagagtgagactctgtctcaaaaaaaaaaagcttaggatggaaaaggtaaattataacattaaaaataggtgtcgtggaagtgctttcaaaaacccgcaaataatttcatttggatttaaaccccgtacttttaaaaaacactcccaggtcggttacaaaacttaagaatgagaatatcacggccaggtatggtggctcatgcctgcaatcccagtactttgggaggctgaggcgggtggattacctgaggtcaggagtttgagaccagcctgaccaacatggtgagaccctgtctctactaaaaaaaaaa

SEQ ID NO: 609286 - DNA, 860 bp, Homo sapiens
aacctgctgcgtgcccaccttgctgatccctccctccttctagacaaaggcttcataagccagggaccttgggtttgctcacaaggcagcccctcacctagtaggcattagttcattatgtatatgtatatgtagtcctcaggttgtattccttaaatatatatagtttaaggatatgtattatatatatataaatatatatgtaattccttaaatatataattttaatacaatttttttttggagatggagtctcactctgtctcccaggctggagtgcagtggcaccatctgggctcactgcaagctccacctcccgggttcacgccattctcctgcctcagcctcccaagtacctgggactgcaggcgcccgccaccacgccaggctaatttttttttttttgggaatttcaaggggagaagggggttccaccggtgttgggccgggaagggtctcgaatcttcgtgacctcagtgatccacccaaccttgggcctcccaaagggcggggatcacgggcggtggaccaccgcgccgggccaaaacaaagttttcaaaagattcctttaataaccttttacaataacatcaaggaactataaacgatatagcaattatgtgaaagccagcagatctcaagggatcagaagctaggtactagaaagactgaacggccagcagggctggcttcgcaactccaacgcatctggacaggctgtggcaggcagcgatcagagcacacaaacacttgaaaatacccgggcagacgtcggtgggccccaaatactagagaaacatacaaaatgcccggatagaggggtgaaactgtaccacgacaagagaaagcacaaactaaag

SEQ ID NO: 609287 - DNA, 827 bp, Homo sapiens
tggggacagggtttcactctgtcacccaggcgggagtgcagggtagcctcaacctccggggctcaagcaagatcctccagtcttagcctcccaatgtaagctggggactggttaatgtggtggagccacctatgcccagctaatttcttgggtagtttttggtaaagaaagacaggggttttaccatggttggtccaggctgtgttttgagaactctcggggctcaagtagacctggtctggtctgggcctcccacagtgctgggagattggcaggtgtaggagccaccatgccgggcatagggggctggtatttcagtgaaattagaaaagtttcggaggcatcgaatgggataaatgggatgggatatatcaaatggtatgggtataaagtggggtagaatggtatggacattggtaaaatcccacagataatttatcttttggtgtaaaatagggcttttaaaactagacttgtcgtgaaccaatacaggttttttgtttttatgaggagggtgaaacagaagtgtggccctaacttttttaagtctggcccaatttcctgaatagaataattgggctttctaaattagggggaatgggggtgcccaatataagaagaagggggttattggaaacaattgagatatactgggggatacttttcaaggaagccgtgatatacactataacgagggctttggaaacacccgtttttgtgttaaaggaagttccattcttagcgaatacaggggactgtgtacccctctttatttcgctcccttaattttaaacaattatggctgacacggcatctggtaacgacat

SEQ ID NO: 609288 - DNA, 259 bp, Homo sapiens
taatgtcttaaaaatgtacaaaccctaactttaaaaatatgtttcgctttaagaaatactaacaatcttctgagccttcagcaagttgtaatcttttttttggtggagggtctgcctcagtgttgatggctgctaactgatcagcctgggggttgctgaaggctaggatggctgtggaatttcttaaaataaggcaacaattaagtttgccacatcaattcattcttcctttcacaaaagatttctttgtaccataaga

SEQ ID NO: 609289 - DNA, 660 bp, Homo sapiens
cgcggtggctcaggcctgtaatcctacgttttgggaggctgaggtgggtggatgacctgaggtcaggagtttgagaccagcctggccaagataaacacaaacacaaaattagccaggcgtgatggtgcatgcctgtaatcccagctactcaggaggctgaggcaggagaatcacttgaaccagggaggcgatgatggtggtgagctgagatcgtaccattgtactctagacggtgcaacacgagcgaagctttgacctaaaaaaacaacagcggagaaacagggtgtaactttcatccaggccatagtgcagaggtgcaatttcagctaactacaaccttagtcagctgggtcaagcaatactgccaccttagactccctagctgatttgatactacactgaatggctgcaacagagcccacagagtctacaggccttatttactatgtagaagatatactatgtgatcctataattaatgaatggatttattgatctacaacctagatgttagcccgttcacagcagcttaggcctcgtatcctacgctctgcgatgctgaagttgcctgatgacctgagtgcagcagtttgcagctggattggccaatattagcacgctaccacaatagacagtctttgatcctgcatgcttgattcc

SEQ ID NO: 609290 - DNA, 341 bp, Homo sapiens
  misc_feature (50)..(50): n is a, c, g, or t
aaaaacaggtgggcagggccagccccagggccctgggttttgaacccggnttttgatccctgttgggtttgaccggctcccccaaacaggttgcccaggctagtcccagtttccgggtgttttacaatgccggccccaaggattagggccaggattacttcgtgggcccctccattgccatttacctgttcaaccctgggggccttttcccggatttctccggccggagcagatcggttgagcagttttcaaccagtgtgggggggcccatgggggctttccccagtgtcctttttttagcccctccagtttgggccccctctttaaacggggggggttta

SEQ ID NO: 609291 - DNA, 120 bp, Homo sapiens
ttacagagatatgagctctattatctgatcaggtgcaaacaagctgcaacactccctgggcttctgaacggcaggagaagagcatctgaaatcccgcacgctgtctttgctggtgggaag

SEQ ID NO: 609292 - DNA, 474 bp, Homo sapiens
  misc_feature (13)..(13): n is a, c, g, or t
ctaacccgaccancagggattaaatataagcaaacatagatcacttgtcttacaggaaagcaactaatgctggtcccttggataagattcttcatggaagtgttggctatctcacaccaaggagtgggggtcatttaatgaacctgaagtactatgtctctccttctgacctactggatgacaagactgcatctcccatcattttgcatgagaataatggtaagactttaattgtaaaggaattaaaggttttgttcggtgcccagcttgcctttaatttctggtttgctattctctaatgagtttgttgaccttaccatttgcaccttatacacacaacacctcacacacgtatatgtgtgttcacaagtacatacatatgtatatacacacatgcatatatacacacatacataataggagcttaataagtacttttgggctgggcacggtggctcacgcctgtaatcccag

SEQ ID NO: 609293 - DNA, 450 bp, Homo sapiens
tagagtatcacgattactccgtagacgggaatgcgaatgagagaaaatggagtgagcaggagtggtgataatgaggtagacgaagaagaggaagaaggtggggatggaagaggaggaggaatgaagaaggtgatggtgtggaagaggatggagatgaatattaggaagctgagtcagctacggtgcaagcgggcagctgaagatgatgaggatgacgatgtctgataccaagaagcagaagaccgacgaggatgactagacagcaaaaaaggaaaagttaaactaaaaagaaaaaaaggccgccgtgacctatacacccttcacttccggtctcagaatctaaacgtggtcaccttcgagtagagaggcccgcccgcccaccgtgggcagtgccacccgcagatgacacgcgctctccaccacccaacccaaaccatgagaatttgcaaa

SEQ ID NO: 609294 - DNA, 2013 bp, Homo sapiens
  misc_feature (180)..(180): n is a, c, g, or t
  misc_feature (1719)..(1722): n is a, c, g, or t
  misc_feature (1911)..(1911): n is a, c, g, or t
tctttttgacgctccagggaccgcagggtctgggaaagttcctggttactccggcgaccggccggccgtcacatgacatgtgagccctggcggaacgcccaagaggcttccgtagtcgggtggcaggtcacgtgtcgaaggcttgcccgcggggaccccttccaccctggctccagcgtnacatgaccggctttaagcaacatggcggctgccgtggtgcagcgcccgggctgagcgacagcaagtgcagcgggctcctaccccgggtgaggggtggcctccgcgtgggatcgtgccctcttcagcccgctcctgtccccgacatcacgtgtattccgcacgtcccctccgcgctgtgtgtctactgagacggggaggcgtgacagggcccgggtcccttctcagtggtgctctgtgcttcagggcaagctccccgtctccgggcgcacttccctcgcctgtgttcggtccatcctcctttctccagcctcctcccctcgcaggtgggatcgtcggtgggaccggagcgcgggcgggcgcggccccccgggaccatggccgggtccgacaccgcgcccttcctcagccaggcggatgacccggacgacgggccagtgcctggcaccccggggttgccagggtccacggggaacccgaagtccgaggagcccgaggtcccggaccaggaggggctgcagcgcatcaccggcctgtctcccggccgttcggctctcatagtggcggtgctgtgctacatcaatctcctgaactacatggaccgcttcaccgtggctggcgtccttcccgacatcgagcagttcttcaacatcggggacagtagctctgggctcatccagaccgtgttcatctccagttacatggtgttggcacctgtgtttggctacctgggtgacaggtacaatcggaagtatctcatgtgcgggggcattgccttctggtccctggtgacactggggtcatccttcatccccggagagcatttctggctgctcctcctgacccggggcctggtgggggtcggggaggccagttattccaccatcgcgcccactctcattgccgacctctttgtggccgaccagcggagccggatgctcagcatcttctactttgccattccggtgggcagtggtctgggctacattgcaggctccaaagtgaaggatatggctggagactggcactgggctctgagggtgacaccgggtctaggagtggtggccgttctgctgctgttcctggtagtgcgggagccgccaaggggagccgtggagcgccactcagatttgccacccctgaaccccacctcgtggtgggcagatctgagggctctggcaagaaatctcatctttggactcatcacctgcctgaccggagtcctgggtgtgggcctgggtgtggagatcagccgccggctccgccactccaacccccgggctgatcccctggtctgtgccactggcctcctgggctctgcacccttcctcttcctgtcccttgcctgcgcccgtggtagcatcgtggccacttatattttcatcttcattggagagaccctcctgtccatgaactgggccatcgtggccgacattctgctgtacgtggtgatccctacccgacgctccaccgccggggcagccccaagggctcggtgctatttgtaacggaataaaatttgtagccagacaccaaaaaaannnnctcgtctttctctgggtggcctctgatcttgcaccccgtcttcaccccagggctcctgaagactgtgggtcattcctcagggctctgggtgagtctctgcccttctgggctgggcgactgagatgggggactgctcttctccgagtgagctggctgagtgtgacccgtgagtcacacacccatgctctncctggagcctgtcaccttgcctcacaaggcctggctgaaggttgggggttggaactgcccctttcgtacccccagacgtgtctgttataacggatccgctaa

SEQ ID NO: 609295 - DNA, 699 bp, Homo sapiens
  misc_feature (289)..(289): n is a, c, g, or t
  misc_feature (360)..(360): n is a, c, g, or t
aaatctactcttctgataaggacatcagtcatattggaataggacccaccctaatgtcttcattttaatcacctctttaaagcccctacctccaaatacagtcacactgtgagaaactgagggttaggaagtcagcaagtgagtcttgaagagatactaaacaaacccacaacacagataaagtatgcattttggagatttccaagccagagtctcccgtgaaaaaggtaaacggaagcagttattgtgcagcaaaaggaaaaagaattacaaactgaacgtatggtanggtgaaggcaaaggcaagggtaggggcaagggcctttggggtaggctgaatcagaagggtttttcaacaantaaatcaatggggaaatgcatttgttgctcccaaggaaccctgggcaccttggactctgggtactatagcatgtcaagcaaatacaagcaaagcccaaacactctggatttgcatttaaggccaatctaaaactatccgggtgtttaagtttggattttttgaagtgcaggttcattcaaagggaccaaggttcccttggtggctcaagggtgaaagttagaaccagaaaacatccgttatccattcccaagaagttttgggaaggagccttgggtaagaaaagcagaagctgctttgacccgtgaaaaatatttgactcctatcaagtttttgggtca

SEQ ID NO: 609296 - DNA, 1166 bp, Homo sapiens
atctagctagtgtcgaggtcacggttagagtgtgcgtctgctgctgtctgtagtgcggagcgcagtgagcgtgagcgcactcagatttgccacccctgaaccccacctcgtggtgggcagatctgagggctctggcaagaaatcctagtttcgtcctgtcttccctgggcttcactgctgtggcctttgtcacgggctccctggctctgtgggctccggcattcctgctgcgttcccgcgtggtccttggggagaccccaccctgccttcccggagactcctgctcttcctctgacagtctcatctttggactcatcacctgcctgaccggagtcctgggtgtgggcctgggtgtggagatcagccgccggctccgccactccaacccccgggctgatcccctggtctgtgccactggcctcctgggctctgcacccttcctcttcctgtcccttgcctgcgcccgtggtagcatcgtggccacttatattttcatcttcattggagagaccctcctgtccatgaactgggccatcgtggccgacattctgctgtacgtggtgatccctacccgacgctccaccgccgaggccttccagatcgtgctgtcccacctgctgggtgatgctgggagcccctacctcattggcctgatctctgaccgcctgcgccggaactggcccccctccttcttgtccgagttccgggctctgcagttctcgctcatgctctgcgcgtttgttggggcactgggcggcgcagccttcctgggcaccgccatcttcattgaggccgaccgccggcgggcacagctgcacgtgcagggcctgctgcacgaagcagggtccacagacgaccggattgtggtgccccagcggggccgctccacccgcgtgcccgtggccagtgtgctcatctgagaggctgccgctcacctacctgcacatctgccacagctggccctgggcccaccccacgaagggcctgggcctaaccccttggcctggcccagcttccagagggaccctgggccgtgtgccagctcccagacactacatgggtagctcaggggaggaggtgggggtccaggagggggatccctctccacaggggcagccccaagggctcggtgctatttgtaacggaataaaatttgtagccagaca

SEQ ID NO: 609297 - DNA, 254 bp, Homo sapiens
aggaaattttgttagaagttatgttaatatgataatgaattaagagtttataaatatatttttgaaaatagaaaagaaatgttttagtaataatatgataatggttgttgagaatttttgaggaatgttttgagtagttttattggttgtgtggattgtttggaattatgtggtagattagaagaatggtaaagatgattttaatttgagtatttttatatagtaatgtataaaatggaattatatttaaagga

SEQ ID NO: 609298 - DNA, 1687 bp, Homo sapiens
  misc_feature (180)..(180): n is a, c, g, or t
tctttttgacgctccagggaccgcagggtctgggaaagttcctggttactccggcgaccggccggccgtcacatgacatgtgagccctggcggaacgcccaagaggcttccgtagtcgggtggcaggtcacgtgtcgaaggcttgcccgcggggaccccttccaccctggctccagcgtnacatgaccggctttaagcaacatggcggctgccgtggtgcagcgcccgggctgagcgacagcaagtgcagcgggctcctaccccgggtgaggggtggcctccgcgtgggatcgtgccctcttcagcccgctcctgtccccgacatcacgtgtattccgcacgtcccctccgcgctgtgtgtctactgagacggggaggcgtgacagggcccgggtcccttctcagtggtgctctgtgcttcagggcaagctccccgtctccgggcgcacttccctcgcctgtgttcggtccatcctcctttctccagcctcctcccctcgcaggtgggatcgtcggtgggaccggagcgcgggcgggcgcggccccccgggaccatggccgggtccgacaccgcgcccttcctcagccaggcggatgacccggacgacgggccagtgcctggcaccccggggttgccagggtccacggggaacccgaagtccgaggagcccgaggtcccggaccaggaggggctgcagcgcatcaccggcctgtctcccggccgttcggctctcatagtggcggtgctgtgctacatcaatctcctgaactacatggaccgcttcaccgtggctggcgtccttcccgacatcgagcagttcttcaacatcggggacagtagctctgggctcatccagaccgtgttcatctccagttacatggtgttggcacctgtgtttggctacctgggtgacaggtacaatcggaagtatctcatgtgcgggggcattgccttctggtccctggtgacactggggtcatccttcatccccggagagtggccacttatattttcatcttcattggagagaccctcctgtccatgaactgggccatcgtggccgacattctgctgtacgtggtgatccctacccgacgctccaccgccgaggccttccagatcgtgctgtcccacctgctgggtgatgctgggagcccctacctcattggcctgatctctgaccgcctgcgccggaactggcccccctccttcttgtccgagttccgggctctgcagttctcgctcatgctctgcgcgtttgttggggcactgggcggcgcagccttcctgggcaccgccatcttcattgaggccgaccgccggcgggcacagctgcacgtgcagggcctgctgcacgaagcagggtccacagacgaccggattgtggtgccccagcggggccgctccacccgcgtgcccgtggccagtgtgctcatctgagaggctgccgctcacctacctgcacatctgccacagctggccctgggcccaccccacgaagggcctgggcctaaccccttggcctggcccagcttccagagggaccctgggccgtgtgccagctcccagacactacatgggtagctcaggggaggaggtgggggtccaggagggggatccctctccacaggggcagccccaagggctcggtgctatttgtaacggaataaaatttgtagccagaca

SEQ ID NO: 609299 - DNA, 436 bp, Homo sapiens
  misc_feature (121)..(121): n is a, c, g, or t
gggatccgggtggtaaatatcccccctgtattcattttttattgccatttaattggattctttctcctcttttcttctttattagtctggcctagcagtctaatctattttgttgatcttnttcaaaaaaccaggctctggattcattgtttttttcgtggtctctatctccttcagtcctgctctaatcttagttatttcttgtcttctgctagcttttgaatttgtttgctcttgcttctctaggtcttttaattgtgatgttagggtgttgattttagatctttcctgctttctcttgtgggcatttagtgctataaatttccctctacacactgctttaattttgagatggagttttgctcggtttcccaggccgagatcgcacccctgcactccagcctgagcaacagagtgagactctgtctcaaaaata

SEQ ID NO: 609300 - DNA, 976 bp, Homo sapiens
  misc_feature (180)..(180): n is a, c, g, or t
tctttttgacgctccagggaccgcagggtctgggaaagttcctggttactccggcgaccggccggccgtcacatgacatgtgagccctggcggaacgcccaagaggcttccgtagtcgggtggcaggtcacgtgtcgaaggcttgcccgcggggaccccttccaccctggctccagcgtnacatgaccggctttaagcaacatggcggctgccgtggtgcagcgcccgggctgagcgacagcaagtgcagcgggctcctaccccgggtgaggggtggcctccgcgtgggatcgtgccctcttcagcccgctcctgtccccgacatcacgtgtattccgcacgtcccctccgcgctgtgtgtctactgagacggggaggcgtgacagggcccgggtcccttctcagtggtgctctgtgcttcagggcaagctccccgtctccgggcgcacttccctcgcctgtgttcggtccatcctcctttctccagcctcctcccctcgcaggtgggatcgtcggtgggaccggagcgcgggcgggcgcggccccccgggaccatggccgggtccgacaccgcgcccttcctcagcccatcttcattgaggccgaccgccggcgggcacagctgcacgtgcagggcctgctgcacgaagcagggtccacagacgaccggattgtggtgccccagcggggccgctccacccgcgtgcccgtggccagtgtgctcatctgagaggctgccgctcacctacctgcacatctgccacagctggccctgggcccaccccacgaagggcctgggcctaaccccttggcctggcccagcttccagagggaccctgggccgtgtgccagctcccagacactacatgggtagctcaggggaggaggtgggggtccaggagggggatccctctccacaggggcagccccaagggctcggtgctatttgtaacggaataaaatttgtagccagaca

SEQ ID NO: 609301 - DNA, 651 bp, Homo sapiens
cttaacactctcatacggagattgaagcttcagctgaagtctcacccaccacgagtgacctcccccatctcaccccacttcacagtgactgaacgccagaccttccagccctggtctgagaggctcagcaatacaacgtggaatgagctccgtacaattcctccattgtcccatgggaggccatgtgagcaagcgccagagcactaagcaggagcaaggatgtggagcacaggcaggagccgatacaagaacacaagcaggatgaggggcggacacaggaagagccagaagaggacacaggacagacggagggaacgcaggaggaaggacaggggactaaggagggactgggaggctgtgtctcagctgcagacagactcagagcccaagtttcactctgaatctctatcttgctaacccttcctcttttgctccccgggtacgagaagtagagtctactcctatgataatggagaacatccatggagctcattctgatcagcccaggaaatagatgaagtgactgaaatatgtgatgagaactcctactggagaaagcataatccttgtagcctcctgcagctggcccacacagaggccttgctggtgctgtgctattcgatcgtggagaatacctgcatcataaccccc

SEQ ID NO: 609302 - DNA, 1087 bp, Homo sapiens
  misc_feature (180)..(180): n is a, c, g, or t
  misc_feature (793)..(796): n is a, c, g, or t
  misc_feature (985)..(985): n is a, c, g, or t
tctttttgacgctccagggaccgcagggtctgggaaagttcctggttactccggcgaccggccggccgtcacatgacatgtgagccctggcggaacgcccaagaggcttccgtagtcgggtggcaggtcacgtgtcgaaggcttgcccgcggggaccccttccaccctggctccagcgtnacatgaccggctttaagcaacatggcggctgccgtggtgcagcgcccgggctgagcgacagcaagtgcagcgggctcctaccccgggtgaggggtggcctccgcgtgggatcgtgccctcttcagcccgctcctgtccccgacatcacgtgtattccgcacgtcccctccgcgctgtgtgtctactgagacggggaggcgtgacagggcccgggtcccttctcagtggtgctctgtgcttcagggcaagctccccgtctccgggcgcacttccctcgcctgtgttcggtccatcctcctttctccagcctcctcccctcgcaccacccgcgtgcccgtggccagtgtgctcatctgagaggctgccgctcacctacctgcacatctgccacagctggccctgggcccaccccacgaagggcctgggcctaaccccttggcctggcccagcttccagagggaccctgggccgtgtgccagctcccagacactacatgggtagctcaggggaggaggtgggggtccaggagggggatccctctccacaggggcagccccaagggctcggtgctatttgtaacggaataaaatttgtagccagacaccaaaaaaannnnctcgtctttctctgggtggcctctgatcttgcaccccgtcttcaccccagggctcctgaagactgtgggtcattcctcagggctctgggtgagtctctgcccttctgggctgggcgactgagatgggggactgctcttctccgagtgagctggctgagtgtgacccgtgagtcacacacccatgctctncctggagcctgtcaccttgcctcacaaggcctggctgaaggttgggggttggaactgcccctttcgtacccccagacgtgtctgttataacggatccgctaa

SEQ ID NO: 609303 - DNA, 842 bp, Homo sapiens
  misc_feature (180)..(180): n is a, c, g, or t
tctttttgacgctccagggaccgcagggtctgggaaagttcctggttactccggcgaccggccggccgtcacatgacatgtgagccctggcggaacgcccaagaggcttccgtagtcgggtggcaggtcacgtgtcgaaggcttgcccgcggggaccccttccaccctggctccagcgtnacatgaccggctttaagcaacatggcggctgccgtggtgcagcgcccgggctgagcgacagcaagtgcagcgggctcctaccccgggtgaggggtggcctccgcgtgggatcgtgccctcttcagcccgctcctgtccccgacatcacgtgtattccgcacgtcccctccgcgctgtgtgtctactgagacggggaggcgtgacagggcccgggtcccttctcagtggtgctctgtgcttcagggcaagctccccgtctccgggcgcacttccctcgcctgtgttcggtccatcctcctttctccagcctcctcccctcgcaccctgctcttgccaaagttaacagtggcctcctagttgctaaacacagctccaacttcctggtcctgttcatgctaggagcctctggcactgttgacccactcttccttcctgaaactctctcctacctttgcgatgccacactcttctggctttcctcctgcctccctggctgttgcttctttgttcctttgaagcctcctctgtctgttctcactccaccccagaactctgtcctcagccccaggacctacgtactttccttgggtgactgtacccgtccttagcttcaggtgtctttggtagacacataaactcccatctaaggtcacttattcatt

SEQ ID NO: 609304 - DNA, 421 bp, Homo sapiens
gcagtacgacgtgcagaaaaagtagatgagcacagaacccctgatggcgatgcgcaagctcccaactccaggtgacagagggctagagagtcgtaccaaggccctgacctgcctgctagggcagtccccgcagccagatgggtcgtccaggcaactcagcatggaaggaacagtggccgtgccagggccctgtggagctgacacgggcggacagggcaagggcaggatggggagcagtcaggaagttccgggttgtaggggaggtcggatgactaatgggcgggttcacgtgctggtagttcacagtgcatacggacgcattcacatagggtggtcgtcccatctgccatgacagcataaccccttcgtggatgtggccaaaagacaatgtcaccgcggcttgacgcgccatcgtgcgctt

SEQ ID NO: 609305 - DNA, 301 bp, Homo sapiens
ccccccgtgagacaactttatagggttttcagtatgtaccatttttgacgcacatcttagaagacaggacattatggggctggtatcattagggtttgactgaaagtgagaaacagtattttgtaaaacatttacctaataatagctttcccaatcggtacttcccttggaattaaaaacaggaattacaatttaggtttatacgtggttttagatatgactcaatatacatagattttaactttatggttgggtattacttttttaaaggcgctcaatagaaattcaaatctcactttaa

SEQ ID NO: 609306 - DNA, 561 bp, Homo sapiens
acgtctacatacctcgtcaatgttatatttgtgatcgtcggctatgtgtgagaagggagcttagacaggattggaacttggctatcctacgtgttatgcaatcgtgctgacatacgtttgaggttgaggaacacagttaatagcatagttaatgataatggccgtgtcgggctgctctgagtcagaacaatcagaagtcggtaaagatggtagttatctatcaggaggtgccagggctcgggtgtggagcaggcctgatggagcagtggtacccaccaaggtggtagtcagaagtctagccagtcttgcaaggtgttgtgccattgggcatatcttcactcctcatagtctgcatgtgggtgcagttctttaaagatatatagccttatagctacagtagtttgcacaagtagatgcagctcttataaaccttaaaatacctgtctggtgtctacagagcatatgccattttgtatagagtcacccttccccaggccagggcctagagtcttcattttggggactttgtgttttggaagttctaggacataaagctttaga

SEQ ID NO: 609307 - DNA, 357 bp, Homo sapiens
tttaagactattccttttaattgtcaataagtttcatcaagatgtgtctgaatatgtcagtgcagtgaggctcatgcgagtaatatcagcatccaaggacgccgacgtgaatctgtcatttgaggtcaggggtttgagagcagcctggccagcatggtgaaaccccatctctactgaaaatacggagttagctgggtatggtggcacatgcctgtagtacaagctacttgagaggctgaggcaggagaatggtttgaacctgggaggtagaggttgcagtgagccaacattgcgttattgcactccagcctgcgtgacagagcaagactctgttcatacaacaccaaaacaaacaaa

SEQ ID NO: 609308 - DNA, 105 bp, Homo sapiens
tagataaaactgaaacggaaatcctatagctggagacaagagaaaagctagatgaagagtatgatatgggagctaacagatcaacgtgttcaccggaggaagttc

SEQ ID NO: 609309 - DNA, 309 bp, Homo sapiens
cgggtggtgataaatgacaactgtgaatttctcgaaggttgatgagtccgcacggctgaggattctacgtggttctcttggttccccgtggtgtgtgtgctgtgtggacggaggcctgcgcccttttatgatcaccgttcgttgagctctgtctgtacatggaccatgcacggaaggcgcccccctatgcccctgagggacggtgggaccacggcaccctttgaagaaggccttgccccccttcatctctgaagatcttcctccaagagtcgacggtgcccgtgaccctaatgtcaggctcctttgcgc

SEQ ID NO: 609310 - DNA, 512 bp, Homo sapiens
  misc_feature (9)..(9): n is a, c, g, or t
  misc_feature (33)..(33): n is a, c, g, or t
  misc_feature (216)..(216): n is a, c, g, or t
ggacaggcngagagagagaaaggagagcaggcnccatgaggaggaggaaccgaggaagataaaggagctgctgagtgtcaccgagggaagcagacggacgaaaacggccgaggcagtcccgccacatgacccccaagtcctgccagctatggcataggagaggccactccgggaaggctttggttgaaagtaagtggctgggatgtttaaacacancttaagagagaactatggccaggtgcagcggctcatgcctgtaaacccagcactttgggaggccaaggcgggtatatcacctgaggttaggattcgagaccagcctggccaacatggtgaaaccccatctctacaaaaatacaaaaaactagctggatgtggtggcacatgcctgtaatcccagctactcgggaggctgaggaaggagaatcacttgaacccgggaggcagaggctgcagtgggccgagatcgcaccactgcactccagcctaggcgacagggcaagatccgtctc

SEQ ID NO: 609311 - DNA, 174 bp, Homo sapiens
  misc_feature (63)..(63): n is a, c, g, or t
ccgtgatatttgagaggttagtaacaagattttaatctaggtcatctgagaccacagtgcccntcatcacaaacaatcctagaaaaaaattaagccaaaggagaaagttagtggaaaccacaggtctattctccatgtccatgattttcttttctgtggaaagtttcatttatg

SEQ ID NO: 609312 - DNA, 1091 bp, Homo sapiens
  misc_feature (12)..(12): n is a, c, g, or t
  misc_feature (63)..(63): n is a, c, g, or t
  misc_feature (71)..(72): n is a, c, g, or t
  misc_feature (76)..(76): n is a, c, g, or t
  misc_feature (90)..(90): n is a, c, g, or t
  misc_feature (94)..(94): n is a, c, g, or t
  misc_feature (124)..(124): n is a, c, g, or t
  misc_feature (126)..(126): n is a, c, g, or t
  misc_feature (133)..(133): n is a, c, g, or t
  misc_feature (136)..(136): n is a, c, g, or t
  misc_feature (156)..(156): n is a, c, g, or t
  misc_feature (158)..(158): n is a, c, g, or t
  misc_feature (160)..(160): n is a, c, g, or t
  misc_feature (182)..(182): n is a, c, g, or t
  misc_feature (186)..(186): n is a, c, g, or t
  misc_feature (193)..(193): n is a, c, g, or t
  misc_feature (195)..(195): n is a, c, g, or t
  misc_feature (197)..(197): n is a, c, g, or t
  misc_feature (203)..(203): n is a, c, g, or t
  misc_feature (207)..(207): n is a, c, g, or t
  misc_feature (229)..(229): n is a, c, g, or t
  misc_feature (236)..(237): n is a, c, g, or t
  misc_feature (243)..(243): n is a, c, g, or t
  misc_feature (250)..(250): n is a, c, g, or t
  misc_feature (255)..(255): n is a, c, g, or t
  misc_feature (271)..(271): n is a, c, g, or t
  misc_feature (273)..(273): n is a, c, g, or t
  misc_feature (275)..(275): n is a, c, g, or t
  misc_feature (301)..(301): n is a, c, g, or t
  misc_feature (338)..(338): n is a, c, g, or t
  misc_feature (345)..(345): n is a, c, g, or t
  misc_feature (347)..(348): n is a, c, g, or t
  misc_feature (373)..(373): n is a, c, g, or t
  misc_feature (398)..(399): n is a, c, g, or t
  misc_feature (402)..(402): n is a, c, g, or t
  misc_feature (406)..(406): n is a, c, g, or t
  misc_feature (420)..(420): n is a, c, g, or t
  misc_feature (436)..(436): n is a, c, g, or t
  misc_feature (452)..(452): n is a, c, g, or t
  misc_feature (455)..(455): n is a, c, g, or t
  misc_feature (465)..(465): n is a, c, g, or t
  misc_feature (481)..(481): n is a, c, g, or t
  misc_feature (483)..(483): n is a, c, g, or t
  misc_feature (486)..(486): n is a, c, g, or t
  misc_feature (488)..(488): n is a, c, g, or t
  misc_feature (490)..(490): n is a, c, g, or t
  misc_feature (494)..(494): n is a, c, g, or t
  misc_feature (521)..(521): n is a, c, g, or t
  misc_feature (545)..(545): n is a, c, g, or t
  misc_feature (548)..(548): n is a, c, g, or t
  misc_feature (559)..(559): n is a, c, g, or t
  misc_feature (579)..(579): n is a, c, g, or t
  misc_feature (585)..(586): n is a, c, g, or t
  misc_feature (604)..(604): n is a, c, g, or t
  misc_feature (665)..(665): n is a, c, g, or t
  misc_feature (782)..(782): n is a, c, g, or t
  misc_feature (802)..(802): n is a, c, g, or t
  misc_feature (849)..(849): n is a, c, g, or t
  misc_feature (851)..(851): n is a, c, g, or t
  misc_feature (863)..(863): n is a, c, g, or t
  misc_feature (868)..(868): n is a, c, g, or t
  misc_feature (905)..(905): n is a, c, g, or t
  misc_feature (927)..(927): n is a, c, g, or t
  misc_feature (935)..(935): n is a, c, g, or t
  misc_feature (939)..(939): n is a, c, g, or t
  misc_feature (943)..(943): n is a, c, g, or t
  misc_feature (953)..(953): n is a, c, g, or t
  misc_feature (957)..(957): n is a, c, g, or t
  misc_feature (960)..(960): n is a, c, g, or t
  misc_feature (962)..(962): n is a, c, g, or t
  misc_feature (968)..(968): n is a, c, g, or t
  misc_feature (977)..(977): n is a, c, g, or t
  misc_feature (987)..(987): n is a, c, g, or t
  misc_feature (999)..(999): n is a, c, g, or t
  misc_feature (1004)..(1005): n is a, c, g, or t
  misc_feature (1009)..(1009): n is a, c, g, or t
  misc_feature (1012)..(1013): n is a, c, g, or t
  misc_feature (1022)..(1023): n is a, c, g, or t
  misc_feature (1027)..(1027): n is a, c, g, or t
  misc_feature (1037)..(1038): n is a, c, g, or t
  misc_feature (1044)..(1045): n is a, c, g, or t
  misc_feature (1050)..(1051): n is a, c, g, or t
  misc_feature (1057)..(1057): n is a, c, g, or t
  misc_feature (1060)..(1060): n is a, c, g, or t
  misc_feature (1064)..(1064): n is a, c, g, or t
  misc_feature (1068)..(1068): n is a, c, g, or t
  misc_feature (1071)..(1071): n is a, c, g, or t
aatgtttttttntctgaggacaacgtggccaaggtcagcgactttggtctcaccaaggaggcntccagcanncagnaaacgggcaagctnccantcaagtggacagcccctgaggccctgagananaagaaantcnccactaaatctaacgtgtgnantntaggaatccttctctgggaaancaantcctatngncnaatacnatanacaagaattcccctaaaggacntcgtccnncgggtngaaaagngctanaagatggatgcccccnangnctagcccgcaccgcagtatatgaagncatgaagaacagctggcacctggacgccacatgcggnccaccancnnacagctccgagagcagcttgaaaanataaaaacccaagagctgcacatgnnacngctngcctccgcctgggnccatgggcctgtgggnactgaacctggaagancanggacctggtncccctgctcactgggncngancntnaacngagccccagcgggctggcgggcatttntcctgcgtcccagcctgcaccccnccngcacccatctntattaggacccacctgtggnacctgnngagcccactagaggggcnagggaggaaggaggccacggagcgggaggcagcgccccaccacgtcgggcttccctggccncccgccactcgccttcttagagttttattcctttccttttttgagattttttttccgtgtgtttattttttattatttttcaagataaggagaaagaaagtacccagcaaatgggcnttttacaagaagtacgaatnttatttttcctgtcctgcccgtgagggtgggggggaccgggcccctntntagggacccctngcccnagcctcattccccattttgtgtcccatgtcccgtgtntcctcggtcgccccgtgtttgngcttgacnatgntgcnctgtttgcangggnccnangcaaangtttgtcanggggttggantttgtgtgccgntgccnnccgnccnnccgccttgnnaganggaattgtanntaaccnngccannaggacnccnccgnccgnctngggggtttctccccccgaaa

SEQ ID NO: 609313 - DNA, 81 bp, Homo sapiens
gcggccgcctactactactactactgctcgaattcaagcttctaacgatgtacggggacatgccccagttgctgatctcat

SEQ ID NO: 609314 - DNA, 729 bp, Homo sapiens
  misc_feature (264)..(264): n is a, c, g, or t
  misc_feature (270)..(270): n is a, c, g, or t
  misc_feature (278)..(278): n is a, c, g, or t
  misc_feature (281)..(281): n is a, c, g, or t
  misc_feature (396)..(396): n is a, c, g, or t
  misc_feature (528)..(528): n is a, c, g, or t
gacccgcggtttgctatggcgatgagcagcggcggcagtggtggcggcgtcccggagcaggaggattccgtgctgttccggcgcggcacaggccagagcgatgattctgacatttgggatgatacagcactgataaaagcatatgataaagctgtggcttcatttaagcatgctctaaagaatggtgacattatgtgaaagcttcgggtaaaccgaaaaaccacacctaaaagaaaacctgctaagaagcaataaaagccaaanagaagnaatactgnagnttccttacaaccagtggcaaagttggggacaaatgttctgccatttggtcagaagacggttgcatttacccagctaccattgcttcaattgattttaacgagagaaacctgtgtngtggtttacactggatatggaaatacgagaggagcaaaatctgtccgatctactttccccaatctgtgaagtagctaataatatagaacaaaatgctcaagagaatgcaacattgaaaagccaagtttcaancagatgaaagtgagaactccaggtctcctggaaataaatcagataaacatcaagcccaaagtctgctccatggaactctttttctccctccaccaacccccatgccagggccaagactgggaccatggaaagccaggtctaaaattcaactgggcccacaactgcgcgcggcgaaccacaaaagcccactttttatcatgg

SEQ ID NO: 609315 - DNA, 871 bp, Homo sapiens
ggagaaataggagcgcgcaggcgcgaggtgcggatcgcagaacgggagtagcggagcgggacccgctggaatcatcatccaggacgtgccagaaaccacaagaaaacatggggagggttttcctcacgggagaaaaagccaattccatattaaagaggctacccaagagctaatgggtttttttgaagaaataagacagggcaacgattgagcgtgagtgcaaagaagaattctgtacatgtgaagaagcaagagaagcttttgaaaataatgaaaaaactaaggagttttggagcagctacacaaaagcgcaaaaggggagagtaaccgaggaagtgactggtgtcagttttaccttacctttccgttagtctttggcctcttcatgatcctcctgtgtcattttcctaatctggagatgcttcctaagaaacgaaagctcgtagacagacagtgactgaagggcacattcctttccctcagcaccttaatattatcagcccaccccccacagatgaagtgttggaccgcagggattgtctcaggttctgggatatgtagtgggcgcccagattccgttctactcggctgttccattgtgatcccgggcagctatgaggaagcgaaaggcaagtgaactggcggggagtggacagaacttggttagacccccccaaagttggggaatggcctccactcaggatggagtcatgggctgggccccctcagtacgggttttcaaccactttgcaccaggtacattgttccactacgagacataggggccgatcccaagaatggggttgaacaaagccagggggtgcgacaagcgttgggacgtttaaaaacgggagcgtgtcttcgattaggt

SEQ ID NO: 609316 - DNA, 384 bp, Homo sapiens
gtctgtaggccatcgagtcagcagccgtacgctgtcgctgaggaaggcaacagaggtgattgccacacgatgatgttgtcagtgggagtagatgacggagctcctgatcggtgccgcgaggtcgaatgaggcgggcacgtggtcgtcgatcagagccggtggtcgaatggcgtatcgcgtttgggacagaaatgccactgcagttgatgtctgattcatggccgatgaaggtctgtcggcacatggaatcccgcacgtcccacagcttgatagaggcatcacaggcgcctgacacaaacgtgcggccatcgggggccagggacagggacatcacatccccactgtgtccagcaaaacccactgtccgctggcctacagcacatg

SEQ ID NO: 609317 - DNA, 354 bp, Homo sapiens
ttcagaggatcctacaaagaaagaaaaaaaaaaacatattgggtggacatcagaggtcctggtccgtaagaaaatatttttggagaaagaaagatgctttggttcagggctacggagctgccctcaggcagtcactgaggatgcttttggtagtttaagaagctaagacatgagagaaagggcaggagtccggcccctcctcagagaaaatctgagcagcaaattagggatttccattccattgggcaagtgaggtccttttttttttttttattttaaatatcacgggggctgggtgttaacggggttaactcgtttaaccaacctcgaggaaccagacagggattgtggggg

SEQ ID NO: 609318 - DNA, 872 bp, Homo sapiens
caatttgcatgctttttattactttctcttgcctaattattctgagtagaaattccagtgctttggtgaatagaagtggcaggaagggatgttgctatcttattcctgatcctagaggaaaagattttagtttttcaccattgagtatgatgttagctgtgagcttttcatgtacaatctttatttactgaggagtttccatatattactaattctttgagtctttttattacaaaagatgttcatctggctctggaaccagataaatgttgacctgatagaatggattggaatgtccccttctggtttttgaacattttggaatattttgcggaggatcggcattaattcttcttgaaatgtctggtaaaattctccagtgaagttatctggacctggaacttttcttacccgggggggtatccgattactggttgaatcttcttactagttacaggtctctttggatccttcatttctccgtgattcagtatggtggtcagtgtctctaggaatctataacatttattctaggttgaccagtcttgtggcataccggtgctcacattagtctcttgtaatctttcttcatttctgtggcaatctgtgtacctgtcaacctctttcactctactattccagtacttcgacgaatttcctccttccccccttaatataagctcataagttctcaacaactggcaacttgatccttccatacaaacacgctcacgagtgtgcttctctcctcgctttttctcccgtgcgcaatactctcgtgcacactcttgcctcaacctcgctcactctacccatcccctctggcatgggaagtggcactcacctccttccaccccccgcaaagccgcacg

SEQ ID NO: 609319 - DNA, 780 bp, Homo sapiens
gtgccggtcagggtgtgtggagccgcctagtatgggggtctggagctaatcacgtgtatgacttctcaggtgtcaagtacgggtgaaacatgctggtaagcttgaaattaccatgacagtggaacaccacagaaagtcagacaaatagtataaaccggaatcgcgtctgcccctgtcctagacccgtggagccgggtgttgaagatatttatccagtagatcgattatgcactcgcccatccatatatgtactgcccagaggaaacaggaaatacgtcctttagcatagtaactcatgtcattgtgccacatgcactccgtgttggaattctctgttggtggtttttcatctaaactcagagttataagccaatggatagggtcacaagcctctatgtgatcatgctcgtgtgcatggagcgatagtggatacctagtgaatctttgtacatgggtaggtaagagatgggttgggtggatgagtagatggatgggtgagtcatactgtgtcatttaataagttgattggggtgatggcctattaagatcccgccttttgcaaataatggaagtacttaagactatgcagtttgttgagacttataaagcatgcggaggagttccggagctggacagaggtctacttaggtatgggtatcaggattatcttctaggtatatgaatataagtgtggggtcctggtatgagggtgaaatgacggttttggagggaacaggcagatggccgggggtgtggacgtgggaaaaattcccaggggtt

SEQ ID NO: 609320 - DNA, 451 bp, Homo sapiens
  misc_feature (32)..(32): n is a, c, g, or t
  misc_feature (439)..(439): n is a, c, g, or t
acccccttataatatatttttcccctacaccntaccatcccccttgataaagtttaatttataaattagggcacagtaagagattaacaataataacaacattaagtaaaatgagttaccttgaacgcaagcactgcaatacccataacagtcaaactgattatagagaaggctactaagtgactcatgggcgaggagcatagacagtgtggagacattgggcaaggggagaattcacatcctgggtgggacagagcaggacgatgcaagattccatcccactactcagaatggcatgctgcttaagacttttagattgtttatttctggaatttttcatttaatgtttttggaccatggttgaccatggttaactgagactgcagaaagcaaaaccatggataagggaggactactacaaaagcattaaattgatacncacctttttaag

SEQ ID NO: 609321 - DNA, 922 bp, Homo sapiens
gtttttcacgccggccctatatgggggctggccctcgtgaccgcgctgttcccccccgaggtttttggcccccgccaatgggcccccccatgcgcttgtgccaaggaaggtttcaccaagcattgggcccacgaggatgtggaccacatgggggtgaacccacaggccgtggctgcggaccccgcacccccgctggttattagggcattctacggcccgatctatgttgacaccgcgcccccatcggtctttcatggagcgccttccctcggtgtagggtgctctccccccccagcggacattaatctggcgccgccgcctacatcccgggtgaccataccacgcccgggtttgctccaacaccgttcaccagcgtccctgaagggttgttttgaacaaggtgctcacgcaagaaaaaacaccttgcctataccaaagagaccgcgtaatctagaggattctccccgcggttgctcctgactgacgacaaaatatttgggggcgcacggacccacttaaagacagcccttctcgtgatacggccgagagaacacccaccacaccccttgtgaaaaagaattgccacccctcccgggcccgtttttctcccacccgctacaacttcccgcagacccaaattacatatccctccccaccacccctttgtaccaagactcttctatataatgggaccccttacccccttccccctttaaactgggaacataccaacatgaacagcccaacaccgcgaggactcccaacctctctccccccctttatctttggtcactactgaacgccttgtatctggccccctatatataaagaatcatctcttgaaaccccctcctgagtcatacacaatacaaaatcattcttcccccaagggaccccaaaagggcccacagcccccaaaaca

SEQ ID NO: 609322 - DNA, 325 bp, Homo sapiens
ctagttttagaagttcatagcatcaacagcatggggtgcaaaaaaaaaaatctacattaaaacccttggtgggaaggcttaacgcttccacagaacagaaactaaaataaccggttatacaattagtcacaaatacagtcctcgagtttttggcccatacacatgagtattggtctaaaacatgtcttcttggtagcagctaggcccggccaccacggtgctgggttgagttcacaaatctgtggtaaccggtagcttcccggtcacttctcgggctctcctctccggctaagcttggtttcctaattaaaatcttcggccacgg

SEQ ID NO: 609323 - DNA, 253 bp, Homo sapiens
ccagattaagagatgagatgggaaagttgctgagacagaaagcctagggaaactttaggctagatacgaaattcacacagtggaaatggcacggactctggggagactggtgaaggtcctcagccattcagcaccatgcgtgacgagctctgcctcgtggatccgatccatcggtgtggttatgccttgccaccgctttctcgtgggtatccatcctatagtcgtactgatggccatgccagccatggtctcg

SEQ ID NO: 609324 - DNA, 189 bp, Homo sapiens
gccgagtcttcgggcagctgctgtgccagcatctgctggtcatttcgccctgacagtcccaaccagaaccctgggacttgaatccagagacgtgcgtgcaggaacccgtcaacggagctgtgaattaagaggtttcctcgtttaaacctgtcttgttggggccccagatatcctcacctcagggcctcc

SEQ ID NO: 609325 - DNA, 210 bp, Homo sapiens
ggaaaaaaaaaaaaaaaaaaaaaaaaaaaaaaaaaaaaaaaaaaaaaaaaaaaaaaaaaaaaaaaaaaaaaaaaaaaaaaaaaaaaaaaaaaaaaaaaaaaaaaatttccccgttttaataaccccttccctttaaaaagggggaaacttttaaaattaaccttgaggctttaaaatttggaccttgccctttttttaaaacctgggaat

SEQ ID NO: 609326 - DNA, 756 bp, Homo sapiens
gaagaggataatcgcagcgagaccgcatcatctggatatgcttcaggtcaacaggtaacagatgaaccgcctctggaggaacacgtgcagggcaacaaatgaaagtctacagctggtaaaccatgaagcaaattctgtggcagtggatgttatgcctcatgttgacaacccaacctttgaaggaagacgaaactcctaatcaagagactgctgtcgtagaaattaaatcttcaaaatctgtgtaagtagaacaacttgaaccattagtaataacagaactgccaatcagggcctagtttctattactaaagtgggagtaaattgtaataaaataacgagtgactactgaaatgtgctcagatgactaatattatgctatagtctcaaactggctggaacaatagtttaacctgtgaggcttttttccacaaactcatgataatatttttcataggcaagtttcctctcagtagtgataacgacattttgagacattcaaaactgtcttcaagaacgtcgcgtttgcatttgataacaattgttcttatagaaaacatgttgcttctaaaatgtggagtagctgtaaatcgcttactccatgatagtatcttaactgaaaaatactacttcttcgccttggccactgtgtcaggttcttctccgggctatatggtccgaaggatgtacccgcagcattaggcagaccttgaagcaataagcggtagtactcaaagttccacaacctctactccaaca

SEQ ID NO: 609327 - DNA, 164 bp, Homo sapiens
gcttattgggtgcatgcatgtgtatcaggaagttaaagaaacacatataaaactcccaggaataaaggtgagcacagaccctgtttaggatcaagtcagttcctggagcctgaatgatgactgctgaatcacgggaagccacgggtctgtacccacaggctgca

SEQ ID NO: 609328 - DNA, 110 bp, Homo sapiens
taggtacttaaggatccggaggaacatctaagccatacagtgaggagaagcaacagagcctgtctgtcccatgagcggagtctgtcctctgctcttctgcagtcaggtca

SEQ ID NO: 609329 - DNA, 682 bp, Homo sapiens
agagaactagtctaagttttttgttattgtttttagtaaaaacaggtttcaccgggttagccaggagggtctcgtgcggacttggtgatccgcccgcctcggcctcccaaagggctgggattacagggcgtgagccaccacaccgggccccggcacgttatcttttaaggaatgacaccagttccgtgggcttcgtgaccaaagaaaaaagtgtcacaggagacttgtgaagaggcagacagggaggggtgggtggcagcaacacgtgcagcgtgcttcgtggatgctgcgtgggggtgctctccggagcggggtggtgaacagcgcacttcaacagtgagcagggcgccgtggctccgggtggtgtcctcacttcagggggtgcaccgtgggttgggggaagccagccttgggggcaggaaaccagctcagaggagggtacccagctcagctgctggcaggagccaggtttttacagccataaggggggttaagaaaaaacacgttctgcaagaaactctcctacaccgtcgggagaacgggggctcctatgctggggatagagcttcactcaacggggagatgggggtggacgggtccctgaaaagcgggccttgcagggccaagtggaggcctcagggcctaacccagggcctctgaaagggggtgtgcagcaagggac

SEQ ID NO: 609330 - DNA, 619 bp, Homo sapiens
  misc_feature (361)..(361): n is a, c, g, or t
atgacaaggcactgggcactggtctgcacgtctgagcttggcgctgtgtagcagcgtgaagggtgtgcaggcgtgcaggactggagttcatctccagaactgagagagggcctcgggcatgaggcatccagtgctaggcttggacaggtacagcggagaggtacggagtgcgtgtgtgcagcgcctggtgggaatgcggagacccgtggacagagcttgtcagagtgtcctagagccagggggaactccaggcagcgcaaattgtgccctggatgttgagaagctgcgtaacaagtactgagagaacaaaagcttgtgggtcagcaggccccacaaagatgttactgcagacaggatcggncctgggagagaccgaggctccaggtgactcctatagcaagccggtgaaggggcgggtctggggctccagttcaggaatacatagtcagctgcagccactcctggatgttcacctggatttgtccagtgccatctttgtcaagagatttgaaggcacgaaacattgcgtccagcctgaccgagcagctgatgaagtgtcaaaatccatgttccactttcatctgagtagcgtcgcaaatcatgtaatagagatgtcatc

SEQ ID NO: 609331 - DNA, 313 bp, Homo sapiens
aggttttagtttacttagttaatccttaggtttggacattacaaggagacaatgggggtgaccatagcaattttagctgataaatgtatcagaaactctttcatcattttctgtcccctcctatcttaggctgaccggttccctgatgtgttacctgcttctgctactgatccaaactgcagacttctcattcatcccaaggcctccagcagtatccatgggaatcagctctaaaggaccagacacgtttccagcccttcatctggtactagggagagatggagggtatctgtctagtgatgaagaacaactg

SEQ ID NO: 609332 - DNA, 200 bp, Homo sapiens
tgggccctaagacccctggcagaacccagcctttgctcacacccgccccagcttttgccccggcttcagtcagggccaggaggaacacgtgaaggagaaaaagaaatgcaggaaccgcggggctcccggttccttgggaaaagggtgcccattggacctttggccctggatgagccaataaaccaaactctggcccctca

SEQ ID NO: 609333 - DNA, 276 bp, Homo sapiens
  misc_feature (20)..(20): n is a, c, g, or t
  misc_feature (23)..(23): n is a, c, g, or t
  misc_feature (25)..(25): n is a, c, g, or t
  misc_feature (29)..(29): n is a, c, g, or t
  misc_feature (55)..(55): n is a, c, g, or t
  misc_feature (57)..(57): n is a, c, g, or t
  misc_feature (60)..(63): n is a, c, g, or t
  misc_feature (150)..(150): n is a, c, g, or t
  misc_feature (169)..(169): n is a, c, g, or t
  misc_feature (180)..(180): n is a, c, g, or t
  misc_feature (183)..(183): n is a, c, g, or t
  misc_feature (188)..(188): n is a, c, g, or t
  misc_feature (225)..(225): n is a, c, g, or t
  misc_feature (244)..(244): n is a, c, g, or t
  misc_feature (246)..(246): n is a, c, g, or t
  misc_feature (269)..(269): n is a, c, g, or t
  misc_feature (272)..(273): n is a, c, g, or t
tcttcaaaaaaatgcataanagnanttcnactcatgtgcatgccacacatttccntngcnnnnccaccctgccccacgcctctacaggcacacatatgtcacacaccaaagggactccttcctgtaactggggaacagaagtgtaaaagnatccatccaagtggccacngataccagaantanccaantgcatttacgctgacaaaatcagtcaatttacatgcncaagggggggcgtctgcantnggggcttggggcggagggggttnggnnggg

SEQ ID NO: 609334 - DNA, 1081 bp, Homo sapiens
taaaaaaatttattaattaaaaagggggaaataggtgggagtacccttttcttccccaacaaaacaaaatcttaaagagccaacagcaaataaaaaaaaaaaaaaaaacacgcggggcgcgggttccacgcggggaaccaccccctgtgacgtgggagagcaccagagaaccccgccacccgcccggagggagagcggggggggcggccgggccccgcgggggggtgtggcccacaaagaaacccccacaacacagggtaaaacgcgtcgggatataaaaacaaaaaataaaacgccccccatgtgggcgggggcaaagaggaaaaattgtggcacaaaaaaaggggtggggcgcgggaggagaaaaaagaggaaacccggcggcgcccctctctcaaaaaggagggcggtgtcgcacaaggtggcccccccccagggccgcccccaaaaaaacccccgcggtgaggggtggggcccccccggagggagtccacgaggagaaagccgtggggaaatagtaagcagggcggggggaaatcacaccttaaaaataacaatgtgagggggagagggggcgccccaaaaggccggcaaacccccccggggggggaaccccccccgtcggggggccctcaaaagggccccccgcgggagagaaagaggtccaaaaaaaaaccccttgtcagaattcccccgggacagaaccacccgagacaaaacattaatcccgcggtggaacacatttctgtgtgcaataacaccccccggggagagaaatcctaatcaaaaggcggggggcgcacaagccgagaaaaaggcacccccgggacaaataaaagggcgggacggaagaacaaccacagaaacaaaacccccttacgtacttccccgtaaataaccctccgaggggaggaaataaccccgagaagggtgcacaggcgggcaaactgagagcccataacccaaattgttccccggggcaaaaaacttgtcgggggacaaaaagccccccgtttaataaaggggtgaccctaaaaacggcacccttaaagcccgttctccccggggagactaattcaac

SEQ ID NO: 609335 - DNA, 201 bp, Homo sapiens
aagaggggctagtcagctcaggttggtctagagacaggtacacagcagataccattccaccttactctctaaagaacagggcagcacacatataatcctttcctactttactaatgtattccttatgtggtaccagcaatggaggacaggcagaattaacccctgccatctagagagaatgttgttattacccgtaaaact

SEQ ID NO: 609336 - DNA, 839 bp, Homo sapiens
gacttacagagtggggacgtccgggttcgggagcgggagtgctcgtgtgccagcgactaaaaagagaattaccatatgggtgatgttgagaaaggcaagaagatttgtatatatgaacgtgtcccagtgccacacggcgcttgataagggaggcaagcactagatgacttgggccaatatctccataggtctcttttgtcgcggaagacaggtcaggcccctggttactcttacacagccgccaataacgatcaagggcatcatctgtgggagaggatacactgatggagtatttggatgaatcccaagaagtacatccctggaacaaaacttgatctttgtcggcacttaagaatgaaggaacgaaagggcagacttaatagcttatctcaaaagagctactagtgagtaataatgggcactgccttgaatttattaccataacagaagtgtctcatgactttcttatgtgtagccatcctttagtagatctcatagcaccagaagtcagatcatgagtgactggagcgaatatcaggtggtggcagtcctgattgataattaagactgctgtgtggttaaatgatatgttcatgttgggaaggtttaatagtaactccaaattggggacatgttttctctgtttactcctttcaaagatatgataggcttcgtaatgatgttcctgttttgcacgattgggtgtgctcttagacttctggggatgtatttagagtttctacgggccgtcacatttacacgggggtggtccggtttaacacgaatgccggttgggacggctggctagggaggggaaaaaggcggtcgtgccattacca

SEQ ID NO: 609337 - DNA, 437 bp, Homo sapiens
  misc_feature (39)..(39): n is a, c, g, or t
tggggcctttaaattccccccaagggtttccaacacccnaagtttcctccttagaaagaatactcctaagatgcacctaaactttcccccattcaccttcctgtcctaggcaggaagattcctactcaagttaagaagcagtgttgcccagatgcagtggcctcactccctgaaattcccagcaatttgagaggccaaggcaggaaaattgcttgagctgaggagttcgagaccagcctgagcagcatagtgagaccctgtctctacaaataatcaaaaattaaccagacatggtaatgcatgcctgcagtcccagctactcagaaggctgaggtgggaggatctcttgagcctgagaggttgacgctgtagtgagccacaattgcaccactgcactccagcctgggcaacagtgcaaaaccctgtctcaaaaaaaa

SEQ ID NO: 609338 - DNA, 278 bp, Homo sapiens
tggccggctctctacctcagaggtcggggcactccagccctgaaagccccaggtgtacccgaatgggcagcctctcactactcttgtctgggctaaaaggaatctaatcgggtggagggtagagaccctgagacagggggaggggggggggacggccaagccaccctaagacctggggaggacaactcagagagggtcttcgtggctcagtcagtcaagttcctcggagatctggctcggcctcacctaccccagggaacttccagggtagagagccg

SEQ ID NO: 609339 - DNA, 373 bp, Homo sapiens
ccttccttggggttggatgctctcatgcaattatttagtactgttcctgccttttagttcctgatgtcacagcccctaagtctacttagctagtgtctgcatctccacttggcatttgctaaaaccttccatgtcgagattcagctagtggccaacagatgctttgccaggagccctttatcagtttctcagcatcttaacgcatcttgcattgcaccctggatttgtatacattcttcctgatcccatttgtatttttccgtgatctaaaccattgtgcattctatagtgcatatctgtatattgtgcctgttcacaggatcgtgagcactgttagcttatttctctttggatgtttgttattattatcagg

SEQ ID NO: 609340 - DNA, 459 bp, Homo sapiens
ccccgtattactctttgcctgcatgacaggcttttatttggtgtgcagaaatcaaatatatgtttatctcactgtataaatgagaagctccctccattttcactccatgtctttttattattcccctctttcttctccagtactgtgcattttttatgtttttttgttttgtgaaattccactggcttaaactaatccattttggcatattttacaaattctagtatcttagaattgaaataaagaaggacaaaagatagtaaaaatgtgactgagagagagagagagagctgtttaatgccatattattaaatgcaagtcatttcttagaagagattctgcatttcattgtaagagaaaaagcctttgatgcgtcaattatcttttgtataccagtgcatctttggatttccacagactcatttgaattgtactgaaaaaataaattcttatagggta

SEQ ID NO: 609341 - DNA, 234 bp, Homo sapiens
gtgaatgagactggatgtagagacatagggtcacgtacgagacttctggtcagaggagagagactgaattggactaaacccgtcctctgttcccagcacgtatctcatattgccctcagtcactgaggaagtcccccggaggatgggagaggcacattcccttgggacagaggctacaggttggagctttttttcccctgtctcctaatcccattcccaccattgcctcgtgcg

SEQ ID NO: 609342 - DNA, 450 bp, Homo sapiens
  misc_feature (67)..(67): n is a, c, g, or t
  misc_feature (102)..(102): n is a, c, g, or t
  misc_feature (252)..(252): n is a, c, g, or t
tagaccactgttcgtgaccgggagatgcctgaagctttggagtttaacctttctgccaatccagagncaagcacaatattccagaggaactctcaaacagangctttggagtttaacccttctgccaatccagaggcaagcacaatattccagaggaactctcaaacagatgttgtagaaataagaagaagcaactgtacaaaccatgtatctactgtgcgtttcagtcaacaatacagcttgtgttcgacnatattccttgatgacagcacagccattcagcattatcttacaatgactataatatctgtgaccttggagatacctcatcactatcacactaagagatgcagatagatcattgagcatacctgatgaacagctacactcatctgcgacaggtatcaccatgtagaccaggatggtctgaactcgagacctcggatccac

SEQ ID NO: 609343 - DNA, 1130 bp, Homo sapiens
cgggtgtgttccacgcggccactgatggtgtgctcgcctcctggtgttgtgctgtgaggggcgccgcggggtgacccccccatggttgtcgtgtgctcccgcgggggggcgccccccacagactctggggggagccccccttcttcctgctggagcatggtggtggtcctccgccctttattaacacccccccttctttgtgtgggcaccgccgccgttttttgtgggggggctctcccccgtgtggctcctccggaggagaagattgggttgtccccacaacacgggggttttatggccgcgcgtgctgactattttggtcctccccagggccacttgtgtgggccccccccttttcgctccctcccccccctcctctgttgtggagtggccccccccccgcgtggtgcgtcgtcgccccgcctcttatatacatcccgcgcggtcttttttctccggcgcatatttttcgtaccacccgggggttttttctgagagtatttctcgcgacacactccttgcggcctcccctgtgggcgggtgggttctctcgcgagttgtgtcgcccccccttttttccccccgcgaggcgtcttgcccggcgctcacagggccacacaggagggtggcgctgtggtgtgaggatttttctcccgcgcatccctccacaggagggccggctccggggcggtgcactcgcgggaactatcttctctccgcgcgggttttctacccgcggaaaattcacacgcctcggtcccccgcgcggtgggaggccccaccaccccaggttgtttctcttcctcgtgttctccctcgagggggacaccctgttggccctgggggggccccccatctgtcccacgtgtgaccaccccggcttccacagagaggattcacactctgcccgttgccctcttggaattgtggggacaaccactgtgggggccccacaaaggtgcaccaatttcgcaaggaggaactccccccagttataactctttgccgcagaagcccaccctcgtgtgcccccccgggggggcgccccccccccccccggggggttttttgagaaaaaattttttttgtgtttttttccaaaaaaagggtaagccccccccctgtggaca

SEQ ID NO: 609344 - DNA, 211 bp, Homo sapiens
  misc_feature (150)..(150): n is a, c, g, or t
  misc_feature (193)..(193): n is a, c, g, or t
  misc_feature (211)..(211): n is a, c, g, or t
gcaagggcttgagtggctggggggaatcatccccatgtttggtccagcgaactacgcacagacattgcaagacagactcacgattaccgcggacgagtcaacgaagacagtctatatggaactgagcagtctgagacctggagacacggnccgcttcttctgtgcgaaacatgactactatgacaccagtggntaatttccccttgacttn

SEQ ID NO: 609345 - DNA, 179 bp, Homo sapiens
taatcacaaggtaagtgtgtattcaatggtcttagcatattcagagttgtgtgaccagtcgctacaggtgacttgtaggacgtttttatcacgtgctaaagaggagagctcaatctgttcagttcctcccatcccgaagcaatcacgtaatctacttcctctatatggagatttgctta

SEQ ID NO: 609346 - DNA, 794 bp, Homo sapiens
taccacgtcctactgtagcttgttcgcggtcacacttgtggtggggtgacgactccaccccacccgcccgcgctgtgttttgtagtagctcgctcgcgtgtcggtcgtcgaatcttctagttttccccgcagcggggtggttggcatacccatgttcggtgtcttccgcccccccccccctgtcgttggtttcatcatgtgtgctggccgtgcgtgccgcgtgtccctactcacacgaggatccagccgcggacccctcgtgcgggtgaggtctccccttctttggtgtggccgctttccttcactccggcggtgcgcttccaccacctacaatagtgtctgttgtgtcgcccccacccgatcgtggtgtgttctctccccccttcttcgttctccgccccccctccccgtggcggaccccctcccttcggtgggtgggagccccaccagttagtctgtttctcacgcgctgagatagagacgcgccccgctgctcccctccttctcctctcatatctgcagctactcccccaccagagaggagactcgttttttctctctgcctgtggtgtgtgctctcttatccttctcctcttgcggtcgggagggctgtccgccctccttgttgctgccgccctgccgtcagccccggctgagtgccggcggcggacagcgactgacgtacacgatcaccctcccccgcgccccccccccccccccctctgggggggggcccccccccccccccccccccttttttttaattattttcccccccggggtttcccccccca

SEQ ID NO: 609347 - DNA, 476 bp, Homo sapiens
  misc_feature (87)..(87): n is a, c, g, or t
  misc_feature (167)..(167): n is a, c, g, or t
  misc_feature (182)..(182): n is a, c, g, or t
  misc_feature (203)..(203): n is a, c, g, or t
  misc_feature (218)..(218): n is a, c, g, or t
gtacgggaggtagttttttatttcctgccaaaggatagcagaagctgtacctctgtctgagttctgtctcttggcttgacacccttnagaggaattcctgcctcttccatgggtcaggaagaggtgcctagttagtttcttctgggtgccgagttaattccttcccnccaagtgggtttaanccctggaaggagtgtcttggngccagggtgcagtgngcgtttggtgctgagcatggacctgaaacttcgtgtgtggtcagatttatgttccatgcgtggggatgtgcaccggaccaggtatgtgtgtaggtggacatggatgatgaggtgtgtgtgctgtgactgtgtgtgcaccctttgctgcgtatgacaagcaggctgtgtgtgtaggaccaggaagctgtacttgtggccaggtatgtggctatggactgacgagcttgtttgttgaacacttgctcagtgccaggcatc

SEQ ID NO: 609348 - DNA, 835 bp, Homo sapiens
  misc_feature (6)..(7): n is a, c, g, or t
  misc_feature (9)..(9): n is a, c, g, or t
gcctgnncngacacgaagatgaccctcgacagccgccgggcgctgatcaccagggaaggcaaaggtatagggcgcggcacggtccaggcgctgcacgcgacgggcgcgcgggtggtggctgtgagccggactcaggcggatcttgacagccttgtccgcgagtgcccggggatagaacccgtgtgcgtggacctgggtgactgggaggccaccgagcgggcgctgggcagcgtgggccccgtggacctgctggtgaacaacgccgctgtcgccctgctgcagcccttcctggaggtcaccaaggaggcctttgacagatcctttgaggtgaacctgcgtgcggtcatccaggtgtcgcagattgtggccaggggcttaatagcccggggagtcccaggggccatcgtgaatgtctccagccagtgctcccagcgggcagtaactaaccatagcgtctactgctccaccaagggtgccctggacatgctgaccaaggtgatggccctagagctcgggccccacaagatccgagtgaatgcagtaaaccccacagtggtgatgacgtccatgggccaggccacctggagtgacccccacaaggccaagactatgctgaaccgaatcccacttggcaagtttgctgaggtagagcacgtggtgaacgccatcctctttctgctgagtgaccgaagtggcatgaccacgggttccactttgccggtggaagggggcttctgggcctgctgagctccctccacacacctcaagccccatgccgtgctcatcctacccccaatccctccaataaacctgattctgctgcccaaaaaaaaaa

SEQ ID NO: 609349 - DNA, 342 bp, Homo sapiens
gaattttattcaagtccaacctgcagggcaacaactcaacacagccattcctgctctttcaggagaagccacaagtgtgggaagacaggcagctaagtctagggcacagacaaattagtcatactgtctgcttagatcctgagggcctgcgaaaccctcaaggtttcctggtgtcatcttaaggtgctagttattccattctggctgccttttgattcatttggttttctgcccacaggcaagcagaggcgaaaccaacctgccaactcttacctcaaacccattgagagagacctggggatttcctagggttttatttttacctattgctccccaaacaga

SEQ ID NO: 609350 - DNA, 938 bp, Homo sapiens
  misc_feature (16)..(16): n is a, c, g, or t
atagcatagtagagcngggagactgcgccgacatggagctgttcctcgcgggccgccgggtgctggtcaccggggcaggcaaaggtgggcggcggggaaaggtgggcaaaggccggcggcgggcagaggcgggcaggggacgccttcactgagcccgctcccggcaggtatagggcgcggcacggtccaggcgctgcacgcgacgggcgcgcgggtggtggctgtgagccggactcaggcggatcttgacagccttgtccgcgagtgcccggggatagaacccgtgtgcgtggacctgggtgactgggaggccaccgagcgggcgctgggcagcgtgggccccgtggacctgctggtgaacaacgccgctgtcgccctgctgcagcccttcctggaggtcaccaaggaggcctttgacagatcctttgaggtgaacctgcgtgcggtcatccaggtgtcgcagattgtggccaggggcttaatagcccggggagtcccaggggccatcgtgaatgtctccagccagtgctcccagcgggcagtaactaaccatagcgtctactgctccaccaagggtgccctggacatgctgaccaaggtgatggccctagagctcgggccccacaagatccgagtgaatgcagtaaaccccacagtggtgatgacgtccatgggccaggccacctggagtgacccccacaaggccaagactatgctgaaccgaatcccacttggcaagtttgctgaggtagagcacgtggtgaacgccatcctctttctgctgagtgaccgaagtggcatgaccacgggttccactttgccggtggaagggggcttctgggcctgctgagctccctccacacacctcaagccccatgccgtgctcatcctacccccaatccctccaataaacctgattctgctgcccaaaaaaaaaa

SEQ ID NO: 609351 - DNA, 1308 bp, Homo sapiens
  misc_feature (1)..(1): n is a, c, g, or t
nctctcgaaaaaggacgaggagcgtactgctgcgagttccctagcggcggttcttcgatctctctgctccgcgtctcgccagccttactatgtgctgcgtgcggtgtcttttctctgctcgctgcctggaaccacgtttttttgtagcgctgcggtcgtgcgtgctggtccgctgtttattctctacttattactcgcgattgctagacacctttgatctctcggctctttggaagtttgatcggcgggtatcttctggcgtgcgtcgctcaatgtatcaccggcgtgtgtgaccgatcacctgtacgtgcatgcctctgggggtttcgaatttgaggccccctgctactcttggtacttactctcttggtttggttgttccctcgttcagctcgcctgctctgtacaccttcttcgttgaccccagccgtttcttctaataacctcgctactatttcgccctaggtctactggatatctatttgtctgtgcggttttacgaacctcggtccgattctacggttggtattttttcttggaggcactgttagtggtattagcttttctctagggctacccctatattatgtttgccacttttgagcgtactttggtactactagacattgtttcactgttttgggagtgctggaggctcaaggtttctggcagggccattgctcctctctgggggctatctaatgtgttgggtcctgttcctaggcctctgctcctagcttctgtgagtagttccttgccttgtggcacgcgttactcctgtctgcacatagcattctgcctgcgtgcttgtctgtctgtgtgtccataattttccactttgtataaggacatctatgtaatattagaatagggcccatcctaatcacctctatttttctatcttgattttctctgtaaagaccctatctctaagttaaggtctacattctgaggtattggcatattaggactcataactatagcttttttattttttggaggacagttcaacccacaacagtaaggctggtttgatattctaaaatcaactactgttaataagtatatcgaccaggcgtcatgtggctcactgcctgtaatcaccagcagctttgggagggccaacggtgagcagatcaccgaggtcaggagattgagaccatcgtgagctaagcaaggtgaaagccccgtctcgtactaaataatacacaaaattagccgggcgtggtggcgggctcctgtagtcccaagtattcgggaggcctgaggcaggagaatggcgtaacccgaggcagcgagctgagatca

SEQ ID NO: 609352 - DNA, 307 bp, Homo sapiens
  misc_feature (201)..(201): n is a, c, g, or t
tgccccacacagggctctccatgatgggaagcagtggttagtggcttcataggccgtagtctgacatcgctccactaggctaaggggtgtcctaagagtggctcccccgtgtattccccttcccagtgacagcccctgcccagcataaaatcccaggaccctggtctctgcagcgcctgaggcagggtacttattgagtantagggatcgtgtatctatgctagacgtcccacagttcgtcgcgtggtctctccttttctgaatactaataggattgatagaactggtatagaaagaaaaaaaaaag

SEQ ID NO: 609353 - DNA, 758 bp, Homo sapiens
  misc_feature (16)..(16): n is a, c, g, or t
atagcatagtagagcngggagactgcgccgacatggagctgttcctcgcgggccgccgggtgctggtcaccggggcaggcaaaagtgcccggggatagaacccgtgtgcgtggacctgggtgactgggaggccaccgagcgggcgctgggcagcgtgggccccgtggacctgctggtgaacaacgccgctgtcgccctgctgcagcccttcctggaggtcaccaaggaggcctttgacagatcctttgaggtgaacctgcgtgcggtcatccaggtgtcgcagattgtggccaggggcttaatagcccggggagtcccaggggccatcgtgaatgtctccagccagtgctcccagcgggcagtaactaaccatagcgtctactgctccaccaagggtgccctggacatgctgaccaaggtgatggccctagagctcgggccccacaagatccgagtgaatgcagtaaaccccacagtggtgatgacgtccatgggccaggccacctggagtgacccccacaaggccaagactatgctgaaccgaatcccacttggcaagtttgctgaggtagagcacgtggtgaacgccatcctctttctgctgagtgaccgaagtggcatgaccacgggttccactttgccggtggaagggggcttctgggcctgctgagctccctccacacacctcaagccccatgccgtgctcatcctacccccaatccctccaataaacctgattctgctgcccaaaaaaaaaa

SEQ ID NO: 609354 - DNA, 1013 bp, Homo sapiens
  misc_feature (16)..(16): n is a, c, g, or t
atagcatagtagagcngggagactgcgccgacatggagctgttcctcgcgggccgccgggtgctggtcaccggggcaggcaaaggtgggcggcggggaaaggtgggcaaaggccggcggcgggcagaggcgggcaggggacgccttcactgagcccgctcccggcaggtatagggcgcggcacggtccaggcgctgcacgcgacgggcgcgcgggtggtggctgtgagccggactcaggcggatcttgacagccttgtccgcgaggtcaccagccccagtccccagctgtgccgcttgctgggcacagagcctctggtaactgccccctgatacacacagtgcccggggatagaacccgtgtgcgtggacctgggtgactgggaggccaccgagcgggcgctgggcagcgtgggccccgtggacctgctggtgaacaacgccgctgtcgccctgctgcagcccttcctggaggtcaccaaggaggcctttgacagatcctttgaggtgaacctgcgtgcggtcatccaggtgtcgcagattgtggccaggggcttaatagcccggggagtcccaggggccatcgtgaatgtctccagccagtgctcccagcgggcagtaactaaccatagcgtctactgctccaccaagggtgccctggacatgctgaccaaggtgatggccctagagctcgggccccacaagatccgagtgaatgcagtaaaccccacagtggtgatgacgtccatgggccaggccacctggagtgacccccacaaggccaagactatgctgaaccgaatcccacttggcaagtttgctgaggtagagcacgtggtgaacgccatcctctttctgctgagtgaccgaagtggcatgaccacgggttccactttgccggtggaagggggcttctgggcctgctgagctccctccacacacctcaagccccatgccgtgctcatcctacccccaatccctccaataaacctgattctgctgcccaaaaaaaaaa

SEQ ID NO: 609355 - DNA, 1493 bp, Homo sapiens
  misc_feature (815)..(815): n is a, c, g, or t
  misc_feature (818)..(818): n is a, c, g, or t
  misc_feature (820)..(820): n is a, c, g, or t
  misc_feature (835)..(835): n is a, c, g, or t
  misc_feature (843)..(843): n is a, c, g, or t
  misc_feature (845)..(846): n is a, c, g, or t
  misc_feature (852)..(852): n is a, c, g, or t
  misc_feature (854)..(854): n is a, c, g, or t
  misc_feature (877)..(877): n is a, c, g, or t
cgtgggcctgccgtggtgcctggtcacctggggcatggcaacatggttgggcgtgcgtgggaaacggtggggcagaaggcctgtgcgtgcgtgtgcagatggcggtgcatgtggtgactgtccttcagctgatgccctgctcccgtgcagtgtatagtgtgctgctgtgcactgtgttccatgtgctgctttgcactgctgactgtgtgctgctgcgtggtgtgttggcttgtgatgccgtgactcagtgcgggatcttgacatgccttgtccgcgagggtaggtccctgccggtgtccccagctgcttgctgatgtgctgtgctgatgcgcatgtgatgtgggtgctgtgcatgcagatgctggtgggctggtacctctgttgcgctgactcccgcctcccctcgcgggcgctggcttctcaccgcggctgggcgcccgcgcaccctctctcggggctggtggcctgcgtgggcggccgggtggtcggcagagccgccggggcccccgggctcagaaagaggccgaaatggctgcgaagcaggccccgggcaggagtcgctcgggcgcagggaggaagtgaaccggccggaggtagcgcccggctgctggccccacagtcccgacaccttcggaactcctaactcctttacttgtccggctgaaaggtcaccagccccagtccccagctgtgccgcttgctgggcacagagcctctggtaactgccccctgatacacacagtgcccggggatagaacccgtgtgcgtggacctgggtgactgggaggccaccgagcgggcgctgggcagcgtgngcncngtggacctgctggtnaacaacgncnntgtcgncntgctgcagcccttcctggaggtnaccaaggagggcgtgggccccgtggacctgctggtgaacaacgccgctgtcgccctgctgcagcccttcctggaggtcaccaaggaggcctttgacagatcctttgaggtgaacctgcgtgcggtcatccaggtgtcgcagattgtggccaggggcttaatagcccggggagtcccaggggccatcgtgaatgtctccagccagtgctcccagcgggcagtaactaaccatagcgtctactgctccaccaagggtgccctggacatgctgaccaaggtgatggccctagagctcgggccccacaagatccgagtgaatgcagtaaaccccacagtggtgatgacgtccatgggccaggccacctggagtgacccccacaaggccaagactatgctgaaccgaatcccacttggcaagtttgctgaggtagagcacgtggtgaacgccatcctctttctgctgagtgaccgaagtggcatgaccacgggttccactttgccggtggaagggggcttctgggcctgctgagctccctccacacacctcaagccccatgccgtgctcatcctacccccaatccctccaataaacctgattctgctgcccaaaaaaaaaa

SEQ ID NO: 609356 - DNA, 700 bp, Homo sapiens
aggaagagtaaatgggctccgaagtggcatattaacattataattccattcagctggcatgcagcggcgtgatctcggctcactacaacctccacctcccgggttcaagcgattcttctgcttcagccttctcctgagcagctgggattacaagtgcgcaccatcatgcctggctaatttttgtatttttaatagagacggggtttctccatgttggccaggctcgtctcaaactcctgacctcaggtgatctgcccacctcggcctcccgaagtgctgggattacaggtgtgagccactgcacccagcctaaagagaatattttctcaattaaaaatactatagtcttcagaaaagaatcaattaaagtgatgagaaatttcaaatatattaactacaaactgcaactttgaaaaatattgcaggcaattttattaagttctacagacaaatgtcagtaacatggtattagaaataaatatagctgatcaacagattaaagtttatgaatatatacccagaataattattctgctttgtagttttaattttggaaaaccattttgaaaagtttgctactgaaatggtattttttaaagaaatttcctatttcgaaaaaacgttcgatcatataactgggaaagattttcaatgccagtaggcccatttttctgatcaatagaaattttttaaaaggaag

SEQ ID NO: 609357 - DNA, 1208 bp, Homo sapiens
cgtgggcctgccgtggtgcctggtcacctggggcatggcaacatggttgggcgtgcgtgggaaacggtggggcagaaggcctgtgcgtgcgtgtgcagatggcggtgcatgtggtgactgtccttcagctgatgccctgctcccgtgcagtgtatagtgtgctgctgtgcactgtgttccatgtgctgctttgcactgctgactgtgtgctgctgcgtggtgtgttggcttgtgatgccgtgactcagtgcgggatcttgacatgccttgtccgcgagggtaggtccctgccggtgtccccagctgcttgctgatgtgctgtgctgatgcgcatgtgatgtgggtgctgtgcatgcagatgctggtgggctggtacctctgttgcgctgactcccgcctcccctcgcgggcgctggcttctcaccgcggctgggcgcccgcgcaccctctctcggggctggtggcctgcgtgggcggccgggtggtcggcagagccgccggggcccccgggctcagaaagaggccgaaatggctgcgaagcaggccccgggcaggagtcgctcgggcgcagggaggaagtgaaccggccggaggtagcgcccggctgctggccccacagtcccgacaccttcggaactcctaactcctttacttgtccggctgaaaggtcaccaaggaggcctttgacagatcctttgaggtgaacctgcgtgcggtcatccaggtgtcgcagattgtggccaggggcttaatagcccggggagtcccaggggccatcgtgaatgtctccagccagtgctcccagcgggcagtaactaaccatagcgtctactgctccaccaagggtgccctggacatgctgaccaaggtgatggccctagagctcgggccccacaagatccgagtgaatgcagtaaaccccacagtggtgatgacgtccatgggccaggccacctggagtgacccccacaaggccaagactatgctgaaccgaatcccacttggcaagtttgctgaggtagagcacgtggtgaacgccatcctctttctgctgagtgaccgaagtggcatgaccacgggttccactttgccggtggaagggggcttctgggcctgctgagctccctccacacacctcaagccccatgccgtgctcatcctacccccaatccctccaataaacctgattctgctgcccaaaaaaaaaa

SEQ ID NO: 609358 - DNA, 223 bp, Homo sapiens
cgaacaggacaagcaagtagatcagcggagagggttagacccagggcggaagaaaactctttatgtgactcttgccattgcgcgccctcctgcttcttgccaactgctacccaccaacgctaagggtattgctacgaatacttgcatgcgtgcctttgctctgcaacctaagatctggcaatgatgcaccctgctatccctgccctaggctccaaggggaagt

SEQ ID NO: 609359 - DNA, 376 bp, Homo sapiens
  misc_feature (173)..(173): n is a, c, g, or t
ttaccagtatagataatttactcttgtatttttagtagagacggtgtttcaccatgttgatattagacccatatcaacatatgcttccctggctgggtgtggtggctcacgcctgtaatcccaggcatttgggaggccaaggcaggcggatcacctgaggtcaggagtttganaacagcctggccaacatggtgaaacccccatctctactaaaaatacaaaaattagctgggcgtgatggaaggcacctgtaatcccagctactcgggagcctgaggcagaagaatcgcttgaacctgggaggcagagattgcagtgggccaggatcatgccattgcactccagcctgggcaacaagagtggaactccacctcaa

SEQ ID NO: 609360 - DNA, 932 bp, Homo sapiens
  misc_feature (16)..(16): n is a, c, g, or t
atagcatagtagagcngggagactgcgccgacatggagctgttcctcgcgggccgccgggtgctggtcaccggggcaggcaaaggtatagggcgcggcacggtccaggcgctgcacgcgacgggcgcgcgggtggtggctgtgagccggactcaggcggatcttgacagccttgtccgcgagtgcccggggatagaacccgtgtgcgtggacctgggtgactgggaggccaccgagcgggcgctgggcagcgtgggccccgtggacctgctggtgaacaacgccgctgtcgccctgctgcagcccttcctggaggtcaccaaggaggcctttgacagatcctttgaggtgaacctgcgtgcggtcatccaggtgtcgcaggtgagctgccctgtgggctggacgggaattctcgtgagtgatgccagctctgcctcacggtctcgctgcgattccagattgtggccaggggcttaatagcccggggagtcccaggggccatcgtgaatgtctccagccagtgctcccagcgggcagtaactaaccatagcgtctactgctccaccaagggtgccctggacatgctgaccaaggtgatggccctagagctcgggccccacaagatccgagtgaatgcagtaaaccccacagtggtgatgacgtccatgggccaggccacctggagtgacccccacaaggccaagactatgctgaaccgaatcccacttggcaagtttgctgaggtagagcacgtggtgaacgccatcctctttctgctgagtgaccgaagtggcatgaccacgggttccactttgccggtggaagggggcttctgggcctgctgagctccctccacacacctcaagccccatgccgtgctcatcctacccccaatccctccaataaacctgattctgctgcccaaaaaaaaaa

SEQ ID NO: 609361 - DNA, 208 bp, Homo sapiens
  misc_feature (178)..(178): n is a, c, g, or t
  misc_feature (199)..(199): n is a, c, g, or t
tatgctgcaatagaaaacattgaaaatatgcttacttcagagaataagtcattgaaccccaatacttcggctggcatacttattcagaaaagtaatagaggagcagtggaaccagcagttgaaaagataagcatcagtggcggagtagattgggcgaatcagtttgcagatttataanacctggtcactagattttttnccttcgaga

SEQ ID NO: 609362 - DNA, 129 bp, Homo sapiens
tatttactggcacctcccagctcccacctccccacttcagttccccactccttcttctgcagttcccacctcccagttcccacctgccagctcccacctctttcctcgcagttcccaccccccactgtt

SEQ ID NO: 609363 - DNA, 1492 bp, Homo sapiens
cgtgggcctgccgtggtgcctggtcacctggggcatggcaacatggttgggcgtgcgtgggaaacggtggggcagaaggcctgtgcgtgcgtgtgcagatggcggtgcatgtggtgactgtccttcagctgatgccctgctcccgtgcagtgtatagtgtgctgctgtgcactgtgttccatgtgctgctttgcactgctgactgtgtgctgctgcgtggtgtgttggcttgtgatgccgtgactcagtgcgggatcttgacatgccttgtccgcgagggtaggtccctgccggtgtccccagctgcttgctgatgtgctgtgctgatgcgcatgtgatgtgggtgctgtgcatgcagatgctggtgggctggtacctctgttgcgctgactcccgcctcccctcgcgggcgctggcttctcaccgcggctgggcgcccgcgcaccctctctcggggctggtggcctgcgtgggcggccgggtggtcggcagagccgccggggcccccgggctcagaaagaggccgaaatggctgcgaagcaggccccgggcaggagtcgctcgggcgcagggaggaagtgaaccggccggaggtagcgcccggctgctggccccacagtcccgacaccttcggaactcctaactcctttacttgtccggctgaaaggtcaccagccccagtccccagctgtgccgcttgctgggcacagagcctctggtaactgccccctgatacacacagtgcccggggatagaacccgtgtgcgtggacctgggtgactgggaggccaccgagcgggcgctgggcagcgtgggccccgtggacctgctggtgaacaacgccgctgtcgccctgctgcagcccttcctggaggtcaccaaggaggcctttgacagatcctttgaggtgaacctgcgtgcggtcatccaggtgtcgcaggtgagctgccctgtgggctggacgggaattctcgtgagtgatgccagctctgcctcacggtctcgctgcgattccagattgtggccaggggcttaatagcccggggagtcccaggggccatcgtgaatgtctccagccagtgctcccagcgggcagtaactaaccatagcgtctactgctccaccaagggtgccctggacatgctgaccaaggtgatggccctagagctcgggccccacaagatccgagtgaatgcagtaaaccccacagtggtgatgacgtccatgggccaggccacctggagtgacccccacaaggccaagactatgctgaaccgaatcccacttggcaagtttgctgaggtagagcacgtggtgaacgccatcctctttctgctgagtgaccgaagtggcatgaccacgggttccactttgccggtggaagggggcttctgggcctgctgagctccctccacacacctcaagccccatgccgtgctcatcctacccccaatccctccaataaacctgattctgctgcccaaaaaaaaaa

SEQ ID NO: 609364 - DNA, 950 bp, Homo sapiens
  misc_feature (16)..(16): n is a, c, g, or t
atagcatagtagagcngggagactgcgccgacatggagctgttcctcgcgggccgccgggtgctggtcaccggggcaggcaaaggtatagggcgcggcacggtccaggcgctgcacgcgacgggcgcgcgggtggtggctgtgagccggactcaggcggatcttgacagccttgtccgcgagtgcccggggatagaacccgtgtgcgtggacctgggtgactgggaggccaccgagcgggcgctgggcagcgtgggccccgtggacctgctggtgaacaacgccgctgtcgccctgctgcagcccttcctggaggtcaccaaggaggcctttgacagatcctttgaggtgaacctgcgtgcggtcatccaggtgtcgcagattgtggccaggggcttaatagcccggggagtcccaggggccatcgtgaatgtctccagccagtgctcccagcgggcagtaactaaccatagcgtctactgtgagtgccccagctgtgccctcagccccaccccagccccagcctcgccctcatcaccgaccccagccccagccagcttgggttcctcttcgtaggctccaccaagggtgccctggacatgctgaccaaggtgatggccctagagctcgggccccacaagatccgagtgaatgcagtaaaccccacagtggtgatgacgtccatgggccaggccacctggagtgacccccacaaggccaagactatgctgaaccgaatcccacttggcaagtttgctgaggtagagcacgtggtgaacgccatcctctttctgctgagtgaccgaagtggcatgaccacgggttccactttgccggtggaagggggcttctgggcctgctgagctccctccacacacctcaagccccatgccgtgctcatcctacccccaatccctccaataaacctgattctgctgcccaaaaaaaaaa

SEQ ID NO: 609365 - DNA, 726 bp, Homo sapiens
  misc_feature (627)..(627): n is a, c, g, or t
tgatctagcaggatccccttaagtcacccgcgtcaccgtgcgtgagcgaatgggccagatcgtcgattcagccgaaatcaacgttgaaagtttcagtgagattattgaacgcggtaatggcgcctcgctggataatcgtatcgaggtgctcaacagcctcgttgagcaattttccagcgccgaccaacgcctgctggatctgcatgccgactacccgcagcacttgctcaaaccccgcctcgaacgttttcgcctgcaaataagcgagttcagccaacgggccatccacgacctggcctacctgctgcgagggaaaaaagcccagcagcccaagcccggcagctccagggccgagcccgccccaaggcgtgaagtgatcaagacacgtcatcacggcttggtgatgggtgagccccgcgaagcagacagttcgttggtcgacgtcaaggcacacatgaccggcaaggtgctcgccacgtttcatgagaaggcaccgggagtctgggttaaacggcagaaagccccatcgcagccaagcgcaccggtagctgtggatctggacaccagcatcaacacggggcaagcgctattggatggcgaacaagctgaaacccgtaaataccaggntttctccaggaaaccctggcatgcgccgcaggatatccaagacatgttcgatgatcatgcaaaggcgctggaaaaagctcaacgatatgaggaagccga

SEQ ID NO: 609366 - DNA, 466 bp, Homo sapiens
  misc_feature (285)..(285): n is a, c, g, or t
  misc_feature (379)..(379): n is a, c, g, or t
  misc_feature (404)..(404): n is a, c, g, or t
  misc_feature (409)..(409): n is a, c, g, or t
gtacacaccaagggcctcgcgcttttgtgcgacggtgttttctacgagctcacccaccagctggcgtaggccactgccaagccccccagtactatcgcggtgcaagtggtcccggaccagctaatggccttcggtggctccaaggaaccggtggccgattgcaagcttgcacagcatcggcaagatcggcggcgcgcagaaccgctcctacagcaagctgctgtgcggcttgctggccgagcgcttgcgcatcagcccggacagggtttacatcaactattacgnacatgaacgcgcgccaatgtgggcgtggaacaatctccaccttccgcctaagagccgacagggacccacgtctgtttgcgctggtctccaccgnggaacccgccggcacgtgtgtgttntaggncccgcccaccccaaccttctggtggggagaaataaacggtttagagactaaaaaaaa

SEQ ID NO: 609367 - DNA, 981 bp, Homo sapiens
  misc_feature (16)..(16): n is a, c, g, or t
atagcatagtagagcngggagactgcgccgacatggagctgttcctcgcgggccgccgggtgctggtcaccggggcaggcaaaggtatagggcgcggcacggtccaggcgctgcacgcgacgggcgcgcgggtggtggctgtgagccggactcaggcggatcttgacagccttgtccgcgagtgcccggggatagaacccgtgtgcgtggacctgggtgactgggaggccaccgagcgggcgctgggcagcgtgggccccgtggacctgctggtgaacaacgccgctgtcgccctgctgcagcccttcctggaggtcaccaaggaggcctttgacagatcctttgaggtgaacctgcgtgcggtcatccaggtgtcgcagattgtggccaggggcttaatagcccggggagtcccaggggccatcgtgaatgtctccagccagtgctcccagcgggcagtaactaaccatagcgtctactgctccaccaagggtgccctggacatgctgaccaaggtgatggccctagagctcgggccccacaagatccgagtgaatgcagtaaaccccacagtggtgatgacgtccatgggccaggccacctggagtgacccccacaaggccaagactatgctgaaccgaatcccacttggcaagtttgctggtgagtcaggtgggagccagccagcgtggtgccagcagtccctgtgtgtgccatgggtaggggtgggagggaaagatgggcggcagcttccttcctctatgcccatgacccccgccctgaccacagaggtagagcacgtggtgaacgccatcctctttctgctgagtgaccgaagtggcatgaccacgggttccactttgccggtggaagggggcttctgggcctgctgagctccctccacacacctcaagccccatgccgtgctcatcctacccccaatccctccaataaacctgattctgctgcccaaaaaaaaaa

SEQ ID NO: 609368 - DNA, 1087 bp, Homo sapiens
  misc_feature (988)..(988): n is a, c, g, or t
atagcgacaccgtacccacctaccagagcaacatgagcggttacctgaaacaacaggtgcaactgacacagatagccatggagcaacaggtgaagagctacaagaaagccttgacggcgtcgttgccggttcttgatgcggaggtggacattgactataaaaaccaggcaaaaatcgcaaaaaccctgtccactcagaaccttggcatcatcaggcggctggaattcatcaacgaccgcttcaacgaacttaaaaccctgggagatgaaggcgcggcgatcattcgtaaaaccatacgagagttgccgcagctcacgctcattgaactcaaatctcttgagattggcttgggccgttacttgtgtatcgatgagacgcaaagccaggttccagccaccgtgcgtgagcgaatgggccagatcgtcgattcagccgaaatcaacgttgaaagtttcagtgagattattgaacgcggtaatggcgcctcgctggataatcgtatcgaggtgctcaacagcctcgttgagcaattttccagcgccgaccaacgcctgctggatctgcatgccgactacccgcagcacttgctcaaaccccgcctcgaacgttttcgcctgcaaataagcgagttcagccaacgggccatccacgacctggcctacctgctgcgagggaaaaaagcccagcagcccaagcccggcagctccagggccgagcccgccccaaggcgtgaagtgatcaagacacgtcatcacggcttggtgatgggtgagccccgcgaagcagacagttcgttggtcgacgtcaaggcacacatgaccggcaaggtgctcgccacgtttcatgagaaggcaccgggagtctgggttaaacggcagaaagccccatcgcagccaagcgcaccggtagctgtggatctggacaccagcatcaacacggggcaagcgctattggatggcgaacaagctgaaacccgtaaataccaggntttctccaggaaaccctggcatgcgccgcaggatatccaagacatgttcgatgatcatgcaaaggcgctggaaaaagctcaacgatatgaggaagccga

SEQ ID NO: 609369 - DNA, 1111 bp, Homo sapiens
gaacagaatgaaggagatcgcatagtggctctctcctgtacgggattctgcctgtagctgcgtacaatgtggtcgaagtcgtacaccagaacctagtgtgatgttctgaatcagcaaacctttgagcaggtatgcactcattgcatcgtaccgactacgccaatggtggataactcatcgtccattctttagtgcatcacatatgctggtaagcaatggaatccacgacaatgtcccatgtgggcatcactcaggatgaacttaacatgttagcctcctacttccattcgttccatgcaagtgtgcgcttccatgaaggctggatgcaacatactagggtactgccgccacccgatgatttagcccaagatataagatcaagcactaccgcaatcagtgaaactatgtctgttccaatacattgggagtagaaaaaccaggcatagtgaagacccattacaaagaaagtcgattctataagccactaataacttgcagacagctgcataattcttatacgctgcaaggcgggctgctgaatcttttggcgtgtggatattgcaaccgttccttagaatgggctaattcgcgaaaaacctttactccaatgcatcccaggactgtacctgcacattccccacgccatagccaattgtgcaactcgagtttccccagggaactccgatttgcacacgggcttcttggcactgccacttactacagtgcctccgagtcccccccgccccacatgggaggaacccaacttagggaccaagtacccacgggcaaaacttatactggtaccaggcgcttgtaatcattactagggcaccaggggtaatgatttcccaaacgagttcccgcacttcacacgttcgcccactctgggcaaaagggcaatcttctgactctcattcggcgacaagtttggcaacccagttcgctaaccctcaccctaactgcgttccgttcggcaaccacaactgctctcgccaggacgggctatgactctcactgcgccaagcactagactaacgcttgcggggcccaacactgcttcgcacttacgacaccccactctcacgagcgcttcatccatccaaccaccacc

SEQ ID NO: 609370 - DNA, 427 bp, Homo sapiens
  misc_feature (400)..(400): n is a, c, g, or t
gggggcatggtgtcaagtatctgcgctgaaaaaccaggtgatgtaactctttcctaaggctctgtcttcagggacttttgtgacatatcactgtattggtcacctaggagatgtgagccttgtatgggctttgtctacaggaggctttgtgacatatctctgcactgatctctgaggtgaggcaactcttgtctaggcactgactgcaggggacattagtacatatcccttcactgatcacccgggtgatgcactcttgtcttacacctgcctacatggacattttgacacatctgtgaactgatccaccaagtgatgaaactcttgtcaagctctgcctacatgggctttgtgacacatctctgcactgatcactctggggagggtactcttgtctatntctgcctacaggattctttatgattta

SEQ ID NO: 609371 - DNA, 263 bp, Homo sapiens
ttctggcccacgatcgtgaagtctgggaaggaatgagactttcaaggaccagggtatgggtgggttcatggcctggtaatcccagctccttgagggcccggaggcaggcagatcgtttaaggtcagaagttcgagaccagccgggctaacatggtaaaacccggtctctactaaaaatacaaaaaaattagctgggtgtagtggcacacacctgtagtcccagctactcaggaggctgaagcaggagaatcacttgaacccgg

SEQ ID NO: 609372 - DNA, 411 bp, Homo sapiens
gctgggagtgttgctctactctagggagttatttttaagtaatctcatctgtcaattggattaccatccacaaactgaccttgtatatattccattctttctcccagcccagccacacactccaaggttttccctttgcttataaggggtagtcacccttttttatttcgaccttccaaacattctgggagttctcctcctttagagccaactacagcgcagaggagcgctttctcctgctgggttctccgactggccttccctgcagccggtcctcttcgcccttgtcctcctgtgctacctcctgaccttgacgggcaactcggcgcttgtgctgctggcggtgcgctagccgcgcctgcacacgcccatatactacttcctctgccacttggccttgccatatgcaat

SEQ ID NO: 609373 - DNA, 704 bp, Homo sapiens
  misc_feature (25)..(25): n is a, c, g, or t
  misc_feature (34)..(35): n is a, c, g, or t
  misc_feature (40)..(40): n is a, c, g, or t
  misc_feature (47)..(47): n is a, c, g, or t
  misc_feature (57)..(57): n is a, c, g, or t
  misc_feature (66)..(66): n is a, c, g, or t
  misc_feature (69)..(69): n is a, c, g, or t
  misc_feature (79)..(79): n is a, c, g, or t
  misc_feature (93)..(93): n is a, c, g, or t
  misc_feature (100)..(100): n is a, c, g, or t
  misc_feature (110)..(110): n is a, c, g, or t
  misc_feature (123)..(123): n is a, c, g, or t
  misc_feature (125)..(125): n is a, c, g, or t
  misc_feature (136)..(136): n is a, c, g, or t
  misc_feature (144)..(144): n is a, c, g, or t
  misc_feature (165)..(166): n is a, c, g, or t
  misc_feature (169)..(169): n is a, c, g, or t
  misc_feature (171)..(171): n is a, c, g, or t
  misc_feature (177)..(177): n is a, c, g, or t
  misc_feature (185)..(185): n is a, c, g, or t
  misc_feature (187)..(187): n is a, c, g, or t
  misc_feature (211)..(211): n is a, c, g, or t
  misc_feature (216)..(216): n is a, c, g, or t
  misc_feature (223)..(223): n is a, c, g, or t
  misc_feature (227)..(227): n is a, c, g, or t
  misc_feature (239)..(239): n is a, c, g, or t
  misc_feature (299)..(300): n is a, c, g, or t
  misc_feature (320)..(320): n is a, c, g, or t
  misc_feature (359)..(360): n is a, c, g, or t
ctcggtatttttggaagggtcactngggcttatnnaaagnttaagantcccagcacntgtttaaanatngtttcatttngcaagaaaaaaaanttcaagnaaaagatacnaggcatcggccantnaaagaaagtantggatgancacctttagattcttaaatannggnancatttngaccctcngntggaacagatagtaaaacatgtantttgnacatgcnagcnaatgctgctgcnaactaacatgcattgattcattaagatgttattttgagggtgttcctggtctttcactgnnaattccaacattcttacttncaagtggaccaatggataagtctatgcatctataataanntataaaaaatgggagtacccatggttaggatatagctatgcctttatggttaagattagaatatatgatccataaaaatttaaagtgagaggcatggttagtgtgtgatacaataaaaagtaattgtttggtagttgtaactgctaataaaaccagtgactagaatataagggaggtaaaaaggacaagatagattaatagcctaaataaagagaaaagcctgatgcctttaaaaaaaatgaaacactttggatgtattacttaggccaaaatctggcctggatttatgctataatatatattttcatgttaagttgtatatttttcagaaattataaatatta

SEQ ID NO: 609374 - DNA, 319 bp, Homo sapiens
ggaccacaggtgttcgaaacagtctcaatggtgtcatgcgcatcccctgtaaaaactggttgttcctgaagtccaataatagtacctatgttagccaagtagtcggcgtgtgccatgatgacgttaaacgcaccttgccaatcattcctgcacagacagtcttgtgagaggaggttctgtgacggagtctcattctacagacgaggaaagtgggaggtgaaggaaactgtcaagccatgaagcctggaccctcagtcacgatgctaaacagcttccttggtcaagcagaagagggaagcattggggtccaaggacctgg

SEQ ID NO: 609375 - DNA, 687 bp, Homo sapiens
gaggctgaggtggagaatagcttgaactcaggaggtggaggtttagtgtagagctgatatggcgccactgttatgtccaaccgagcgagtatgagcaagattccgtcccagaacagagaataagcagttttgccatcaggaaggatatctcgctccacgtttagatggacaggcctcattttggcagctatgcgtgtttgagatgtagcaacgtgaatatccaaggttcctcccgtagctcaagtttttacttgtgattaacacacacgcacatttgaattccgtcttcagaggcacaagcatttgggcttcatatctcaacagcaaagagggcctgttcagcaatgtcccttcattttagacgtcatatgaggctcgagcgattgcatgatagtagtaaactagtctcctggaaactaatggctgtagggtgcttctagaatatgttacagaattcagagttagctattaatagactccctggatcttgacttaaggtgacaaaatgagactttaattattgttaaagaaatgctgtgcaatatttgtataacgtagagtcctctagtacttttgggtattgtcgggtttagtaattaaggagcttaaggcatttaaaattgtggaaccattgttcagggaaggtattgctttgatgtacagtggtctccaggaattgtaaagatg

SEQ ID NO: 609376 - DNA, 128 bp, Homo sapiens
  misc_feature (44)..(44): n is a, c, g, or t
attcatgcactctggcctgcaggagcactcctaggagaagagancaaaaaggtgggaaggcccagcagggacacggcttcatacccaaaagtccagaacattccaccccaaggcttcagtgcctgacc

SEQ ID NO: 609377 - DNA, 336 bp, Homo sapiens
agagtattgggattactagcataagccaccacgcccagccaaaattacatataatacacctttaatatgtacttagtgtatgtccagagcatatatattatatatagttttcatctggttaaaaaataatccaagtgcaataaaccaggtgctgtgaggatagggaaaagcagggcagtgagctgcagcaggacagggaaggccaagatctactgtgggctgcgtgggagttggggtagggaggccccagctcccggtgctcggtgggaggaaccatagtcctctaggcagtgcctgatagccagagagtagtgagcaaacaacaggtgggtacgt

SEQ ID NO: 609378 - DNA, 352 bp, Homo sapiens
ctggcagctcatatacctaaaaacgtgagatgcgatgctctcctctgacctatggaactcccgtgaggctgcgttctgagagcttcctctagcaggagcccaactgtaggagctgtatttctcaccttcctccacattccccctcacaagctgacaggcacatggaatttacactcactcctaagtcatgagtactgttagccatgaagaacctgtaaacatgctccattaaattcagcagcccatgactggctctgaaccgcccaggtaatgggaaccacgattgccatgacagctggcagaagctataggcatgctgttaccataatcagagtgacatgtacagttatat

SEQ ID NO: 609379 - DNA, 197 bp, Homo sapiens
tcgatctagcaggatccttgaaattgtgtggtgttatgggtacgctcgggaagcaggtatgaacctaggcatgtccgaaacgcccgtccgaagacggcctctagttgcgaacgaatggtcaataagtcttgtcaaaacgcgaagtcgaatcctagttgctaaccctacatcgatggatcatgtagcctagtcatact

SEQ ID NO: 609380 - DNA, 211 bp, Homo sapiens
gaggtcacatacggaaagaggagagcggccaaagcccctggtgaattctgtgcatctgcatcctggtgcacttggagcacggcagggtgtgttactgaacacagcagtctgttctcttggccatcagtggtgtacatctcacgggggcagtgggagcccggaggatctatatgtgccccaatgcttctctcacagcattgtccgggtctgc

SEQ ID NO: 609381 - DNA, 234 bp, Homo sapiens
ttcagatacaccaccctcaagtaggtcccaggtgacagcgtgccccctttgtgtctatatgtactcaactatttacctacaacttataagtgagaacatgcagcatttggtttactcttcctgttcagatagctataggataacagcctccagctccatccatgttgctgcaaaggacatgatctcattctttctcacgactgtatagtattccatggtgtatttgtacacata

SEQ ID NO: 609382 - DNA, 89 bp, Homo sapiens
gcactgaaaggtctgtacctgagcctggatacttgaacagaggcagacactgcggctcaaaaccccaaggaatatcctagctctgagac

SEQ ID NO: 609383 - DNA, 732 bp, Homo sapiens
cgagaagatcatgctgtacactgtcctggctgtgctagaggatacatccagagatattcgagaggctcttcatgaactcttatgctgtactaactgtttcaaccaaagaagggattcatcttggcatcggtggagctgcgtgaacaaatttaagccaagtagccctactagatagggacatccatatggaagtgcttgaagtctctgggaaggtcgggcatgcaaccctggtgcttcccttggtgccagagcttctgagcagccacccatttttggacacaggtgaaccagacatggatgatccagcttatattgcagtatttggtacttattttcaatgctgctaaaacctgtccaagcaatgccagcattgtgtctcacgatcacacgcgttcaggcagctatgcctacctccgagacagtctttctacaatctggttacctgggcttgaggtgtaccaggtagaagaactggtgtcatcagctgtttactcccaggatcatacctcaatgaggatccttcccagcagttcctgcaggagagccttgaaagagtgtatagtcttcagcacgttggaccctcagggagcccaggagctgctggaattcaccatcaggggtatctgcaagagactgggagaacttcaatctgaatgggcaggagtagctgatttctctggcagctatcttcgctgtcaactacttctcatcaagggccttgcaggaaagtag

SEQ ID NO: 609384 - DNA, 162 bp, Homo sapiens
tggtcgaaggctcagtggtggttggtggccttgacgtctcaaattcataatcttcatcatatataacgtaggcctctttcgtaggtactgcagtgtcagtctccaagcctgagaactcatcttcttcagcgtagcactccgggatcccattggagactgaca

SEQ ID NO: 609385 - DNA, 288 bp, Homo sapiens
taataccgggtctgaggcttatggaagcctcacagaggccaacctgcctgaatcacaggtggccagtggggcaggggctggggcgcccattgcctcttccccagagaaggctgaagaggacaggacgctggcgggcaaccagggcccacctgccctggtcagctacacccactccctgatggagtggtgccacgaagtcaccactggctaccgtggcgtgcgcatcagcaacttcaccacatcctggcgcaacggcttggccttctgtgccatcctgcaccgattcta

SEQ ID NO: 609386 - DNA, 215 bp, Homo sapiens
aactgtatgcggttgatgaagccgggttgggcgagggtgtcatagtccttctcgttgaagctacgtgtcgtgcactagttcacccaggctgcgacgtggtgagcacgtccatgtccacgtcgttgctgaacgtcagcacggtgggtaccacgttctggttgggcatggagtgagccggatcatccagactgtcgttgggccttgacgccgtacgg

SEQ ID NO: 609387 - DNA, 392 bp, Homo sapiens
  misc_feature (28)..(28): n is a, c, g, or t
  misc_feature (58)..(58): n is a, c, g, or t
ccttgacctaattatttcaaatacctcnctttttataagaaaaaaattttgtgatttnccagggaacttctaggacatctcatagatcattttaaatataaaaggtctcctggggctgggcacagtggctcacacctgtaatcccagcactttgggaggccgaggcaggtggatcacgaggtcaagagatcaagaccatcctggccaacaaggtgaaaccccgcgtctactaaaaatacaaaaattagccaggcatggtggcgggtgcctgtaatcccagctacccgggaggctgaggaaggagaaccgcttgaaccaagaagtcagaggttgcagtgagccgagattgcgccactgcactccagcctggcgacacagcgagactccatctc

SEQ ID NO: 609388 - DNA, 150 bp, Homo sapiens
  misc_feature (70)..(70): n is a, c, g, or t
  misc_feature (116)..(116): n is a, c, g, or t
acctttcagcggaccatgaactcctgagcccgaccaactaccacttcctgtcctcaccgaaggaggccgnggggctctgcaaggcgcagatcactgccatcatctctcagcaaggngacatatttgtttttgacctggagacctcagctg

SEQ ID NO: 609389 - DNA, 261 bp, Homo sapiens
tgactctcggaatcggtattctcgagctgttcggaggttggctcattgaccaccatcatgcccacttgtggcatcctcgggaacctgcgtgatgactccggggtggatacgctcccgtgtgccccttaatcgcgcgcgcacgacgcgtgctaagaagtacattcctagcacgttcggcagcgccatgaggaaaagcattgcgtcggccagatcaagaatcgatgccatatttgtcgcagctccgactaggagcaagatgag

SEQ ID NO: 609390 - DNA, 359 bp, Homo sapiens
tgcgaatattgcacgagatctccgctgtggagaccccgccatgtgctgtcgcactatgtgcatgtgatatgtggcgcgcgaactgttccagagtttctgtgcacagagggataagccgacctccacagactgtgagccaatatacctggaaggccgcaatttctttcgcttcaacagactgagttacacgcaagaatgtgggcgcggagaccgcaacccaccggaaaggtgccggtgggcaattaacggagataccggcacaggaagacctgccactcttatatgcgcggcaccattaacaggaacgcgccgaaccgtgcaatggaagcaatcgcaagggcagaggcatattgtgcgcc

SEQ ID NO: 609391 - DNA, 779 bp, Homo sapiens
  misc_feature (16)..(16): n is a, c, g, or t
atagcatagtagagcngggagactgcgccgacatggagctgttcctcgcgggccgccgggtgctggtcaccggggcaggcaaaggtatagggcgcggcacggtccaggcgctgcacgcgacgggcgcgcgggtggtggctgtgagccggactcaggcggatcttgacagccttgtccgcgagtgcccggggatagaacccgtgtgcgtggacctgggtgactgggaggccaccgagcgggcgctgggcagcgtgggccccgtggacctgctggtgaacaacgccgctgtcgccctgctgcagcccttcctggaggtcaccaaggaggcctttgacagatcctttgaggtgaacctgcgtgcggtcatccaggtgtcgcagattgtggccaggggcttaatagcccggggagtcccaggggccatcgtgaatgtctccagccagtgctcccagcgggcagtaactaaccatagcgtctactgctccaccaagggtgccctggacatgctgaccaaggtgatggccctagagctcgggccccacaagatccgagtgaatgcagtaaaccccacagtggtgatgacgtccatgggccaggccacctggagtgacccccacaaggccaagactatgctgaaccgaatcccacttggcaagtttgctggtcccacagatgtacataaccgaggggcagagaaaacagtcgtgtatgcagaaataagtaggaagtgacgtttgccgattttgcttttaataacacaaattgtaagcttcaaaaaa

SEQ ID NO: 609392 - DNA, 176 bp, Homo sapiens
taaaacaatgttcaagtaactaaaaaaaaaaaaaaagaaaacagaggaacaaacaaacaaaaagcagaagacaaaagacaaaatggcaaacatcagccctaacatctcagtaatgacattaagtgtaaataatctaaatacaccaattaaagatagctattggcaaagtggatttt

SEQ ID NO: 609393 - DNA, 239 bp, Homo sapiens
  misc_feature (32)..(32): n is a, c, g, or t
  misc_feature (69)..(70): n is a, c, g, or t
  misc_feature (72)..(72): n is a, c, g, or t
  misc_feature (74)..(74): n is a, c, g, or t
  misc_feature (163)..(163): n is a, c, g, or t
  misc_feature (224)..(226): n is a, c, g, or t
aactcgttggcgaagggttgagggcgaaaatnttctttaatatcgcgatggtggtgataatcgaagtanntngngggggaagagatatgaataaagttacgcacaccccaggcgacagccattcacccaggcggcgagtggcgcgaacgttagccagatcganagcctgttgtgtcccccagggtgaggtaaagctggagcagtgccacagcgtatcattgccnnntggcatcactttg

SEQ ID NO: 609394 - DNA, 931 bp, Homo sapiens
  misc_feature (16)..(16): n is a, c, g, or t
  misc_feature (559)..(559): n is a, c, g, or t
atagcatagtagagcngggagactgcgccgacatggagctgttcctcgcgggccgccgggtgctggtcaccggggcaggcaaaggtatagggcgcggcacggtccaggcgctgcacgcgacgggcgcgcgggtggtggctgtgagccggactcaggcggatcttgacagccttgtccgcgagtgcccggggatagaacccgtgtgcgtggacctgggtgactgggaggccaccgagcgggcgctgggcagcgtgggccccgtggacctgctggtgaacaacgccgctgtcgccctgctgcagcccttcctggaggtcaccaaggaggcctttgacagatcctttgaggtgaacctgcgtgcggtcatccaggtgtcgcagattgtggccaggggcttaatagcccggggagtcccaggggccatcgtgaatgtctccagccagtgctcccagcgggcagtaactaaccatagcgtctactgctccaccaagggtgccctggacatgctgaccaaggtgatggccctagagctcgggccccacaaggtgagcagaggctngggtacctcccccaacctaggacaccccacttgccctgctgaccccagctgtcccggtgtagatccgagtgaatgcagtaaaccccacagtggtgatgacgtccatgggccaggccacctggagtgacccccacaaggccaagactatgctgaaccgaatcccacttggcaagtttgctgaggtagagcacgtggtgaacgccatcctctttctgctgagtgaccgaagtggcatgaccacgggttccactttgccggtggaagggggcttctgggcctgctgagctccctccacacacctcaagccccatgccgtgctcatcctacccccaatccctccaataaacctgattctgctgcccaaaaaaaaaa

SEQ ID NO: 609395 - DNA, 398 bp, Homo sapiens
tagaggattccatgccaataacctccaatggcccctcctgaaggacaaccttccggactctgggaggtagggatcgtcttaaatcagaaatgagaggttcttgtccccctagggaaatttgggaaatatagcatgagatgtgagccctgaagccggggcatggatctggggctctgcccctggctctgtctagtggagaagggtgtgttttctctacctgacccttgcatccccttggcaatggcaactttctgcattgttgttcctcagatttcatttaaataaaaacctgtagtctgggcaacatcgggagaccccaactctacaaaaaatacaaaaattagctgggcgtggtggtgcgtgcctgtggtcccaactacctgggaggttattggcat

SEQ ID NO: 609396 - DNA, 1026 bp, Homo sapiens
  misc_feature (16)..(16): n is a, c, g, or t
  misc_feature (654)..(654): n is a, c, g, or t
atagcatagtagagcngggagactgcgccgacatggagctgttcctcgcgggccgccgggtgctggtcaccggggcaggcaaaggtatagggcgcggcacggtccaggcgctgcacgcgacgggcgcgcgggtggtggctgtgagccggactcaggcggatcttgacagccttgtccgcgagtgcccggggatagaacccgtgtgcgtggacctgggtgactgggaggccaccgagcgggcgctgggcagcgtgggccccgtggacctgctggtgaacaacgccgctgtcgccctgctgcagcccttcctggaggtcaccaaggaggcctttgacagatcctttgaggtgaacctgcgtgcggtcatccaggtgtcgcagattgtggccaggggcttaatagcccggggagtcccaggggccatcgtgaatgtctccagccagtgctcccagcgggcagtaactaaccatagcgtctactgtgagtgccccagctgtgccctcagccccaccccagccccagcctcgccctcatcaccgaccccagccccagccagcttgggttcctcttcgtaggctccaccaagggtgccctggacatgctgaccaaggtgatggccctagagctcgggccccacaaggtgagcagaggctngggtacctcccccaacctaggacaccccacttgccctgctgaccccagctgtcccggtgtagatccgagtgaatgcagtaaaccccacagtggtgatgacgtccatgggccaggccacctggagtgacccccacaaggccaagactatgctgaaccgaatcccacttggcaagtttgctgaggtagagcacgtggtgaacgccatcctctttctgctgagtgaccgaagtggcatgaccacgggttccactttgccggtggaagggggcttctgggcctgctgagctccctccacacacctcaagccccatgccgtgctcatcctacccccaatccctccaataaacctgattctgctgcccaaaaaaaaaa

SEQ ID NO: 609397 - DNA, 1289 bp, Homo sapiens
  misc_feature (16)..(16): n is a, c, g, or t
  misc_feature (559)..(559): n is a, c, g, or t
  misc_feature (1041)..(1041): n is a, c, g, or t
  misc_feature (1086)..(1086): n is a, c, g, or t
atagcatagtagagcngggagactgcgccgacatggagctgttcctcgcgggccgccgggtgctggtcaccggggcaggcaaaggtatagggcgcggcacggtccaggcgctgcacgcgacgggcgcgcgggtggtggctgtgagccggactcaggcggatcttgacagccttgtccgcgagtgcccggggatagaacccgtgtgcgtggacctgggtgactgggaggccaccgagcgggcgctgggcagcgtgggccccgtggacctgctggtgaacaacgccgctgtcgccctgctgcagcccttcctggaggtcaccaaggaggcctttgacagatcctttgaggtgaacctgcgtgcggtcatccaggtgtcgcagattgtggccaggggcttaatagcccggggagtcccaggggccatcgtgaatgtctccagccagtgctcccagcgggcagtaactaaccatagcgtctactgctccaccaagggtgccctggacatgctgaccaaggtgatggccctagagctcgggccccacaaggtgagcagaggctngggtacctcccccaacctaggacaccccacttgccctgctgaccccagctgtcccggtgtagatccgagtgaatgcagtaaaccccacagtggtgatgacgtccatgggccaggccacctggagtgacccccacaaggccaagactatgctgaaccgaatcccacttggcaagtttgctgaggtagagcacgtggtgaacgccatcctctttctgctgagtgaccgaagtggcatgaccacgggttccactttgccggtggaagggggcttctgggcctgctgagctccctccacacacctcaagccccatgccgtgctcatcctacccccaatccctccaataaacctgattctgctgcccaaaaaaaaaaaaaaaaaaaaaaaaacaaaaaaaaaaaaaaaaaaaaaaaaaaaaaaaaaaaaaaaaaaaaaacaaaaaaaacccaaaacccctaaacaccaaaaaaccaaaaaaacttancccacaacccaacttcacagcccctttccccattttaccctattnaaatccattttcacatcacacttttcttacaatttcaaaattttacaaatacctaaaaacttcccattttcacaaatttattgcacctaacccccttttcccctttttgcaaatatccccaattaccaactaccccttccccttttccaaatttctaaacattccaaaactccaaacgatattgggaacctgctaactctttg

SEQ ID NO: 609398 - DNA, 341 bp, Homo sapiens
  misc_feature (44)..(44): n is a, c, g, or t
  misc_feature (62)..(62): n is a, c, g, or t
  misc_feature (71)..(71): n is a, c, g, or t
  misc_feature (96)..(96): n is a, c, g, or t
  misc_feature (214)..(214): n is a, c, g, or t
  misc_feature (323)..(323): n is a, c, g, or t
cttgaacttcatacttcgatatcatattctagtttacagaacanattttaatcaatagaagnattaagatnaaaaacatggccggtcggggtgctnacgcctgtaatcctagcactttgggaggctgaggcgggtagatcacaaggtcaggagatcaggaccatcctggctaacatggtgaaaccccgtctctactaaaaatacaaaaaattanccaggcgtggtggcaggcgcctgtagtcccagctactcgggaggctgaggcagaagaatggcgtaaacccaggaggtggattgcgccactgcactccagcctgggcaanagagtgagactccctctc

SEQ ID NO: 609399 - DNA, 926 bp, Homo sapiens
ctaccgatgtcattgtccacagaatggaagaaaactattataaaatttatatgaaaccaaaagagtccgaatacctaaagcaatcctcaggaaaaagagcaaacctggaggcatcacattagccaacttcaaaccataccataaggctacactaaccaaaacagcacagtgccagtacaaaaacagacacatagaccaagggaacagaataaagaacccagaaacaaagctgcacacctacagccatctaacatttgacagagtaaaacaaaaataagcaaaagggaaagaacttactattcactacattgaatggtgctggaatagccagctagcccatgccaaaggatgacgctggacctctacgtctcatcatatataaacaattacatcaagatggattacaaactttaaatgtaagacttcaaactctaagaatcctagaagacaatccaggaaacatgattctgtacattgccttgggaaagcatcatgactaactattcaaaaacaatggcaacagacaccacaaattgacaagtcagacctaattaataaagagcttctacacagcaaaaaaaccattaccagaataaacagaccacttcagaattgagagagacatctggcaaacctctgcatcaaagagacctatttcagaacgtatagcgactgacaattggacagcaaacaaaacagacacaaaaaaatggtcgcggccggcctgaaagcttaaacatgttgggccgccccaagacgcacaggctacacgtgtcaagaaccggcgcaccggggccccaaaaacgcggccgggggacacccggctgcgtcggatcaagcgcaccacccgcggcgcgggccagacccgcgagcgcccgccgagcaagaaaccgcactgactcaccacctcaaccaatcacacgact

SEQ ID NO: 609400 - DNA, 971 bp, Homo sapiens
  misc_feature (16)..(16): n is a, c, g, or t
  misc_feature (858)..(858): n is a, c, g, or t
  misc_feature (860)..(860): n is a, c, g, or t
  misc_feature (864)..(864): n is a, c, g, or t
  misc_feature (870)..(870): n is a, c, g, or t
atagcatagtagagcngggagactgcgccgacatggagctgttcctcgcgggccgccgggtgctggtcaccggggcaggcaaaggtgggcggcggggaaaggtgggcaaaggccggcggcgggcagaggcgggcaggggacgccttcactgagcccgctcccggcaggtatagggcgcggcacggtccaggcgctgcacgcgacgggcgcgcgggtggtggctgtgagccggactcaggcggatcttgacagccttgtccgcgagtgcccggggatagaacccgtgtgcgtggacctgggtgactgggaggccaccgagcgggcgctgggcagcgtgggccccgtggacctgctggtgaacaacgccgctgtcgccctgctgcagcccttcctggaggtcaccaaggaggcctttgacagatcctttgaggtgaacctgcgtgcggtcatccaggtgtcgcagattgtggccaggggcttaatagcccggggagtcccaggggccatcgtgaatgtctccagccagtgctcccagcgggcagtaactaaccatagcgtctactgctccaccaagggtgccctggacatgctgaccaaggtgatggccctagagctcgggccccacaagatccgagtgaatgcagtaaaccccacagtggtgatgacgtccatgggccaggccacctggagtgacccccacaaggccaagactatgctgaaccgaatcccacttggcaagtttgctgaggtagagcacgtggtgaacgccatcctctttctgctgagtgaccgaagtggatgacacgggttcattgccggggaaggggtctggctggtggtcttcaaaacttagcccangnggtnatcacncatcctcaaacgttctgcaaaaaaacacaacaaaataaaaaaaaaccgcattcggaaaaagaagagacaaaatccactagagagcctagtataggcacaaa

SEQ ID NO: 609401 - DNA, 1048 bp, Homo sapiens
gggatcttctcaatcgcggacagcccgtgcagaatctgcattccctgtgacacccacagggggctgctgtttgcggcctcacactcgggcgtctccatgtgcccatggccaactgcatgcctgtacagagagtctgtggggactgcctccctgcccggggacccctactgtgcttggagcggctccagctgcaatcacgtcaacctctaccagcctcagctggccactcaggccgtggatccatggacatcgagggagccagcgccaatggacctttgcacgcgcgtctgcggttgtgtccccgtcttttgtaccaacaggggagaacgccatgtgagcaagtccagcttccagcccaacacagtgaacactttggctgtccgactcctctccaagctggcgacaccgactctggctacgcaacggggcccccgtcaatgcctccgagtctcctgcgcacgttgctacccactggggaccttgctgctggtgggcacccaaacaggctgggggagttccaggtgctggtcactagagcgagggcttacaagacagactggtagccagcatactgcccagaaggtggtgcatggacggggtggcagacccaaacaagatgacgggtggaagtgtaccccgtcattagtcaagaacatcggggtgtaaatgcaccaagcctgctagccatcggcagctgggcggtgaagacaggtctacttggaaaggaactcatggtgaaggtgcacgcactatgatcaggcgggtggctcccagtataatcatggcctaacggacacggctaagacgtacagacttcctgaatcagatgactgtgcaaggaaccaaaaactccttgggtgttgcacatggaacacacaccaggaaggccaacagccgtgggtcactagacagctgatacatccccgtgactgttttggttacgaatcataatccagtacgagataagactcgaatagacaacaagagatgacaactagcacgcatgtgaacaatgaaggtgccgactcaacacgtcgcaatgaccacc

SEQ ID NO: 609402 - DNA, 1103 bp, Homo sapiens
  misc_feature (16)..(16): n is a, c, g, or t
  misc_feature (731)..(731): n is a, c, g, or t
atagcatagtagagcngggagactgcgccgacatggagctgttcctcgcgggccgccgggtgctggtcaccggggcaggcaaaggtatagggcgcggcacggtccaggcgctgcacgcgacgggcgcgcgggtggtggctgtgagccggactcaggcggatcttgacagccttgtccgcgagtgcccggggatagaacccgtgtgcgtggacctgggtgactgggaggccaccgagcgggcgctgggcagcgtgggccccgtggacctgctggtgaacaacgccgctgtcgccctgctgcagcccttcctggaggtcaccaaggaggcctttgacagatcctttgaggtgaacctgcgtgcggtcatccaggtgtcgcaggtgagctgccctgtgggctggacgggaattctcgtgagtgatgccagctctgcctcacggtctcgctgcgattccagattgtggccaggggcttaatagcccggggagtcccaggggccatcgtgaatgtctccagccagtgctcccagcgggcagtaactaaccatagcgtctactgtgagtgccccagctgtgccctcagccccaccccagccccagcctcgccctcatcaccgaccccagccccagccagcttgggttcctcttcgtaggctccaccaagggtgccctggacatgctgaccaaggtgatggccctagagctcgggccccacaaggtgagcagaggctngggtacctcccccaacctaggacaccccacttgccctgctgaccccagctgtcccggtgtagatccgagtgaatgcagtaaaccccacagtggtgatgacgtccatgggccaggccacctggagtgacccccacaaggccaagactatgctgaaccgaatcccacttggcaagtttgctgaggtagagcacgtggtgaacgccatcctctttctgctgagtgaccgaagtggcatgaccacgggttccactttgccggtggaagggggcttctgggcctgctgagctccctccacacacctcaagccccatgccgtgctcatcctacccccaatccctccaataaacctgattctgctgcccaaaaaaaaaa

SEQ ID NO: 609403 - DNA, 1428 bp, Homo sapiens
gatcgtaatgacgggctatagtcgcacatctcactctgccgagctcgataccttacaatacaggcgtccctatcacgactaccaaggaccagactcctcgaaatgagttagcacgcacggaaacgattcgtgaccgaagtgcatactctatggatctcttctatgcctgaagagatgctgtcgagagaagaagctgaatgctcagagggactatgttactcgcctgctggtccaccaaagatcaggtccgcctgcagtcaacctggtaccatccgaacatgacaagatgggttcattcgaacatggacgaatcagaatatgccagtaagctgaataccgatcatgaagtgacattatcacagtgtagaaccgtgtacacatttctataacatcatgatgacggcctcatgtacttggagtgtggctgtccgtgacatggctcgtcctgcactctgagactagtctataaggacgattcatcgtgaatgctggcttaagtaggacctcacctgattacaggatagtaccctaaaagcaacaagtctggggatatctatcgagcgtgtatgtgactaagacaaatgtagtgcaccctagtaattgcgtccagatctaggactaccagcggtgagctcggggaatacgcttgttaagcggcgttggagtaagaccattcttcccttgcgaaaagctcaactatttagaagaaggaaggaattcccttagaggaggcgcacctttggcccctcgaggggtcaagtatgggagacttgataacatggtttagatagtgtgcacagtacaactcccggtcaattgaaaagtcaaatcgatgtgaagcatcaaagcatgggtggatacctgtgtgtgaccttggccccacgtgcaagtttacaaggcactacaaatgggacataatatcattgttgcacacggtaagcggagggatttcactgtttgaagcaatatccttggtacacacacaaatcattgagggagcaaacttgcaaggaaaatcagatcccacagcaaggtgcatacttggttggaaatggcacagggaaggaaatttacattggttccaaggaatgcctatattgggcgcgttgaattaatttgggcgcccctgtgtcataaatttgggtcaagtggtaacgaagggttttttaagaggagagaaaaaataagcgatttacaagaaagaggttttggctacattggtgacaagtagacatccgttgtcgagggtcaggaggtgacattcacccaaaaaggccctcctatgtgtttgtgtacgaaaagtattgaaggaaacattttgacacactatggatgggacatttcaatccttgaaagaatggaaagccataaaggagtgaatatggtctggacgattggcggagaagcacgtaataaactggaaaagag

SEQ ID NO: 609404 - DNA, 290 bp, Homo sapiens
aagcatttgcatcagctacagtcttaaattgcttctttaccaaggatatttacagaaaagactctgaccagagatcgagaccatcctagccaacatcgtgaaaccccatctctgctgaaaatacaaaaatgagctgggcttggtggcgcacacctgtagtcccagttactcgggaggctgaggcaggagaatcgcttgaacccgggaggtggagattgcggtgagcccagatcgcaccactgcactccagtctggcaacagagcaagactccatcttgagcctgtgtctg

SEQ ID NO: 609405 - DNA, 878 bp, Homo sapiens
  misc_feature (6)..(7): n is a, c, g, or t
  misc_feature (9)..(9): n is a, c, g, or t
gcctgnncngacacgaagatgaccctcgacagccgccgggcgctgatcaccagggaaggcaaaggtatagggcgcggcacggtccaggcgctgcacgcgacgggcgcgcgggtggtggctgtgagccggactcaggcggatcttgacagccttgtccgcgagtgcccggggatagaacccgtgtgcgtggacctgggtgactgggaggccaccgagcgggcgctgggcagcgtgggccccgtggacctgctggtgaacaacgccgctgtcgccctgctgcagcccttcctggaggtcaccaaggaggcctttgacagatcctttgaggtgaacctgcgtgcggtcatccaggtgtcgcagattgtggccaggggcttaatagcccggggagtcccaggggccatcgtgaatgtctccagccagtgctcccagcgggcagtaactaaccatagcgtctactgctccaccaagggtgccctggacatgctgaccaaggtgatggccctagagctcgggccccacaagatccgagtgaatgcagtaaaccccacagtggtgatgacgtccatgggccaggccacctggagtgacccccacaaggccaagactatgctgaaccgaatcccacttggcaagtttgctggtgagtcaggtgggagccagccagcgtggtgccagcagtccctaggtagagcacgtggtgaacgccatcctctttctgctgagtgaccgaagtggcatgaccacgggttccactttgccggtggaagggggcttctgggcctgctgagctccctccacacacctcaagccccatgccgtgctcatcctacccccaatccctccaataaacctgattctgctgcccaaaaaaaaaa

SEQ ID NO: 609406 - DNA, 432 bp, Homo sapiens
  misc_feature (45)..(45): n is a, c, g, or t
gagatctgtagggcccgagctctagggctatcaccttgagtcagnatgtccaggcacccttggtggagcagtagacgctatggttagttactgcccgctgggagcactggctggagacattcacgatggcccctgggactccccgggctattaagcccctggccacaatctgcgacacctggagtgacccccacaaggccaagactatgctgaaccgaatcccacttggcaagtttgctgaggtagagcacgtggtgaacgccatcctctttctgctgagtgaccgaagtggcatgaccacgggttccactttgccggtggaagggggcttctgggcctgctgagctccctccacacacctcaagccccatgccgtgctcatcctacccccaatccctccaataaacctgattctgctgcccaaaaaaaaaa

SEQ ID NO: 609407 - DNA, 208 bp, Homo sapiens
  misc_feature (18)..(18): n is a, c, g, or t
  misc_feature (50)..(50): n is a, c, g, or t
  misc_feature (92)..(92): n is a, c, g, or t
tagcggccgcgcgctggnaaccaccactctactctctacttctgtgagtncgactttcttggattccacataagtgacatcacatgggattngtctttctgtgcctggctcatttcacttaatgtcctccaggtttatccatgctgtcacagatgacaagattcctttggtaaggctcagcagcactgcattgtgtatcagtacctca

SEQ ID NO: 609408 - DNA, 135 bp, Homo sapiens
atgagtaatttactcttaaggatgtattgtaagcgcctttatattgctgcttaccttctacaacttcgaacaacacatccttatcttgtcaccactgccaatctattttcctcaacaacatggaaatgtggtgtg

SEQ ID NO: 609409 - DNA, 711 bp, Homo sapiens
  misc_feature (16)..(16): n is a, c, g, or t
  misc_feature (255)..(255): n is a, c, g, or t
  misc_feature (258)..(258): n is a, c, g, or t
  misc_feature (260)..(260): n is a, c, g, or t
  misc_feature (275)..(275): n is a, c, g, or t
  misc_feature (283)..(283): n is a, c, g, or t
  misc_feature (285)..(286): n is a, c, g, or t
  misc_feature (292)..(292): n is a, c, g, or t
  misc_feature (294)..(294): n is a, c, g, or t
  misc_feature (317)..(317): n is a, c, g, or t
atagcatagtagagcngggagactgcgccgacatggagctgttcctcgcgggccgccgggtgctggtcaccggggcaggcaaaggtatagggcgcggcacggtccaggcgctgcacgcgacgggcgcgcgggtggtggctgtgagccggactcaggcggatcttgacagccttgtccgcgagtgcccggggatagaacccgtgtgcgtggacctgggtgactgggaggccaccgagcgggcgctgggcagcgtgngcncngtggacctgctggtnaacaacgncnntgtcgncntgctgcagcccttcctggaggtnaccaaggaggcctatgacagatcctttgatgagaacttgagtgcgatcatacatgtatcgcagattgtggtcagcggctttatagcacggtgcgttccagatgccatcgttaatgtctgcagacagtgctctcaggggtcagtaactaactatagcgtatactgctccaccaagggtgccctggacatgctgaccaaggtgatggccctagagctcgggccccacaagatccgagtgaatgcagtaaaccccacagtggtgatgacgtccatgggccaggccacctggagtgacccccacaaggccaagactatgctgaatcgcatcccactctgctaagtttgcttaagtaaccccacgttgacgactgtcattcatctttgttgctgagcgg

SEQ ID NO: 609410 - DNA, 110 bp, Homo sapiens
tcacgcccattacacaaccaggaaaacccacatgcttgtggatcccaaggcccaactccccgaaccactcaggtcctgtggacagctcaccttgtgtacattgggcgtga

SEQ ID NO: 609411 - DNA, 101 bp, Homo sapiens
cggttatattcttatctaccaggcttcgtaatatctcccatattgtaacctactactccggaacaaaagaaccatttggatacatggtatgtctgagctat

SEQ ID NO: 609412 - DNA, 516 bp, Homo sapiens
taaagacagggtcttgctctgccagccaggctggagtacaatggcataatcatggctcacagcaacctcaacctcctgggctcaagcaatcctcctgcctcaacctcctgagtagctgggtctacaggcatgcaccaccactcccagctaattaaaaaaaatttttttaagagacagggaatcggtgtgtgtgggggggtgtctcactatgttgcccaggctggtcttgaactcctggccttaagggatcctcccaccttggcctcccaaagtgttgggattacaggtgtaagccaccacgcctagcacctattcagtacaataatgtgctgtacagggttgtagcctaggagtaacaggctgtaccatacagcctaggtgtgtagtaggtttcaccacctaggtctgagtaagttcacttgacgatgttcacacaacacaatcacctaaggatgcatttccgtgcggcttaccctgtggctaagtgatgtatgattgttttatcagtcgacccgg

SEQ ID NO: 609413 - DNA, 113 bp, Homo sapiens
gtttaagctaggtagctagtagggtagaccctggtcctacttggcataagccaggccctacctagggagcccgtaggtacctacctaggtagctagtagagtaagtacctagg

SEQ ID NO: 609414 - DNA, 239 bp, Homo sapiens
catgccgataatcccagcaattcagaaagctgaggcaggaggattacttgaggccagactgggcaatatagcaagaccccatctctaaaaaattaggcatggtggtgcatgcctgtattcccagctactcaggaggttgaggtgggaggatcacttgagcccagaagttcaaggctgcaatgagccatgattacaccacggcactacaaccttggtggcacagtgagaacctgactctt

SEQ ID NO: 609415 - DNA, 351 bp, Homo sapiens
agcgtgaaggaggagctgatgttgtcaaccccccacaggcacaaagttcactagggcgcgtaggcacaggtcattacccaggaggagcgcagggggatggcgtgaccttgtcggtggtgtagctgtcccagatgatgagcttcccatcctgggaggcgctgaccagcagccttgagtcggtcccccagtgcatcgcatagatctttgccaggtgcccacggagtgtcctccggggtcctcagtgtggattctccccactgggtccagcccagctgtgatctgggtcagtgttgagtccccacatgcttttcgggcatcccggatctggttccggagctgctcgggctcctg

SEQ ID NO: 609416 - DNA, 290 bp, Homo sapiens
ggctgactctagcaggatcccccaagcagttaatacatgactcagaactcggggccgggtgtggtggctcacaccttgtaatcccagcactttgggaggctagaggtgggcggatcacttgcggtcaggagttcaagaccagcctagccaacatggtgaaaccccatctccactaaaaatatcaaaaactagcagggcattgtggtgggcgcctgtaatcccagctgctcaggaggtggaggcaggagaactgcttgaacccagagacggagaaggttgcagatgagccc

SEQ ID NO: 609417 - DNA, 1337 bp, Homo sapiens
  misc_feature (885)..(885): n is a, c, g, or t
  misc_feature (957)..(957): n is a, c, g, or t
gagctgcgtcggtgctgcagtgagaagatgtgcgtgtctccacaggagttaaacgttcctcgtaattttcgcttgtttggaagaacttggaagaaaggacaaaaaggagtaggcgaaggtacagtaagcttgggggccttgaagattgacttgcaacgatattgaccactttacccaggggtggaccagggcattgcattacttggggaccacccaagggaccacactttatggaaacaacacgaaatactcataacgcccttggacaaggttagaccactgtgggcaccttacagattagcccaagaaaggctccctaccgtccaggttcacagcactttttggtacaaccacaaagaactttaactacattagacacgcggtgacaattcagacttcacatttcgcaatgtgggaggacctggagatgggaattgcccccgggaaggacaaataccccaagtattgagtataagccaaaacatggggcaaaacaagttacattattaggccattacaacacgttgtggtacctttaccacagaatgacgtaaagacacagtgtcttacagtggcatgggtgcaccacaagggaacacacacttcaattgaacacggccttttcaccaacacagacccacacccacagacaacggtgaacccctcacacgcatttaccacaaacgaacactgtcacatatgattatctcacgggatgggggaactcgttccacagacaggttatggttgccatatgaacacagttccgaccacgaaatccctatattccttacgcttacaagttggtttgaccacagtgggtttccattagggcaattttcaacactgtttaaattccaaccgacaatttggcgcacaagaagnagtacaccaccacctttacacaaggttcaacacacagtaaaccagttattacaccaaggaacttcggacgtntcaaaaaccaccactttttgaacacccgttgtgcgaaaccagatatgtatgggtaacacgggacacaagtcagtaaattactgacacagtaaactaaacttggaatacacccgaacacgccgccagataatacatcggtatatgtaaccaagaggtattaacaccacagagatgacgtggatagaacaaaccgattacacctggcaacagcaaccgagagatatatagcatcagacgttcctgattgggaaacgacgtggtgcgcaacgacatagctcaaacattctcaacgaacccaactttcaacacaccactgtggacgagataacgttcccgacgacaaaataacgacaaaatgtcacagggggctacacaccaac

SEQ ID NO: 609418 - DNA, 146 bp, Homo sapiens
atctcccgactcgttcacttgcgatcagctctgacatactccatgaacaaaaagtatccagatgactcagtaagaaacccccatcacttccttccttgagtctctgtctgactgtccttgtccacccgcctttccatccaagaaac

SEQ ID NO: 609419 - DNA, 928 bp, Homo sapiens
aaaagcatcacaaggtggtacatcatgcaaggctcccttgagcactcccaagaagaactggtaatttgaaacaaaagtatgtgtcttcatttgtatcggaaaagtactgtctttaaatagtttctatgtagagattccccgacaatggatagaaattaaccgaatttaagacctgttttatggatggcaagtttggagacgaataggacaagagagttggaggattggaattgccattcgccagttactaattgtgttcagtattcgttacacaaactagtaataatcggttcacttgttgatagatagtttaataaggtggttggtgaatgtgaagtagcaaataactggtatatcgtgactaagcgcttaagaatgcctgtcttcgagaggaaggtgttataatattaaggaacagtgccaaatacacttgtgcatatctgcaatttagtctctttgaatgtatgttactggattagctccctcctcctgctgtgatggtaccgatgcatagagtcaagtcaagatccttgtgatgtgtgtcatggactttgacaatatgtaaatgtgttgtgagccagttgattgatttaaggcatcctatcaattgaatgcactctatgaagagtggaacgtaacatgtgtgtaacaacagccaataagctattcgctgtcctggcacaataaatggtaacatcatgaagacgactgggggagcctacgcaaaaattctcaacacaggggggcgcgggcacatagaggagaaacggcactgagccacggaacgggcaggaaaggggggcccctaaaaatcgcggcgccgattccacacacgggctgaggagggtaacaggaccgacaaaacaccgcgggacagagagacacataggaacgcaaccacacaaaagacaagacaaggcacgcacca

SEQ ID NO: 609420 - DNA, 1083 bp, Homo sapiens
gctctgccctgatgtcagagttggcatccggctgcatccagaggaaagggaaactgctctctctctctcctctgcctccacttctcttgggggtaacacaaaaggatccttctcagcaaatcatgtcagtatttcaagctctatttctatggcacttatctttcgagaagagtcttcacctcttcaggtgatgacttggtaggtagtaaggtagggagatcttgatttgtctgaggatgtcgctactttattctagtggaatatcctgtaccttgtgctagtgtgtcatacgaccatcgatccccattaccctatgcgttagtgactggcttatgggtcaaaaacctgttatgatttctaaatgttataaacagactaaatattcccgactggtgatgcctgtgtgacgacatttgggtatttagtaggaaacaatgcagtgtttcaaagcttcgagagaagcttcaaaagtggacacaattgctgaaaacgagagatgagatcagtgacacgagttatctcagtgttttgcataatagacaagaccacggcgttgtggttccctgacctgtttggtcgtttactgttacggatctgaatcatgttctgggtaaggagaggaggagcgaacactggactacagattcggtcttgccaaatcagaattcgttcggtcacagagtcaggtcagggctgggtgcggtggttcgaaccctgttaatcccaagcctttgggaaggctgagggcagtgcatcacgtagaagaaacaggcctgggccaaagggggtgaaaatcgcgggccctaagaataaaagatgcgccaaaaacttcagactggggcacatggggggccacatgcccctgggtgggcccgaagcatacaatggggaaaaggccgtaccgccgcaaaacaaactccggatggcaacccccaggcagagtggaaaggttgcgcacagcgacagctgggacaccactgccagagtaagaagttcacaggcgcggcgcaccacacaaggagaccctgactgtcaagagacccaaaacacagaaagcccaacaacaacaggagcaacacaacg

SEQ ID NO: 609421 - DNA, 913 bp, Homo sapiens
  misc_feature (62)..(62): n is a, c, g, or t
  misc_feature (193)..(193): n is a, c, g, or t
ggcgtgatagtctacacagaaagttctccgctcccagacatggtgtccctcgcgacttcctngctcggaagcgcagccatgccggcattgtgggaaggtgaacgagcttgccctaaggatgacccgtccaagccggtccagctcacagaccttcctgggaatacaagggctggtcattgaacgtcactatctntggcggagaatgtcggactaggccgtggtatccaaacggatgtagacaaacgcaacggaggtgcggtgccgagagctgtgctggaggcatatgatacgaggacgatcgacctcagtggatgcgttgatggcgcggtgtgtcggcctgtactgatcggaaaatccccttccgaggccttcccgggagccctatcgaatgacctgttcttttatgcctgtacgcggactttcagctgactgcaagtgctaaagcatggccggttgtcatgatagacgcatagtatgggcactacagagtctgacacggaacgaagggctctattagcatagtactggcaacatacatggcagcgatcgcaggagtggcagagagacgcgaagctgggagagaggacttcagcacgtccatgcaaggaagtcactgccaagtaatccgggtcgtttgcccagacccgagaggcgcctgcatgactctgcgccagaaaaacggccccacgcgtgatgtgagatccaggtgaacgggagggacatgtggccgccgaagctggactgtgcccgcgagaggctcgagcacgcatggtacctgtgaagcaagtgtgtggtgcaggatgagatgatcgacgtccgtcgggggtagaaccaaagggccaaggctactaaggggtcaccaatcgttgaacaccaaaaagctgccgcagagaccacgaggcctgccgcagtg

SEQ ID NO: 609422 - DNA, 144 bp, Homo sapiens
  misc_feature (18)..(18): n is a, c, g, or t
  misc_feature (36)..(36): n is a, c, g, or t
  misc_feature (101)..(101): n is a, c, g, or t
gctggactgttggagganatctgagtgtctttgcanacttggcttaaattgtttttttttaactaaaagtagttgtaggtgaaatgattaccttaggtaantgttttggtaaatggcttgaagttgaaccacagcagttttgct

SEQ ID NO: 609423 - DNA, 337 bp, Homo sapiens
aattcctcgtctatacattcagtgcaatcccaaacaaaatccctccacctcccaggttcaaacagttctcctgtctcagcctcccgagtggctgggactgcaggcacgtgccaccatgcccggctaattttttgtatttttagtagagacggggtttcccgtagttggtcggttgttcttgaactcctgaccttaggtgatccacccacctcagcctcccaaagtgctgggattacaggcatgagccatcacacccagcccaccatggtttttagtataaattaacaagctagcactgtatacctatgtaacaaacctgcatgttctgcacatatat

SEQ ID NO: 609424 - DNA, 435 bp, Homo sapiens
ggggagcccggtaatcgcataaaacttaaaactttacagtcagaggttcatttcctcttcttaacaccaaaaaaaaaaaaaaaaaaaaaaaaaaaaaaaaaaaaaaaaaaaaaaaaaaaaaaaaaaaaaaaaaaaaaaaaaaaaaaaaaaaaaaaaaaaaaaaaaaaaaaaaaaaaaaaaaaaaaaaaaaaaaaaaaaaaaaaaaaaaaaaaaaaactttttggcccctttggcccaatcctttttaaacttaaacaaatttttccattgggcccaaatttgagccaaattggccaattccccctaaaggggggcttattaaaaaaaaagggccccaatttaaaaaatttggaattggaaaaaccttgggtttcccaaaataaaaccctttggaaaaaaaccccttttccccaaatgggaaaccggccccccccc

SEQ ID NO: 609425 - DNA, 306 bp, Homo sapiens
gccttgctggtgatctcatacaggatcccatgtcagatcatgaggcaggaacagatgatgcagaatacagtcttcctggattgccaaggagtgttcctgggtcatgcctccatctgggtcctttctgaaacctgcatttggagcttgctggctgtgggagccaggtatactgtcaatcctgcccgcctgcccacgctgctgtcatgaagctggcccaccacgtgcctcctccagaaagccggaagctactccttgcctctgcatattgacttttccttggcatgccatcgggccgtacataggatg

SEQ ID NO: 609426 - DNA, 743 bp, Homo sapiens
  misc_feature (85)..(85): n is a, c, g, or t
  misc_feature (94)..(94): n is a, c, g, or t
  misc_feature (109)..(109): n is a, c, g, or t
  misc_feature (373)..(376): n is a, c, g, or t
  misc_feature (422)..(423): n is a, c, g, or t
  misc_feature (436)..(436): n is a, c, g, or t
  misc_feature (438)..(438): n is a, c, g, or t
  misc_feature (522)..(522): n is a, c, g, or t
  misc_feature (545)..(545): n is a, c, g, or t
  misc_feature (547)..(547): n is a, c, g, or t
  misc_feature (563)..(563): n is a, c, g, or t
tccccagcctactgcctctccaccacttctctcttcaaccccccaccccctaccctcccacccacttgcgctgcgcacacgctcncgccacgcncctgccgcgcgcgcngcgcacgaaaccaaaatccaactaatggctatatattctacgctacacaatacagcctcttctgttcataatatctctcacccccatccctcctcacttcccctgccactttccatgctttcattttgacctggtcccccacctgtgaagtgtagtggcatccatttctaatctatgcattcatccaacacacttatttattggctggagatagaaaatcacaccacctgcacaggccttctcggcctccaaagcccatccttnnnnttccccctccctctctcaaatgtattatcaccaccacacactgccnngcctccctccccncngcactgcctgaaggccagtgtgggcatagcattagctgcttcctcccctcctcccacccactctcccctcccatcgcatcctgntgtgtcaatgccacaaaatcctntnttcgctggaaccagtnctagccgcgtgtgacagtcttgcattctgtttgtctcgtggggggaggtggacagtcctgcggaaatgtgtcttgtctccatttggataaaaggaaccaaccaacaaacaatgccatcactggaatttcccaccgctttgtgagccgtgtcgtatgacctagtaaactttgtaccaattc

SEQ ID NO: 609427 - DNA, 349 bp, Homo sapiens
cagctggaacgggagtctgcgtatgcagcccggagtctggccttgtaggggcgaaggtgcaggtagatcgcggcgggcttgcagtcttgtagcgcctggagcgcgtccctgcccttagcggggcttgccccagtcgcaggggcacatccagccgctgccggctgacatgcatgcctgttgcgctgcgggatgtctgctggggtctgcggcagcctgcacctgcgctgggcgaccagctgcaaggtcccctgccctggctgggctgggcatgcaatggtgcctggggagacgggtgctggtgtgcatggcctgtggtggcccctacatgggccaccttcttgcccggctg

SEQ ID NO: 609428 - DNA, 898 bp, Homo sapiens
  misc_feature (130)..(130): n is a, c, g, or t
  misc_feature (630)..(630): n is a, c, g, or t
  misc_feature (827)..(827): n is a, c, g, or t
  misc_feature (886)..(886): n is a, c, g, or t
  misc_feature (898)..(898): n is a, c, g, or t
gccgccctccagcatttcgccctagaggcgccattgccgcagggtgattagttgtaggaagagagtcgcagagggccttagaggtgattcgaagagacgggtggtagatactctgagaaccattattatnggccaaccctgcttgaactcgccttgatcttctgtaaagaggtcttggttgggtgtggcgtgttgcgttcttctttcttccttcctccgcgcgtggtttgaggctgtcaggtaggccgccagcgtgcccgccgcgccctctccccccccccccccctctcgccccacccccccccacccgcatagtgcacgtcgccgctagatgtggtagggcgttgaggtttcgtggctcgccgtcgtgggtgggagatgagggatatcgtagggggcggcgcggcgggtggggtgcgcgttgggcattattgggggtgcgcagaacgagcgcgctccgcaggtcgagcgtcgcgtatgcgtatcttgctcgctgtcgtcctctactgtcattgtcgtggaatttgagtatatgtgcgaatatcaaattaatgttagatgtttgtcacttcaatccactacacgtgtgttctgcgcgaacggtgtgtgcaagacgggaggtttttggantgctgagagacgggtcggtgagcgactacggctgatgttgtgtacttgatcggtcgcacttcaagccagttccacctttagcgacagtatgcttgagtcagaggcccggcgtcgtgagcgacggtgaccgacgacataaggcaacgcttacagattgacggctgacgacatggtaggatagggaggcggcttctcgnaggtggtggcggcgggggggtgaagggatggaaataagattggcggtacgtgtcggggnacgccacgcagn

SEQ ID NO: 609429 - DNA, 335 bp, Homo sapiens
gactgaatacatatgatttcatgtatgccacattttgtgtactgattcatctgtcgatgaacacttgtagttgttcccaccttctaggctattgtgaatgccgctgcgtacgaatgtgggtgtgcaaatctctctgtaactccctgctgaagcccaattttgtaatgactgatgctacctacttatgaggacatgtacgactatgccaccatactgtcagcatgcaaccaactgagctcatggtaaatacagttacgttgcagctctttgtcatcactaatgaacctgtgaaaacaatagaagtacgaaaccagtaagacggcctcaagaaaaca

SEQ ID NO: 609430 - DNA, 434 bp, Homo sapiens
cttctgcttttcttgctgccctgtaatcattgtggccacagacattcctgcctaaacttaaccccttctgtgagcaaaaggtactgtgagttccttgagaaataggtactgtactggctagttttgtgtcaacttgacacagctggagttaccacagagaaaggagcttcagttgaggaaatgcctccatgagatccagctgtaaggcattttcttaattagtgatcaagggggaaaggtcccttgtgggtgggaccatctctgggctggtagtcttggttctataagagagcaagctgagtaagccaggggaagcaagccagtaaagaacatccctccatagcctctgcaccagctcctgcttcctgacctgcttgagttccattctcgacttcctttagtgatgaacagcaatgtggaagtgtaagctgaat

SEQ ID NO: 609431 - DNA, 513 bp, Homo sapiens
  misc_feature (182)..(182): n is a, c, g, or t
  misc_feature (238)..(238): n is a, c, g, or t
  misc_feature (327)..(327): n is a, c, g, or t
  misc_feature (496)..(496): n is a, c, g, or t
gtaatgccaagtgactgttcctgagagccagctctgggctgtcttcaccatgtaggtgggcttctgtctaaggagaacagcattaggagaggtgcatcggcccatgagcgtgaagtccacccagcctagtggacactgaagtgctcacaaggcctccacctgcctttgtaaaagccgaatgntgatctcaaaccatgggaagcccgaccgccccacccctcctcaccccagcgtttantgtttcaggggtcagctattatctcaagatttctatccaagtggaaacaaactgaatcatgcacacgacttatctgtgtggtgtcagtnacactcaggctcttgctacggaatgcaaagaacaactcacataccagtgtcaaacagaatgcacagaagagacctaaaacagcagcaggtcactcggttcacaaaaggtgactcccagtcaagtctgacacactgtcttggttgtagagcacagttgccatcctctttncctgggtaacatcaccg

SEQ ID NO: 609432 - DNA, 716 bp, Homo sapiens
tcggcacgaggccacgtcccccttactaccagacaagccttagaccaaaccatttacccaaatcaagtataggcgatagaaatgaaacctggcgcactagatatagtaccgcaagggaaagatgaaaaattataaccaagcataatatagcaaggacataaccccatataactactgcagtaatgaattaactagaaataacttagcaaggagagccaacagctaagacccccgaaaccagacagagctacctaagaaccagctcaaaagagcacacccgtctatgtagcaaaatagtgggaagcatctataggtagcaggcagacaaacctaccgagcctggtgatagctggattgtccaagatagaatcgttagatatcaacatataaatatgcaccacagaaccctctaaatcccctgatacataaaacatgataagatccaaagaggaacagatctttggaacacataggaaaaaaactgaagagagagtaaacaacttacaaaaccataggaagggctaacaagacacacaacaaataaaagaaagagtacaaggcaacacaaacccaataaccaaaacaaatcccaaaacatataaacagaactcctaacaccccaatggaccaatctacaacctaaagaagacgataagcaagataagaaacatgaaaaaaacacacccacaaaaccaggacaaatacaacaagacaga

SEQ ID NO: 609433 - DNA, 81 bp, Homo sapiens
  misc_feature (14)..(14): n is a, c, g, or t
tgcaaaggcttttncatctctggtccattcaacgtccaatttcttgtcaaaggaaatgatgtcttggtgattgagtgtaac

SEQ ID NO: 609434 - DNA, 94 bp, Homo sapiens
  misc_feature (1)..(1): n is a, c, g, or t
ngcaggtcgtgaggtctggacgagtcaagaaagccgtagccaacgctgttcagcaggaagtaaaatctctttgtggcttggaagcctctcaggt

SEQ ID NO: 609435 - DNA, 696 bp, Homo sapiens
aacataaaaacttgtatatgactttaaaaacaagaggacggcacagtattgtgcaaaatgtatatagcgcatatgcatggagcaaagcgggcgtggaccgtgttgcctaatgtttaataacaaaaaaatatgtattctttaaaaatctgcaagatgatgtctattagctgtgcatctcttacagttagcttatcttgcccgggtcggggtgggataaaggtgtgtcggttagcacctctggaagacctatctagagctctttcactttcctgaggttatttgcccttactggtgttggtatgtctgtgccggccatgggccctcattgccttgaattcctgctcttgatcagggacaagggaggtcaagctctgactaatgccatgatcctgattaaggggtacagacagggaagtatcgtgctacagctcatgaattaacctgtcccaagcctaatccccctccagtggcatcatgcctctacccaagcctttgtgtgcccatgttatgcacacagctgtaggcattcttaagtcccctgtcgcatccagtggaagcattttaaaagtttcttgttacttatatgggttgtcccttaatggctgctttacagatttagtcagtggctcgtagtgtcaccccttctctagattagggtgtcaaagagattgtttgcttaaatataatagccatcat

SEQ ID NO: 609436 - DNA, 796 bp, Homo sapiens
  misc_feature (245)..(245): n is a, c, g, or t
agcggggaggaggtggagagtgaggccgaggcgtggcggagcccgggaactccctcctcctgaagtaacgcgtcccgggccggctctgccgtcgttgctgccgccgggctgccccggaacgaaggagtgtgagagcgatgggagaggcgcccgcgtgccttcgcctccggcctccgtcagctcgacgctgcggctatgcaacgtctcatgagagcgctggccaggagtgcactagatttgataantgggctgcgattatatattaaagtagagcacacaaatagtcccagcacattaatgtacatgatcctggaaatttctccagagcctgtcagtacaagttgttgatgccatgattggagctgaatgccatctacaggtgtcatcgcatgctccgtcattcttcagccaatagggagatcatacctgttagttatctgccagatctttccaggtacaccatgcggaggatcctcagtgggttaacggccttgttggaaggtggcattcttcctcattctcatgtgtgtggcccatagttcagttagtccgttgctgcgtttcacacagggtgtgtgtgcctattacttatgtgagtccgttcgtcttgagttcattgcaaggcttatcaattctacccggaccgaaaccgtttctcatttgaaagggaaagggggtggaacagaatctctctagggtaatgtatagccaatgacgggaagcggccagcatttggcctggggaatgcggcgcatcccctcggcgtaccagggcagaggaatggttagtatccccg

SEQ ID NO: 609437 - DNA, 115 bp, Homo sapiens
ctctacgaagatccacactagcagcccatagcactctgcgcaaggtagccctttgtcttacgagacaggaagccgccgctgttcttcacggcaacgtcaagcgttctcctcagga

SEQ ID NO: 609438 - DNA, 308 bp, Homo sapiens
taaagttttattgttagcatttgctctaataatatcctttgatcctttcgctataaacacacacacacacacacacacacacacacacacatatatgtgtgtgtgtatatatatagtttgcttaaaaataaccaaatttggccgggcgcgatgactcacgcctgtaatcccagcactttaggaggctgaggcgggcggatcacgaggtcaggagatcgagaccatcctggctaacacggtgaaaccccgtctctactaaaaatacaaaaaattagccgggcgtggtggcgggcacctgtactcccagc

SEQ ID NO: 609439 - DNA, 154 bp, Homo sapiens
aaacagatgggctatctgattttaatgttatgcaagtgcaagcattttaggatatacggcaagcttctggatgccactgagaactggtggctgcaatggactgcggaagattgttgatgatgagataaggttaaagaactgggcaatcagaggg

SEQ ID NO: 609440 - DNA, 454 bp, Homo sapiens
  misc_feature (20)..(20): n is a, c, g, or t
cgaatctcgagctcgttacncctaattggttcttcgatgacgccctcggacacatgcgcgtgtcgccagggagtgctggtcgacaccgcggtccttcagacacgggcccgagtcgcccgggtcccctggtggaccccgctggacatcgggtacgggcacgagtccccggggacagctggtcgacccctcaggcccactgacatggacccgagtcccctgggacagctgctcaaaaccaagggctctcggaccaaaatgcaagtcgcccgggagggctggttgaccccgcaggcgctcggagctgggccggagtcgccggggacatctgttggaatcccggtgcctcgggaatggtcacgagtcgcccgtgagacctggtcgacccagtcggccctcaaaaccgtgcccgagtcgccaaagacatcgggtcgaccgtcatcgaagaaccaattag

SEQ ID NO: 609441 - DNA, 565 bp, Homo sapiens
gtggttgccgtggcttatagataatcacgtcattttctaagacccatctagtctctgcacagtgcaaataggtaagttgaatcaatgagggtttggtgggagtcaccacccgtgcctccttcggatcctttaatggtggcactcatctcggcagtccctccagaaatgcagtattcctttcagtttactgttttcccaggtagaggcaattctagtggcctccacttggccttttccaccgtaatagccctcattccacaggtcaagaaaccagtatggggattctgccagctgctgtgtcaaactattccaattttgcatctggaattgggaagataaccacaggatgggttcagggacctgctgtgcccactgtgagatgcacctgacctaaaattccattgatcacctgacctccataagccctgactctgactagtggaccatggtgacattttgggtctcctggaatcagggtcagttcagagccagtgtccagcagtgtccacaaaagttctgattatttccttttcctcagttgcacagttacactgttaaaatgcct

SEQ ID NO: 609442 - DNA, 236 bp, Homo sapiens
  misc_feature (91)..(91): n is a, c, g, or t
ccccccccttaaccaaaggtttattttgggggttaaaggacagggtttctggccccccccccttttttgaaaaccatttttgggattaaanctccctttcccagggaaaaagggttgtttcccccccccccccgggggccctggggggtgattttgggtttgtattttttaaacaaagggccttgccctttccctttgtaaaaaccctttgccagggttttaccccgttttaccca

SEQ ID NO: 609443 - DNA, 218 bp, Homo sapiens
acaagcacatacaggttttagtgtgaacctaagtcttcattttctgggataaatgcccaggagtgcagaggctgagtcgtctggtagttggatgtttagctttttaagaaactgccaaactttcctggagtaactgtgccagttcacattctcaccagcagcgtatatgtgattgtagatttctcggaatccttgccatcatttgtcaccgtccttat

SEQ ID NO: 609444 - DNA, 517 bp, Homo sapiens
  misc_feature (468)..(468): n is a, c, g, or t
tcggctaggtacgaggctgggtggttgaattccgcaatgtcacctttacttatccgtgacgtgacgtacctgcattgcgtaacatcaacctgaaaattccggcagggaagacggttgctctggttggacgctctggttcgggtaaatcaacgcatcgccagacctgatcacgcgttctttactgatattgattgataggcgacatactcctgcatggatggtccacgatctgcgcgagtataccctggcgtcgttacgtaaccaggttgctctggtgtcgcagaatgtccatctgtttaacgattacggcttgctatcaacagttgcttacgcacggcactgataccacgctacagcccgtgaagccacaattgaacgaagtcggccgccgctattgcgcctatcgtccatgcgcatcttcactcaagtaatgactggactataccgtgtctcgattacagctggatnttggtgaaaaccggacgtgtctgcctctctggtcggtccagcgctcatc

SEQ ID NO: 609445 - DNA, 262 bp, Homo sapiens
taaaaactttttaataagtgccattctgactggagtaaaatggtatctcactgtggttttcatttgcatttccctgatgattggtgatattgaacatttttttcacgtttgttgccaagatagatatttcactgtcttatgttcaagaagtctggaggaggtcaggtcagaactgatctggagctccctggattcggggctcaagctcctgctaccttgccgtctctgcccttcacagcttccactccgaagtccccacatg

SEQ ID NO: 609446 - DNA, 952 bp, Homo sapiens
ctgaccttaggtgatccgcctgtcttggcctcccaaggtgtgggattacaggcgtgagccaccaatcccggccaccagctaaatactttcgagtggttctataaattctgtaagaacagttacccaagactccgtctcaaaaaaaaaaaaaaaaaaaaaggaatattatttttttaaatgtgggttgtaaaaccccagggtggggcccatttttttcttcttttctcttttccccgcgaataccgcgaaaagggggccccaagaggtgtggcccccttaaaaaggggcttaatattttcggccggggcggggggggaggaaggcccggtaaaaacccccagcacatttgggggggagaggctctggaagacccaacggggcgacatcccacgggaggtcccgaggaggtgcaagagaaacacgagcctggaaaccaacgcgggggggcaaccttccggcttctccataaataaaagaggggccaaaaataaaacacggggggggaggagagggaatgggccgctcggtgggtcccccaggcatacaaccacgaggaagaggcacagagggacgaggaaaaaatcctttggaattccaatgaaaaggggaaggttggccagaggatagctgtgaaaaatggcccaacagggtgatcatcagagccgtggggggaaccaggggggagattgttttctcaaaaaaaaaaaggtggggtttattacaagaggcgagcggggggggggcaacaagagcatttgcgggacaacattcgagtttacaatggcgtaaataattgggggggaaacaaacgttggaattccgggtattttattataccacattgtggaagacttcatgctggtgagggacaccgcattcagggataaaattagagtcgtttttataaatggagcgcagggtcagttgtatcggcaggatcggcgataaggga

SEQ ID NO: 609447 - DNA, 815 bp, Homo sapiens
aacacccgaaaagcccaagggaaaaaaatccaaaaatttttaaggtttgaggtttataaatcgttaaaaaatagtgtttaaaaagagccccttcccctataagggcaccaaaatatttaaaattttaagagccatttgggaaaaaacgcgaaaagttttaattcccagggggtaattttacctccaaggttccaaggatatttccttaaccggtgtataaatccccatttggggattggcacaattttataaggggttaataatttaaaatttctacaagaaatcctgacaaggaccccactaaaatttgcctttaaaaatttaattttccaaagaccaggaaccaaatttgtggtcaattgtccagtttaacaaaaggggacttgaatgggataaaattatcctttaattatctagagctacccagttcgaggcttgaatttaatcatagcaaatgtttccttgacagcataatattaccatacaccatattaccttataattgccattacagttccttatcaaaaatgttaattctttgcgtgagcaaaaatcaataaaaccttatgtttgaccctaaagtatttgatcagggaacagaaggtgtaaattggacagatcccccgaataactttcttcaatcaagttgaaaatccaaacagctatgtaagtccccaggagagctctttttcccttatcttctcatttgttttgttataaactgtttaaatagttcaaatggttgtgcatgcctaggggatgaaacctatgtaatagaaatgtactgttttatgaataaggagtaaaattgtttt

SEQ ID NO: 609448 - DNA, 317 bp, Homo sapiens
  misc_feature (109)..(109): n is a, c, g, or t
  misc_feature (116)..(116): n is a, c, g, or t
  misc_feature (118)..(118): n is a, c, g, or t
  misc_feature (136)..(136): n is a, c, g, or t
  misc_feature (140)..(140): n is a, c, g, or t
ctgctacggacgccctgaagaaaatgaatggaggtgaagtgcaacattcattttccaagctactttacctttcacagatcatcgccacgcctccagtatttcgaatgtncgatgtntnaacatgatgatgcttttntgcnccgatacgcgcgttacccagggcacgccttggagaaaattgaaaagtggagccctggtattgctgaacgctattgcgaaatctggaagaagaaatcatcccttgcagctatggcgaaagcgttggtttttcaccattgtcgttattgtccgttaacgcagacctgcgtccgtagcgg

SEQ ID NO: 609449 - DNA, 115 bp, Homo sapiens
ccacttagctccctagtaatagggactattataggtgtgcgccaccccacccggctaattttgcatttttgtagacatggggtttcgccacatgcccaggctggtctcgagcccc

SEQ ID NO: 609450 - DNA, 346 bp, Homo sapiens
  misc_feature (47)..(47): n is a, c, g, or t
  misc_feature (99)..(99): n is a, c, g, or t
  misc_feature (180)..(180): n is a, c, g, or t
  misc_feature (192)..(192): n is a, c, g, or t
  misc_feature (272)..(272): n is a, c, g, or t
  misc_feature (288)..(288): n is a, c, g, or t
  misc_feature (320)..(320): n is a, c, g, or t
  misc_feature (338)..(338): n is a, c, g, or t
tttgattcaggggagacctaccttggggttgacacacgccagaattntggccttcataggcgtcccctgaagctgagcctgggaaggggttgacctctntctgttacaccctcatggagttaccgtgtcgatgacatctgagtggagtgtctgtgctgagggttgcagctgcagctgcgncagggctgtttnagttgctcagacctgcatgtacttggagaattgggaagacctggtgttgaggaagctggctggcctggagaccatagggnggggaggggtgcagantctgggcaacctgggagagttaggggacaaantaaggggagaattgccantcatgggg

SEQ ID NO: 609451 - DNA, 1004 bp, Homo sapiens
gtgttcctttgtgcgatgccggagctcgggcagccgtgattcgtcagaggtcatccgaaaggcgactcacgaggaggctgccatgtcacaaccgggcgtggggatgtccgtcagaacccatggcgtgagaaagggctgacgccgcctcttcggcccagaggactcagagcatgtgtgccgctaatgtgattgcgctaatggcgggttgaatccaggaggcctctgtggagcgatggaacttcgtactttgtcgatgcgatgacacctattgagatgggtgacttcgcctggtagcgtgtgcagtggcttgagcctgaccaagctctatcttcacacgatgccccgggagaggccgggatgagttgggaaggaggcagagtcgtgggtggcacgcgtcatcctggactaactgtaaggggacatcagatgaaaaacatgtgggcctgtcacttgtcttgttagccctttgttgtcgctcgtctctagaggtgagccagagcgtgaagggtccccaggttgggacctggcacgactctcagcggttcagaaaaaacggtgagtaggacagcaatgactagatttctacgcacattcaaatcgcgggatgagtcttctccatggtaggaatgccctaaatccgcccacaggaagcctgcggtcctggaagcgcgagggcctcaaaggcccgtctacatcgttctgccttaggctcaggttgtgtggctgaattatattcgtgtttacacttaagaactcctcatgtacatacctggccgccctgccacaggctcggggttacattattacaccagactagggggttgattgcaaggtcctagaggctggcatttcgtctgtgaaaacattaaagctccaaccgggtcactatcctcaccgaagaggttagagggcaagaaaatcaccccctggccatggttgccacaaggtgtaccagagcaggaaaaaccttcgagaaattttgaagcagcaggacggacaagcca

SEQ ID NO: 609452 - DNA, 268 bp, Homo sapiens
tgtcatgtcaccagcaaatttcaccggaatgcacctatatgcctcttgcagggcagagtcggtccggaaaccaaaaagccgaaacggagccgtgaattacgagagggagcccttgaagctttgtgtattataaccctccacttgaccgagtccttgggtctgtgtgagaaacctggcgcaccccgaaggtcctattttgggtgggggaaccgccttcattgggcccatttttggccgggagaggggtgagaaatggtccgtcaccgtt

SEQ ID NO: 609453 - DNA, 1037 bp, Homo sapiens
tccaggcggccgggaaaatgggggactttcaaactgagcgtggcctaccaaaagcagccgaccatctttcaaaacaaagaagagggtcctggctggggaagaaactgggcaaggagaagctcccgcggtactacaagaacatcaggtctggggcttacaagacacccaaggaggcttattggagggcacctacattgacaaggaaatggccccttccactgggtaatggtgtgtccattcagaagggcgagatcctactctgggaagtgggtagaccaagatagaaaatggcaaagaggaccattggtcaatccgccgaagactattctggcactaactatccggcaatgtacaagccgagcttcgaaaagagggcacacaagaaacatgtgtcgtgaacaccgtgagtccccacgtgagatacaggggagcgtccagaaatcgggtgacactcgagcacacaggtgggacagaggtgccggacctcgtgagacaaaaaaggtgcggcattcaagcgtgtgcctcaaggggtcacacaaaggggcgtgcgcgagagacacaaagaaagaagtttcccagaaagtttcgtgaagagcgtgagacaactcggcaccgatatccaccaaaagaggtacaaataagagcttaatatagacactcattgtacccaaaagaagacaacaagaagccaaccagaaaacaacaaaacaacaaagaacacgaaaaaaacaaggacgagggggattaactataagggagggcgaagaaaaacgacgtagaacaacaagaggaaaaaggaagaaacaagcagagaaaaaagagaccaccagcacacacaaaccaacaaacgcgcacaacaacacaggagaaacacacacaacagaaacacgcaaaagcaaagcagcgccacaacgccaggggaaagccgaacaaacacgaccagaccgaggcaaagaaagacgaagcaagaacaggcgaaaacacaaggaagaaagaaaggaaacaacaagagacaaacacggagacgcggcgaaacg

SEQ ID NO: 609454 - DNA, 1303 bp, Homo sapiens
  misc_feature (438)..(438): n is a, c, g, or t
  misc_feature (443)..(443): n is a, c, g, or t
ggttgcaatcaacatggaacctgagatctgtcaggtatcttcagtcgacctgtgcaagattatttagcacttaggatgccgctagtgcatccgaggggaccgtgacagacgcaatctagccagagcactcactgcgtgccagaaactgcgaagacaagaaggctcactgaacggtctgtacgctagcatctactgccatggtctcagctgcgtagagtagtggtaagggttgaatggacacagacagagtcctatttgtggtccttcagactgctcctgaaggtggctgtaaaggaggtgcgtagagtggccgtatcggatcatgagtcttccgtgagaggactcgtcgtcaagaaacaaggtggccctcaggatctcagcaaactgacgtgacatgtgaggtgtctgcacggtgatctgaaactatcggtgtaccgntgacnatgtgtagtacaaaggatataacggagatgctgactatggtgggagaatgaagggagcgacctggggaaagaggttgctgcgaattaaaagggacggctttggcgaaggaatcccaatgagtttactggaagaataaagtttggtgcacctctttacacattcatagctttgggggaatccacgtacgacagagactagaagggaaagtcctcgcatcgaagaattaccgaatgcgttattacaaaccgataacgattggaggtaaagcaacgggccagacatagcaatatttagcgcttgagcggcttgtgtgttaggacaagaatgcctccgattttgcggagagataagacggaagaccgtcctatgtgccgcgtcggcgtccctcgaagcaagacaatagaaccgattacgttggcgtatagacagacgttccaattgagaaaggggacacatatccgaggttgtatgtcggagatgagcttgagtggggctgtaagcgcttgaggaaactcggacatagaacttgactatggcttagttcaaattttgttcgacgcgtgtatggagaagagccacgaaggcacttttctacgagagataggcaaagaacgttgcaagaaagtgtccccagaggccataaagatgggtagaacattgtgggtgaatactcgtatgcacgaaggaagacgcagggatccgcgctgtgccagagaaaagcaacaggaagacaccaacgctagagagacttggattcatgggtagacatagggcgttgtgacttactcaccttcgggcaatgcactttggacacgttcacgcgtaggtgacgaggagaccgaggccaggaaaagacaag

SEQ ID NO: 609455 - DNA, 471 bp, Homo sapiens
cttactctgcccttattatccaataaaacagcgcagcaggcatttggggcactatcggtctctgcgtcttggtggtagtggtcccccaggcccagctgtcttttcttctatctctttgtcttgtgtttttatttctacgatctctcgtctccgcacatggggagaaagacccacagaccctgcagggctggtccctacagtggcgcaatcatagctcactgcagcctccaactcttgggctcaagcaatcctcctgccttggcctcctgggttgctgggactacaggcatgcaccaccacgtctggcaaagttttaatttttttgtagagattgaggtctcactatgttgcccaggctggtctcattctcctggactcatgcaatcctcctgcctcagcctcccaagaagtggggattacaggtgttagctaccacaccccactaaaaagctgagttctgtgtttcacgac

SEQ ID NO: 609456 - DNA, 343 bp, Homo sapiens
aattcggttatacattgtcatgatgacagatgagccagaactcactatctggaatacaaaatctcaagggcaaaacaaaaacaaaaaatccaaggtgacaagaagcaatagtgtagtataacaagtcagcaatgtgcatctgaatacccacccaagggctgggtttggaatgcattcttcctagactcctataactgcagcaaataaaacgggtggcttgtgcaaaggagcacatgccttccataaaataccaaggatgagcttggcaaatgttctagtggctctgagagtagcccagcaaggaaaggttctgaattctcccagggtcatcatagtaatgagg

SEQ ID NO: 609457 - DNA, 956 bp, Homo sapiens
gcgtcagtatcgacctagtacaacgctgtgctacaactgacactacgcttgagccagagggcgctagttgacgaaactgcatcaaactctgtagctcgatagggaggtctgtgagggatagccgatcacggaagcttcgcgaggaacacgtagcgactaggatagagcgtgctagatactcatctagtaataaaatggctacacccaggatgctacgagatactgaattctatcggtgcgtgtacgtagatgaactgcgggtactcaccgtgaactctgagtgcgtgacgccgaaagaccatgatgcaattccgggtgagtgaccctagtgggcttacgcccgagtagtactacgcaactacggagatgtacgtggaacgcgcaacgcgaacgtaagactctagcgtctatatgagtgactacgaagtgtcgagcgtatgacggaataacaaaagggtaagtccccacccggcatgaactcaggcgaggcctcatcaggtatggagtggagtcctgccctatgtgcaaacgggttagcctcaaatgagaggcgcatgacatcagacgatagataggaccgtattgcgtctggtggggcatgcccttatgacatagacaggaaacacgaccttacctgaaggggtatataaacacgtcttaaggacacgaaggacgcatatgacgtcgatctgtttactctgcagagactgcgagcgcaactacaggtagatgcaggcgaagtaatagcaccggtaacatggttacatggcaacatagcggcttcgtagctgggtcggccagtgaaaatgtagtgataatctaactattgatgcctcagtcgtgtaaggcatgaaggggcgcatagcagaaaagcgattatagaaactggtgtcgatatgagtcagacaacgcgcaggtaacgcctcgcgtagccctctcacacgtgcgcttttgta

SEQ ID NO: 609458 - DNA, 284 bp, Homo sapiens
ggattgtgaccagaagattttgaaaattaaatattactgaagatttcgacttccactgttaaatgtacaagatacatgacatattaaaggaaatgtgtaactttttgtgtaaatacatcttgtcttgttttcattcaaaaacatttcacttttggggttgcggtgtaaattttgcaggtataattcctggcattattttttggtggtaggattaatttggctgtaagatatcgcgatatgtctacacatactgtatacctcgtgtcatctgtaaggtgagagta

SEQ ID NO: 609459 - DNA, 339 bp, Homo sapiens
tacgccataaattaggaaacacggtatcaccatgaccaggtagtccttgtccagctcatgaacgtacttgcccacgatatccttggagctgaccaggttttccatttcgtctatgagcatttcggcggtccgctcgagttcctctttggcttccaaggcctcttcaagggcccgagccagggacagggccttggtttccttctccctggcttctgcctcagctctgtccctctcatccgcgtatttggaagagatgtttttctcctcggctaacaactgatcaaatttcctctgcttcttttccaggttggacacgagttgccagaagaagaaaatgat

SEQ ID NO: 609460 - DNA, 124 bp, Homo sapiens
gtgatctagcaggatcttcgggagccttaccctatgctaggcttgtcttgagaacatccctcagtaacttgactattcacattgacctacatggatgtcccatctggcagggctgagtcagttg

SEQ ID NO: 609461 - DNA, 1255 bp, Homo sapiens
  misc_feature (255)..(255): n is a, c, g, or t
  misc_feature (956)..(956): n is a, c, g, or t
  misc_feature (1030)..(1030): n is a, c, g, or t
  misc_feature (1099)..(1099): n is a, c, g, or t
  misc_feature (1103)..(1103): n is a, c, g, or t
  misc_feature (1134)..(1134): n is a, c, g, or t
  misc_feature (1136)..(1136): n is a, c, g, or t
  misc_feature (1172)..(1172): n is a, c, g, or t
  misc_feature (1202)..(1202): n is a, c, g, or t
  misc_feature (1253)..(1253): n is a, c, g, or t
gtgtgacagtgctgttcgtcttccttaatacttcttagaagacctctggaatcggtgccgacgtacactggatatcacaagtctctgtgatcacctaccggagcctgagaccgcccggccgcgggtgtgacatgacacagtatttcgctctccgcctgttcatccttttatgccactctgtattggtgctatcagaggtcgagcgtcacgcgacgcccactacgcgttgcctttagttgtctcgcccccgagcgntcaggccttaccatctagcgcttactcctctccaagtcgtgttcgctgggagttcatcccatgcccactttttccgcacccgatctaggaagtgggttacgcgcctcgtcatcatcctaccaagtatgtatgtatctctcctctccactcatccacccatctttaaagtccccttctgtctatactgatacagtaatgactccctcctttgtcagtcgggcatgagccttactgctcgcgggtgcatcccccacgcatacccgagcgccaggctgaggcaagccgattatgccatacttaccgcatgtcgctatgattcggtggtcgaaacaaccaataccgataaaaaaaaacatctgaacatcactttaatcgtgacctgcgtgtggagccatcaactttatcgttgtctaggtgccgtcgacgcgtcacaacggagactcattgattactttacgattgtttactcatctcgattttgcgttactgtcttctattattcgtccatacttacacatcagacatactcatattgaccttaactctcgcactcatcttcccaccgacgcgcggatgcgtgtcttgtactatgtcgtacagtcgtacgtactcgacgcatctgctagacgtcggcctcccagttacctcgtctactgttacgtagtgacgaccgtgctctccatctaatactgacgctactngtcgtcgaccgaccagtagtcgtatcctaaatatactcgagcatcttgtcactcgtacgcgctcctagagtagnctagatatctggtatgcagatatgcgagacgccagcacgctctatatgtatgtaactcgcgactcaagncgcncatgctgcgcactgacacgcggcgcgctcgngngtatagctcgtctgctcgcaccacgagacataccgncttcctgctctctcgtatatgctcgtctgnctcgcactcaagatcgctgacgacacatgcaacatacacagcatatgaatnag

SEQ ID NO: 609462 - DNA, 236 bp, Homo sapiens
ctcaaactgctgcccgggagctgaagctgcagtgtgagggattgcggcaggagctccagttggcgggcgccccgtagcgcccccgtctgtgcagacacctcctgggcgcttccgcatcctaccctgtagaagctgaacgagccccgcaagtgcttcctcgaggtggcccacgagcagccgggcaacctcaatgcctgggccaatctggcccacgtgtactgccgcacccggtgacg

SEQ ID NO: 609463 - DNA, 109 bp, Homo sapiens
acatggcgactcccggccctgtgattccggaggtcccctttgaaccatcgaagcctccagtcattggaggctagccccaatggttaacagaattccagagagtttcaag

SEQ ID NO: 609464 - DNA, 532 bp, Homo sapiens
tatgagtacaaattcagtggcctttgctttacgacagctagtccctattagcatttcttctttttccccgggggtactttctgatgggtaagggcgtcaagcacagctgtggtgtgaagagttagggccagtgtcttgaaaatcaatcaagtagtgaatgtgatctctttgcagagctatagatagaaacagctggaaaactaaaggaaaaatacaaatgttttcggggcatacattttttttctgggtgtgcatctgttgaaatgctcaagacttaattatttgccttttgaaatcactgtaaatgcccccatccggttcctcttcttcccaggtgtgccaaggaattaatcttggtttcactacaattaaaattcactcctttccaatcatgtcattgaaagtgcctttaacgaaagaaatggtcactgaatgggaattctcttaagaaaccctgagattaacaaaagactatctggataacttataggaaagcctagaacctcccagtagagcggggatttttttctct

SEQ ID NO: 609465 - DNA, 122 bp, Homo sapiens
caaagcaagttggcacagaatttacaaaaatgtcagggcaggggagcatgcgagcataattcaagatagaaagatagagacagcctcccttgccctgacatttttgtaaattctgtgccgac

SEQ ID NO: 609466 - DNA, 208 bp, Homo sapiens
agtctaaattgaatcaacaattgctgaacgttctggtcaatcttcattattaaaagcagcttcacagctgggtgatttctgagtcaaatgtataacgaagcttgtcactatatcaagtctcttctctgggaggaggcatgggctgagatacatcttgtgctcaatatagctccccacatcgagtatttcacagcaatttctaggttga

SEQ ID NO: 609467 - DNA, 262 bp, Homo sapiens
tatcaatcagtcgctgacagcatcttatgtcactccgattttcataccacaccgtgtgctacacacataacgatgaattaatactattacatccgcatgggctccccagggtattgactggatattcggagaagaatatgcttcattcacggacagtttctattgccgcggtcgcaataacattatctgtcctaactttttccctttttaaaaaattctaaagcttcatgactttttaaaacatcacttcttggctgggtgc

SEQ ID NO: 609468 - DNA, 419 bp, Homo sapiens
gctgtacttccggcagaagctcagatgtttcgcaagaagctttcatcaaggcatattattctctagagacattgcagaacgagtacgccttttcatcttggatcactcgtattgtatctcgtttgtgtcacgatccggcattccagaaaaaaagaaaagaagaagtgatcgcacgagacaatattttaacaggaaagccactcactcaaggattcgatggaacatttgttggttgcggattcatctcgaaaagggctatgcaaaaactttctcctgaacaaccggggaaacttattggtattaccggggatattccaggggcttttaacttattgactgaaaatttgcctgaaatccttacagatacccggttggacagggtaaccagacccgtcgggggtaacccgagctccgaaatt

SEQ ID NO: 609469 - DNA, 86 bp, Homo sapiens
gagtgtcagcaggatttggaacaacctttttccccttacttatgtctactattaaacatattttaatacctttgaaaaaaaaaaaa

SEQ ID NO: 609470 - DNA, 829 bp, Homo sapiens
agcggataccgcgagcgagagcacctcccgagtcagcgcccgcgccctccgctgccgttctcctgccgggacctcgagcgaaagactgccgaggtgaaagatgagatccttggttgtactgggacgaacagagttctccgcattccatcgagcgaggagcggggctgcggcgagcggtatgggccagacaaccgtggggcaactgggcacacaacacgtgcagcgcagctcagcaggtatcagaactgagaagtcgaccaacagtacgaacatagaaacagcgacggagaggaaatccgtgcgtagagaagagagcaccctgtgacctcacggcagaagtagacgagaacgctcgcgccaaagaaacggcgaacgaggtaacgttgcaagacgtcgtacaaagaccacatgggcgcagacctggccttgcaaccggatcgccgccgaatcagcaacatgcacacaaggactcaaggagcacgcgccaacaaatgtggagaacagaaaaggagttgcggcggaacacccagacactcgacctgaagaagaccacgaaggcggtcggaacaacggcgcagggcaccaagcccaccttggaataaccaactgtcgactgaggcacaaccaacgcacataacagcccctcctctgacaccacactagcctgtcggcaaggcgagaacccaacacgggacacaaaggaccccccgacgaagagttgacacacacctgcctaccacgcgcgacaggggcacggcgccacgttgatggcaaaaagatcacccaataagaggaatagggcgcggaatgagcgagactaacggcaaac

SEQ ID NO: 609471 - DNA, 952 bp, Homo sapiens
ggcagtacattgagctccatagagacagtgccggggtcagagtgtggagccggacgggcactgggcgacttcctgtgccttcgcttgagtgcaaagataatcgtaaacgatgggcagataggaggatcctaatgaagcctgagaggccaagacatgtcagtcatatcgcagttcttgtgtcgcataacttgtcggcgaggagcattaacgaaggaacgcagcccacgatgcttcagtcagactttctcagaggtttgcgtagaggaatgtgctcatgatgacgcgtgtgagagaccatggtctgactagatgagacatcggaaccctttgactgactgttgcgcacatatgcggtaccaagtgccccgttatcgaacagcgagagactattgaatacatcgctagtaatctcgctcccatagaaggggcagagcaaatgacagacacgttcaatggagtcccaaatggtcgagccctatagaaggctctcctatctggcctttcgttcctcttccttgctctggaggtatcgccctagaagtcgacggacgaacattgcatggactgtccgagttggctgattgttcgtcgaacgagaactgggtagatgatgtcgggaatacactacctgggtgcagaattgagcaagcgagcctttgatcgcactgagatgggcttgcgacagctgaaagcgcaaaatttgccgagacaggatattcgctggcattatcggagctagaagggaatacgccctgattgcggtcaaacaaacagggaagttgtcgacggctgaaattcatggccacgtaccgcctggaacctgcatggcacgcagcgacgaattcagggacgcactgaacgagcgactcgaggatacgaatggacgcacgcattgcacccaacgcattgccgaccgtatggaagaacgcatgtcagtgagtgactgacgtaa

SEQ ID NO: 609472 - DNA, 624 bp, Homo sapiens
cacatgcttagagggtctggagaaggcgaggaagaaggaagggagccaagtaaaacatgtgactgaccaggggctttggagaagacaagccctgcaggaaggcacgcatgtggtcattctgtctgtagcctcccattcctccctgctttccccagctgcatctacctggatcctgaatttgaaccaagtggtccaatacggtcccggtcacctgtagcaacccctctgcaggaaccgcacaataatggcatatgcaaggtgtgacaaaattgttggcatcagatgaggtaaaagatttgtacaaccacaccaagaaacagcacaataaatctggatagcagctctggcagtcctgtcaagcacggagcaatggactgaactaacgcggaactactctgatttgtgcgcctacctttgactggaatagttacctctgcgactcaacaaggacacagactgagcactgatacactgcagcactggcatgagctcttcaggcacattcgtgtcaacgtaacgagaagctcagattcaacacgatgaacgtcctttcctgagcacttactacatgccagacaccataccaggcaggatgacgcaaaacacggtgatcgtgacatggac

SEQ ID NO: 609473 - DNA, 284 bp, Homo sapiens
ggtacgtcagccactgcgctgttagctctgatgaggtaaaagcaacttaactttgtctatctaattctcctgagtcatgaaagaaatttactttcagctctggatccacatgagggtatttgacgaggaagtttgtctgccctctgcttctgttgtaccttgtgtgaggcaatgacaacatcccatctttgcattctgtctaaatatcatattcatggaaatagaaacataacttccacaaacaagccctttccatcttactggcgtacacccgatacgctcct

SEQ ID NO: 609474 - DNA, 273 bp, Homo sapiens
  misc_feature (12)..(12): n is a, c, g, or t
  misc_feature (14)..(14): n is a, c, g, or t
  misc_feature (121)..(121): n is a, c, g, or t
  misc_feature (218)..(218): n is a, c, g, or t
  misc_feature (263)..(263): n is a, c, g, or t
ctggtacctccntnacatcatcactcgataccaggagaccttcaacgtcatcgagaggtgccccaagcccgtaattgctgccgtccatgggggctgcattggcggaggtgtggaccttgtnaccgcctgtaacatccggtactgtgcccaggatgctttcttccaggtgaaggaggtggacgtgggttttggctgccgatgtaggaacactgcagcgnctgcccaaggtcatcgggaaccagagcctggtcaacggagctggncttcaccgcc

SEQ ID NO: 609475 - DNA, 285 bp, Homo sapiens
  misc_feature (8)..(8): n is a, c, g, or t
  misc_feature (10)..(10): n is a, c, g, or t
  misc_feature (18)..(18): n is a, c, g, or t
  misc_feature (31)..(31): n is a, c, g, or t
  misc_feature (105)..(105): n is a, c, g, or t
  misc_feature (271)..(273): n is a, c, g, or t
cctgctantntcaggcanggagtccctcgcnggcacccggaatgggagttcacacgcgaattcctgccgtgtcctcaggacagctgctcggcccacccaacagtntgcgtgcggccaccacggactgcggccccagcacatcccgggagctccacggagccacctgtcgcctgcctgtggtggggccgtggcgtgagacggcaaaaatgactcacacacacatccagatagagaagctgccaccgtctttttaaaattaaacttttaattnnnccatcatcgtaa

SEQ ID NO: 609476 - DNA, 187 bp, Homo sapiens
aagtatacctagatggcaatttaaattagcgcggcagtacagtgcgggaaaccctataattgtgttaagtatcttttttcccatatggggtctcactgatatggtccaggctggactcacagtcctgatctcaagcaagcctcgcaccttggtctccagagcctcgggagaccaaggtagagccgag

SEQ ID NO: 609477 - DNA, 180 bp, Homo sapiens
gtgatgtatccaatgaatactgtatggcctgaaagctactatacaatcctgattcttaactgagaagggaagggaataagagactgtcacaaagccctgggatgcttctctggagttatgcagggaaacatggaccctgggcaagcagctctgggtgtcctagtgaatgtgattcttggg

SEQ ID NO: 609478 - DNA, 697 bp, Homo sapiens
atcttatctagtaatgtgatgaagtgatgatgtctgaactctacttagagagtgtatgatgtgtctaacagaacaaccagatgctctgtgtgaattccttcctgtagcggcacactgcaggatttccatgtagatagaagaactatagggcctagtacagcaggtgcacacaaatgtggcacagtccaaaaccccatgaattaaagacctactggaatggggtctgtgagggagtttggtaattagattatctcttttgtgatttttcattcagatctatatcctctatgggtcagctcagctttgaaattggctgatgaataggaaaatatacataccgagggtaacaattcacacatacagagaaacaaaaatgcacaaagcctgcttcagtaactttttgtttctggaattgtttccactttgcctttttcttgccaaaacgaagtaatcaaagagctcttgctttaacctcattccgtgtacaaagactgtcttttgaccagataatcatctgttgtggcgatctatcattgtaggacactgtatattgccaaaatagtggattcatggaacggggccagttgcatgtctaaacatcgcagagccctgggcagtcttaaaagcaggctcaccaagcatcggtgatagcatgtggtgggaccaatgccccttccccactcttcagcccgagtag

SEQ ID NO: 609479 - DNA, 125 bp, Homo sapiens
aaaacttacgtatggtccctgatcattaagaattcagaagtcttctgtaatgggatcagatctttcatctgtagtgtaatgaaatgttgacagaaagataacttgttcattaaaatatttttcga

SEQ ID NO: 609480 - DNA, 148 bp, Homo sapiens
tgaactccgcctccctggttcataattctcctgctcagcctctccagtagctggattacaggcgcataccaccacgcgtgcacttttactttattctttttgagcctaggatgacagagctaagactccgtctcaaacaaaaaacaaa

SEQ ID NO: 609481 - DNA, 570 bp, Homo sapiens
  misc_feature (404)..(404): n is a, c, g, or t
gtttaaaaaatataaaggatagaaatgcacacatgaatagtttaaaggaatgtacctgaccacagaggtaatatatacggcttacacaaggcatactttacaccgttacaacttctactaaaaggagggattatcatacgggccttacaagatgtgagcacttaacgataccggggccacagtgaccaaggaagcttctactaaattgttatataagtctgcactcatcgaaagagcacagagcatgggctaagttacatcccaatgccgagggaagccctgagatcccaatgtgacgtgcaaagggataccgaagaataactgtatatcttgaaaatggcaatgctctgtttcccagggaagaagcataggtatactggcctgctgcaagcaagcatactgtntttgcagctaaatatccaaataaacgagttgtgaggatgacatggcatggtgcaaaaagctgggttaaccgcaagatgacagaagtgttcaaaagacatgagaggacatgggaagcatcagcgcaatccacagaataggaaatgctgtgacgcttagtaactaatt

SEQ ID NO: 609482 - DNA, 186 bp, Homo sapiens
cgatcatctgtcattttctccattaacttcagtcaaattttacgatcatacacccaaaccagaatgacgaagagtacaatagactggcagtaccatagtgctgtgaggtgccgtgtttcttgcgggtaggagtgtccatggctcatctggggcttgcaggctgaactgcaaatgcaacctcctttt

SEQ ID NO: 609483 - DNA, 920 bp, Homo sapiens
atcagagcgtaaggccctcgcagtggaagatgatgctcaatatcgatgtctcggccaccgctttctacaaggctcaaccagtcattgacttcatgtgcgaggtgctggacattcgcgacatcaacgagcagcgcaaaccgctcaccgattcgcagcgcgtcaagttcacgaaggagatcaagggtttgaagatcgagatcacccactgcggccagatgcgtcgcaagtatcgtgtgtgcaacgtcactcgccgccccgctcagatgcaatcattcccactgcagctggagaacggacagaccgtagagtgcaccgtggccaagtacttcctggacaagtaccgcatgaaattgcgctacccgcacttgccctgcctgcaggttggccaagagcacaagcacacttacctgcctctagaggtgtgcaacattgtggccggacagcggtgcattaaaaagctgaccgatatgcagacgtcgaccatgatcaaggccacagctcgttcagctccggatcgtgagcgtgagattaacaacttggtaaagcgcgccgattcaacaacgattcgtatgtgcaagagttggcctgaccatctccaattcgatgatggaggtacgaggacgcgtcttgcctcctcccaagcttcagtatgggggacgtgtgtctaccggctcacggcagcagtgtccgcacagaacaaggtgagcttggctcgccacaggtgtttggattgcgaggcagcagccttccctgggtcggagaccgtttggccttcgctgtttgccccaaggcggtggcgaggttgccgggatttcccccggcggcgaattccaacgggcggctcggatggacccggttgtgagtcccccgggcgctagggccaatcgctgaactccccggcctggggtgccgcacctcgg

SEQ ID NO: 609484 - DNA, 1191 bp, Homo sapiens
ccctcgagaagcttatctagaccataacagtaataggcgcagcggagcccagtaaggtaagtaagaacataggacaaagctagtatatcctaatggaagatacctaaggtacatagactaacgtagctataggataactacaccaattaaaaaaacgcccggcgggcaaccgagcagtatctagaacaaataccagataagagtttctaaagggtacataaactaagagatctatacaagcaaggaagttaccaaggcgagcatcgattatacaagatatacgcgcgccgagtgccaggatgtggcggcgtggtggggcggggggagggcggggaggggggggggggtgaggggggggggggggggggggaggggtgggggggggggggggggggggggatgcctgtggcgcgaaggcgaggggagcggggccggagcggcaggtgcggcggcgacgacgggacgcatgatcatcactatgcccatgctcgttgctggtcggcctgcgcgcgtagcgctcagcaaaccagatcagcgaatcacaagaccgtcatggaagacgacacgctgctcattagaatagctcgcacctccagccgtagaagacaaacatacataatatacatacttccataataaataaataaatacacataagctagatagacacaaaatatatcagagttgagtgacgacacatcgaccacatgcgacagaggcagttcatcccgctaaccgaatacgacagaggctaaacacgcgcatcacgcaccgagcgcgacgctccgacgtcgagccacgagacgcgtagatcgggcatgtagaatgtacggatgcgagagccataaagcgtaaataaacacaacgaagataagcggcgcagcatgacacaggaaaaaaaaagaaaaagaaggagatagcaccgacgaggacgagaggtctgagtgacataagagacgtcagacacggacagacactgcgacagccagcgagctcaagacagtaggtagagcaccagctccacgacacactcagcggagacacggagtagcacacactagagcaggacacgagacggacgatgggagcagggcaggagcgacccgtgtgtatgcgggccgatgcgcagcgcgcctagcagagcgtaggcggagagagggactgagcgagggctcagacccggcgcgccgg

SEQ ID NO: 609485 - DNA, 718 bp, Homo sapiens
  misc_feature (42)..(42): n is a, c, g, or t
  misc_feature (56)..(56): n is a, c, g, or t
  misc_feature (84)..(84): n is a, c, g, or t
  misc_feature (93)..(93): n is a, c, g, or t
  misc_feature (184)..(184): n is a, c, g, or t
  misc_feature (229)..(229): n is a, c, g, or t
  misc_feature (267)..(267): n is a, c, g, or t
  misc_feature (285)..(285): n is a, c, g, or t
  misc_feature (308)..(308): n is a, c, g, or t
  misc_feature (323)..(323): n is a, c, g, or t
  misc_feature (354)..(354): n is a, c, g, or t
  misc_feature (358)..(358): n is a, c, g, or t
  misc_feature (362)..(362): n is a, c, g, or t
  misc_feature (378)..(378): n is a, c, g, or t
  misc_feature (383)..(383): n is a, c, g, or t
  misc_feature (390)..(390): n is a, c, g, or t
  misc_feature (398)..(399): n is a, c, g, or t
  misc_feature (405)..(405): n is a, c, g, or t
  misc_feature (428)..(428): n is a, c, g, or t
  misc_feature (430)..(430): n is a, c, g, or t
  misc_feature (448)..(448): n is a, c, g, or t
  misc_feature (468)..(468): n is a, c, g, or t
  misc_feature (495)..(495): n is a, c, g, or t
  misc_feature (524)..(524): n is a, c, g, or t
  misc_feature (548)..(548): n is a, c, g, or t
  misc_feature (560)..(560): n is a, c, g, or t
  misc_feature (640)..(640): n is a, c, g, or t
  misc_feature (657)..(657): n is a, c, g, or t
  misc_feature (680)..(680): n is a, c, g, or t
agcggcgcgctaggtaagatcgggttccgtttttcccgcggnttctggtgcctgtngggccggtgacccaacaccatgaagganacgccactntcaaactgcgaacgccgcttcctactccgtgccatcgaagagaagaagcggctggatggcagataaacctatgattattggatcatcaggntctcatttggtacagattacggatgctgcattgtggacttggaanacaagagttcttggtcaggttttctgtgaacttgtgtntacaaaactcaatcgggnaacagaaggtattcttttttttnaccttgaactctctnagaaggccgctccagctttcgaacctggcangcanttanatctcttggtgaagtngaatngactcanggaaaganntctaanaaattcgaagtgtatagacactnantctctctgtgttgttgcnggtgaaaaggtttggcaaanacgtgtagacctacatttattaaatcntgatggaaatattattgatgctgccagcnttgctgcaatcgtggccttatgtnatttccgaaganctgatgtctctgttcaaggagatgaagtaacactgtatacacctgaagagcgtgatcctgttccattaagtatccaccanatgcccatttgtgtaanttttgcctttttccagcaagganatatttattggtggatccaatgaacgagaagaacgtgt

SEQ ID NO: 609486 - DNA, 308 bp, Homo sapiens
cgctgaagctctctctgatgccttcacaaggacgtcgttttatgcagagagggttctgctaaacatggggatcgtcagttgcttcacttcccaccccccaacctccccatgactagggacagctgcaggcaaagaagatcttttgtttcttccaagttcatctgtttcccctgccaggattctgcataagctaatcagatatatacattaccaaataaaagaccatcagtcaatgtgaatgattcttaatgtatcctcttatcaaaacatttactgaggccaggcgtggtggctcacgcctgtaatcc

SEQ ID NO: 609487 - DNA, 496 bp, Homo sapiens
atctagagatccgtatgtatcgccacactatatttattatcacatgggatttcgtatattctgggaatgcaggcactctgtcttatcatggctgaatacggtaggcttatacttcacaatatatagcactttcaccaagggctgttgtttggtttaggtttattgtgtgttttaatcagcttccagaattgccatgcctcacctgtgaagtgggataggcagggtacccaagaggtgatcactccaggtggtgtctaagccagagctaccactgagcctaggagccctgatcctcaatattgataattagacaaaacttcctcaaaaatgttagaggaagagtaataggattgtgctacaatgagccatgtccatctctctcctgttgtatacttaaaagaaacactgactgcattgaggggaatcctaaaaacataaccctaacatggcactgttgcaagactgccccttggatcccatagttcgtgtggtactt

SEQ ID NO: 609488 - DNA, 4955 bp, Homo sapiens
  misc_feature (5)..(5): n is a, c, g, or t
tggangaaaacttaatcgaaacctggtcatcgggctgtccgggagctccggctcgggctgcggacgccatggagcttgctgaccacctggtgaagcgggcggctgccgtgcaggcggatgatgtggaggtgctgaaggtggggaggacccagctgatcgacgccgttctgaatctgtgcacctaccatcaccctgaaaacatccagctcccaccggggtaccagcctccgaacctcgccatctctaccctctactggaaggcctggcccctcctgctggtcgtcgccgcattcaacccagagaacatcggcctggctgcgtgggaggagtacccgaccctgaagatgctcatggagatggtgatgaccaacaactactcctacccaccgtgcaccctgacggatgaggagacccggacggagatgctgaaccgtgagctgcagaccgcccagcgggagaagcaggagatcctggccttcgaggggcacctggcggccgcgtccaccaagcagaccatcactgagagcagcagcctcctcctgtcgcagctcaccagcctggacccccaggggcccccccggaggcctccccctcacatcctggatcaagtgaaaagcctcaaccagtccctccgcctcgggcacctcttgtgccgcagccgaaaccctgactttctcctccacatcatccagcggcaggcctcctcgcagtccatgccctggctggcggacctggtacagtccagcgagggctccctggacgtgctgcccgtgcagtgtctgtgcgagttcctgctgcacgatgctgtggacgatgctgcttccggggaggaggacgacgagggcgagagcaaggagcagaaggccaagaagcggcagaggcaacagaagcagcggcagctgctgggccgcctgcaggacctgctactgggcccgaaggctgatgagcagaccacgtgtgaggtgctggactacttcttgcggcgcctcggctcctcccaggtggcctcccgcgtgctggccatgaagggtttgtcgctggtgctttcggagggcagcctgcgggacggggaggagaaggagccccccatggaggaggatgtgggggacacagatgtgctgcagggctatcagtggctgctgcgggacctgcctcgcctgcctctgttcgacagcgtcaggagcaccacagccctggccctgcagcaggcaatccacatggagactgatccccagaccatcagcgcctacctgatctacttgtcccagcacacgcctgtggaggagcaggcccagcacagcgacctggccctggacgtggcccggctggtcgtggagcgctccaccatcatgtcccacctcttctcgaagctctccccgagtgccgcgtcggacgccgtgctgagcgctctgttgtccatcttctcacgctacgtgaggcgcatgcggcagagcaaggagggcgaggaggtctacagctggtcggagtctcaggaccaggtcttcctacgctggagcagcggggagacagccaccatgcacatcctcgtggtccatgccatggtgatcctgctgacgctgggcccgcctcgagccgacgacagcgagttccaggcgctgctggacatctggtttccggaggagaagccactgcccaccgccttcctggtggacacatcggaggaggcgctgctgcttcctgactggctgaagctgcgcatgatccgttctgaggtgctccgcctggtggacgccgccctgcaggacctggagccgcagcagctgctgctgttcgtgcagtcgtttggcatccccgtgtccagcatgagcaaactcctccagttcctggaccaggcagtggcccacgacccccagactctggagcagaacatcatggacaagaattacatggcccacctggtggaggtccagcatgagcgcggcgcctccggaggccagactttccactccttgctcacagcctccctgccgccccgccgagacagcacagaggcacccaaaccaaagagcagcccagagcagcccataggccagggccggattcgggtggggacccagctccgggtgctgggccctgaggacgacctggctggcatgttcctccagattttcccgctcagcccggaccctcggtggcagagctccagtccccgccccgtggccctcgccctgcagcaggccctgggccaggagctggcccgcgtcgtccagggcagccccgaggtgccgggcatcacggtgcgtgtcctgcaggccctcgccaccctgctcagctccccacacggcggtgccctggtgatgtccatgcaccgtagccacttcctggcctgcccgctgctgcgccagctctgccagtaccagcgctgtgtgccacaggacaccggcttctcctcgctcttcctgaaggtgctcctgcagatgctgcagtggctggacagccctggcgtggagggcgggcccctgcgggcacagctcaggatgcttgccagccaggcctcagccgggcgcaggctcagtgatgtgcgaggggggctcctgcgcctggccgaggccctggccttccgtcaggacctggaggtggtcagctccaccgtccgtgccgtcatcgccaccctgaggtctggggagcagtgcagcgtggagccggacctgatcagcaaagtcctccaggggctgatcgaggtgaggtccccccacctggaggagctgctgactgcattcttctctgccactgcggatgctgcctccccgtttccagcctgtaagcccgttgtggtggtgagctccctgctgctgcaggaggaggagcccctggctggggggaagccgggtgcggacggtggcagcctggaggccgtgcggctggggccctcgtcaggcctcctagtggactggctggaaatgctggaccccgaggtggtcagcagctgccccgacctgcagctcaggctgctcttctcccggaggaagggcaaaggtcaggcccaggtgccctcgttccgtccctacctcctgaccctcttcacgcatcagtccagctggcccacactgcaccagtgcatccgagtcctgctgggcaagagccgggaacagaggttcgacccctctgcctctctggacttcctctgggcctgcatccatgttcctcgcatctggcaggggcgggaccagcgcaccccgcagaagcggcgggaggagctggtgctgcgggtccaggcccggagctcatcagcctggtggagctgatcctggccgaggcggagacgcggagccaggacggggacacagccgcctgcagcctcatccaggcccggctgcccctgctgctcagctgctgctgtggggacgatgagagtgtcaggaaggtgacggagcacctgtcaggctgcatccagcagtggggagacagcgtgctgggcaggcgctgccgagaccttctcctgcagctctacctacagcggccggagctgcgggtgcccgtgcctgaggtcctactgcacagcgaaggggctgccagcagcagcgtctgcaagctggacggactcatccaccgcttcatcacgctccttgcggacaccagcgactcccgggcgttggagaaccgaggggcggatgccagcatggcctgccggaagctggcggtggcgcacccgctgctgctgctcaggcacctgcccatgatcgcggcgctcctgcacggccgcacccacctcaacttccaggagttccggcagcagaaccacctgagctgcttcctgcacgtgctgggcctgctggagctgctgcagccgcacgtgttccgcagcgagcaccagggggcgctgtgggactgccttctgtccttcatccgcctgctgctgaattacaggaagtcctcccgccatctggctgccttcatcaacaagtttgtgcagttcatccataagtacattacctacaatgccccagcagccatctccttcctgcagaagcacgccgacccgctccacgacctgtccttcgacaacagtgacctggtgatgctgaaatccctccttgcagggctcagcctgcccagcagggacgacaggaccgaccgaggcctggacgaagagggcgaggaggagagctcagccggctccttgcccctggtcagcgtctccctgttcacccctctgaccgcggccgagatggccccctacatgaaacggctttcccggggccaaacggtggagggtgagtcaggccctgcttcacccacgccagatctgctggaggttctgagtgacatagacgagatgtcccggcggagacccgagatcctgagcttcttctcgaccaacctgcagcggctgatgagctcggccgaggagtgttgccgcaacctcgccttcagcctggccctgcgctccatgcagaacagccccagcattgcagccgctttcctgcccacgttcatgtactgcctgggcagccaggactttgaggtggtgcagacggccctccggaacctgcctgagtacgctctcctgtgccaagagcacgcggctgtgctgctccaccgggccttcctggtgggcatgtacggccagatggaccccagcgcgcagatctccgaggccctgaggatcctgcatatggaggccgtgatgtgagcctgtggcagccgacccccctccaagccccggcccgtcccgtccccggggatcctcgaggcaaagcccaggaagcgtgggcgttgctggtctgtccgaggaggtgagggcgccgagccctgaggccaggcaggcccaggagcaatactccgagccctggggtggctccgggccggccgctggcatcaggggccgtccagcaagccctcattcaccttctgggccacagccctgccgcggagcggcggatccccccgggcatggcctgggctggttttgaatgaaacgacctgaactgtca

SEQ ID NO: 609489 - DNA, 1844 bp, Homo sapiens
  misc_feature (20)..(20): n is a, c, g, or t
  misc_feature (26)..(26): n is a, c, g, or t
  misc_feature (40)..(41): n is a, c, g, or t
aacttacggctagtagagcngggtgntaatcggccgaggnnccctctgcctctctggacttcctctgggcctgcatccatgttcctcgcatctggcaggggcgggaccagcgcaccccgcagaagcggcgggaggagctggtgctgcgggtccaggcccggagctcatcagcctggtggagctgatcctggccgaggcggagacgcggagccaggacggggacacagccgcctgcagcctcatccaggcccggctgcccctgctgctcagctgctgctgtggggacgatgagagtgtcaggaaggtgacggagcacctgtcaggctgcatccagcagtggggagacagcgtgctgggcaggcgctgccgagaccttctcctgcagctctacctacagcggccggagctgcgggtgcccgtgcctgaggtcctactgcacagcgaaggggctgccagcagcagcgtctgcaagctggacggactcatccaccgcttcatcacgctccttgcggacaccagcgactcccgggcgttggagaaccgaggggcggatgccagcatggcctgccggaagctggcggtggcgcacccgctgctgctgctcaggcacctgcccatgatcgcggcgctcctgcacggccgcacccacctcaacttccaggagttccggcagcagaaccacctgagctgcttcctgcacgtgctgggcctgctggagctgctgcagccgcacgtgttccgcagcgagcaccagggggcgctgtgggactgccttctgtccttcatccgcctgctgctgaattacaggaagtcctcccgccatctggctgccttcatcaacaagtttgtgcagttcatccataagtacattacctacaatgccccagcagccatctccttcctgcagaagcacgccgacccgctccacgacctgtccttcgacaacagtgacctggtgatgctgaaatccctccttgcagggctcagcctgcccagcagggacgacaggaccgaccgaggcctggacgaagagggcgaggaggagagctcagccggctccttgcccctggtcagcgtctccctgttcacccctctgaccgcggccgagatggccccctacatgaaacggctttcccggggccaaacggtggaggatctgctggaggttctgagtgacatagacgagatgtcccggcggagacccgagatcctgagcttcttctcgaccaacctgcagcggctgatgagctcggccgaggagtgttgccgcaacctcgccttcagcctggccctgcgctccatgcagaacagccccagcattgcagccgctttcctgcccacgttcatgtactgcctgggcagccaggactttgaggtggtgcagacggccctccggaacctgcctgagtacgctctcctgtgccaagagcacgcggctgtgctgctccaccgggccttcctggtgggcatgtacggccagatggaccccagcgcgcagatctccgaggccctgaggatcctgcatatggaggccgtgatgtgagcctgtggcagccgacccccctccaagccccggcccgtcccgtccccggggatcctcgaggcaaagcccaggaagcgtgggcgttgctggtctgtccgaggaggtgagggcgccgagccctgaggccaggcaggcccaggagcaatactccgagccctggggtggctccgggccggccgctggcatcaggggccgtccagcaagccctcattcaccttctgggccacagccctgccgcggagcggcggatccccccgggcatggcctgggctggttttgaatgaaacgacctgaactgtca

SEQ ID NO: 609490 - DNA, 739 bp, Homo sapiens
gcatataatgagagagagagaactagtctcgagtttttttttttaaagagttggagtaagaagaggattaaaaaggaaaggcaaataaaaaaaaaaaaaaaaaaaaaaaaaaaaaaaaaaaaaaaaaaaaaaaaaaaaaaaaaaaaaaaaaaaaaaaaaaaaaaaaaaaaaaaaaaaaaaaaaaaaaaaaaaaaaaaaaaaaaaaaaaaaaaaaaaaaaaaaaaaaaaaaaaaaaaaaaaaaaaaaaaaaaaataagggggggaaaaaaaaaaaaaaaaaaaattataaggtaggaatataaataaagggggtgttttttaaaaaatggttagtttgaaaaaatgttgggttaaaaaaatttattatttttagaaaaaaattttattaggtgtggggaaataagtataaggggttaataaatgtgtttttttaaaaaatggtgttttaaatgggaaaagttatattggagggaaaattttttgtaaaattgtggtaaatattttttaataaaggttttttttaaaataagggggaaaatggaaaatttttttgaaaaaaaaattatatgggataggggaattttttttatgtggggaaggaggttttttaaaaaaagtgatttaaagttaaaggggaaaaattttttagggggtgtgttatttggaaaaattattaaataattttgggggtgggggggaaaaaatatatgttaattaggggggtttttataattttggt

SEQ ID NO: 609491 - DNA, 977 bp, Homo sapiens
  misc_feature (977)..(977): n is a, c, g, or t
cactcgcgggaagcgagagtctgagtcgcggggcagctccggtcgcgtcaagcgggagcgagatcgggagcgggagcctgaggaggcgagctcccgggggagacctgtgcgcgtgaagcgggagtcgaaccgggagcgcgcgtgaggccccggttgtgtggtcccgtttgtgcgggtgaagcgggagtcgctgaaggtcggatgaggactcggagcctgagcgggaggtgcgagcaaaagaatggcccgaggggattctgaggaccggaggagccgccatttgcccgtacctggacaaccatttaacaggagtgtgctgggactttgactttgagcaaactgtgtctatctccctctcacatatcaatgcttatgcgtgtcgtgggtgtgtggcaagtactttccaaggccgggggttgaagtctcacggccatacatcactaggtgtccagtttagccaccagtgttttccgtcaaccttccacaccctcagggtttaacgtgcgttccgagacaactatgagcatcatcgagtcctcatggggaggatatcaccgtttgtgtgaagcccactttcaccaaggcggcaaagtgtgcaacactttgcgaccagtgcaaggccaaaaatttgtcgcgggggcatattgagtgggcttaccacctctaccccttgccggcgtaatgtgtgggggccgtgaataacaataaggggccattgattaatgccaacgcgtggtcctccaggggcgtattgaaatggtcctcctctccgggaaatactttcgtggggagaggagattattaagaacctttcacacggtcccccgggggatacaacgttcttggcggggccgcgggttttggggaccgtgtagaacaccctggagccccccacaatttaggcgagtgtgtttcccctatagagcgtcgcgagtgttctgcgggaaacacgagttctcaacaccacggggcgttgn

SEQ ID NO: 609492 - DNA, 810 bp, Homo sapiens
  misc_feature (31)..(31): n is a, c, g, or t
ctttccagtgctttctgtcctgtggtgctcngggccttgccccctctgggtggctggggtggggtgggcagaggtctgcctgggcccttcagttctggtctggccctctctctgtgtcagatctgctggaggttctgagtgacatagacgagatgtcccggcggagacccgagatcctgagcttcttctcgaccaacctgcagcggctgatgagctcggccgaggagtgttgccgcaacctcgccttcagcctggccctgcgctccatgcagaacagccccagcattgcagccgctttcctgcccacgttcatgtactgcctgggcagccaggactttgaggtggtgcagacggccctccggaacctgcctgagtacgctctcctgtgccaagagcacgcggctgtgctgctccaccgggccttcctggtgggcatgtacggccagatggaccccagcgcgcagatctccgaggccctgaggatcctgcatatggaggccgtgatgtgagcctgtggcagccgacccccctccaagccccggcccgtcccgtccccggggatcctcgaggcaaagcccaggaagcgtgggcgttgctggtctgtccgaggaggtgagggcgccgagccctgaggccaggcaggcccaggagcaatactccgagccctggggtggctccgggccggccgctggcatcaggggccgtccagcaagccctcattcaccttctgggccacagccctgccgcggagcggcggatccccccgggcatggcctgggctggttttgaatgaaacgacctgaactgtca

SEQ ID NO: 609493 - DNA, 651 bp, Homo sapiens
gaccccattctgctatgagctccttggagccatcttctttcatcagtaactattctgagattcaaaagcttggatgtgttctagagtactgccctcctttataaaggagagatcctttgtttggttataataaaggtagtactgatatatactgtcccaggctaaggaattctctggaattattactgtgtttgctcagagaagaggtatgcaccaaaaaggtggaatcccaaatgttgaaggtgctgccaaactgctgtggtctgagtggacagggtaagcttacttttctgttggcatattggtgaccactagaataaaccttcttttgacacatcttatttttaatatcagtgcctcattagcttactattgccatccccctacatcttggactcctcctccatattttaatgagagtattgtggtagacatgaaaagcggcttcaatctggaagaactggaaaagaacaatgcacagagcataagaggtgagaattgtgtgtcgctgctgtcttcatcagctgacaggccagtggagctcttacctgtttacatgggcttgctttctttcccagccatcaagggccctcatttggccatagcatcctttacagtcatccgtctgcaaatggatatagagaacggact

SEQ ID NO: 609494 - DNA, 617 bp, Homo sapiens
aactcaggggcgacctgcgcgactgccaagacagtcagcagatcaaagagcagaagttcgtacatttcctggcccaggacagtctcccagcattgcagccgctttcctgcccacgttcatgtactgcctgggcagccaggactttgaggtggtgcagacggccctccggaacctgcctgagtacgctctcctgtgccaagagcacgcggctgtgctgctccaccgggccttcctggtgggcatgtacggccagatggaccccagcgcgcagatctccgaggccctgaggatcctgcatatggaggccgtgatgtgagcctgtggcagccgacccccctccaagccccggcccgtcccgtccccggggatcctcgaggcaaagcccaggaagcgtgggcgttgctggtctgtccgaggaggtgagggcgccgagccctgaggccaggcaggcccaggagcaatactccgagccctggggtggctccgggccggccgctggcatcaggggccgtccagcaagccctcattcaccttctgggccacagccctgccgcggagcggcggatccccccgggcatggcctgggctggttttgaatgaaacgacctgaactgtca

SEQ ID NO: 609495 - DNA, 217 bp, Homo sapiens
ataaggggaacccaactatctttcccccaaatgttagtcggaaacccatgtctccataaggcctacaggttgtcatgggagacgacttgcccaccaagaagggcatctgggaatgctggcggacactgggaactcttcgctcatcgggcctctgcaaaaatacacagcactaagagaaaaggatgacccctatgaagagaaaggagcgatctacagg

SEQ ID NO: 609496 - DNA, 162 bp, Homo sapiens
cagacgatggtcgtcttaatatttcatgattataaaagaacatcccagatccatgcgaagagtacagtccaagaattaatcacatttctgaacgcattttatgctacatatgtgtatacttagcgatcctcaggtgttcgtcccatttcgggtaccgagctc

SEQ ID NO: 609497 - DNA, 393 bp, Homo sapiens
  misc_feature (40)..(40): n is a, c, g, or t
  misc_feature (103)..(103): n is a, c, g, or t
  misc_feature (212)..(212): n is a, c, g, or t
ccccccaagttgaaaggtggggtgtggtggggaggtgatnggatccatgggggtggtttcctgatggtttaagcacccatcccccctagtccctgttaagagntcctcacaagatctgattgtttaaaagcgtgtaacacctctccctctctcactctcttcttcctgcttcggcccatgtaagatgtgcctgcttccccttcccctttcgnccatgattgtaagtttcctgagacctccccagcaatgcttcctgtaagcctgcagaaccgtgagccaattaaaccccttttctttataaattacccagtctcaggtacttctttatagcagtgcaagaacaatctaatacaatttcgttctttgaaaagattaataaatcaacaaagcaat

SEQ ID NO: 609498 - DNA, 1180 bp, Homo sapiens
gagccaagtacctggtggtggctgccatgatgatttccatttgtggaggtttctgaggtcccgttcaaccactgactcctgtgcgatggaactcggtggttggctgttggctgttctacagggcttctgtagtgggcagcgccaacaagtaaacgatcgtctcttcgcgcggatgcaacgagaggcgcctaccccagcgagcgattcggtctagtgggtggtcagtgttgggcgtagctatattccgttactctccagtgttctcggaggatgctcagtggctcttttgtgttatggcacttagctttgccttgtgctgttgcatgtgttatccattggcagtcgttgacgacgttcgtgaagcctcgagagcacacgacagactcggatggacaataaaatgggcacacggacattagggcttgtgcagagatggactagcccgcatggtgcattggttcctgggcatgcgcctgagaacgagcttaggacaggaagggcgatcaaacgaggacttcaacgggaacctatgactctaggacgataacgtcgcacatggaatagttaacaccaataagcttagccgtgatggcttagtgggtttcgccacgcgagacaccattcgcatggttgcaggctttgtccctgtgctccccatgaacccctcaagggtttcctgggcttaagcactgtttctcttgagaagcaccatggtgacgggttggcccccggtatcgcaagccccaaaagtttcattcctatttgggcgaaggccatttgggattgtgattaaggggcccggaaacttcaatttaattccaggggtcctggaattggtttttccacacagacagcagaaaaaccctctaggagaaaaccccggagcaagaaaaagagcgcagtctagatccccttccacgtatttggtcggctcctcgcacaacgcttcacacacggtgggtggttctcatttgagaacactccctcaatctggcgggacacacacgtggttgttcccatcaccgggaatgatcgcatttcaacgggggcgcgtctatcaaaaacattcacgacgaacaatcaacggggcggtgtttaaccacgcgacacccaagcaccgaacgattctcatcttacggcgaaagaacaacaacaaagcagtctgcgtgacgatggtctg

SEQ ID NO: 609499 - DNA, 1438 bp, Homo sapiens
  misc_feature (1021)..(1021): n is a, c, g, or t
  misc_feature (1123)..(1123): n is a, c, g, or t
cgggtgttgcgtacatgcggcccgcccctcgtgggtgcgtgtgtcggtggtgtacgccgagtttgctgagggcggcggtgtttttgccgcgggcgatggttttttgtttttggggggacaatataaggggagggaggttccaccacggacggttgggctttccaccacacaagtggtgccgaaggtggcgcgccgcccactgccccaccctcttgtggggtttttgtggggggcggccatttattactggttgttgtgtgcccccatccttgggagagaatagtcccccaacctttggtaagtatgtgttaagaaccttcgttttgtgttggtggccgacacaacaacgccaccttggggagaagtgttcctgtcggcgttcttcccaaccggcaagtgtttgtggaccttctttgggggcgcgtgatccccgcggcttgggtgtgtttctccggcggagacaagtttttcgtgcaccgctgctttgtgggccaacctgtcttcgggccgtcttggtccccccgtctgccggcgggcgagatgaggatttgttgtcatcccgctctgctcgttggtggtgttgtgtgaggaagaatatcttctccgcggcgttctactcgtctcgggggggaagaagtgctcctgatgaagagcaccccacgtggtgtgttttcgtgggaacaacaccttctcaacgagtggttaaaatttgtgggtggtcccccgcacgcccattgttggggcccacacatagggccgtcgcgtctcgggagtagaatcgcgtttctgttgcgccccccgcccgtgtgtgtgcggcataggggatctcgggagactccgggactcattgggcacaacataagggtcttaacactctcataggttgcacgcgcgctcttctgcgcaaagtggtgtttctctccacagtgtacacgtgagtatccacatgggcctctttcgcacaatttatttggcgcgctcaaaatgtgagagagctctctctccgcgaggatcccctggnctcacagaggggtgttctccccccacatgtccctgtgagaagagaggaactctggtgggcctgccacggcgccctcgggggcactcgcggcacacacggccnctcgggccctcttctcctctcttccctctcacacacccacggggcttcctccctctcctcgttcgctggggctccctctgggacccacgtggccctcttcttaccagccccggccctgttgtgccctggttcaaacgccagacacccccagccccttgactccccgggtggggaaggtggcccaaggaatgctctggagagcctgtaaatccacgagccgcttgaaccagtgtcttccggcctattctatttccaccatccgaattgacaccaccattgcgccccaataaagattgcaattttacccccctgtta

SEQ ID NO: 609500 - DNA, 168 bp, Homo sapiens
ggtcctggagtatcgcggatgctcctccgctccacgagatgctcctcctctccacgagatgctcctcatctccgccagatgctcctccgctccacgagatgctcctcgtctccgccagatgctcctccgctcctcgagatgctcctcctctccaccggatgctcctcg

SEQ ID NO: 609501 - DNA, 759 bp, Homo sapiens
tggtcttttcccttcatcctggggtgtctccagcggtcactaagggaaaaaagacaaaaaaaaataaaacagcttttagtaccgtgggaaaaaaaattagtcagcgagttatccccttattggatgaaaagggcaatgattggggaaacatgccccgagcaaatgtgattaaacttatggatgagcgaacacctgcgacgggtctcaagggaaccccagcacagaaaccgtggcagagtatcagcctcaaggaacaggatggcagactccctccaggagcggacagaggctgagggagagtggacgaaggcgacccccaaaagcgggacccaccccgttaaaaaggacacgtgattgggctctctcacaaatatgggccaccctgtgatttgggccccaaagactaaacagattctccgcaggtggcatttaagaaaaaacccctagttccagatttcccactaaagaagggaacaacaagtggtagacggtgcttccagcaacattctgcaccggggggacaatatttcactcaaaatactccagacgtagtgccgggaatagctacatattctcatctaggccacaagctggtccccagggaggaacaacgctcttcaatggtggtggtcctcccgggcttggagccaacattggaggcacaagcgctttataaagaaactccagagaccccaggaaagagacctttttgacccaagatgctgggaacttgctcaaggaatccaaatggtctggcac

SEQ ID NO: 609502 - DNA, 279 bp, Homo sapiens
ctactggttcctccagtgctggtattacaggcgtgagtcactgtgcctggccttttttatttttattttttggacacagagtctcactcggtcaccaggtaggacagtggtgcaatctcggctcactgcaacctcggcctcccagggttaagagattcttatgcctcagtctcctcagtagctgggattacaggtgcacaccagcacgcccagttaattttttactatttttagtagagacagggttttaccatgtgggccccactgttctggaactcc

SEQ ID NO: 609503 - DNA, 156 bp, Homo sapiens
gcgacttatgagactgacctgcaccggtaaagcttcagggggttaggatgagactggctgttactacgtcgggctctgtggctaactagcagagtatgcaatgagcgattttaggtctgtatgtcgtaggccgatggagcttgtatataattatgc

SEQ ID NO: 609504 - DNA, 524 bp, Homo sapiens
  misc_feature (256)..(256): n is a, c, g, or t
gcacagtgtataatatttatatcttcatactgattctcacgaagatatctggcttcatcagcatctctgtcgaaagccatcttggcatttgccattaagtcactaaatcctgatactcgggtatagtccttcagaaatataatacctctatactcgatctccctgatgcgcatttctacgcaccattggccgctttagtgttatgtgctctcactgagcgttcttaggtcctagctttttcctggtttaaaaatgnttcaagtctggcttacagtcatatgggaccatcttggaacactgcttatgaaacattcaaaccacaatctgcacatatcactcccctgagccaatggagacccacataaagttgggacagtattcaacaccagtggtgggcctctgaatgtatgccccttgaaattgtgaatcttttcctattttggaatttgctccttttctttcagagttgctcttctaaccagtgatgtccactgcgaataagcaaagagtttcagaggttgcca

SEQ ID NO: 609505 - DNA, 227 bp, Homo sapiens
aaagaaggaaaagaaagaaataacacttaacagtccataacaaagtgttaacgagatagacacatgcttattcaaaccacagatatgatccagttaattcccttcttagaatgtgcccatagtgccttattgcctcataataatgataataataagagcaacaataataacggcacaaactccagtcgatactgacaaactaccagagtaaccgtcatccccttgag

SEQ ID NO: 609506 - DNA, 101 bp, Homo sapiens
cgtgtttcaccaaccacatagaagtgcaaagaaaggaggtacaggcccgagctgtgttctaccccctcttagggttgggaggagctgtgaacatgtgctat

SEQ ID NO: 609507 - DNA, 537 bp, Homo sapiens
ggtgttctagaggatccgaagggtgatgcgttgaggcgctgtaatcccagctactcgggacgactgagacaggaggattgcttgaaccctgggagatggaagtgcagcaatccaagatggtgccattgcactccagcctgggtgacaagagcaaaagtccgtcttaaagacaaacaaaaaaaccacttgtaaccccaatgttatgagcacccagtgaccttataaaaggcacccatataacaattactggagctccaacgggaatcaccgggtcagactgggtgatggggttgaagcagggagtatcgggggggggcttgccaccctccaggacatcatccggtcgcttcaagtctcccaggttcgggctgccgtgatccggtgcgcacgaacttcgatgccttcccagataagggtgggccatccagctcaaggaaacccacccttcctggaacatcccggagctgatgaggatcctggtgtcccgggaacgggctggcgtgggacaaggcgtgggatgtgacccgtgaggccctg

SEQ ID NO: 609508 - DNA, 153 bp, Homo sapiens
ctctatctgaatcagatctcctattgaatcagatctcctatctgaatccagatcctcctatctgaatccagacggccatgatgacaaaaaggagacggatggccttgtactttgcatctggattcagataggaggcctcctatctggattcag

SEQ ID NO: 609509 - DNA, 192 bp, Homo sapiens
aaaactttttgtataaaagcgacagaaagcaaatattttagacactgcactccagcctgggcgacagagtgagactccatctcaaaaaaaaaaattaaataaattaattaaattaaattaaaaggaggaggaaggccgggctcagtggctcatgcctgtaattccaccaccttgggaggccaaggcacgcag

SEQ ID NO: 609510 - DNA, 223 bp, Homo sapiens
  misc_feature (13)..(13): n is a, c, g, or t
  misc_feature (15)..(16): n is a, c, g, or t
  misc_feature (21)..(21): n is a, c, g, or t
  misc_feature (50)..(51): n is a, c, g, or t
  misc_feature (59)..(59): n is a, c, g, or t
  misc_feature (68)..(69): n is a, c, g, or t
  misc_feature (74)..(74): n is a, c, g, or t
  misc_feature (78)..(78): n is a, c, g, or t
  misc_feature (118)..(118): n is a, c, g, or t
  misc_feature (129)..(129): n is a, c, g, or t
  misc_feature (134)..(134): n is a, c, g, or t
  misc_feature (136)..(136): n is a, c, g, or t
  misc_feature (165)..(165): n is a, c, g, or t
  misc_feature (172)..(172): n is a, c, g, or t
  misc_feature (199)..(199): n is a, c, g, or t
  misc_feature (204)..(204): n is a, c, g, or t
  misc_feature (211)..(211): n is a, c, g, or t
  misc_feature (222)..(222): n is a, c, g, or t
ctttcgtgttaantnngtcangccaaatttttttcatcttcgcctttatnnttttttcntttgttttnntttgnatgntgggccttcgtgcccccccttcccccttttttgtcccccnaattgggatanttagngncttttggtctccctgggggtgggtggggncgaccgngctttcctgtccacagccttgggaccngatgnttaaaangcccacatttnt

SEQ ID NO: 609511 - DNA, 124 bp, Homo sapiens
  misc_feature (30)..(30): n is a, c, g, or t
  misc_feature (105)..(105): n is a, c, g, or t
attgattaaattgataactgggtaccttanagttgcaaaacaagtctacaccattctttagtatgaaaagcaacattaaaaaatggagcattaaaatatttattnaatttatttatgccagatc

SEQ ID NO: 609512 - DNA, 354 bp, Homo sapiens
  misc_feature (120)..(120): n is a, c, g, or t
  misc_feature (169)..(169): n is a, c, g, or t
tggcgtgcgttgtagcaaataaaattgcgcgttatgcaaacttagcaaggtgttccactggtgtgaatcggtgatccttccccaccccggctccggcattccctgtgcttgttgcagganaaatatctccgtcagcattgatgcgaggcttaccgcaccggttaatganacattgtcggcgctcaccttgagttccgatggtaatgcctgcgttaatgaacagctttcgtcctgtttctcacgtttaaggcacaagtttgattgcggaaaattaacacccgttccagttcgcgaaacgcccgtttgccgatgcccggtaaatcagcaattgacctcctgccctgctgaagacgc

SEQ ID NO: 609513 - DNA, 296 bp, Homo sapiens
tcgatacgactttttttttttattatatttctttctttctttctttctttctttctttctttctttctttctttctcgctctcgctctctccctccctcgctcgttttctctctctctcgctctctccctcgctcgttttctctctctctctctctctctgtctctcgctctcgccctctctctctctttctctctctctctctctctctctctgtctctcgctctcgccctctctctctctctttctctctgtctctctctctctctctctctctctcccttctgtcgtcttctc

SEQ ID NO: 609514 - DNA, 4434 bp, Homo sapiens
  misc_feature (3720)..(3720): n is a, c, g, or t
tctggcctcttgccctaagaagcgagtgcggagggagtgggagcgagactgcccgaacgcaagtgtctggcttcccggcgaggcccaggcgtccgtcccgccgcccatgaactcgttgccccgcgagcagcgccgtcgttaggccgtccccgtcactctcgctcgcccccatccccgggcagccattcccccctacccacgtctggccggggactggacgtcgtgtcgaagcgccttccccagtccgcgtcgcgctgcgaccctggaagcgggcgccgccgccaacgagaggaggagccccggccgcggggcccagcagccactgagccagcaggcgggatcgaggccggcaacatggcgagcgcttcgtaccacatctccaacttgctggaaaaaatgacatccagcgacaaggacttcaggtttatggctacaaatgatctgatgacagaactgcagaaagactccatcaagctggatgatgacagcgaaaggaaagtcgtaaagatgattctgaagttgctggaggataaaaatggcgaagtgcagaacttagctgtgaaatgtcttggtcctttagtgagtaaagtgaaagagtaccaagttgagacgattgtagacaccctctgtacaaacatgctttctgacaaggagcagcttcgagatatttccagtattggccttaaaacagtaattggagaactccctccagcttccagtggctctgcattagctgctaatgtatgtaaaaagattactggacgccttaccagtgcaatagcaaagcaggaagatgtttctgttcagctagaagctttagatattatggctgatatgttgagcaggcaaggaggactgcttgttaatttccatccttcaattctgacctgtctacttccccagctgactagccctagacttgcagtcaggaaaagaacaattattgctcttggccacctagttatgagctgcggaaacatagtttttgtagaccttattgaacatctgttgtcagagttgtccaaaaatgactccatgtcaacaacaaggacctacatacagtgtattgctgctattagtaggcaagctggccatagaataggtgaataccttgaaaagataattcctttggtggtaaaattttgtaatgtagatgatgatgaattaagagaatactgcattcaagcttttgaatcatttgtgagaagatgccctaaggaagtttatcctcatgtttctaccattataaacatttgtctaaaataccttacctatgatccaaattacaactatgatgatgaagatgaagatgagaatgctatggatgctgatggcggagatgacgatgaccaagggagtgacgatgaatacagtgatgacgatgacatgagttggaaagtgaggcgtgcggctgccaagtgcctggatgccgtagttagcacacggcatgagatgctcccggaattctacaagaccgtctctcctgcactgatatccagatttaaagagcgcgaagagaatgtaaaggcagatgtttttcatgcatacctttctcttttgaagcaaactcgtccagtacaaagttggctgtgcgaccctgatgcaatggagcaaggagaaacacccttaacaatgcttcagagtcaggttcccaacattgttaaagccctacataaacagatgaaagaaaaaagtgtaaagacccgacagtgttgttttaacatgttaactgaactggtaaatgtgttgcctggggcactaacccaacacattcctgtacttgtaccaggaatcattttctcactcaatgataagtccagctcatcgaatctgaagattgatgcattgtcctgtctgtatgtgatcctctgtaaccactctccgcaagttttccacccgcatgttcaggctttggtccctccagtggtggcttgtgttggtgacccattttacaagatcacatcagaagcccttcttgtcactcagcagcttgtcaaagtaatccgtcctctggaccaaccctcctccttcgatgcaacgccttacatcaaagatctcttcacttgtacaattaagcgcttaaaagcagctgacattgatcaggaagtcaaggagagggctatttcctgtatgggacagattatttgcaatcttggagacaatttgggccctgacttatcaaatacacttcagattttcttggagagactcaagaatgaaatcacccggctaacgacagtgaaagcactgaccctgattgctgggtcacctttgaagatagatctgaggcctgtgctgggagagggagtccctatccttgcttcatttctcaggaaaaatcagagagctttgaaactggggaccctctctgccctagatattctcattaaaaactatagtgacagtttgacggccgccatgattgatgcagttctggatgagctccctcctcttatcagcgaaagtgatatgcacgtgtcccagatggctatcagcttccttactaccctggcaaaagtatatccctcctccctttcaaagataagcggatctattctcaatgaactgattggacttgtaaggtcacctctgctgcagggaggagctcttagtgccatgctagacttcttccaagctttggttgtcactggaacaaacaatctaggatacatggatttgctgcgcatgctaacgggtccagtttactctcagagcacagctcttactcataagcagtcttactattccattgccaaatgtgtagctgcccttactcgagcatgccctaaagagggaccggctgtagtaggtcagtttattcaagatgtcaagaactccaggtctacagattccattcgtctcttagcgctcctttctctaggagaagttggacaccatattgacttaagtgggcagttggagctaaaatctgtaatattagaggctttctcctctcctagtgaagaagttaaatcagctgcatcctatgcgttaggcagcatcagtgtaggcaacctccctgagtatctgccatttgtactacaagaaataaccagtcagcccaaaaggcagtacctgctgctgcattccctgaaggaaatcattagctctgcgtcagtggtcggccttaagccgtatgtcgagaacatctgggccttgctgctaaagcactgtgagtgcgcggaggagggcaccagaaacgtcgtcgccgagtgtctagggaagctcactcttattgatcctgaaactctcctcccgaggcttaaagggtatttgatatcagggtcatcctatgccagaagctcagtggttacagctgtgaagttcactatttctgaccaccctcagcccattgatccactgctcaagaactgcataggtgattttctaaaaacgttggaagacccagatttgaatgtaagaagagtggccttggtcacattcaattctgcagcccataacaagccgtcactgatacgggaccttctggattctgttcttccacatctttacaatgagacaaaagttaggaaggaacttataagagaggtagagatgggcccgtttaagcacacggttgatgacggcctggacattagaaaggcagcttttgagtgtatgtacacacttctagacagctgtcttgacagactggatatctttgaatttctaaatcatgtggaagatggtttgaaggaccattatgatattaagatgctnacatttttaatgttggtgagactgtctaccctttgtccaagtgcagtactgcagaggttggaccgacttgttgagccattacgtgcaacatgtacaactaaggtaaaggcaaactcagtaaagcaggagtttgaaaaacaagatgaattaaagcgatctgccatgagagcagtagcagcactactaaccattccagaagcagagaagagtccactgatgagtgaattccagtcacagatcagttctaaccctgagctggcggctatctttgaaagtatccagaaagattcatcatctactaacttggaatcaatggacactagttagatgtttgttcaccatggggaccattacatatgaccatacaatgcactgaattgacaggttaatcataagacatggaaagagaagtgtctaaaagcttcaaaatgttccacttttttttccttcatggagactgtttgtttggctttcttccattgttgtttttgtagcatttatttcagaaatgtgtatttccataatccagaggttgtaaaaccactagtgttttagtggttacagcaacatttgaaatggaaactaaaagttaggattttatggagtatggagatagggtccagtatctatttaccctgtaatgtttaggattaaaatgttaaaattttgtgaccatgaatttctttcttttataaattttctcatttaaaaatc

SEQ ID NO: 609515 - DNA, 811 bp, Homo sapiens
  misc_feature (560)..(560): n is a, c, g, or t
gttcctcccatatgcttagcggcggtggcaaagtgggtgtcgtgcacctggtctttgatgtgaactaaaacggttgtggtcataactactgcttgactgcgccgctctcctggaaccgtcgcatggaatatagctatcaggatcgatacatagaagactgaggtgtaacgttgcccctgccctttagtgtcagtgagttagtgactttattccagagataggtgccgatcgcagatgccaccgaagttttcacattgtaaactctagattatcttcaggatccacatacgatgtctattgcaattaaacttcctcttctcctttttgatgcaggccgtcatcgcgaaataactgggctttgaaaccagaatcttgaaaacatgcctttgagtaccttcttggaacaggtggccaaagcctacttgacgaacatgcacatgagctgtcccgtgtagactcttgactgcgatcaatgtgatctcactttcccgattgggggaagccgtcatcagtgtagtggaattggcatctcccgccaaggttgattgtacgaggattcntcaggtccctagagatacatccccaaaagcaattgaatgtaattcgaatagacgtgcaggaagagaaactcctacattccctgtgtatcaaagcgatctttgctctggcggaaactttcggaaagctccccttggggagatggacaaggtaggtttggctcgggattggaccaccctgagggccatcgcaattggatagagggtagccatgagtggatctcgtgcttacaatccagttgctattgtgcccc

SEQ ID NO: 609516 - DNA, 394 bp, Homo sapiens
acgagctccgagccaggtcaggcttcggaggccacaagctcagcctcaggcccaggcactgattgtggcaaaggggcccctacccaaggtctagctaggcccaagacctagttacccagacagtgaaagccccctggaaggcaaaaaagttgggggcctggcccccccgggaaggggaacctttttcagggaaaaaccatgtatcccatgtcttcagaagcaagtcaggtttcatgtaaccgagtgtcctcttgcgtgtccaaaagtagcccagggctgtagcccaggcttcccagtgattttgtgttcacccgtgagtccccctacatgcccccgtgaagctgggcattggtgacgtccaggttgtccttgagtaataaaaacgtatgttgca

SEQ ID NO: 609517 - DNA, 659 bp, Homo sapiens
ggggaggcggccctcggccctctgggacgatcacctgggaacgcatgactgttttctccctcacctacgagatgaactcttcaagcagaccgtcatccaggaccccatgcccatggagcctcaaggccaaaagcctctcgcctcagcccacctgacttccgctgctggcgacactaggacacctggccatccaccgccccagagattccatctgagctgggggcctgtgactttgagaagccctgagagcccccgagccgcagcagcagctccccaggatcaccagtggcctcaagccccaagcaggctgagccccaaccccgacgggcctacaccttgggtcaggcccacaatgatcctggagccttggtctccccactgtaggtgggccgtgcaactatgactctggccatcatcctcaacctggctcatcgaggacaccctcaccaggtgcccctcctggaacacaccccggcccacagataccatagcccaactctgaggtcaactaaggcaggtcactcaggagatcaggaccagtgcttcccaccaggcatttccttgaaccccacatttgggtgtctgcgggccaccaaagctcttcaggccaagtcagagctggtgttgctgcacttggatggggaccctgaaacaagaga

SEQ ID NO: 609518 - DNA, 174 bp, Homo sapiens
agtgtcccggagatagagggactgtaaaccgaaggcaccccacagactggctcctgcccttcatggggttgccccaggtcacacaaccagcaggcggctcctggttcacggcaaagtagtcacagctcaggctggagaagtaccctgggcctctgcttctccatgggttacccg

SEQ ID NO: 609519 - DNA, 994 bp, Homo sapiens
agcggggtggacgaacaggaacgtgtcctggacagacacgtcgagtcggggaggaatgcgggggtcaaagggagcactatgtctgcggaagtccccgaggcagcctccgcggtaggagcagaatggaaagtggcgaggagaaacccagtgactcagtccacgcacgacacagcaagaagacacgcaaaattaataaaagccagatatgccatcgatctcggggtacgaaacagcctgcgaggtctcagattgcgttaaggaacacggtggactgagagggcaaaaggcatatgatgggaattctcggaggattcactagactatggcttaaacgcgagaagagatgacagacacaaagcgaacgtctcctagctgcaggctccgcgataaagacggagggtcactgtgtgaccacgatgtccctacatccgtcaaagactctctgctcatacgtgaagccagaccctttgttggcataggacacagcctggcttggacatgacttaaaggaaggagcgtgtacaacttggctcttgacatcctggcgtaaaacattcgtcaatgtcacttatgcatcccgtataaaatactggattcacctcttagtgcgtaacagtaaactcgtagttgataccagtgtatccacatatcaacgtgaaggctgcaagtgagtgacgaaacttgcacgcgagcttatgtgcacagggatcaagacaggctaagatgagtgggtgcctaggcatttagttgggatgggaaaataataacggatgtatggcttaggaaaggtaatcacttggaattttacggtgtgtaaacaatgatgagaacagtgtggttgtacaaggaagcggaacaagtggattaaagaggggcaaagtactagaagagttaataacacattagcctccgtgagcaagtgagatgggtagtaattaatgtagaccttaaggcgttacttaggtggtagagatacaatgggttctctaagcag

SEQ ID NO: 609520 - DNA, 191 bp, Homo sapiens
atccattcgcgctctcgttctctctttcttcacgctcccgctgctcgggcaccagctccaacatcctcttagttgttcctgtctttccccttcactcaaagcgggttgccttctccggcagcagaaccagatccttcaaggccgccttgctcctgatggaagatgggctccgcgtcccagtgatatgtcca

SEQ ID NO: 609521 - DNA, 307 bp, Homo sapiens
agcactctgggaagctgagatgattagatcatttgaggtcaggagttcgagatcagcctggccaatatggtgaaagcccgtctctactaaaaatacaaaaagaggccaggcgcaggcagaccacgaggtcaggagttggaggccagcatggccaacatggtgaaaccctgtctttactaaagatacaaaaaattagctgggtgtgatggtgcacacctgtaatcccagctacttgggaggctggggcaggagaatcgcttgaacccaggaggcgaggttgcagtgacgtgagattttgccattgcac

SEQ ID NO: 609522 - DNA, 139 bp, Homo sapiens
cggcgcatatggttggggctcggcgtgtgcatgcacacgcggaggaagcatactgagcagtccataatcgccgatcttcatggaagatcggcgattacgcgctgctcagagtgggccctggcgcagaccaaaatcgccg

SEQ ID NO: 609523 - DNA, 103 bp, Homo sapiens
ggacctgaggagtgatagtcccaagttgtagaaatagagtgcctgtcccgcgggattcagtctcttggattgtttcctcaccgtcactgagttgcgtgcaata

SEQ ID NO: 609524 - DNA, 225 bp, Homo sapiens
ctcagtgatgagacgcacagagctagcaaattatttctatgcataatcacacatttaacttcagactcagccttgtttataattcccaaaaaaaaaaaaaaacgaaggccacgaaatcctgtttgaccagtatacaaggtttgaacatttgggcagccagtggtaaaacagagcctgccttttttaagtcaccattgcgggcttggatagtagtgggtaatcccc

SEQ ID NO: 609525 - DNA, 677 bp, Homo sapiens
gctctcaccccgttgcctctagcgttctgggaacgatggcgaaggtctcaagagctttacgatgtcacttgggaagaacatgagcagatcaaacatgcagaaaatgggagagaaagaaaactccaagaaatgagtgagcaaattggtggaagttggggagcaaggaattcaaattcaatcgaatattgctttctaagcttggggagaatgataattgggatcattattattgaaccaggtgaatgattgcagacacttagactatggctcggaatgacgtttggcacatgggttagggtccttcaagagcctgagaagcacagtttccctgagcagtcacacagagtcaaggcgaattaaacaggccatgccgcatttgaacgcccatggcaacgatattgattgcatgctataacagactactaatgcataggatttgataccaaagaaagaatccaatttaaagcacgtgctgacaaggaaagcgtaaagaattggcccatttcggaaaaaagcccaggggcaaacaatgttggaagggaccaatatcgggagaagcatgaaagttgaagtatctgtgaaacaatttttgtgtggaagaacacaagaagaccttggaaattgaactcttgcaggaaacgtttttacaatacatgtgaaacattgcattatgcaaa

SEQ ID NO: 609526 - DNA, 694 bp, Homo sapiens
  misc_feature (452)..(452): n is a, c, g, or t
aaagcggctgtacggtctgggatttaggatgcggcggggcgcgctcggaggctccttagcggcgggtgcgtcggatccaggcagccttcgggcggcggcgctgcctggtgcgtcgcggcgtggtcctccggcggctgtccggggcggtagtgagttggctgcgggatgtgctcagccggggagctgctgcggggcggcgacggcggggaacgcgacgaggacggggacgcgctggcggagctgggaggcggctagggaccgtagtgggatccctggggctgatgcccgcggctggctgcggacagcgtgcctgaaggagagcgagcaggatgttgaagactcacagaaccacactggtgagccggttggagatgactacaagaaaaatgggaacacttttttggtgaactgaacaaaaaccttatcaacatgggcttcacaaggatgtattntggagaacggaataagtggaaaccagtaatagtcattttcttatgggttatgctgttggttcccttgggcctgcaagcccttggactagttgcttgttctttgccttgcttataatttattgtgcaaacaggttaaaaccattggccgaaatttggaaattggttggaccatttgggtaggcccatattttgttatttggaaggaaaggttataataatttccaccttttttggaacaaacg

SEQ ID NO: 609527 - DNA, 446 bp, Homo sapiens
aaggccaattttaaagaatccctttggtgataccacacaagggggcatttgcttaagaaacatatcatgcgtatggacagtcatggtggctcatgcctgaaaacccaacactttggcacgccaaggtgggaggatcgcttgaggccaggagttccggacaagcctgggaaacacagtgagatctcatctctgaaaaaaaatttttttttaaaaaattaggcatggtagtgcatgcctgtagttctatctactttgaaggctgaggtgggaggattgtttgagcccaggacgagggtttgaggctgcagtaagccacgttcatgccactgtactctagcgtggatgacagagagagatcctgtctttggaagactggagctataagaatatgacctgagcatggccatggccttataatatagaacgggtcacatattaatcgctga

SEQ ID NO: 609528 - DNA, 636 bp, Homo sapiens
  misc_feature (50)..(50): n is a, c, g, or t
  misc_feature (52)..(52): n is a, c, g, or t
  misc_feature (59)..(59): n is a, c, g, or t
  misc_feature (81)..(82): n is a, c, g, or t
  misc_feature (84)..(85): n is a, c, g, or t
  misc_feature (87)..(87): n is a, c, g, or t
  misc_feature (222)..(222): n is a, c, g, or t
  misc_feature (229)..(230): n is a, c, g, or t
agtgggtagtgtgtatttattgatgaagatatgggggtacgggggggggngnggggggntttgaattgactgacatggacnngnncntggggttagtgagcactcccgggtggccggacataaggccccagagccgatcgttttatctaacagtcgcacccttaccaggaggtggtgaagcacacacgtgtggtccaccccgactaccggttgctgggggangggagtnngagtatgtggaatggggtggggggggtgaacgagagagcccggctcggcgcattacggtagctgagaagtgtcaggtgactcaccggtttatataaatgagaggcggatggccatggggggagtgagggcaaggggaggcaacaagagggacctgtgttttcgtgaacaggggtgtgaggaatggcatgtgttctttgggggagaaaaaaggaggactggggcaatgtggggggggtagtatacagggatggtcagggggaagacaggtaagacactgggtggatgttgggagtgggaagggggggatgatccccaaagttgtggggtgtgggcttgggttagggggagggaggggtgagagattattggaattggggtagaggattggggaaaaatgggggggaa

SEQ ID NO: 609529 - DNA, 116 bp, Homo sapiens
atatgaatccccgtagatcggagtactccaggtcggttctatctacttcattattcctccccgtacgaaagtgacaatgagaaataatgcctacttcacaaagcgccttcccccga

SEQ ID NO: 609530 - DNA, 413 bp, Homo sapiens
  misc_feature (91)..(91): n is a, c, g, or t
  misc_feature (365)..(365): n is a, c, g, or t
  misc_feature (407)..(408): n is a, c, g, or t
  misc_feature (411)..(411): n is a, c, g, or t
tgcccttcctgttcaacatcaaccgtgcttgaagggcaagatgaaacctgcaataaccctcgtgtttgtaaaagttgaccttaagaagcanacagtgaagttcctggttgggccctggaggctcaaaagatggctgggcacggtggctcgtgtaatccccagcacttcggggggccgaggagggaggatcacttgaagattgagacgagcctggacaacacaacaacacagcaagaccctgtctctacaaaaataaaaaattagctgggcgaggtggcgtgcacctgtggtcccagctacactggggcctgaggtgggaggatcgcttgagcccaggaggttgaggctgcagtgagttgtgattngccactgcactctggcctggagtgagcaagaccctgcctcannatnat

SEQ ID NO: 609531 - DNA, 108 bp, Homo sapiens
agcagttcatctatcaggagtgcagaggacccccgcaggtgcttggccgcatcactttgaagttctgagttgctttggtctccacagtccgcagctcgcccctgagtt

SEQ ID NO: 609532 - DNA, 410 bp, Homo sapiens
gagggagagtggagggcccttgtggaggaagtaacagagcatataggacagtttgaggttatgtctcttagtgaggtgaatagatggggggaggagaaatagggtgaaggagtaggtatgggggcgcacactgatatggaaggattggtgaagagatgtcagaatttctttggtctgctcttaggggaggacgagcttttgatttttgactatccagtccccttgaaaggaggctccttgctgtatagcaaagctttctcggtgggagagttcttgggtaggattgctgggataacaggaaggagaggggcagaggcagaagaaagggaggcttcttttggctgcctcatcggcctttcctgtttgcctcgaggatttcatcttgaacctgttcgatgtcctcagacagt

SEQ ID NO: 609533 - DNA, 459 bp, Homo sapiens
cggagccattgtggctccggccggttgcgcgggccctcggaccctcaggtaggcgagggttcgagggcacgagttcgaggccaacctggtccacatggggaaaaaaaacaaaaaaacaaaaaaaaaaaaaacacttgtgtgtgggggcgcgcctgggaccctgagaaaagatcttttcaaacacatgtggttgggtgcgcggcggcccagttgtgaactgggaacctttggtgacagaaccgttggtcccagagagaaactcggcgccatgcgcccatgtggggcgtggtggttttcctccacaatatataaaaaaccccgcgggggggcaacccgcgcggcgtcttttggaccaaatcaccagatagggaggttctaaggaggcccacacgcggcttcctatcacaggggctgcaaacgggagggccgaattataaattattacgccggggagtgagc

SEQ ID NO: 609534 - DNA, 415 bp, Homo sapiens
cccagtagctatcacgatggtttttacgtcaggtggatgcgaggcatgtgggacagagcatcctactgggctctcatcttttccaaagacagtactctctctcacacctgcactggacactgatagagacaggacaggtacaatataaccatgctggctcagcccaggcccaccggggttttcagcagcagcctgtttcccatcatggagtgggcccatgcctgagttctgcatgcctggggcagcaatcgctatgactgccgcaatcagcccatctggattcaactttcagggactgagcagctcccactgcaagtggcaaattaattctgtgcatgcctttcaaccccagcagcagggctcatcacaggcatctggcatccagcatcagagcaggactggcattcagcatcag

SEQ ID NO: 609535 - DNA, 1394 bp, Homo sapiens
ggaggacgtgcgacaagcgacggacgcagcgcggttgcggcgcaagggtccgtgctcagctgtttcgccttcgctgtggcgagaggtgtctatgggggcatccccgatgacgagcgtcgtctactcgtgctaccggacaacccggtcagccgccgtccgagatgctgtctcatatggctgaggagagagcgaggagtgagctgctgaagctcaagagatagcaaaggtacgatagtttagaccggattcctatgatttgtgtagtcgaagacgaagactctctacaaagtcgcacagtactaatcgagttttagagtcgctttcgtgcaatgtctagaaactcctccttgttgccgcatctgagcataattggcctatgagctggcgagctcgtggtattgatcgagttaggcccaaaagagataagttctgggtgcgaagagcttttgcgaggctttgggaagactttttggggcttgcaaatggaggattagacaagggaacatactttcgtggtcccacagggtgtagtgcgcggaaaaaaattcattcaattttaacccgtttgggcgtgattggggacaatcctgtgagttttggcctcgggggtagttgcgtctgagaaagaacgcccaattgggagacaaataacaggggacggaagtgcttggatctcaattcgaagtaaccaaactaattatgcgaggtgttatactggtaaggaaactttgcttggatagagaatagatgttcaggagtagggggattggaacggttttagtggaaattggagggcttgaggggagaaaatagcaccttgccaaggtgaaacgttactaatgtaggggcaaggtgttaaatttgttgaaactcttgagcatttcttggagacgggccagcgaacacctgggttacttggccccaaggaggaaccttcgtgacttataaaggtctaccttaagacaaagccatgttcgtgggttacttcccacacgtgtcgtaaggaatcgcacccatttgaccgtgacgtggacagtgcgacagctctggagactcccccacggaagctcttctggcaaggacgcagttccccttattggaaccttgcgcttgtgcacgctggggtacctcctggctgaacagcgtgtgtctaaaactgtgttgtgacgcaacgtgtccaattaagccgggcgttctacgagacctgtcgcgcgcatcactgtacgctctctacaagatcctgtaaacgcacaaatatcgtcgacgtttgggccatgagcgaaccgaacgttgcacctccttgttgacaaatccatatcggcatgggatagacacacctgggctacgcctaggagagcgtgaaaggtaccccatcaggcacagcagcggtacag

SEQ ID NO: 609536 - DNA, 245 bp, Homo sapiens
agcggacattagctgatgtctgggactgaagggctaggtgtatattccagtcttggcagtctgccctggttgtacctgtcattcaaagggctgacgactattacctaattgattctccttataggacgattagatagatagatagatagatagatagatagacagacagacagacagacagacagatagatagatagatagatagatagattttttttttttttcattttttttagtttgggggg

SEQ ID NO: 609537 - DNA, 820 bp, Homo sapiens
gtcgtgcacctgttggttgtgtgatgttcttttggtgttgatgctctgggtttttttcttctcttgtttttgttgttgtgttttgcagttttcgtgtgcatatggttgtttttgttggtgtttttcctgttcttgctgtgcttaggtgtgtgtgtgtcggggggtggggtgttagtttgttttgtgggcccccccccaggagaaaacgggcaccacacgtataaaacaccacctcctggggggtgcaaaccccaccgccgacatttgaggggaccacccatgaggaaactccggagaggagatccccccgcagcggtggcaccacaaagaccagcgcggcgtgggtgaaaagcgccccgccccgccaactcataacgcggctctcaaagggtgtcggggccctcgggtggggcggattttgggccgccgcggacgcaccaggttgtgggtgtttcacctcctggatctctgggtgaggagaagttggggggctcctctgggaaccctcgagtgtcctcgcctattggggaagtgtctcctcctttcggggaccttttctcggccccttttgtgtttcccctgtggggagtggggggggtgggccccctcttcctcggggagaggaccaccctccctcgggggttgtgaaatttcccgcggggccttcccgcgggtgccgaggtaatcttgagaagcacagaatgtctgtggccacgtttttcttttgccccacaatggggccttttttttttttgtttttttttgtaaaggaggaccctttttcttaaggggcgcccaaaaaaaaaataatttgggccca

SEQ ID NO: 609538 - DNA, 383 bp, Homo sapiens
  misc_feature (370)..(371): n is a, c, g, or t
tggtaatgggttaagggataggcatttagatcaagtggaaaagaactgagagtccagggccgggcgcgggggtcacgcctgtaatccgtggaaaagaacttgagagtccagggccgggcgcaagttgtcacgcctgtaatcccagcactttgggaggccgaggcgggcggatcaccaggtcaggagatcgagaccatggtgaaaccccgtctctactaaaaatacaaaaaattagctgggcatggtggcgggcgcctgtggtcccagctactccggaggctgaggcaggagaatggcgtgaacccgggaggtggagcttgcagtgagctgagattgcgccactgcactccagcctgggcgacagagacgnntccgtctcaaaa

SEQ ID NO: 609539 - DNA, 576 bp, Homo sapiens
  misc_feature (278)..(278): n is a, c, g, or t
ggaactctctaaaaaggagccagagtcttacaatgaccacaccatgcagaaggaataaccttcatcaagttttatgctccatggtgtggtcattgtaagactctggctcctacttggaaggaactctctaaaaaggaattccctggatctggacgggggtcaacgatcgccgaagatagactgcactgctgaacggaatatctgcagcaagtattcggtacgaggctaccccacgttattgtcttttccgaggagggaagaaagtcagttagcacagntggaggcagagaaccttgactctgttacaacccttttgtcctgagccaagcgaaagacgaactttagggaacacagttggagggtcacctcttcctgtccagctcccgcaccctgccgtttaggaggttcagtcccacagaaggccacttggttcccagtggtggctgttcagaaagcagaacatactaagcgtgagggatcttctttgtgtgtgtgttttccaagccaacacactctacaagttctttattaagttaagattctctaaggaaatatgtaactcatgggcactgtgtt

SEQ ID NO: 609540 - DNA, 427 bp, Homo sapiens
  misc_feature (50)..(50): n is a, c, g, or t
  misc_feature (78)..(78): n is a, c, g, or t
  misc_feature (89)..(89): n is a, c, g, or t
  misc_feature (117)..(117): n is a, c, g, or t
ctgggctatgggtctccttctgtttattgggctgccccatcttggcctcnttcagggccctcttctgggtggtgtccngcagatggggncagggcatgctccctcctcactgtctcncaggccactgcaccgtctaccctgttggcttcaggacaacgatcacgagcctttgttgagggcctattctgtgtacttagagtgactgctttatagcctgtgggttgtctgacttcatactccagctgtctaggccatgcaagctgccacaaccccatcttctcatgtcttggggactctgtcctccactgcttgatttctatagtcttgggagctattgattcaggtttcacctggtttttcagttttttcaggcaggagggtaaacctggcccctgttaccatcatggtcagagcagaaggtcgacgc

SEQ ID NO: 609541 - DNA, 286 bp, Homo sapiens
tgtgcatcccccttcgtacagggaggaatttgaagtagatagaaaccgacctggattactcccgctgaactcagatcacgtgggagtttaatcgtgaacacacgaacctttaatagcggctgcgccatatggatgtcctgagccaacatcgagggcgtaaaccctattggtgagtatggactctagaataagaatgggctggtattcctaaggtgacttggtccggtgggcaaggtattggatcaattgaatattgtagttcgctttgactggggaagtcttaaca

SEQ ID NO: 609542 - DNA, 754 bp, Homo sapiens
  misc_feature (8)..(8): n is a, c, g, or t
  misc_feature (77)..(77): n is a, c, g, or t
  misc_feature (82)..(85): n is a, c, g, or t
  misc_feature (91)..(91): n is a, c, g, or t
  misc_feature (93)..(93): n is a, c, g, or t
  misc_feature (99)..(99): n is a, c, g, or t
  misc_feature (133)..(133): n is a, c, g, or t
  misc_feature (209)..(209): n is a, c, g, or t
  misc_feature (233)..(233): n is a, c, g, or t
  misc_feature (237)..(237): n is a, c, g, or t
  misc_feature (239)..(239): n is a, c, g, or t
  misc_feature (241)..(241): n is a, c, g, or t
  misc_feature (249)..(249): n is a, c, g, or t
  misc_feature (257)..(257): n is a, c, g, or t
  misc_feature (264)..(264): n is a, c, g, or t
  misc_feature (302)..(302): n is a, c, g, or t
  misc_feature (308)..(309): n is a, c, g, or t
  misc_feature (313)..(313): n is a, c, g, or t
  misc_feature (325)..(325): n is a, c, g, or t
  misc_feature (330)..(330): n is a, c, g, or t
  misc_feature (335)..(335): n is a, c, g, or t
  misc_feature (353)..(353): n is a, c, g, or t
  misc_feature (358)..(358): n is a, c, g, or t
  misc_feature (364)..(365): n is a, c, g, or t
  misc_feature (369)..(369): n is a, c, g, or t
  misc_feature (371)..(371): n is a, c, g, or t
  misc_feature (381)..(381): n is a, c, g, or t
  misc_feature (385)..(385): n is a, c, g, or t
  misc_feature (391)..(391): n is a, c, g, or t
  misc_feature (410)..(410): n is a, c, g, or t
  misc_feature (435)..(435): n is a, c, g, or t
  misc_feature (458)..(458): n is a, c, g, or t
  misc_feature (474)..(474): n is a, c, g, or t
  misc_feature (511)..(511): n is a, c, g, or t
  misc_feature (742)..(742): n is a, c, g, or t
taactacncttcagaaactgaagatggaaacatagctaagcctcaacttccggtcaagcagaaagtaatgaaaaccnccgannnncccccncncacatnccccactgctccttaaatgccacaatcacgcggnccactgctcctttcattctctacagacaacctgagtctcacactgtcatagcaccaagaagaaaacagttactttnacttttcttatagcaacatagggntttntntncataaaanatgttggncaggttntccttcaatcatggtttgtttgttaacagttggtttcntaaaanngggnggggtgggaagnggatnggggntggtctctttacaaaagngaggngaatanntttngntgtaccaggntgtntagggnaggtgagtgactgtgtgtnttatctgcgctatgagtgctaagtnttaatatttagttttttattttnggaaataacctcaganaccatcagtccaaccgcttccattttacagctaaggnaaagggtccggaaacttaggtgaatatcagactgggatgagaacgcaggctttggagttaggctccttagtatatgaagttcatgtatccccatagacaaactcattttctggtaatatgaatacacttctgggatgaaccaacagtttttcagtctaaggtatgtcagaaacgaattcaatttttatgcttaagtttcctctgcacagctttctccatttaggttgtgangatgatgcagac

SEQ ID NO: 609543 - DNA, 732 bp, Homo sapiens
gagcggagcggacgggtggagaggtcccggccgggagccgcggaaagagtagggctccccagacaacggggtccgacgagcagttgggcacgggctgagtccgcctgccggcaggaatggtaagaagacacgacagcggagacaactgccttgaaagaagagcttattatgtacagttcccagggcaagagtgggcgtgccgacacagtgcaaggccacatggggaagtaccagggtcattcaggaggcataaggagcaaggtgaaagcataggccagagctattctttaatggtgtcaagggtgggaaggacactgaagcgtcactggggtgggaaggaatgagcgagacagggtagacgagctgaacagaaccttaggattggaatagtacgaagtaactttgggagaccagagaggtggtctactagctgcactagtacactgggctctgaggagtatatagagtacaggggaacgcattggcttgtgtgtggtggtatgggggtatgcaaccatgggattggtcgcgtttgcatatgagaagcatgctcacagggacaggggtagaggctaaactactaagcaggtacagcgtataccccagaagaagggggacagagactaccacctgggtacccttacagggtcctaaagaccgtcaaacgcatacgttaaacaacaacacaagacaagaatacctcaaaccaacaagaagggcagggggacaatg

SEQ ID NO: 609544 - DNA, 209 bp, Homo sapiens
  misc_feature (46)..(46): n is a, c, g, or t
cattagccaggtctatgtggtatcgtgtacggtgtgcagaatacanctggtagatagtagtaattcgtattgtaagtatcatgtgttccgtgtggttgctaggtaaggtttgagctgattgtggtgttgatgttgtccttttgtcgtgtgattagagggtgaatcatggacggggatgttgatgttatcttactagagtatagaaaggt

SEQ ID NO: 609545 - DNA, 748 bp, Homo sapiens
cttcggttttcttttttgtgttttcttttttgatttctttctttgttcttctcctctattcttttttgtgcttgttttgttgcttacgtggttgtcccttgtctgttgcgtttcctgttgtcactttgttttcttcggtgtcctcttgtgtgttcttttcttcgtgtgaccccttttgttctcttttctttctcttctttttcacttctttttgtttcctttctcatctgtttttctcctcttggctccctcttttcttttctgtttcctgttctttagcattcttttataggttcgcgggccgttcctgtcgtcttctttgtgattctcctcgccgctggttcgtcgatgttctcattgcttcgcttcccacctgtggtcttggctctgcggtggcagtcctgaggccgtcggcctctcgtcttactacgtccgtgtggtgctattatggttctgcggtcgcctccgtgtgtctctggccgtccttccttgtcctagtcctgcctggtgcacctagtcgtgtgtcgcgtgtgtcgatcgtgttcgtggtaatctgcgtgagggacttcctgggccctttgcgctgtcggtccctcggtcccggctgtgcctcagggcagatatagcaagctctttcgaccatagttgatggtaggacattttagactttatttgtcagctctgtactgacaccaaatacacacccccacaaaatcgtcaaattcgaaagtttcactacataacactg

SEQ ID NO: 609546 - DNA, 197 bp, Homo sapiens
ccaaccaggtagcgcgccttcaccgatgccaagcggccctgacccagatccagcgccgcgacgactccatcggcttcctcgtggaagctcgtcaggctggcgcccagccgggtgcggacttcgacgtattgctccacccgctggcgcagggcgcggtccagatccggctggtagaaagtcacgagcttggggtgccc

SEQ ID NO: 609547 - DNA, 194 bp, Homo sapiens
ctgggtccaggttgtgctctcctggaatgacagaggcaacgtgaagatgctgaaaacagctgcagagatcgtttgacaaatgaatctagtagcacaaaagatgatgactatttacccagcaacacatgctgggacggagtcatcctactagtagtcgcatgctgcacgtcatgcacattcttggcagcgtgcgc

SEQ ID NO: 609548 - DNA, 186 bp, Homo sapiens
tgatcggtactagatatccacatggaattaccctcacacatcatgaagatctatgtatgtggccacagccatatacatttaaaacttcctaaagcatatattctcaggttaggaaggcacactcaaatttattaggtccaattcctcataagacaccggtggctgcctttccttcgcactgagaga

SEQ ID NO: 609549 - DNA, 458 bp, Homo sapiens
cacgaggcggcctgaggcagcgcttggtcgccgtcgccgggcagcagctcgggaacggtgagagcaccgccggaggccagcatttccaacagttttcgccggtcgcggtagcgggcccgcagcagcgagcggccgtcgaggtagagcaggtcgaacgcccagaattcgacccgcgcgctcttgccgcggttttgcatctcgtggaagttgggcacgccgcgcttgtccagcaccacggcctcgccgtcgagcaccgcgtggtgctcctcaagagcctttgccagcgagcgtaattcgcggtactcgccggtgacttcgcgaccgcgccgggaccgcacccgcagggtaccgtggtcggcctcgaccagtagccggtagccgtcccatttgccctcgaacgcccactggctcgccttgagcgccgacaccgaaccgtgggtggcgagcatcggcgcgat

SEQ ID NO: 609550 - DNA, 197 bp, Homo sapiens
agaggatcccgttcgggcggtggtcatatctgcgtcgtggtcagcgtgccaccggccttgtgcgatgtcgggcgtctgggtgtcgtccttccacagcaactgcagcaggcggatgttgctgccgcgcgggtccgaagggcggccccggcatgcaggaaatgctgtatccgaccagctacctgaagtcgaagggactg

SEQ ID NO: 609551 - DNA, 103 bp, Homo sapiens
gagtgatctagaggatccctaaaattgatggggttgtcagtttagtacccatgtatactctatattgacaatttatgtgtacccagttctgatacggttttga

SEQ ID NO: 609552 - DNA, 145 bp, Homo sapiens
gactcgagctcggcacctgtaacattcgtgtccatggcacatgcggcgcaagtaggtctacaagacgctacttcccgctatcatagaagagcttatcgaccttgtcatgatcagcgccctcataatgcatttgccttatctgtct

SEQ ID NO: 609553 - DNA, 525 bp, Homo sapiens
catggtggcgcatgcctgtaatcccaactactcaggaggctgaggcacgagaatggcttgaacccgggaagcggaggttgcggtgagccgagatcacgccatgcactccagctgggtaacaagagcgaaactccaccttttaaaaaaaagaaaaggaaaaaaaaaaaaggaaaagataaataattctagctagaaagtgtttcattacaattcacaaacaaatagcgttccggtgaaccggtgtaataatgggccttttccttaaaaccgttcattcttcaaattattacccttgggcaatggcgcacgtttaacctttacacaattacttacaagttacctcgtgcattggttccctctatttaaattaacccggtattaattaaccacaattattattagggtaacataataaatttagtactccaaccggtgttggctggaaatcggggtctctttacctaaattcacgtcccctaaaaacaccatatttacctttttttttattttttttttggagaaagg

SEQ ID NO: 609554 - DNA, 134 bp, Homo sapiens
agtgtgtgacagttcaacagaagggtagggaaaggtggctgcactgccagtggagcaaacaccaggtggagcgaaatgggcatccagtaagcaaacctgagactgactgggtctccctttgacgtcagcatgga

SEQ ID NO: 609555 - DNA, 1227 bp, Homo sapiens
gcttgccgtggcttggggttccgatgtggtccccggagcgggaggccgaggaccccagcacggggtgagaccctggcgggccttctgccccccgagtgggaggcaggacgaggacgcgcatgtccttcctgttctcctgctttcaaagagcgagtcgctgatggtgaacatgcacctgactggcgacatgcaatgatgggctatcttggtgctgctcgtttgtgctgcttgatgccacatgccgcctgcccgggtgtgtgtgtgctgcctgctgtctgctgtggacttgcacgtgaggcctttccggcgcacatgtgggacgcgtccctgctgtgtggcttgtgccacaggctgcttgcatgtgaccatgctgcggtctgacggctggacgcttgccagctggtgaggtcaggacgttcaatgggctccagtgtcagacaggcatgccttggaatctcacgtggtgtcgggtgatcttgtgcggtcattcgcgtgccttgacacggccatattacaaacgcttgcgacgtcttatatgctaaacccatgccttgggaacgataaactaaccgtgttctcgcaggcctagacgtgacgggtaccctatggctcgccttggttgcgacgcgctcgatatcgacacgggacccacatgggactagacgtggacggctcggtactccgctccttgtattccacggaaaaccttcggccccccacttccttgacctaccacctagcacgactggattaggcgatcggtgcccaccattgagatccacagcaagccgcttcgagacacaagacaccagctttcgttgggatggccattacaacgtctcgcttggacaccccgaatgaaattgcagcgacacaggggaacccgttcaccgctaccccatcttgcgctcatgatctattcgccgctggctgctgcctctcgtgccgcaccttcaacatgctggtcacgcacagacagcatgtcggggggttatccacacacagcgctactccccgaatccccgaacttatccccaggctacacaccctgcgttggcgtctacagtgacaacaccggcacttttgcggtcttgtacaccagacgtcaatctgtggtgcctcctcctggcaagcgctgtggcaccccgcacgtgctttgtgcacccccaacaggaggcaatcatctagatactacccaatgatgtcgacaatgtggacgcagtggtt

SEQ ID NO: 609556 - DNA, 360 bp, Homo sapiens
ccacttactggatctttgtgccacaggaaacccattttctggtgggatatgccttccagtgccacagggccactcaccccatgctatctctgatcctgtcccgtgaattgcctgggacggacagtcaagggtcaagcccagtgttctgggcggataggtgggtgggaaacagaagaggggagaatgaccgtcctaagcttctgccttggggatcccccacacgaacctgggtactgcctgggaaaacctgtgcctatgtgaaaactaatggacctcgtcctcgcccaccggcctgcgaagccagcatctccgtgaaaggtggatggaagcgccctttgttgcctcatttttgaagctgca

SEQ ID NO: 609557 - DNA, 2659 bp, Homo sapiens
cacgtttgtaatctcaaagaaaggttgcttgagtggaccccgacctcgtcttaggagaaaggagatttatgcagcaagtttggactagccccggcaaagtcagtgccaccaaggccctactcaaagggaggtgttcacactaaggtatcggcccaccctgattgtgcttcttggtcctcggagtactcaacacagattgacatgtggggtgttggttgcattttctttgaaatggcttctggaagacctttatttccaggatcaaccgtggaagatgaactgcacttaattttccgactgctaggaactccatctcaggaaacttggccaggtatttcttcaaatgaggagttcaagaactacaactttccaaaatataaaccacagcctctaattaaccacgcacccaggttagactctgaaggaattgagttgataacaaaatttcttcagtatgaatctaagaaaagggtttcagctgaagaggccatgaaacatgtgtactttcgaagtctgggaccaagaatacatgctttaccagaaagtgtatcaatattcagtttgaaagagattcagttgcaaaaggacccgggttttcgaaattcttcttatccagagacaggacatgggaagaacagaagacagagcatgctcttttaagtctgataacatggtttcaagcccagcccccagcctttcttaccaatcaaggactcagaactgaaggcaattatttcttttggtggacttggaatctccgtttgtctacactgtcctcttcacagtggagtctttttatttcagacctacagattgtttttatatttgttgtcacagtgtgacaattttttgtacagtcggttttaaggtcttctctgccattagagccagtaggttacagctattgatgtaactatagctgcaatttttgtgcaggactgagaaacacagtgcattatttattgcggaatcattgctgctaaataactactgtctgtttatttaacacaacaattgaatgcctgaagaagttgcagtggctttattatatgtgaatgcatctgtttctcctcacgaattgttttactgctgcattttttgtttttaaaattaaactgcagtgtttcctggaatgtaaatttagctttgcttaatagtaaaataagtgagccatcttgaacactttaagtttatactatataatttcttaatgaacattggcaaatagagtagctaagagattgacaagcacattacgtttagataagcatgtgatgcagaagttgattcaagcaagtgaatccctgacattttgaggatctcacattagacaccaacaaattaaagctccaaaattatttattttttatgtgttcctcactttagaaacgtctactgcatattactggatatttgtatactaatacacttacctattttacattgtgttttaaatttagttaaaacttaaccgtagaagtctgttcaaacgcgaaaggtcttgctttgtttgttttaaatacatttattttattagaaaggatgatatttcattggggaatagtttctttcatttgggggctatgtgtttcaataacattcacttggaatcagctgaaagctgtaatatgtctttgaaatgagccatgataaattacaaacaagagaaatgagaacttacaggattgcttgaaattattgtgggtattatctgtttaccagagatactaaatattagttttaattatgcatctctttgaacatcataaacacactttggtgttggtaacagtattttaagcatttttgttcacttttaaggactatttgtttagtgcatcttacaaactataaatcttaattggtatattttgaaatggtcgtgtaaatttttgccttatatatcatgaaaatagtcataacttaatttcttttcctgaaattcactgtaaaacattcaggggtcctaccatttctgttcaggaaatcttgtagtttattgttgttatttaacagtattaagtggatttttgtatatttcattttaactttatttgtgaatagtgattgtggcatgtttggggtgttattttaatatttcacgatactaaaattttaattttaaaaaattctggaagaaacagattcatgtgtaatggtgaatattggaccactactgcttttcacatttgtaaattggttttatgttaaaccttgtagcctaacaaactgctgttctttctaactgacagacatgtattaatattgtactttgaaggttataaatatgtggaaattccttcattttgttttgaaatttataataacaaaatctccatgttgttaaaatgtggttttattgagtcacagttctttcttggggatgaaggctgtgccgagtggggtccttttcttttatgggtcgttcttaagataatgaagtctcactgtgctagaggtgttattgttttctgtttgtgccaatcatttgcttagtaatttctgctgggttttttttatagcactctcaattataaagtatcaaatttgtcacttcatagaatgtatatttgatttgttgcaaatttgacattatagcttttcataggcttaattcttgcgtataaaagatgaaaatatatatccatttgttacataa

SEQ ID NO: 609558 - DNA, 171 bp, Homo sapiens
  misc_feature (141)..(141): n is a, c, g, or t
  misc_feature (160)..(160): n is a, c, g, or t
catagagatcatggtacacagtatattgaactctgtaacaaattattttgagaaatacagaagtgagaatagtgatttcctcaatttgtttatagtctatcacaaagaggccaagttcagtattaatagatatcctaatanaagttttacaagttttccnagggatacatt

SEQ ID NO: 609559 - DNA, 2286 bp, Homo sapiens
acgccatccctggtacctgaggcagaagacacatcttgtgcttccctagtcatcaggttcatcacttcgaagcatagaagctgtagactgaccccgtcaacagaagggtcatttaagacagtgctgatcactcttaccatggaatattagcttttgctggtgggaacattagcttcctagtcaccaaataactgtatgtgggataaaactgaaccttgaactgcctcataaaatgactttatattttaggacatgggaagaacagaagacagagcatgctcttttaagtctgataacatggtttcaagcccagcccccagcctttcttaccaatcaaggactcagaactgaaggcaattatttcttttggtggacttggaatctccgtttgtctacactgtcctcttcacagtggagtctttttatttcagacctacagattgtttttatatttgttgtcacagtgtgacaattttttgtacagtcggttttaaggtcttctctgccattagagccagtaggttacagctattgatgtaactatagctgcaatttttgtgcaggactgagaaacacagtgcattatttattgcggaatcattgctgctaaataactactgtctgtttatttaacacaacaattgaatgcctgaagaagttgcagtggctttattatatgtgaatgcatctgtttctcctcacgaattgttttactgctgcattttttgtttttaaaattaaactgcagtgtttcctggaatgtaaatttagctttgcttaatagtaaaataagtgagccatcttgaacactttaagtttatactatataatttcttaatgaacattggcaaatagagtagctaagagattgacaagcacattacgtttagataagcatgtgatgcagaagttgattcaagcaagtgaatccctgacattttgaggatctcacattagacaccaacaaattaaagctccaaaattatttattttttatgtgttcctcactttagaaacgtctactgcatattactggatatttgtatactaatacacttacctattttacattgtgttttaaatttagttaaaacttaaccgtagaagtctgttcaaacgcgaaaggtcttgctttgtttgttttaaatacatttattttattagaaaggatgatatttcattggggaatagtttctttcatttgggggctatgtgtttcaataacattcacttggaatcagctgaaagctgtaatatgtctttgaaatgagccatgataaattacaaacaagagaaatgagaacttacaggattgcttgaaattattgtgggtattatctgtttaccagagatactaaatattagttttaattatgcatctctttgaacatcataaacacactttggtgttggtaacagtattttaagcatttttgttcacttttaaggactatttgtttagtgcatcttacaaactataaatcttaattggtatattttgaaatggtcgtgtaaatttttgccttatatatcatgaaaatagtcataacttaatttcttttcctgaaattcactgtaaaacattcaggggtcctaccatttctgttcaggaaatcttgtagtttattgttgttatttaacagtattaagtggatttttgtatatttcattttaactttatttgtgaatagtgattgtggcatgtttggggtgttattttaatatttcacgatactaaaattttaattttaaaaaattctggaagaaacagattcatgtgtaatggtgaatattggaccactactgcttttcacatttgtaaattggttttatgttaaaccttgtagcctaacaaactgctgttctttctaactgacagacatgtattaatattgtactttgaaggttataaatatgtggaaattccttcattttgttttgaaatttataataacaaaatctccatgttgttaaaatgtggttttattgagtcacagttctttcttggggatgaaggctgtgccgagtggggtccttttcttttatgggtcgttcttaagataatgaagtctcactgtgctagaggtgttattgttttctgtttgtgccaatcatttgcttagtaatttctgctgggttttttttatagcactctcaattataaagtatcaaatttgtcacttcatagaatgtatatttgatttgttgcaaatttgacattatagcttttcataggcttaattcttgcgtataaaagatgaaaatatatatccatttgttacataa

SEQ ID NO: 609560 - DNA, 2418 bp, Homo sapiens
cacgtttgtaatctcaaagaaaggttgcttgagtggaccccgacctcgtcttaggagaaaggagatttatgcagcaagtttggactagccccggcaaagtcagtgccaccaaggccctactcaaagggaggtgttcacactaaggtatcggcccaccctgattgtgcttcttggtcctcggagtactcaacacagattgacatgtggggtgttggttgcattttctttgaaatggcttctggaagacctttatttccaggatcaaccgtggaagatgaactgcacttaattttccgactgctaggaactccatctcaggaaacttggccaggtatttcttcaaatgaggagttcaagaactacaactttccaaaatataaaccacagcctctaattaaccacgcacccaggttagactctgaaggaattgagttgataacaaaatttcttcagtatgaatctaagaaaagggtttcagctgaagaggccatgaaacatgtgtactttcgaagtctgggaccaagaatacatgctttaccagaaagtgtatcaatattcagtttgaaagagattcagttgcaaaaggacccgggttttcgaaattcttcttatccagagacaggacatgggaagaacagaagacagagcatgctcttttaagtctgataacatggtttcaagcccagcccccagcctttcttaccaatcaaggactcagaactgaaggcaattatttcttttggtggacttggaatctccgtttgtctacactgtcctcttcacagtggagtctttttatttcagacctacagattgtttttatatttgttgtcacagtgtgacaattttttgtacagtcggttttaaggtcttctctgccattagagccagtaggttacagctattgatgtaactatagctgcaatttttgtgcaggactgagaaacacagtgcattatttattgcggaatcattgctgctaaataactactgtctgtttatttaacacaacaattgaatgcctgaagaagttgcagtggctttattatatgtgaatgcatctgtttctcctcacgaattgttttactgctgcattttttgtttttaaaattaaactgcagtgtttcctggaatgtaaatttagctttgcttaatagtaaaataagtgagccatcttgaacactttaagtttatactatataatttcttaatgaacattggcaaatagagtagctaagagattgacaagcacattacgtttagataagcatgtgatgcagaagttgattcaagcaagtgaatccctgacattttgaggatctcacattagacaccaacaaattaaagctccaaaattatttattttttatgtgttcctcactttagaaacgtctactgcatattactggatatttgtatactaatacacttacctattttacattgtgttttaaatttagttaaaacttaaccgtagaagtctgttcaaacgcgaaaggtcttgctttgtttgttttaaatacatttattttattagaaaggatgatatttcattggggaatagtttctttcatttgggggctatgtgtttcaataacattcacttggaatcagctgaaagctgtaatatgtctttgaaatgagccatgataaattacaaacaagagaaatgagaacttacaggattgcttgaaattattgtgggtattatctgtttaccagagatactaaatattagttttaattatgcatctctttgaacatcataaacacactttggtgttggtaacagtattttaagcatttttgttcacttttaaggactatttgtttagtgcatcttacaaactataaatcttaattggtatattttgaaatggtcgtgtaaatttttgccttatatatcatgaaaatagtcataacttaatttcttttcctgaaattcactgtaaaacattcaggggtcctaccatttctgttcaggaaatcttgtagtttattgttgttatttaacagtattaagtggatttttgtatatttcattttaactttatttgtgaatagtgattgtggcatgtttggggtgttattttaatatttcacgatactaaaattttaattttaaaaaattctggaagaaacagattcatgtgtaatggtgaatattggaccactactgcttttcacatttgtaaattggttttatgttaaaccttgtagcctaacaaactgctgttctttctaactgacagacatgtattaatattgtactttgaaggttataaatatgtggaaattccttcattttgttttgaaatttataataacaaaatctccatgttgttaaaaaaaaccaaggaaaaaaaacttttggggggttgggccggaaaagttttaaacattggtgggggggggcca

SEQ ID NO: 609561 - DNA, 499 bp, Homo sapiens
gtgtagggttgttggtggggactgggtgtctaattacttcttctacaaactttaaccaacatccctatttttttttttcctttaaaaagaatttttggtcgagcacggtggctcatgcctgtaatcccagcactgtgggaggccgaggcaggcggatcacctgaggccaggagttcgagatcagctggcctacacggcaaaaccccgtctctactaaaaatacaaaaattagcctggcgtggaggcacactcctgcagtcgcagctactcgggaggttgaggcaggagaattgcttgaacccaggaggtggaggttgcagtgagccgagatcgcaccactgcactccagcaagcctcagccacctttaaacatattttttaggccaggtgtggtggcttctgcctgtaaccccagcattttgtgaggcctaggtgggcgaattgcttgagctcaggagtttgagaccagcctgggcaacatgaaaccctatctaccaaa

SEQ ID NO: 609562 - DNA, 492 bp, Homo sapiens
ttatagtggacagcagagttatcctgccgagcatgatatgaacgtccaatgcttaggagtgtcagctgccaggacgaacatcaggcagagacgctgagatcgttctacccagcatggtaccttctatgttattaggctcaaatgtcacactctgcctttgaactcagtcattcgaaactatattagtctgtcctcaccctgctacaaaacagccatcaccgaggcagagcaacatatcatcaaaggaacagaggattcaatagactcaccagaccgtcatggtcagcggcaggctcacaatcatggtggaaggcgaaagaggagcaaagtcatgttttgcatggatgcaggcaagagagcatgtgtagggaaactctcctttataaaaccatcagatctcatgagatgtattcactaccatgagaatgacatgggaaagagccacccccatgattaatttacctctctcttgttccttccatgacatgtgcg

SEQ ID NO: 609563 - DNA, 1126 bp, Homo sapiens
  misc_feature (9)..(9): n is a, c, g, or t
gtcttgctntgttgttttaaacacatagcccccaaatgaaagaaactattccccaatgaaataacattcacttggaatcagctgaaagctgtaatatgtctttgaaatgagccatgataaattacaaacaagagaaatgagaacttacaggattgcttgaaattattgtgggtattatctgtttaccagagatactaaatattagttttaattatgcatctctttgaacatcataaacacactttggtgttggtaacagtattttaagcatttttgttcacttttaaggactatttgtttagtgcatcttacaaactataaatcttaattggtatattttgaaatggtcgtgtaaatttttgccttatatatcatgaaaatagtcataacttaatttcttttcctgaaattcactgtaaaacattcaggggtcctaccatttctgttcaggaaatcttgtagtttattgttgttatttaacagtattaagtggatttttgtatatttcattttaactttatttgtgaatagtgattgtggcatgtttggggtgttattttaatatttcacgatactaaaattttaattttaaaaaattctggaagaaacagattcatgtgtaatggtgaatattggaccactactgcttttcacatttgtaaattggttttatgttaaaccttgtagcctaacaaactgctgttctttctaactgacagacatgtattaatattgtactttgaaggttataaatatgtggaaattccttcattttgttttgaaatttataataacaaaatctccatgttgttaaaatgtggttttattgagtcacagttctttcttggggatgaaggctgtgccgagtggggtccttttcttttatgggtcgttcttaagataatgaagtctcactgtgctagaggtgttattgttttctgtttgtgccaatcatttgcttagtaatttctgctgggttttttttatagcactctcaattataaagtatcaaatttgtcacttcatagaatgtatatttgatttgttgcaaatttgacattatagcttttcataggcttaattcttgcgtataaaagatgaaaatatatatccatttgttacataa

SEQ ID NO: 609564 - DNA, 430 bp, Homo sapiens
  misc_feature (7)..(7): n is a, c, g, or t
  misc_feature (73)..(73): n is a, c, g, or t
  misc_feature (419)..(419): n is a, c, g, or t
ctttttnaaaaataaagactgttttttataaaaggccagtttaactcctagccatatactggatgatttgttnaggtgatgaatagccccaaaatcccttcccgaatgcctcatttttatcagccataatctcttttagcaggttgggcatggtggctcatgccctgtaatcccagcagtttgggaggccttgcttgagctcaggagttcgagaaccagcctgggcaacatgacaaaaccccatgtctgcaaaacatacaaaaaattagccagttacaatgatgtgtcccagctactctggaggctaaggcaggagaatttctggaggctaaggcaggagaattgcttgagcctgggaggcagaggttgcagtgagctgagatagcaccattgcacttaagcctaggtgacaagaatanaaccttgtttc

SEQ ID NO: 609565 - DNA, 291 bp, Homo sapiens
gcctttcactctaaaatatactctgaccatatttccagttcttccacttattgacccttctacctctcttcctggtttccaccaaatccactctttaaagcccccaatatcttgtccctaccctattgagtttatgagcttccttcagatttcactccctgtctattatctagggatctttaggtcagttattttaatatttttgagaaatcagttctctcaacttcttgccttctacccctcttgtcccgccaatcttgctggattaattcactagctgaataatctcaa

SEQ ID NO: 609566 - DNA, 274 bp, Homo sapiens
tcggtcggtaccccctgggcctgacttctcctacggcctgagccctgtggcctctgccctgaaggcctggggctgggaagaaggagaacctgaaggctgcgcagtgaggagtatgtcaatgctgagccctggccaacagccttgcctgtcaaggaaagccactccgagcggtcaggctggtgctgctgccagcgagtccctcttcgtctctaaccatgcctattaagcggaggtgttcccaggctggtctcaaactcctggctcaagaaatctg

SEQ ID NO: 609567 - DNA, 584 bp, Homo sapiens
  misc_feature (92)..(92): n is a, c, g, or t
atctcaacacttagggaggctgaggcaggaggaccacttgagaccaggattggagaccagcctgggtaacataaagactcctgtatctactnaaaaaaaaaaaaacttagctggaagtcaaaccaacgggttcagaatatggggcattttggagaatcagtatacacggggcaaaaccgggatcgctgaaagagttggcaccaaattactgggttggtagctagaatgaagtgggcaagtagaagataagaaagggcctaatctcagacaacgggcttatttacaaaggttggtacaacaaaaagggagtctggcaagtgaggaactatccacaactggggagagcagggaggcgctggggccaggatgtgatgacccaggagtcttcagcccgaggaggaatggagagctcaagtgttctggagcaacaggaagggcagcggtacatgcatttcagaaagatcctgggccggacgtggtgggctcacgccggtaaatcccagacactcgtgggaagaggggctgaagacgactggggcgaaatcacttgagctcaagagttcgaagaccagcctagacaagcg

SEQ ID NO: 609568 - DNA, 247 bp, Homo sapiens
  misc_feature (138)..(138): n is a, c, g, or t
atatatatctattttatactatgaatataactatatacaaggtatgcttgaaataatgctgttaccaagaaaagaagctgcttacccaaggaaccctggtgtaaaggcaaagattaaccaaataatcccacagaaacntatcatggactatgaaatgctgcaaagaaacgatgggaagcggagaggatcccacctggggctggacagggctcaacacagaggtgagggtctccatgcaagagacatg

SEQ ID NO: 609569 - DNA, 93 bp, Homo sapiens
  misc_feature (5)..(5): n is a, c, g, or t
ctgantgggggaagaaaagaagcaagggaataaaaaaaaatgggaaaaaaagagcaggaacaaagagaaaaaataaaaaacaggacaacaatt

SEQ ID NO: 609570 - DNA, 481 bp, Homo sapiens
  misc_feature (111)..(111): n is a, c, g, or t
  misc_feature (117)..(118): n is a, c, g, or t
  misc_feature (127)..(127): n is a, c, g, or t
ggggcggttttttttctgggtatccaaaaaaccaccttttttttttgggggacgggggtgaatccaatggggggtgccttccttttggaaaaaaatttgttcccttccttnttgggnngggccaaangggcccctgaaaaaaaaaccccccctttttttttttttttttaaaccctttccttttatgggggggggaaacccctcaaaaatttgggggcccccgttcccccttttgccaaaatggggggccccaattttggtttgggggaaatttttttttcccagccccccctgggggccatttataataaaagataaccccgggggttttttccccaaacccggggggggttttcccttttccccaaagaagggaaagatttttgggtttttttttcctttttttttaattttgccccaaaaacccctttttttttttttttttttcccttttttttaaaaaaaaaatttttggccccca

SEQ ID NO: 609571 - DNA, 201 bp, Homo sapiens
tcgttaccagctaagatgtgtatgtactttgggtctgcatttgctacagccttccttgttagtaagacagcaactgcttaaaacataaggatagtttcagttcccccatttaacagatataaagagcattttaagaggtgcaggctctggaagtggatcaaactagaactcgaaccccgtgtggaatacgaacccagtgtg

SEQ ID NO: 609572 - DNA, 248 bp, Homo sapiens
gccctgcttttccccagggtggacatcggtagccaaaatgttttacttgtttttcaattgcccatttatgggccttgacggactttcccctcccacccagctgagaatgatgagtcatcgggggcctagctggagcagtacttggggccagggacctcgagacgtttccttcccaccccccagcgtcatctcccagcctgctgttcccgctttcatatagctttggccaggaagcatgcatagacttg

SEQ ID NO: 609573 - DNA, 87 bp, Homo sapiens
  misc_feature (62)..(62): n is a, c, g, or t
gagagagatgaagggtcttactactgtgcctgtgacacggatccttcctacggaggatacgngccctgggacacccgacagatgttt

SEQ ID NO: 609574 - DNA, 501 bp, Homo sapiens
ctcaggcatccacccgcctcgggtctcccaagtgctgggattacaggcgtgagccacctgacatggcaaatcccttttattaataaaacactaaactctcctggagcaagaatgtgagaattttattatttgagcaacctggatttttaccccagtgagcaatgaaacaatccatgagacctggaaaaagctgaagctctccttttttttttttttaaactggtatacggtacagtttcaaacaaattgggggcaacttggtacttcgtaccttataaaaaggggggcgaacacagggtgtggggttggatctggtctgcataggatcttcgggctgataccttctcgggatgagtcctgagaatctctagaatctcgggagagtaagggagggtcgggagccttctctatgtacaaggaattcccagtttggtcaaaaattggccaagggttgggtgatataactccaaagacaaatccagagattccttccaggtactt

SEQ ID NO: 609575 - DNA, 106 bp, Homo sapiens
gcatagagtagtgtatttctttgtatgcaatctcgcacgataaaactgtaatttgtaaaaacccttttttggaaaaggtatttcacccatttaattccttttcatg

SEQ ID NO: 609576 - DNA, 312 bp, Homo sapiens
  misc_feature (10)..(10): n is a, c, g, or t
  misc_feature (16)..(16): n is a, c, g, or t
  misc_feature (19)..(19): n is a, c, g, or t
  misc_feature (60)..(60): n is a, c, g, or t
  misc_feature (94)..(94): n is a, c, g, or t
  misc_feature (146)..(146): n is a, c, g, or t
aagttcaagnaccatnagnaggaggttgttggggagagccaacaatttccacgtacgggnctggccgcagctgttctttcacaaaggatttggnacaagggccaattacctgtcccagggccctccagggcgggcactgtgtgggntcaactgctatgatgtgtttgggagcccagtcaccctttggtgggctacaagatgtcggggagtggccgggagttgggcgagtacgggctgcaggcatacactgaagtgaaaactttcacagtcaaagtgcctcagaagaactcataagaatcatgcaagctttct

SEQ ID NO: 609577 - DNA, 460 bp, Homo sapiens
acgtgtcggcgcttgactacgcgctgcgcttggcatggtggatcgcgacaaggctggtggatgctgaactgacagcgctgtgtgccatggctgtgtgcgcccgggtaacggcggcagtttgcaggtggtggttgggccgatggccgatagcattgccgatgagattcgcttggcgatgccgggatttgttgcagcagtgcctgtagcggtggcacctgtggataagccggtggtggtgaatgtgcaggaggccgagcaatggctgaatgcgctgggtggccgggggaatgtacggcatctggaagcggtggcaatgacccggctgcgggtggagttgggggatgactcgagattgtcagaagctcagctcactgcgctgggttgccaggttgtgagtcaacttgaaagcggtgtttggcacttgttgatgggtgacaaggcgtccgtagcggggtaccga

SEQ ID NO: 609578 - DNA, 965 bp, Homo sapiens
acagtgagaacgcctgagcgcatgctgtatacttccttattgctagtacactcgtagtaggctccctgtcccctgactcatcgcacgtaattgactaccgtcagcaattaccctgagtgcgtcatcgtaataccattctaactactctacatcgtcgacatgctctctagagcaacatattcagatagcatcctgagcggatagcaacatgtcctgtatgatcgtagtctctagcagcaaattagcttgtttactcaggtaaagatatcgctcgtttcacggggtctccgagcttatgacttccctaaagcccatgtcgacagacccacgcagtcgcgtgggctctaatagtacttggccggagtgactgctggaataatggaggcggctatggtataatacgcctcatcagctcattctcaagtcccctgtacataatacacagtatttcctaccgccttccttggtactatcccctatgagtgcagtagttatatcaaagctccatcgtgcctacgggatacagacctaataatcgctcattgtatactctgcaatcagccacatagccctcgtagtaacagccattctcatccaaatccctgaagcttcacgggcagtcattctcataatcgcccacggacttacatctcattactattctgctagcaatcaaactacgaacgcactcacagtcgcatcataatcctctctcaaggacttcgggtctatgccacttatagctttgatgacttctagcaggcttgtaactggcttaccccatattactatggagaatctcggccggaaagcccgtttcccgacaaatttacccctattagggcagataatagcttttcccttttttcacaggcgcccccccttaaaaaccttccagggaacttttttacccttcttctccgaacgggtcttaaaaaaaaggcgcgcaaggcgggaagtagttc

SEQ ID NO: 609579 - DNA, 292 bp, Homo sapiens
  misc_feature (132)..(132): n is a, c, g, or t
  misc_feature (214)..(214): n is a, c, g, or t
gctcactgcaacctccacctcccgggtttgagcgattctcttgcctcagcctcccaagtagcttggatacaggtgcccaccaccacacccagctagtttttgtatttttagtggagacggggtttcaccatnttggccaggctgatattgaactcctgacctcaggtgatccgccctcctcagcctcccaaactgctgggattacaggcgtgancaccacgcctggtcaggaacattcttatgagaccttgaatgcctaaaagtaaccatgcccctcaggcgtaattgattg

SEQ ID NO: 609580 - DNA, 237 bp, Homo sapiens
tctagaggaccctgtgtttggacggcgtagaggtcataatgcagacaaagcgcggaggagcagtacacatcacgtacggtggctggtctcaccgtcttgacagactgctgaatagcaggagtacaattcaaggtctccacaaagcctcccagtcccctcgagaaacatctcccaatgcaaggcagcccgagaacacaggtgtacacctgccgccatcccggtaggagatgacaagac

SEQ ID NO: 609581 - DNA, 381 bp, Homo sapiens
cgatctagcaggatctcaagctttggtcagctctattctgtggaccctgtaatgttatatatagccaaacaactggtttgttttgtttcattttgagacaggatctcgctttgtcgccgagattggagtgcagtagtgcgaacacagctcaccacagccttgacttcctgtgctcaaatgattctcctgcctcatcccctcatcctgtgtaactgggatcacaggaggatgccaccatgcctagctaatttttttgattttttggtagagacacgatttcactttgttgcccaggccggtctcaaatttctgggctcatgcaatcctgccttggcctcccaaaatgctgggattacaggcatgagtcactgtgcctgacca

SEQ ID NO: 609582 - DNA, 427 bp, Homo sapiens
  misc_feature (127)..(127): n is a, c, g, or t
gattcaagaattcctaattgcattttcaaaacataaatagttttcatggttccactgtaactctccatttctcccttccctcccttgttctctccctggctctgacctcacctctgctttccacggngagcaagatgaactgcttgggtgttccatgggggaagctgggtgggggcaaaggttgcagtgagctgagagcaggaaccccttcgcaagtctggcacctggtttgagggaaaggcctgcttggggctgttttcaaaacagctttgcctcaggagccctgtgccagcgaggctgagatcagggcctggcacatcccaatggcagggagagagtaacttgtgaggagcccagacttgtccagcgtagcttggcagagttggagaggtgcgcttaacagggtgatctccgagggggatcctct

SEQ ID NO: 609583 - DNA, 104 bp, Homo sapiens
ctcgctatcgctgggaccataagcacacaccaccacacttggctgattttgtatttttcatagagacggggtctcgctatgtgcccaggctggtcttgaactcg

SEQ ID NO: 609584 - DNA, 253 bp, Homo sapiens
  misc_feature (46)..(46): n is a, c, g, or t
  misc_feature (139)..(139): n is a, c, g, or t
  misc_feature (246)..(246): n is a, c, g, or t
gccttcttgctgcatcatcacatggtggaaggtggaagggcaaaanaggaaggggtacatcacacactggaacctgttgtggggtgggggggagtggggagtgatagcattgcattaggagatatacctaatgtaaatnatgagttaatgggttcagcacaccaacatggcacatgtatacatatgtaacaaacctgcacgttgtgtacatgtaccctaaaacttaaagtataataataataaaanagacttg

SEQ ID NO: 609585 - DNA, 244 bp, Homo sapiens
cgggaatgtaaataataattaagcctactacctctgaatagtttccctgttttagagaggtgagatagaaaaaaaaaaaaaaaaaaagcccaagggaaaacctaaagaggaaggtataatctgaataaaaaccctggccggggaaatgtattcaaattattaaaatttcaatgggacacacagaacccccatctgggtttatacccacgagcctacgggggaaacactggaaacaaacaacaca

SEQ ID NO: 609586 - DNA, 561 bp, Homo sapiens
agcggagtcccgcatgcgcttcaccccacgcggcgggccttggcccttggctgcctactcctaccgcaccagcccaggcggccctgggcctgctgcgggcgcggcgctgcccgaccagagcttcctgtggcacgtcttccagagggtcgataaagacagtgagtggcagtgatactcagacacctgagcttcagcaagctctctccaacggatgtgagaccccatccgcccttcaggatgccagccttggcaacatcgtgagaccctgctttctacatgaactaaacaagtgtagtggtgcacgcctgtattcccagctacttgtgaggctgagatggcgaagatcacttgagcctgggagcgttgaggctgcattgagctgatgatcaaggccacggtactccatgcctgcggagacagagcgaaatcccatctcaaaacaaacaaagaaagtggatgcgtgctgctcctgccattggatcatcgcagcatctttctatctctctgatatgcgccttttgtcctcgatctgtgggggctcatgtttgcgtaattcccgtc

SEQ ID NO: 609587 - DNA, 234 bp, Homo sapiens
tccttatgccttagtatcaaagcgtctacagttaatttataacatcagcaaacaaagtaaacaaaaaaaccctgcagcagatcctgctgaaatactaaagaagaaaaaaaaaaaaaaaaaaaaaagagaccccaaatggggctaatttttaccaaaggttgcgtaggcccaaaggttttaaacccagggtttttttaataccacaacagaggaggggggagggggctatacatg

SEQ ID NO: 609588 - DNA, 288 bp, Homo sapiens
taggatgaggatggatagtaatagggcaacggacgcctcctagttcgtcagggacggatcggcacaattgtgtaggcgaataggaaatatcattcggagcttgactgtgggcgaggggctgtttaacgggcgttgcgctacgggctataacttgctctgggctcgccctacgcaggctcctggctgagcaactagctgcttaactgatcacttaacggacgacgaacggacagacgaagctaacgcccgcaggcgcgctctcttgacttgctgctagctaacgggctg

SEQ ID NO: 609589 - DNA, 134 bp, Homo sapiens
  misc_feature (28)..(28): n is a, c, g, or t
  misc_feature (40)..(40): n is a, c, g, or t
  misc_feature (64)..(64): n is a, c, g, or t
  misc_feature (114)..(114): n is a, c, g, or t
tggttagcatactcaacaattacccacnataggattaatnaatagcagttcgggcgcccaaccnctaacataacaaatcttaatttaactatttatattatcctaactactacncgcattcctactactcaact

SEQ ID NO: 609590 - DNA, 338 bp, Homo sapiens
  misc_feature (156)..(156): n is a, c, g, or t
  misc_feature (172)..(172): n is a, c, g, or t
  misc_feature (202)..(202): n is a, c, g, or t
acctgctctactcattgtctgtagcatacatttggcgcttactgtggaagtatagtactgtgaggtactctttaatgtttccaactggatctcgagatcaagctcatctctgacgctatttctctttgtaatctaaagctactagtacagtatatnacacatctgaggaatngactcttcttatttggttaactttctgttnccgcacacaatgattttaactgccattagtatcaaactgttatttgcagcatttaatataaagagtgtatattagatgatgaatctcttatttttttttggggaaaggggttctggccctgcccccaggggggggg

SEQ ID NO: 609591 - DNA, 84 bp, Homo sapiens
cccgaggacacggctgtgtattactgtgcaagatcctcctatgcttcagggagtgactatgtctttgactactggggccaggga

SEQ ID NO: 609592 - DNA, 272 bp, Homo sapiens
aaccaaacagtgccagtgattttaaaatttttggttaagatatgtgaatactgttacttcagtttaatagtaatctccttttatagattttgctttctaacaaagtcagtgaaaagtaaccgaggttcactccagtaaacatgtatagaaagtaaaattattaaaaggccaaatatttaattcttggtgacattgtaatcctgcttttattatcacagtagttcataaattgccatttccatgaacagtttcctccattcaactaatcttaa

SEQ ID NO: 609593 - DNA, 730 bp, Homo sapiens
gggattacaggcgtgagccaccgcgcctggcacaaaaatactatttagtaatatgtatcttcgtacactttgctagtcacacttttcccttccagtggtgtttgataacagtatatacagtagttttcactgaactattgtttacaactttcttcttcaaagtatattgctacatcatgtttgaatgtctgcatgcatgttatataagtagacaacaattttggctgggtccagtggctcgcgtctgtagtcctagcactttgggaggctaaggcagtgaatcatttgaagctaggagtctaggacaagcctgagcaacatggcagaaccctgtctctacaaaagtacaaagattggcccagtgtggtggcatgtgcctttggtcccacctactcaggaggctgaggtgggaggattgcttgagcctgggaggtcggggctgcagtgagctgagatcaccctactgcatgcacttcagcctgggtgacagagtgagaccctgtctcaaaaaaaaaaattgtatcttaactggttcttcattatgtacatgtcgatgtagatggtgtcagagtttctacggtcggaacaaactctgaggtacacatccttaactatgtacataggctatattcctagagatcacaatcactggaattactatttatatgtataatcatgcaatacagtgttcatcagacatgtcttcactcattcaaacaaaagacacaca

SEQ ID NO: 609594 - DNA, 267 bp, Homo sapiens
cggaggaagaggccagcgtaggtgaccagcgagctctgtctcaacacgcacacgcgcgcgcgcgcacacacacacacacacaaacacaaagatgaaaaacctaactgaaatcgggttcccctcaaaatttcagaggggcttcatggtgccttatgttttacatgtaacctcttacagtatgttacagtgatgtgtagataacacaatgaggccagtatgcacgcagatcgtgagaatctactcactcttctacgcttcaagacatta

SEQ ID NO: 609595 - DNA, 492 bp, Homo sapiens
agagagccctaacaggttagagccacccacggaaaatgatacccagtgaccatttcaactcccgactcagctcccctcaactctcattgtacagatgaagaagctgaaagcctcctatttccatagaactattctggactacctcctcattgccccatgcaactctcaccacagagggaaattcaagcacagcatcccctggcaaaaaaaaagggaacaaaacagaagcaaaaccaaccaaccaattaaccctggggctttacataaagccttaataaatggtctagttgactcccttcctccattaatggctcaaataacctggtcaagttgactcccttcctccattaattcacctactatcccaatggcgaacacaaaaagcactactgtgtatcgcaattaagataggctgcgtgcagtggttcatgcctgtaatctcaacacttcggaaggctgaggcaggagaatcccttgaggccaggagctcga

SEQ ID NO: 609596 - DNA, 329 bp, Homo sapiens
ttttttttaaggggggacccttccccccccggccctgggggtttaaaaaaaaaacttgtttttttgctgggtgggggggggtttttttccgggggtttttttaaaccccagccttcccttagtttttaacttttgtttccacccgggggtttgccggggtttgccttttttgttccctttggggaaatttttttgtttatggcccaaaaaaaaaacggtgccccctttacaatttttttttgggattttttccccccccccccttgtgggtttcccccggggggcttttccccccctttatgggggggaattaaatcccccttttttta

SEQ ID NO: 609597 - DNA, 85 bp, Homo sapiens
taaaatttttttttgggggggggtttcctttgtgagggggttgcagctatccttcctgggtaaacaaaaacagttttttccctga

SEQ ID NO: 609598 - DNA, 724 bp, Homo sapiens
ctgagacagcaggagcccgcctggcctgaagccgtttccaccgcagcaggcagaggggctggacaggcactgtcagccaatgtggtggggtcctgaagacacccccttgtgggcgacaccgatgtgccccttcatcatgggacatcagatctgaacctgatagacacagcgatcactgcgcatcgcatgccgcccactcggggcctgaccatggaagctccgtcgagctccggtccttgatccttagatgctgatgcccaggaccaccgggggatcatggccgagatcctcacacaccacagaggacaaagatgatatacaaggttcatgcacacacatatcagggaaaaacagtgcatgtcaggacatcgggacacatcaccgtatcggggcaacacacagtgaaaatgcagggggggggctccaatgcattccaagaatcgaccaaacacaaaacacataccaaagtgcaacaccaaaaaacacaacacagggaaacgagccaatgcgcagagaagacacaatgagatggcaacacacatacacacacaggcaaggaaaataggacaagacacaggaaaaagaaagagccaaacaaaaaaaagaggacaaaacgccacaagaaacaagaacaacgatgacaaccagccgagccacaaggaggataaaccacagcgccccaggacccaaagccacaccgaagcaaaaaaaacacgagcacaag

SEQ ID NO: 609599 - DNA, 230 bp, Homo sapiens
cgagaagagcggtctatgagaaagaaaatgaaacgggaacagaggaaggtgtctgggttccaagacaggtcaaatgaagagtggaaaagcactgtgagagaaggagaggcagagcgaggtcaatgagccagaggggagagaggacactgagggccagagagagaactaggaggaggaggacaggggctgcgaaccacagaccagcagctgggaaaatggggttgggggac

SEQ ID NO: 609600 - DNA, 421 bp, Homo sapiens
  misc_feature (377)..(377): n is a, c, g, or t
  misc_feature (397)..(397): n is a, c, g, or t
  misc_feature (413)..(413): n is a, c, g, or t
  misc_feature (421)..(421): n is a, c, g, or t
tgaggtggtagctacctgggaagccatcagccatggggaggcagccagtgccgagtacttcaactttgctcatgatgtgttggatgtgtggagtcagctggaaaagacagggcaccggcccccaaatcctgcattctggtgggtgaacggctcaggaacagaagtcaagtggacatttgaggagctggggaagcagtcgaggaaggtggcttttatttcagaacctgccaaagacggtttctggaaagatcctaaggagtaaattgagaaaccaagaagttgggggaagattgaattgcaaccccaagagaagattgcttgccgattgcacttgaaaggttcttgaaaggagaaggaagttggggcaaggcaagctncctcccttggagtacttatnccttcaaagaattggntatccaan

SEQ ID NO: 609601 - DNA, 320 bp, Homo sapiens
cagccctttttgcccccatggggcctttgggggcctttgggccccctttaacagggggtggggggcccccaaaccccatggggttaccccctggttggttggggcccagtccccccggttgtttttgggagggggtttttacccctagtttttgggttggggtttctggggggcccccccccccccttttttcagtaaaagggccttttttatggggttgtccccccccaaaagggctttgggttttggtttcttttcggggtttgccccccccccccccccggttgggctgttttttaatttttttttttttttcctta

SEQ ID NO: 609602 - DNA, 116 bp, Homo sapiens
cgacacgtgcattgtgttgatgttgggctttgctgcagatggctcatccaagggctgcactctacactgagcagagccgagacacaagcctcagaagcatcacagatggcggtcaa

SEQ ID NO: 609603 - DNA, 956 bp, Homo sapiens
  misc_feature (174)..(174): n is a, c, g, or t
  misc_feature (268)..(268): n is a, c, g, or t
  misc_feature (366)..(366): n is a, c, g, or t
  misc_feature (393)..(393): n is a, c, g, or t
  misc_feature (429)..(429): n is a, c, g, or t
  misc_feature (445)..(445): n is a, c, g, or t
  misc_feature (475)..(475): n is a, c, g, or t
  misc_feature (508)..(508): n is a, c, g, or t
gcccaggcaggagggatacggttggtacagggtggagggagaggaggagctggaaggcacggtcttcgacagggctgcgagcgcgcgaagcgaactagcttccaccagaggtggtgcgggccgaggctatgggacacggttgaccaggtgttgccaggatgctcatcgatgggncacgcctgacgtgaacgcgggacagcggatgactctgcgcatgccgagcatccgagggcgtgaccttgtgaaggggaggacgattcgctacaangcttgcgaccctattcgactccatccggttcgtgccgcgaatcgtgtaggactcgacagcgtggacaagagagacgttgcgtgcattcattcccttgntgcaaaagcatatcgcgcttcagcagnacttctctgtcctgctgtggcccacgaaacggcagncgctgggagcattagnacaatcttcaataacgagagcagtggctgntagcggtgggcagccagtgagcaagccagtagnctttggtggatgaacgactgggcctggcgcttgacgacctcctgcgatagactctgttcttgtctgacatcctgagagtccgtgtggccatggggtgtccttagtaccatgtttctgtagacgtgtcgagatgtttcctcagtgctgacacaagttgaagggtcgagttacgcggaaaggggacttgcacccattgaccgaagtgcatggtgaccggttcgaccaacaggcgactagtgagggcccaaggcatggcgctggccctatgatacggaggagacgggatgcctcatcattaaacgccagcgggggcctcacaccctacgtgttacaaggcgatttcggtacgcacgcttgtaacgcctcggtctcttcgcccaatggtttccctacgagttaccgtccgtaaggaaaaggcaacattccgaggtagactgcctgttggggg

SEQ ID NO: 609604 - DNA, 1238 bp, Homo sapiens
actgatggctcatccatccgcagagcagggcagtgggacgagacgccatgaccccatcctcacggtcctgcatctgtctcgggcgtgagtctggtgccccaggactccacgtgcaggctaggggacactcctccgaagctcgcacccatctgggcatgagcgcaggctcctgtgatcatccagggaagtcctgtgaccctcagtgtgtcaggggagccttcaggctgacggagtaccatctatataggcgaacaacaaatcagacatcctgggtataaacgcgactacaagagcctgggaacgaatgtgccagttccccatctccatccatcacctggtcaacagtgcagggccgctatcactgtcagtactacagccacaatcactcatcagagtacagtgaccccctggagctggtggtgacgaggagcctccagggaaaactgacaccatctcagcatctgcccaagaccctgtgcgtgaccctttagcgtaggggaactgtgaccctcacagtgtgtcgtcacaggtgggcactagtgagcgcggctatcagctactggtgtaacgggcacgcgaagaactgatcgaaacagccgaggaaagatcttgaaactcccattagccccattgcacacgtagcgagtgcgtaaccctgggagcccaatatgacctccagataggggcacctgaagcagccccgaacatcagcacccgtggggtccggagcaaagggaggactattgacgttcactgactaccggaacttcttccacgtaatacacgtaggaactaatacccccacggtggaatctaccttggcaggcctcgctcggctaccactaggggtgcttgcactacaagatacgccaagacacctcctcaaccgcacgcgccacgaggacccacttcgcgtgggcccaccctgtggggcaagtaagcccgcattaaagcctctcccaaggctggtgtcctctccgtggagttgtcccgcgccacaaccaaacatcgaatagcagacgaacaagacatacaacgcgtatgcgatggtgaaaaccttgacaatctacctatcacaagcgatcaacatggtgattgagacagaaccccagagcaggtgctatctcctgcatggaccaacgcggtcgacgcactagggcgccagacatgtacgcccatctgcacagcgagttgacgaaaaccgtcaagtagtcaaaagaagacagcaacagcgatcg

SEQ ID NO: 609605 - DNA, 349 bp, Homo sapiens
ccacgagcggcgcgaagttcaggaaaggccattcggcctcgagcagctcgcggaatttcttgaccgcgtctttcgaatcgctctttagctcgtgcgggctgttgtcccacttgttggcgagcacgatgcacgcgcagccggattctcccacgagacgcgcgatacgcgaatcctgcgtggtgatgccctgttcggcgtccaccacgaggagcgcgatgtcggagctctcgaggttacgggtggcgtacatcacgccgagatcctcgacgtcgttctcgcgcttggcgtggcggcggattccggccgtgtccaccagcaggaagcggcggccctggcgttcgatttccac

SEQ ID NO: 609606 - DNA, 252 bp, Homo sapiens
  misc_feature (165)..(165): n is a, c, g, or t
aaatggaaggtcattaatttaagtgaaataagccagggacaaaaagacaaacttcacatgttgttctcacttactagtgggcctaaaatcaaactattaaactcatggagatagagagtcgaaagatggttacgagacttggaaggatagtgggggagttgagtntgggtgtttagtgggtacaaaaaatagaagggatgagtaagacctagtatttgatagcacatagagtactatagtcaattatagtag

SEQ ID NO: 609607 - DNA, 149 bp, Homo sapiens
atagtaaagcaggctgtcaggacctgctgtgcccaaaggaactgcataaaggaacacgctctatatattctttaagtgattagatgcacagatgaaaaacttaacacacaataacagcaagtaggtcgttcaataaatacacatcctag

SEQ ID NO: 609608 - DNA, 210 bp, Homo sapiens
  misc_feature (63)..(63): n is a, c, g, or t
  misc_feature (68)..(68): n is a, c, g, or t
  misc_feature (80)..(81): n is a, c, g, or t
  misc_feature (87)..(87): n is a, c, g, or t
  misc_feature (101)..(101): n is a, c, g, or t
aaaaggcctaatttggtggttttttttttatatcaattagcgtgaaaaattgcatcaactatntaatncatgaggatctnncatatnaaaatttaaccttnagattcaagcgccatgtgcttatataaaggaaacatttttgagagacgtgtgagctcacttatacatggtggtgcctagggccgtaaatgtcagagatacgggtaccga

SEQ ID NO: 609609 - DNA, 282 bp, Homo sapiens
ttctcgccgggagtgtaatagaaacctccactgattcatttgggcccaaaggggaagcttaatccctccttggaggagggcgccaagtgcccttttataggaaattttttgaaggtttgagcaccaaccttcaaagaagggtgggtctaccacccccaggtccaaagggggaattcaggtttaagggcttattacggccatcaggatagttgatgtgcgtcccccctgttgccgcccccccccccccccttttgtttaattaagctccctgtgttttttcca

SEQ ID NO: 609610 - DNA, 600 bp, Homo sapiens
  misc_feature (35)..(35): n is a, c, g, or t
  misc_feature (54)..(54): n is a, c, g, or t
  misc_feature (301)..(301): n is a, c, g, or t
  misc_feature (325)..(325): n is a, c, g, or t
gggcaaaagagcgagtgggcttttgctcagatgantatgcctgccccccacttntacattttggatgaacccacaaaccactgggacatggagaccatttaggctttgggccgtgccctcacaatttcaggggtggtgtgattttggtgtcccaccataagcgctttatcaggctggtgtgccgggaattgtgggtattcaaaaaaggcggggtcccccgtgtggaaggaggattttccacgtcccgcgccctcctccaggaacagttcccccgggaagggttcctttagggcccccaggntgaggactcgcccaggacatgggntggtttttcaaacccctgggcccccatgtaggccccccctccaggccgtgggcttcccccaacttgggggcagccttattcccaaatgtttttatccttttggctggggcattttttgcccaaccttgggggcccctccaagggttggtgaggactggtttcccgggggggggggtttgggggggaccctttggggttataaattccccccctgccccagctttggttgggccccaagggggtgttttgtaaatttaatttttccccgggtttca

SEQ ID NO: 609611 - DNA, 433 bp, Homo sapiens
aatccaaatcttccactcctccccctccattgtcccctcccccaccacacaccttccttcttgtccttgtgttgaagagggtatcttggggaatgagtttattatcttctccacgacctcacctatacatcccacacaccatcctccaggtctgggaaatatccatttttctggccagtcttagcatgttttcttaatgtcacattcccacgccaggcccaagagagattctatgacatatattatagagagaattctatatcaatatatataaatattagagattatgtacacaagggcatgggctcaaatgcccactgccagtcccccacccaggcttcagcatctctcttggcctggggaagtgggagggatgtgatgctggagaaggctacaggctgtgttcaatgacactaaacagaatgtggtggca

SEQ ID NO: 609612 - DNA, 958 bp, Homo sapiens
ccgggaccgtgccattgtactccagcctgggtgacagagcgagattccgtctcaaaaaaaaaaaaaaaaagcccacctgaaagcctgtctcttcccactttgttggccctcccagtgggattatcgagcatgttgtttttccatagtgcctttttccttatttcaagggttgcttctgagtggtgtttttttttttttttttaaattggtttggtttacaaataaggttaaagggcagcccagagctttctcagccaattttgtctcctactctgtgtaaatttttttcccctccgggcaggggagccaggttagacgcaaaggagacaagcaggagtggaaggtgaggcgttctcctgcttgtactaacgccaggaggctttaagcccccagcttaaagggttgtgacgccccttgggggtcagggacctgcttgcccaggtgccgtgtgattttgatggccccccgggccaagagggaaggtgaccgcccagttctcccacatcccattggatctggctcacaggggggtcggaagcctgtcctcaccgtctcgggggttgtgggcccccgccccctccatatatgcaccttggaaccagcatgtccagacaaggaacggaggagaatctggggaacgcgctcagttgtaccggttccctattcctatgctgggtacccgggaggagccccctttgccctgtctgcccttagatgggccaggatttcatctggtcccggactgtccgtagttaggcgctcggaacggggttgtgttggtccctcccggggtgtttgggtccccccccccagtgtcgaaaggagatgtgggcgacattaacagcacacgcgcgaatgtgtttcccgtccgtggtggtggtgttccatctccacaagacttcggggtgttcgcggttatcgccgaggggggaaccctctagctagctgcattttgtcg

SEQ ID NO: 609613 - DNA, 932 bp, Homo sapiens
  misc_feature (519)..(519): n is a, c, g, or t
  misc_feature (582)..(582): n is a, c, g, or t
  misc_feature (658)..(658): n is a, c, g, or t
  misc_feature (665)..(665): n is a, c, g, or t
  misc_feature (684)..(684): n is a, c, g, or t
  misc_feature (703)..(703): n is a, c, g, or t
  misc_feature (733)..(733): n is a, c, g, or t
  misc_feature (745)..(745): n is a, c, g, or t
  misc_feature (789)..(789): n is a, c, g, or t
  misc_feature (825)..(825): n is a, c, g, or t
  misc_feature (859)..(859): n is a, c, g, or t
  misc_feature (881)..(881): n is a, c, g, or t
  misc_feature (897)..(897): n is a, c, g, or t
  misc_feature (914)..(914): n is a, c, g, or t
aatccaaatcttccactcctccccctccattgtcccctcccccaccacacaccttccttcttgtccttgtgttgaagagggtatcttggggaatgagtttattatcttctccacgacctcacctatacatcccacacaccatcctccaggtctgggaaatatccatttttctggccagtcttagcatgttttcttaatgtcacattcccacgccaggcccaagagagattctatgacatatattatagagagaattctatatcaatatatataaatattagagattatgtacacaagggcatgggctcaaatgcccactgccagtcccccacccaggcttcagcatctctcttggcctggggaagtgggagggatgtgatgctggagaaggctacaggctgtgttcaatgacactaaacagaatgtggtggcatcctctgactgtgagtgtcttatttgggggatggaggagactgggaacaggggaggcaaaggaggagaatgtcggagcgggggcanaatggtagaattaagaacggcatacgggatggcaggttggggagaaaaaccttgggtacggancaagggtttggggatgctcacagcacctggcctctctttgtagagaaagcacgctaatggaagtgcatagccaggnttcctgntgctgatttggggagggtnaagatttgactctcccaanttccggggcagcactcaagagccctgccancttgacgctcanctcctaactcttccacccctaggaaaaggcatctgaagaacccnttctaagagggggctggtgtttgagtgacccgtganctagctgctctgagccctgaattcttggcaaganaagccctggctaaaagcagctncagggtaaactgaccnttggcaggacaagtcanaacaagagggggatgtgt

SEQ ID NO: 609614 - DNA, 308 bp, Homo sapiens
tagagaagagcaccctcccggtgtcagctgtagtctgatttggcggatctttctgcttctttacttcttctcttcttcttctcttcttcttctcttcttcctctcttcttctcttcttcttttcttcttgtcttctcttctcttttttttttggaggacagggtctatactgtgtaacccagggctggagatacaatgacgcaatcacaggctcactggcagcctcacacctaccaggctccagcaaatcctcccacctcagccccaccctgagtagttgggactgcaggtgcccaccaccacgacag

SEQ ID NO: 609615 - DNA, 118 bp, Homo sapiens
cagtttattctaatcagtgttgaacgttgtgattttaccagaagggcacttccatcctggtgtgcgactccactattggactgatacaaggagaaccccacagtccaaaaaagccaaa

SEQ ID NO: 609616 - DNA, 144 bp, Homo sapiens
ctataagatctgaacttctcatctgcagaggcagaaaactatttgacatgtgacttgactgtggaagatgatggttgcatgtttctacgttgtatatgttcccatctttgtgataagatgatttaataaatctctttaaatact

SEQ ID NO: 609617 - DNA, 291 bp, Homo sapiens
cctagaggatctccgaatcctcctcctcctggggaattctcctcctcctggcgaatcctcctcctcctattcctcctcctcctatatctatatccctcctcaagaagggcacgtaggccaggcacggtggctcacgcctgtaatcccaacacttgtggacggcaaggcgggcagatcacttgaggacaggagttcaagaccagcctggccaacatggtgaaaccccacctctaataaaaatacaaaaaattagctgggtatggtggcacatgtctgtaatcccaactactc

SEQ ID NO: 609618 - DNA, 286 bp, Homo sapiens
caagtgcgttggattcaactcttcactggtgtacatttattcaagtgtgagtgtattatacttatgataatatagcttctaaatgactattgtgagaggctggctttgactcagactggagggagttaggagtaagatgggagaagggtatttggggagtagaagtagaagtgatgaggtgactattacttggttggagggatctccacttggccaatgaatatgtatttggttaccattattacgtgtggtgtacccggagctccgaaattctggtaatccattg

SEQ ID NO: 609619 - DNA, 318 bp, Homo sapiens
tgaaatagaatctcgctgtgtcgcccaggctggagtgcagtgtcatggtaactgaagcctccaactcctgggctcaagaaatcttcccaccttagccccctgagtaactgggattacaggcacgcaatatcaccccagctaatttttgtattttttggagagatggggttttgccatgttctccaggttggtcttgaactcctgggctcaagtgatttgtctgctttggcctccaaaagtgctgaggttacaggtatgagccatcatgcccagccaaaaatttcttcttatagtcaatgtggtgtcgacgcggccgcg

SEQ ID NO: 609620 - DNA, 3065 bp, Homo sapiens
  misc_feature (26)..(26): n is a, c, g, or t
agcggcgacgcagcgtgacttcacanggggaggggcgggccgagggtcctgccggcgcgcgggcgtgttcatcggagtcgctgtttgggacgctgggtgtgcggtgttctgtctccgctcccgtttcgctgtcacagcccgttccttcccggagcccgggacaggctgggcgcgcgcccgtgtgagtgagcgggactcagggcagaagtgtcccctcactgcgtttttttttccttttatccaaagaacggggcagttagtacgcttgccttcctgtcgcccggttgggagcggggttggtgtgcggagtggttcgcctttttttctttagaacttgtgagcctttttttttttttttttttcttttctttttttaggctcagtgctgtccgggctggtttgcccggtccctgactaacggctttctgccccttctctcgccacccctgcccaaggtcgcccctctgccttcgcccctgtcccgggagggtgggaagctttgaccccgccctgcccactcgcgtctccgcagccgtagccgcgcctgtcccaatatgaatagggtcaacgacccacttatttttataagagatattaagcccggactgaaaaacttaaatgtcgtctttattgtcctggagataggacgcgtgaccaaaaccaaagacggccatgaagtgagatcgtgcaaagtagcagataaaacgggcagcatcactatttccgtgtgggatgagatcggaggtcttatacagccaggggatattattcggttgaccagagggtatgcatccatgtggaaaggatgtctgacactttatactggaaggggtggtgaacttcaaaaaattggggatctaggtgcggtgcaggcagccgcaatgcgagattccatacactactaccctggtaatgatctccaccctgacctggaggagccatcctctctaggggtgtaagattttgtatggtttattcagaagtgccaaatttcagtgaacccaacccagattatcgaggacagcagaacaaaggggcacagagtgaacagaagaataattccatgaatagtaatatgggtacaggtacatttggaccagtgggaaatggtgttcacactggccctgaatcaagggaacaccagttttcacatgctggcagaagcaatggccggggacttataaatccacaactacaaggaacagctagtaatcaaacagtgatgaccacaataagtaatggcagggaccctcggagagcctttaaaagatgacctatgctaaatactcatgtgtagtttttatactacatgccctacttgaacacttattgcacttttatttattgttaactgtgaaaagtacgtcctttattgggtttccttttatattcttggtttgttaagaagaatggtttgtttttatagcaaaactgttaagctgctcgagtctcctgttgaagaatgggaacactgaaaagtaggggcatttatttttagagtaaaaagattattggatagcctttaaaaaacctgcacccatttcatgggtgagttacttaagacatcagctttatagcctctatgagtctatcttctgtataagttttgtaatatttaacataaggcttaatgggagatgttcttttgtcttgtattcagatattgccaactaaagcaataaccatcaaaaaacacaagaacttgtcaatgctagcagtaatttttgagtgtttgtggctctcggaatgattgacttcgttcagtgactactattaagattttccaaggactgactcatcccaaatttttgttgtattaccaaaaaaacagattccttatcagaatttggaatagaatgtgatctctattgcaacaagtaattttaaaagaaagctacatttattttagagtagtgctcctaacatgtattatcaactttgtggattacattggaggaaaatttaaaactggggccttgaatatttattttttgaaactaccatgttaaatactgaagtataatttgggggagttataaagttatgataaacattcatctgattattttaaacaatagttgtggtagataaacatactggaggtgagtcaaattgaattcatatagtaacatgcagtctgaagtcctagttacttaataggtactcagcctggagtgaaaatcctgggtactgactttgagaggagtgagtgtgcatgttgtcaaagtttctgaacacagttcacatagccttattagcaaaagttttaagaaatggctctatcaaagaagcaattgcagctttattcagaaatataaaagtggaatttatgtacatgtcataagtggtacccacttcccctttttactgtagggtggataactcttaggatttaactctttgaatattatctcttgaataaagcatgtgttaatgttaacaaacctacgtaatttttgccctttcaatgacttacagtggagagccagtacatcttaactactgttgtagtgatggtatcaacctcatggttacttagctctgcatttgttgctttgttttttttccacttcaaatcacaaaataagtagattttgttttctgaaaactccatagcatttgaatacaaaaagttgtgccagattgtttgccctaattcactgtgtttaacaaatatttcagtacacactatgtattaggcactgtgtggaaagtgttaaggggtagacaagataccgaataatctccacaagtttatttgtggtctatagtacttttgtaactggggttacaaaaattatagaaatttttttcctttgttcatatgcatattcatgattataatttggctttgtttgtgattaatgttttcttaagattttcacattatagaatacctcaaaagaagttgtctaaggactgggatagagagtatgtttcataaaattgtagatgtttagaatttttaaaaaccctacaaattagtatatgattgttttatataagtaagataggagcaacactttaaattatttgtgggagaatacagcattaaaggtgatttt

SEQ ID NO: 609621 - DNA, 832 bp, Homo sapiens
cgactagaaatattgagcgatacacatgtacaagtttgtcacttaaaaagaatttgaaaaaacttcatagatgcaaaaaaaaaaaaaaacccaccatttatttaaagaaatactaaggatcatgggggaagtgcttggaagagtttaccaaatgggattaggcgaggaaattattcgcagaaccttagaaatgtgactttacaggttacccagtgggtggaacggaggacgctaggggtttcctcattaaaacttccctgtgataagaagacggcactttggactaaaatttcttttttccccggccaaacaaaattccccgtggtctttcttcaacttagttacgtggtctggtccacttaaattaagaggggggtccggtcaactttcttcaagaatgagccaattaacgggctttccaaaaagatatcatttgggtatatcaaacccctttggggccggggtttacttaattggtgaaaattagatcataattaacttaaattccaagagtgttgtgggtgaagacaaacaattgggggggatgtatactaaagtaccgaagtgtttgaccacacactaggggacggataaggggtaaaatccctggttttccctcagtatcaaaaaagatctaattaaggttacattaaaggacaaggtttgaagataagggtgactaacagtgggtactactaacaaaatggtgggggctaaaattgggcataatgggccttgaaaaacacaaaaattttttcattaaattaacaaaaacgctgtgaatccaggaaggaagagatacaaagtgtgggttggatctaaagctaagggg

SEQ ID NO: 609622 - DNA, 302 bp, Homo sapiens
aaaaatagacgtaacataaaatttaccatctcaagcatatatatatattttttttcttgagagagaatcttgctctgtcacccaggctggagtgaagtggcatgatctcggctcactgcaacttctgcctcctgagttcaaggaattctcccacttcagcctcctgagtacctgtagtctctgctacttgggaggctgaggcagggggattgcttgagcccaggaagtcaaggttgcagtgagctgctattgtgctattgccctccagcctgggccacagagtgaaactctgtctttaaaaa

SEQ ID NO: 609623 - DNA, 864 bp, Homo sapiens
  misc_feature (26)..(26): n is a, c, g, or t
  misc_feature (676)..(676): n is a, c, g, or t
agcggcgacgcagcgtgacttcacanggggaggggcgggccgagggtcctgccggcgcgcgggcgtgttcatcggagtcgctgtttgggacgctgggtgtgcggtgttctgtctccgctcccgtttcgctgtcacagcccgttccttcccggagcccgggacaggctgggcgcgcgcccgtgacgcgtgaccaaaaccaaagacggccatgaagtgagatcgtgcaaagtagcagataaaacgggcagcatcactatttccgtgtgggatgagatcggaggtcttatacagccaggggatattattcggttgaccagagggtatgcatccatgtggaaaggatgtctgacactttatactggaaggggtggtgaacttcaaaaaattggggagtaagtattaaaatgcattttgtataattgcatatattataaataatatctacggaatgattggtaggtatgaacttgtaaacctctttggcttttttgactagtaaactgaatgtctttggtagcttaattggaaaaataacttcgtgtataccaatttaacacttgtcagtactgttttctgtggttaaaagtgtcaatttttcctggcaaagagcagtagaagaagctgcagttgagaccaggcctagttggaagcattcctgtaggttttagaatgtgcntttttaggtgtcacaagagccatttgaagtagaattctctttgtagtgattcaccattttacgaagcctaatggatcaccccagtttcaggcctaagttcaactttcctttcctatggcatggggggacattggtcccccggttccccagggctgtgcggacgaaaactggaatccctattatcccac

SEQ ID NO: 609624 - DNA, 641 bp, Homo sapiens
tttcagcactaaagaagaatttaaatacaaaatagaatgttatatatcttgtagacagtcaaatatttgatgttttatgggacataatcatttgggaagtttttgttgtaaatgaagagttagtttgttgctattaatttgtttgacacataagttcattcctaaaagttagggatgttacataaagaagggttgaggactttatttcagaagtcatttaattttttctttattttctttcagattttgtatggtttattcagaagtgccaaatttcagtgaacccaacccagattatcgaggacagcagaacaaaggggtaattgtgtagtatacttttatgattaggctaattttgactgtgttataattctatgattaggctagccctgttgatacttagtataaagaagataatttttaaaaggatacttaatttttattgtatgttttgtgaggatatgtatctgaggtgtcatctactagatatatgtgccattttgcactttgtggtgtgctgagtaattatcaggaaataggatgtaacagagctctgaaaggtttgggaaacgtttcttaacattataacctttaatgacctaggaaaaatctttaaaaaatttgttaattaaaaaaaaaaa

SEQ ID NO: 609625 - DNA, 3091 bp, Homo sapiens
  misc_feature (26)..(26): n is a, c, g, or t
agcggcgacgcagcgtgacttcacanggggaggggcgggccgagggtcctgccggcgcgcgggcgtgttcatcggagtcgctgtttgggacgctgggtgtgcggtgttctgtctccgctcccgtttcgctgtcacagcccgttccttcccggagcccgggacaggctgggcgcgcgcccgtgtgagtgagcgggactcagggcagaagtgtcccctcactgcgtttttttttccttttatccaaagaacggggcagttagtacgcttgccttcctgtcgcccggttgggagcggggttggtgtgcggagtggttcgcctttttttctttagaacttgtgagcctttttttttttttttttttcttttctttttttaggctcagtgctgtccgggctggtttgcccggtccctgactaacggctttctgccccttctctcgccacccctgcccaaggtcgcccctctgccttcgcccctgtcccgggagggtgggaagctttgaccccgccctgcccactcgcgtctccgcagccgtagccgcgcctgtcccaatatgaatagggtcaacgacccacttatttttataagagatattaagcccggactgaaaaacttaaatgtcgtctttattgtcctggagataggacgcgtgaccaaaaccaaagacggccatgaagtgagatcgtgcaaagtagcagataaaacgggcagcatcactatttccgtgtgggatgagatcggaggtcttatacagccaggggatattattcggttgaccagagggtatgcatccatgtggaaaggatgtctgacactttatactggaaggggtggtgaacttcaaaaaattggggatctaggtgcggtgcaggcagccgcaatgcgagattccatacactactaccctggtaatgatctccaccctgacctggaggagccatcctctctaggggtgtaagattttgtatggtttattcagaagtgccaaatttcagtgaacccaacccagattatcgaggacagcagaacaaaggggcacagagtgaacagaagaataattccatgaatagtaatatgggtacaggtacatttggaccagtggtgatgaatttttgtattcttttttaggaaatggtgttcacactggccctgaatcaagggaacaccagttttcacatgctggcagaagcaatggccggggacttataaatccacaactacaaggaacagctagtaatcaaacagtgatgaccacaataagtaatggcagggaccctcggagagcctttaaaagatgacctatgctaaatactcatgtgtagtttttatactacatgccctacttgaacacttattgcacttttatttattgttaactgtgaaaagtacgtcctttattgggtttccttttatattcttggtttgttaagaagaatggtttgtttttatagcaaaactgttaagctgctcgagtctcctgttgaagaatgggaacactgaaaagtaggggcatttatttttagagtaaaaagattattggatagcctttaaaaaacctgcacccatttcatgggtgagttacttaagacatcagctttatagcctctatgagtctatcttctgtataagttttgtaatatttaacataaggcttaatgggagatgttcttttgtcttgtattcagatattgccaactaaagcaataaccatcaaaaaacacaagaacttgtcaatgctagcagtaatttttgagtgtttgtggctctcggaatgattgacttcgttcagtgactactattaagattttccaaggactgactcatcccaaatttttgttgtattaccaaaaaaacagattccttatcagaatttggaatagaatgtgatctctattgcaacaagtaattttaaaagaaagctacatttattttagagtagtgctcctaacatgtattatcaactttgtggattacattggaggaaaatttaaaactggggccttgaatatttattttttgaaactaccatgttaaatactgaagtataatttgggggagttataaagttatgataaacattcatctgattattttaaacaatagttgtggtagataaacatactggaggtgagtcaaattgaattcatatagtaacatgcagtctgaagtcctagttacttaataggtactcagcctggagtgaaaatcctgggtactgactttgagaggagtgagtgtgcatgttgtcaaagtttctgaacacagttcacatagccttattagcaaaagttttaagaaatggctctatcaaagaagcaattgcagctttattcagaaatataaaagtggaatttatgtacatgtcataagtggtacccacttcccctttttactgtagggtggataactcttaggatttaactctttgaatattatctcttgaataaagcatgtgttaatgttaacaaacctacgtaatttttgccctttcaatgacttacagtggagagccagtacatcttaactactgttgtagtgatggtatcaacctcatggttacttagctctgcatttgttgctttgttttttttccacttcaaatcacaaaataagtagattttgttttctgaaaactccatagcatttgaatacaaaaagttgtgccagattgtttgccctaattcactgtgtttaacaaatatttcagtacacactatgtattaggcactgtgtggaaagtgttaaggggtagacaagataccgaataatctccacaagtttatttgtggtctatagtacttttgtaactggggttacaaaaattatagaaatttttttcctttgttcatatgcatattcatgattataatttggctttgtttgtgattaatgttttcttaagattttcacattatagaatacctcaaaagaagttgtctaaggactgggatagagagtatgtttcataaaattgtagatgtttagaatttttaaaaaccctacaaattagtatatgattgttttatataagtaagataggagcaacactttaaattatttgtgggagaatacagcattaaaggtgatttt

SEQ ID NO: 609626 - DNA, 384 bp, Homo sapiens
cagaggggtccatacggcgttgtctggattcccgtcgtaacttaaagggaaattttcaacaattgtccggagccccttgatgtcctgcaaattgaaggaaggaggatgtcctcaagttccttgcagcaggaacccaacttaaggtggcaccaatccttgactttccagatggaccagtaccatctattaaaaggaaaagtgatggcatctatatcataatcctcaaggagacctgggagaagctcctctggcagctcgtccaatttgttgccattgaaaccctcctgatgtcagtggtatatcctccaggattactgccacaggcctgtctgaagtttcctgctgcactggagcaatcaattctggcgctcatctggacctcac

SEQ ID NO: 609627 - DNA, 2348 bp, Homo sapiens
tttcagcactaaagaagaatttaaatacaaaatagaatgttatatatcttgtagacagtcaaatatttgatgttttatgggacataatcatttgggaagtttttgttgtaaatgaagagttagtttgttgctattaatttgtttgacacataagttcattcctaaaagttagggatgttacataaagaagggttgaggactttatttcagaagtcatttaattttttctttattttctttcagattttgtatggtttattcagaagtgccaaatttcagtgaacccaacccagattatcgaggacagcagaacaaaggggcacagagtgaacagaagaataattccatgaatagtaatatgggtacaggtacatttggaccagtgggaaatggtgttcacactggccctgaatcaagggaacaccagttttcacatgctggcagaagcaatggccggggacttataaatccacaactacaaggaacagctagtaatcaaacagtgatgaccacaataagtaatggcagggaccctcggagagcctttaaaagatgacctatgctaaatactcatgtgtagtttttatactacatgccctacttgaacacttattgcacttttatttattgttaactgtgaaaagtacgtcctttattgggtttccttttatattcttggtttgttaagaagaatggtttgtttttatagcaaaactgttaagctgctcgagtctcctgttgaagaatgggaacactgaaaagtaggggcatttatttttagagtaaaaagattattggatagcctttaaaaaacctgcacccatttcatgggtgagttacttaagacatcagctttatagcctctatgagtctatcttctgtataagttttgtaatatttaacataaggcttaatgggagatgttcttttgtcttgtattcagatattgccaactaaagcaataaccatcaaaaaacacaagaacttgtcaatgctagcagtaatttttgagtgtttgtggctctcggaatgattgacttcgttcagtgactactattaagattttccaaggactgactcatcccaaatttttgttgtattaccaaaaaaacagattccttatcagaatttggaatagaatgtgatctctattgcaacaagtaattttaaaagaaagctacatttattttagagtagtgctcctaacatgtattatcaactttgtggattacattggaggaaaatttaaaactggggccttgaatatttattttttgaaactaccatgttaaatactgaagtataatttgggggagttataaagttatgataaacattcatctgattattttaaacaatagttgtggtagataaacatactggaggtgagtcaaattgaattcatatagtaacatgcagtctgaagtcctagttacttaataggtactcagcctggagtgaaaatcctgggtactgactttgagaggagtgagtgtgcatgttgtcaaagtttctgaacacagttcacatagccttattagcaaaagttttaagaaatggctctatcaaagaagcaattgcagctttattcagaaatataaaagtggaatttatgtacatgtcataagtggtacccacttcccctttttactgtagggtggataactcttaggatttaactctttgaatattatctcttgaataaagcatgtgttaatgttaacaaacctacgtaatttttgccctttcaatgacttacagtggagagccagtacatcttaactactgttgtagtgatggtatcaacctcatggttacttagctctgcatttgttgctttgttttttttccacttcaaatcacaaaataagtagattttgttttctgaaaactccatagcatttgaatacaaaaagttgtgccagattgtttgccctaattcactgtgtttaacaaatatttcagtacacactatgtattaggcactgtgtggaaagtgttaaggggtagacaagataccgaataatctccacaagtttatttgtggtctatagtacttttgtaactggggttacaaaaattatagaaatttttttcctttgttcatatgcatattcatgattataatttggctttgtttgtgattaatgttttcttaagattttcacattatagaatacctcaaaagaagttgtctaaggactgggatagagagtatgtttcataaaattgtagatgtttagaatttttaaaaaccctacaaattagtatatgattgttttatataagtaagataggagcaacactttaaattatttgtgggagaatacagcattaaaggtgatttt

SEQ ID NO: 609628 - DNA, 2463 bp, Homo sapiens
  misc_feature (26)..(26): n is a, c, g, or t
agcggcgacgcagcgtgacttcacanggggaggggcgggccgagggtcctgccggcgcgcgggcgtgttcatcggagtcgctgtttgggacgctgggtgtgcggtgttctgtctccgctcccgtttcgctgtcacagcccgttccttcccggagcccgggacaggctgggcgcgcgcccgtgtgagtgagcgggactcagggcagaagtgtcccctcactgcgtttttttttccttttatccaaagaacggggcagttagtacgcttgccttcctgtcgcccggttgggagcggggttggtgtgcggagtggttcgcctttttttctttagaacttgtgagcctttttttttttttttttttcttttctttttttaggctcagtgctgtccgggctggtttgcccggtccctgactaacggctttctgccccttctctcgccacccctgcccaaggtcgcccctctgccttcgcccctgtcccgggagggtgggaagctttgaccccgccctgcccactcgcgtctccgcagccgtagccgcgcctgtcccaatatgaatagggtcaacgacccacttatttttataagagatattaagcccggactgaaaaacttaaatgtcgtctttattgtcctggagataggacgcgtgaccaaaaccaaagacggccatgaagtgagatcgtgcaaagtagcagataaaacgggcagcatcactatttccgtgtgggatgagatcggaggtcttatacagccaggggatattattcggttgaccagagggtatgcatccatgtggaaaggatgtctgacactttatactggaaggggtggtgaacttcaaaaaattggggatctaggtgcggtgcaggcagccgcaatgcgagattccatacactactaccctggtaatgatctccaccctgacctggaggagccatcctctctaggggtgtaagattttgtatggtttattcagaagtgccaaatttcagtgaacccaacccagattatcgaggacagcagaacaaaggggcacagagtgaacagaagaataattccatgaatagtaatatgggtacaggtacatttggaccagtgggaaatggtgttcacactggccctgaatcaagggaacaccagttttcacatgctggcagaagcaatggccggggacttataaatccacaactacaaggaacagctagtaatcaaacagtgatgaccacaataagtaatggcagggaccctcggagagcctttaaaagatgacctatgctaaatactcatgtgtagtttttatactacatgccctacttgaacacttattgcacttttatttattgttaactgtgaaaagtacgtcctttattgggtttccttttatattcttggtttgttaagaagaatggtttgtttttatagcaaaactgttaagctgctcgagtctcctgttgaagaatgggaacactgaaaagtaggggcatttatttttagagtaaaaagattattggatagcctttaaaaaacctgcacccatttcatgggtgagttacttaagacatcagctttatagcctctatgagtctatcttctgtataagttttgtaatatttaacataaggcttaatgggagatgttcttttgtcttgtattcagatattgccaactaaagcaataaccatcaaaaaacacaagaacttgtcaatgctagcagtaatttttgagtgtttgtggctctcggaatgattgacttcgttcagtgactactattaagattttccaaggactgactcatcccaaatttttgttgtattaccaaaaaaacagattccttatcagaatttggaatagaatgtgatctctattgcaacaagtaattttaaaagaaagctacatttattttagagtagtgctcctaacatgtattatcaactttgtggattacattggaggaaaatttaaaactggggccttgaatatttattttttgaaactaccatgttaaatactgaagtataatttgggggagttataaagttatgataaacattcatctgattattttaaacaatagttgtggtagataaacatactggaggtgagtcaaattgaattcatatagtaacatgcagtctgaagtcctagttacttaataggtactcagcctggagtgaaaatcctgggtactgactttgagaggagtgagtgtgcatgttgtcaaagtttctgaacacagttcacatagccttattagcaaaagttttaagaaatggctctatcaaagaagcaattgcagctttattcagaaatataaaagtggaatttatgtacatgtcataagtggtacccacttcccctttttactgtagggtggataactcttaggatttaactctttgaatattatctcttgaataaagcatgtgttaatgtaactccctaaacgagaatcctggagt

SEQ ID NO: 609629 - DNA, 111 bp, Homo sapiens
cggtcatctagaggatcttccctggtatcccaccagttcccttatcaatatgatgctcttcctcagcatgtatgtgctctccaatgatgtgatgtctgtgtctccaaattc

SEQ ID NO: 609630 - DNA, 2807 bp, Homo sapiens
  misc_feature (26)..(26): n is a, c, g, or t
agcggcgacgcagcgtgacttcacanggggaggggcgggccgagggtcctgccggcgcgcgggcgtgttcatcggagtcgctgtttgggacgctgggtgtgcggtgttctgtctccgctcccgtttcgctgtcacagcccgttccttcccggagcccgggacaggctgggcgcgcgcccgtgtgagtgagcgggactcagggcagaagtgtcccctcactgcgtttttttttccttttatccaaagaacggggcagttagtacgcttgccttcctgtcgcccggttgggagcggggttggtgtgcggagtggttcgcctttttttctttagaacttgtgagcctttttttttttttttttttcttttctttttttaggctcagtgctgtccgggctggtttgcccggtccctgactaacggctttctgccccttctctcgccacccctgcccaaggtcgcccctctgccttcgcccctgtcccgggagggtgggaagctttgaccccgccctgcccactcgcgtctccgcagccgtagccgcgcctgtcccaatatgaatagggtcaacgacccacttatttttataagagatattaagcccggactgaaaaacttaaatgtcgtctttattgtcctggagataggacgcgtgaccaaaaccaaagacggccatgaagtgagatcgtgcaaagtagcagataaaacgggcagcatcactatttccgtgtgggatgagatcggaggtcttatacagccaggggatattattcggttgaccagagggtatgcatccatgtggaaaggatgtctgacactttatactggaaggggtggtgaacttcaaaaaattggggatctaggtgcggtgcaggcagccgcaatgcgagattccatacactactaccctggtaatgatctccaccctgacctggaggagccatcctctctaggggtgtaagattttgtatggtttattcagaagtgccaaatttcagtgaacccaacccagattatcgaggacagcagaacaaaggggcacagagtgaacagaagaataattccatgaatagtaatatgggtacaggtacatttggaccagtgggaaatggtgttcacactggccctgaatcaagggaacaccagttttcacatgctggcagaagcaatggccggggacttataaatccacaactacaaggaacagctagtaatcaaacagtgatgaccacaataagtaatggcagggaccctcggagagcctttaaaagatgacctatgctaaatactcatgtgtagtttttatactacatgccctacttgaacacttattgcacttttatttattgttaactgtgaaaagtacgtcctttattgggtttccttttatattcttggtttgttaagaagaatggtttgtttttatagcaaaactgttaagctgctcgagtctcctgttgaagaatgggaacactgaaaagtaggggcatttatttttagagtaaaaagattattggatagcctttaaaaaacctgcacccatttcatgggtgagttacttaagacatcagctttatagcctctatgagtctatcttctgtataagttttgtaatatttaacataaggcttaatgggagatgttcttttgtcttgtattcagatattgccaactaaagcaataaccatcaaaaaacacaagaacttgtcaatgctagcagtaatttttgagtgtttgtggctctcggaatgattgacttcgttcagtgactactattaagattttccaaggactgactcatcccaaatttttgttgtattaccaaaaaaacagattccttatcagaatttggaatagaatgtgatctctattgcaacaagtaattttaaaagaaagctacatttattttagagtagtgctcctaacatgtattatcaactttgtggattacattggaggaaaatttaaaactggggccttgaatatttattttttgaaactaccatgttaaatactgaagtataatttgggggagttataaagttatgataaacattcatctgattattttaaacaatagttgtggtagataaacatactggaggtgagtcaaattgaattcatatagtaacatgcagtctgaagtcctagttacttaataggtactcagcctggagtgaaaatcctgggtactgactttgagaggagtgagtgtgcatgttgtcaaagtttctgaacacagttcacatagccttattagcaaaagttttaagaaatggctctatcaaagaagcaattgcagctttattcagaaatataaaagtggaatttatgtacatgtcataagtggtacccacttcccctttttactgtagggtggataactcttaggatttaactctttgaatattatctcttgaataaagcatgtgttaatgttaacaaaaaaaaaaaaaaaaaaaaaaaaaaaaaaaaaaaaaaaaaaaaaaaaaaaaaaaaaaaaaaaaaaaaaaaaaccaaaaaaaaaaaaaaaaccaaaaaaaaaaacatgtggcccccttggcccaattaaattttaaactcgacaaagttaagccatgcgcccaaaattcaggttaatttgccaaattcccctaaaggggagccgattaaaaataaatggcccgacgtttaaaaacgtgggaattggaaaaaccttgccgtacccaaattaaatccctttgaaaaaaatccccttttcccaagttgccaaaaaaccaaaaagccccgaacgaatcgcctttccaaaaagttgccaaccttaaaggga

SEQ ID NO: 609631 - DNA, 575 bp, Homo sapiens
aaaccgaggctgcagcagcaagaaacacggccatcgtcacattcttgaagaacatggccatctgcacctgatcactgaactgagtatggaagatcattgccgtcacgatgcagtaccccgccagcagccacgcgacgatacgacttttaaaacccatgaccagcaacaaacccgaaccaatttcaaacaccaccgtaggccagagcaacactgcaggcaggtgcatcgcctccatataaccgcgtatagcttcggggttatcgattttgccaacgccggacaaaataaagagcaaagccatcaacacgcgtgcagcgaccattattagagattgtgtcttagcgttcatacttttgactcacgctcacttgagggtattagtagaagaaaagatatagcgcgcaaaacgccactttccgtcgggctctcgatgcagcaagaacacttcctgattgccttcagcacttcccggttgagcatttactagcggagtgacggttccgttggagcgagtacgcgcgaaggcccagtcccgggataacggtcgaatctcgtcatcgtaaaatgtatcttga

SEQ ID NO: 609632 - DNA, 2601 bp, Homo sapiens
  misc_feature (26)..(26): n is a, c, g, or t
agcggcgacgcagcgtgacttcacanggggaggggcgggccgagggtcctgccggcgcgcgggcgtgttcatcggagtcgctgtttgggacgctgggtgtgcggtgttctgtctccgctcccgtttcgctgtcacagcccgttccttcccggagcccgggacaggctgggcgcgcgcccgtgacgcgtgaccaaaaccaaagacggccatgaagtgagatcgtgcaaagtagcagataaaacgggcagcatcactatttccgtgtgggatgagatcggaggtcttatacagccaggggatattattcggttgaccagagggtatgcatccatgtggaaaggatgtctgacactttatactggaaggggtggtgaacttcaaaaaattggggatctaggtgcggtgcaggcagccgcaatgcgagattccatacactactaccctggtaatgatctccaccctgacctggaggagccatcctctctaggggtgtaagattttgtatggtttattcagaagtgccaaatttcagtgaacccaacccagattatcgaggacagcagaacaaaggggcacagagtgaacagaagaataattccatgaatagtaatatgggtacaggtacatttggaccagtgggaaatggtgttcacactggccctgaatcaagggaacaccagttttcacatgctggcagaagcaatggccggggacttataaatccacaactacaaggaacagctagtaatcaaacagtgatgaccacaataagtaatggcagggaccctcggagagcctttaaaagatgacctatgctaaatactcatgtgtagtttttatactacatgccctacttgaacacttattgcacttttatttattgttaactgtgaaaagtacgtcctttattgggtttccttttatattcttggtttgttaagaagaatggtttgtttttatagcaaaactgttaagctgctcgagtctcctgttgaagaatgggaacactgaaaagtaggggcatttatttttagagtaaaaagattattggatagcctttaaaaaacctgcacccatttcatgggtgagttacttaagacatcagctttatagcctctatgagtctatcttctgtataagttttgtaatatttaacataaggcttaatgggagatgttcttttgtcttgtattcagatattgccaactaaagcaataaccatcaaaaaacacaagaacttgtcaatgctagcagtaatttttgagtgtttgtggctctcggaatgattgacttcgttcagtgactactattaagattttccaaggactgactcatcccaaatttttgttgtattaccaaaaaaacagattccttatcagaatttggaatagaatgtgatctctattgcaacaagtaattttaaaagaaagctacatttattttagagtagtgctcctaacatgtattatcaactttgtggattacattggaggaaaatttaaaactggggccttgaatatttattttttgaaactaccatgttaaatactgaagtataatttgggggagttataaagttatgataaacattcatctgattattttaaacaatagttgtggtagataaacatactggaggtgagtcaaattgaattcatatagtaacatgcagtctgaagtcctagttacttaataggtactcagcctggagtgaaaatcctgggtactgactttgagaggagtgagtgtgcatgttgtcaaagtttctgaacacagttcacatagccttattagcaaaagttttaagaaatggctctatcaaagaagcaattgcagctttattcagaaatataaaagtggaatttatgtacatgtcataagtggtacccacttcccctttttactgtagggtggataactcttaggatttaactctttgaatattatctcttgaataaagcatgtgttaatgttaacaaacctacgtaatttttgccctttcaatgacttacagtggagagccagtacatcttaactactgttgtagtgatggtatcaacctcatggttacttagctctgcatttgttgctttgttttttttccacttcaaatcacaaaataagtagattttgttttctgaaaactccatagcatttgaatacaaaaagttgtgccagattgtttgccctaattcactgtgtttaacaaatatttcagtacacactatgtattaggcactgtgtggaaagtgttaaggggtagacaagataccgaataatctccacaagtttatttgtggtctatagtacttttgtaactggggttacaaaaattatagaaatttttttcctttgttcatatgcatattcatgattataatttggctttgtttgtgattaatgttttcttaagattttcacattatagaatacctcaaaagaagttgtctaaggactgggatagagagtatgtttcataaaattgtagatgtttagaatttttaaaaaccctacaaattagtatatgattgttttatataagtaagataggagcaacactttaaattatttgtgggagaatacagcattaaaggtgatttt

SEQ ID NO: 609633 - DNA, 469 bp, Homo sapiens
tgcatgagcatacgagtacctctggtggcctcacatgctacactcccaccagcgctctgacagtttacaaatgccatgggaacattgggaagttaccctatattgtctaaaaaggggaggcattaataatccacaccttgtttagcatatcattaagaaataaccataaaaatgggcaagcagcagccctctgggctgctctaaggagtagccattctttattcctttactttcttaataaacttgctttcactttactctgtggactcaccctgaattctttcttgcacaagatccacagaactcttggggtcaggattggtaccccttttctgtaacatcttcatgccagctataacgtgaataacacaatgcaagaaagtggattagcaaactgcgaatatcttcaaataatattagttttataactcactaatgaatatttcccaaaaaaacccaagggatcctc

SEQ ID NO: 609634 - DNA, 2772 bp, Homo sapiens
  misc_feature (19)..(19): n is a, c, g, or t
  misc_feature (21)..(21): n is a, c, g, or t
  misc_feature (43)..(43): n is a, c, g, or t
gctcggttcccggatctcntngtgagatcgtgcaaagtagcanataaaacgggtagcatcactatttccgtgtgggatgagatcggaggtcttatacagccaggggatattattcggttgaccagagggtatgcatccatgtggaaaggatgtctgcccaaggtcgcccctctgccttcgcccctgtcccgggagggtgggaagctttgaccccgccctgcccactcgcgtctccgcagccgtagccgcgcctgtcccaatatgaatagggtcaacgacccacttatttttataagagatattaagcccggactgaaaaacttaaatgtcgtctttattgtcctggagataggacgcgtgaccaaaaccaaagacggccatgaagtgagatcgtgcaaagtagcagataaaacgggcagcatcactatttccgtgtgggatgagatcggaggtcttatacagccaggggatattattcggttgaccagagggtatgcatccatgtggaaaggatgtctgacactttatactggaaggggtggtgaacttcaaaaaattggggatctaggtgcggtgcaggcagccgcaatgcgagattccatacactactaccctggtaatgatctccaccctgacctggaggagccatcctctctaggggtgtaagattttgtatggtttattcagaagtgccaaatttcagtgaacccaacccagattatcgaggacagcagaacaaaggggcacagagtgaacagaagaataattccatgaatagtaatatgggtacaggtacatttggaccagtgggaaatggtgttcacactggccctgaatcaagggaacaccagttttcacatgctggcagaagcaatggccggggacttataaatccacaactacaaggaacagctagtaatcaaacagtgatgaccacaataagtaatggcagggaccctcggagagcctttaaaagatgacctatgctaaatactcatgtgtagtttttatactacatgccctacttgaacacttattgcacttttatttattgttaactgtgaaaagtacgtcctttattgggtttccttttatattcttggtttgttaagaagaatggtttgtttttatagcaaaactgttaagctgctcgagtctcctgttgaagaatgggaacactgaaaagtaggggcatttatttttagagtaaaaagattattggatagcctttaaaaaacctgcacccatttcatgggtgagttacttaagacatcagctttatagcctctatgagtctatcttctgtataagttttgtaatatttaacataaggcttaatgggagatgttcttttgtcttgtattcagatattgccaactaaagcaataaccatcaaaaaacacaagaacttgtcaatgctagcagtaatttttgagtgtttgtggctctcggaatgattgacttcgttcagtgactactattaagattttccaaggactgactcatcccaaatttttgttgtattaccaaaaaaacagattccttatcagaatttggaatagaatgtgatctctattgcaacaagtaattttaaaagaaagctacatttattttagagtagtgctcctaacatgtattatcaactttgtggattacattggaggaaaatttaaaactggggccttgaatatttattttttgaaactaccatgttaaatactgaagtataatttgggggagttataaagttatgataaacattcatctgattattttaaacaatagttgtggtagataaacatactggaggtgagtcaaattgaattcatatagtaacatgcagtctgaagtcctagttacttaataggtactcagcctggagtgaaaatcctgggtactgactttgagaggagtgagtgtgcatgttgtcaaagtttctgaacacagttcacatagccttattagcaaaagttttaagaaatggctctatcaaagaagcaattgcagctttattcagaaatataaaagtggaatttatgtacatgtcataagtggtacccacttcccctttttactgtagggtggataactcttaggatttaactctttgaatattatctcttgaataaagcatgtgttaatgttaacaaacctacgtaatttttgccctttcaatgacttacagtggagagccagtacatcttaactactgttgtagtgatggtatcaacctcatggttacttagctctgcatttgttgctttgttttttttccacttcaaatcacaaaataagtagattttgttttctgaaaactccatagcatttgaatacaaaaagttgtgccagattgtttgccctaattcactgtgtttaacaaatatttcagtacacactatgtattaggcactgtgtggaaagtgttaaggggtagacaagataccgaataatctccacaagtttatttgtggtctatagtacttttgtaactggggttacaaaaattatagaaatttttttcctttgttcatatgcatattcatgattataatttggctttgtttgtgattaatgttttcttaagattttcacattatagaatacctcaaaagaagttgtctaaggactgggatagagagtatgtttcataaaattgtagatgtttagaatttttaaaaaccctacaaattagtatatgattgttttatataagtaagataggagcaacactttaaattatttgtgggagaatacagcattaaaggtgatttt

SEQ ID NO: 609635 - DNA, 2962 bp, Homo sapiens
  misc_feature (26)..(26): n is a, c, g, or t
  misc_feature (400)..(400): n is a, c, g, or t
  misc_feature (404)..(404): n is a, c, g, or t
  misc_feature (410)..(411): n is a, c, g, or t
  misc_feature (417)..(417): n is a, c, g, or t
  misc_feature (424)..(424): n is a, c, g, or t
  misc_feature (435)..(435): n is a, c, g, or t
  misc_feature (437)..(437): n is a, c, g, or t
  misc_feature (445)..(447): n is a, c, g, or t
  misc_feature (451)..(451): n is a, c, g, or t
  misc_feature (462)..(463): n is a, c, g, or t
  misc_feature (470)..(471): n is a, c, g, or t
  misc_feature (475)..(475): n is a, c, g, or t
  misc_feature (477)..(477): n is a, c, g, or t
  misc_feature (526)..(527): n is a, c, g, or t
  misc_feature (539)..(539): n is a, c, g, or t
  misc_feature (554)..(555): n is a, c, g, or t
  misc_feature (576)..(576): n is a, c, g, or t
  misc_feature (580)..(580): n is a, c, g, or t
  misc_feature (582)..(582): n is a, c, g, or t
  misc_feature (586)..(587): n is a, c, g, or t
  misc_feature (597)..(597): n is a, c, g, or t
agcggcgacgcagcgtgacttcacanggggaggggcgggccgagggtcctgccggcgcgcgggcgtgttcatcggagtcgctgtttgggacgctgggtgtgcggtgttctgtctccgctcccgtttcgctgtcacagcccgttccttcccggagcccgggacaggctgggcgcgcgcccgtgtgagtgagcgggactcagggcagaagtgtcccctcactgcgtttttttttccttttatccaaagaacggggcagttagtacgcttgccttcctgtcgcccggttgggagcggggttggtgtgcggagtggttcgcctttttttctttagaacttgtgagcctttttttttttttttttttcttttctttttttggggggggggctgtcgggggggggngggngggggnnggggtngggggtnggggggccttngngggggggnnngggncaggggggggnntgggggnngggncnggggggggggggggggggggggggggcccgggcggggggaggggggggnngggagggggagnggggcgggtggcaanngggatggggggaaggggcagnggtntngagnngggggatganggcggggggggaaaacttaaatgtcgtctttattgtcctggagataggacgcgtgaccaaaaccaaagacggccatgaagtgagatcgtgcaaagtagcagataaaacgggcagcatcactatttccgtgtgggatgagatcggaggtcttatacagccaggggatattattcggttgaccagagggtatgcatccatgtggaaaggatgtctgacactttatactggaaggggtggtgaacttcaaaaaattggggaagattttgtatggtttattcagaagtgccaaatttcagtgaacccaacccagattatcgaggacagcagaacaaaggggcacagagtgaacagaagaataattccatgaatagtaatatgggtacaggtacatttggaccagtgggaaatggtgttcacactggccctgaatcaagggaacaccagttttcacatgctggcagaagcaatggccggggacttataaatccacaactacaaggaacagctagtaatcaaacagtgatgaccacaataagtaatggcagggaccctcggagagcctttaaaagatgacctatgctaaatactcatgtgtagtttttatactacatgccctacttgaacacttattgcacttttatttattgttaactgtgaaaagtacgtcctttattgggtttccttttatattcttggtttgttaagaagaatggtttgtttttatagcaaaactgttaagctgctcgagtctcctgttgaagaatgggaacactgaaaagtaggggcatttatttttagagtaaaaagattattggatagcctttaaaaaacctgcacccatttcatgggtgagttacttaagacatcagctttatagcctctatgagtctatcttctgtataagttttgtaatatttaacataaggcttaatgggagatgttcttttgtcttgtattcagatattgccaactaaagcaataaccatcaaaaaacacaagaacttgtcaatgctagcagtaatttttgagtgtttgtggctctcggaatgattgacttcgttcagtgactactattaagattttccaaggactgactcatcccaaatttttgttgtattaccaaaaaaacagattccttatcagaatttggaatagaatgtgatctctattgcaacaagtaattttaaaagaaagctacatttattttagagtagtgctcctaacatgtattatcaactttgtggattacattggaggaaaatttaaaactggggccttgaatatttattttttgaaactaccatgttaaatactgaagtataatttgggggagttataaagttatgataaacattcatctgattattttaaacaatagttgtggtagataaacatactggaggtgagtcaaattgaattcatatagtaacatgcagtctgaagtcctagttacttaataggtactcagcctggagtgaaaatcctgggtactgactttgagaggagtgagtgtgcatgttgtcaaagtttctgaacacagttcacatagccttattagcaaaagttttaagaaatggctctatcaaagaagcaattgcagctttattcagaaatataaaagtggaatttatgtacatgtcataagtggtacccacttcccctttttactgtagggtggataactcttaggatttaactctttgaatattatctcttgaataaagcatgtgttaatgttaacaaacctacgtaatttttgccctttcaatgacttacagtggagagccagtacatcttaactactgttgtagtgatggtatcaacctcatggttacttagctctgcatttgttgctttgttttttttccacttcaaatcacaaaataagtagattttgttttctgaaaactccatagcatttgaatacaaaaagttgtgccagattgtttgccctaattcactgtgtttaacaaatatttcagtacacactatgtattaggcactgtgtggaaagtgttaaggggtagacaagataccgaataatctccacaagtttatttgtggtctatagtacttttgtaactggggttacaaaaattatagaaatttttttcctttgttcatatgcatattcatgattataatttggctttgtttgtgattaatgttttcttaagattttcacattatagaatacctcaaaagaagttgtctaaggactgggatagagagtatgtttcataaaattgtagatgtttagaatttttaaaaaccctacaaattagtatatgattgttttatataagtaagataggagcaacactttaaattatttgtgggagaatacagcattaaaggtgatttt

SEQ ID NO: 609636 - DNA, 348 bp, Homo sapiens
gccagtgggttcttgagctcctgatctcaggcaatctggcctgccactggtctcccaaagtgtggggattacatggcatgagccaccatgctcagccttgtgtcccttttggaatgatctgactcaatcttccagaatacttcatctggcttctgtccaactgcctttgagattccggacttttggagtctgtatgctatgctcacgggaaatgttatctcaagccttcatagccatgtgctattggccatctccacaaagctgatttcttgtatggcttagaaaggggatctgcagggggctatgtaaggaaatatccatgcattggagaggtgcatactaaagtag

SEQ ID NO: 609637 - DNA, 347 bp, Homo sapiens
ggaccccgacgtcttacaaaatagtcagtgacaggatctgacagctgcacagtgtctgaccctgatctaacctatcttctcagccagagaggtggagcgtgcgccaggacacatggatattagtggcagtgaacactagcacaagtctcagatcacaagctggctctgggtgacctagacaggggccataggctcacaggacacccagagctggctctatcagcacttcaggccatcaggcagagaaaagcaactccataggggctattccctagctgataaacaagaggcaaaccaatttataccacgaaaagtaggattcgggggatgtaagtacttgccaggtc

SEQ ID NO: 609638 - DNA, 740 bp, Homo sapiens
atggactaatgaggctctaacactgctcaggagacccctgccctctagttggttctgggctttgatctcttccaacctgcccagtcacagaaggaggaatgactcaaatgcccaaaagcaagaacagcatggcatgaagtaagacaggatatgtatatttttaaatggttctaacataagacctgtgctctctagccatggatttaccagggctttctgaaagatctagtggttcagacagagagagagagagtactgaaaaagcaagtcctctggttagtcttaataatttactaaaaatggtccaagttttcattagtcttttattgataataaagcctggatgggttttttttatgaagctccttagctctgatgtctggtatagtgtggcagctggaaagaggttaatatttaagtgtttcacatgtagtttggtggtggtaagtggaattcggatttctgtaagtgtggtaatgtggattagcagtatattattcgttgaatatctgaattgatacttaaagagtagtgagcaatataagaggcaactggtggtttgacaagtaagtgtgcatggttattgagttggtacttgtaccttatttggaagggatgaagggaatgaatctgtttttccgaagaaaaaaaagatataaaaagaaatttgtgggggggctgggcccggaaaagattttctggaccctttctggggggggggggggcccatgatgtatatg

SEQ ID NO: 609639 - DNA, 276 bp, Homo sapiens
  misc_feature (261)..(261): n is a, c, g, or t
  misc_feature (269)..(269): n is a, c, g, or t
tcatcccgtaggtgcaaaagcaatcaatctcacttcgggcttttgggtttcctgcagcgctttccgagtctccatatagggttctcggagacttctacaggaccgtcacaggaggatcagagtcagagcttcagacactcaggacacccccccccaaagaccaacccaaccccccggaaggaacgtccgagtcagaagtgtggggaaagccaccgtggtgacccgcagatagtactggtcttcgccttgcgtgaggtttgncaaccggncatcttc

SEQ ID NO: 609640 - DNA, 1116 bp, Homo sapiens
atgagctggacttttctctttgtctggagtgatgctccttctgtttccttgtgcatgtagctccctgtgtgctggctggcaccctgtggcagccctgtgctggacgcagtgagcgatggcaatgtgaccgatatagctctgccagtgtgtggtgaatgggtttgcctgaacttgtccccctggcttggcacatgttgggtgtatttgacatgcttgccttgaccagcttggtgaataatgtccctgtcagccatgggccttcttgcttcaacatcctgtgcgttgggatgagacaggtttggcgcaatgtccaccctcatggaccaaccctgttcaacaccaaattctgaagtgtgtgatgccatgccaaccacacaacagcctgggtgtccatgctccatgtctaatacctattgaccctccaatgagatgcaacctgtgacgtgctacaatgctcacgatcgttagcacagttgtgctttttgtggtgaccaggatcaaccaaagcatggacagctaccaaagcctaatcgtggcaatttcatcgattcgcaccaattccgaggccttaccttgcatggaaacgacgcttacaagatcctgacacgacgttgctaccacagcctacccatttgaactcccctgaagtccattgtctcgcctttgtcacttctccatttggccccccaactgtggtacagttcccctggaacgtctctagagacccttaggttgaactattggaatgacacgtctggcaccacgtacaaggtgttgaaacccagttcaattccccccaaattcaaattggcccacaaatcccatcaatttccccattttccgcacagcattgtgaacctaaacccacaagtttccaaacaatcccacgaacattcaccccatccgaacgcctttggtccagcaaacgtggtgagttcccaggactccaactcaggcgttacacctaaaccagactgacttgaaggtccgcgttgcgacaaagccaccccactgggagtgccacttcaacccggccgccaccattggccggcaaccgctggctcactgggcgcccgccaatcaaaggccccgtgcacggacatcgcccaccaccca

SEQ ID NO: 609641 - DNA, 284 bp, Homo sapiens
  misc_feature (134)..(134): n is a, c, g, or t
ccccccccccggggggggccggggttttttttttggggggggttttttttttcccccccccccccccccccccccccttccgggggtttaaggggggggggggggggcccctttttttttttgggccccctttnaaccaggggttttttttgccccccccaggggggttggggggggttttttccccctttggggcccccccggggggggggcccctttttcccccccccaccttttggggtttttttcccccccttttttttcccgggttgggggggggggga

SEQ ID NO: 609642 - DNA, 1009 bp, Homo sapiens
ttcgggatcactccttcggcggcgacagaagtgcgccctctctatacgattagtcacactcctttgtagtatcgtgcccccctacttcatccatgtttttgcacacgtatgctactaccgacgatccgcctcattaatagcggccccctctacaacggtgcctttacaaacggtgggggtacttcaccctggcgtccaggccttaaactcttgcggcggaatacaacgtgttttttcccccttgcggcaccacacagaatgtcttctcaacccccccctgttctcccttttatctctggggtacacctcaccgcctcctgtcgcctccctttttgtgatataagggtcacctcggcgcaatacagcgtcctcttatgggcccataacgtctcgcgtcctgtctgggtcttcccctggccataacttcgaaggggtcctgctaatatgaacgtcgcttttttgacccgcctgagaggctttccctgggaaccttggcaaacactctaaatgtgcgtctgagaaacctcaaagtagggaaaaggagcctctggtatccaaaaccgtgaacagtggtagtcaataggtaacggttcgtacagaccccttttattacagtgattccgtcctggttccttgcagccaaaatcctctatggacaataggatggtgctgtgttcgcatgccctcttgccctgacagtgtcccatggggccccattctgctaccatgccccgtccggtgctacgtgcatgatgcactcgtcgctctccctgcagcccatggccttccgcagccttcctcctgacccctgtcgcaacagccggtggaactccagctgccaccaccctctgggtcggacactgggacccactggcaccagtcttggctgcatgcttacacgctctagcgcgttgatgcctgccaagggacccacagccccctgcccgttgccctgcagctttaacagagtgaacatgtgtatttacaggccgagttgtcattgcacgaa

SEQ ID NO: 609643 - DNA, 415 bp, Homo sapiens
tgaccaatgtgagaatacaaatcttgtgttgacctgattcatcaccgcataagcggatgtattccaaaccacggatcccataggttgacctcattatttctaacgtccaacaggacgcggtcactagtgaatgcccgaaattcctgatataaactgccattcaagttcaagtgtgtcagacttacaattttgcacaggtttgcctgagcatatattatttaattcatttcccagagacaggtattatagacttatagcttctctatgagctgaattgcctgttggaatcagtgaggtaggctgtgtgtgtgtgtgtgtgtgtgtgtgtgtgtgtgtgtgtgtgtgtatcgctaggacatctctgtttctctgctctctttagagtggggtcccgcgctcgtatgcgtactcatgc

SEQ ID NO: 609644 - DNA, 409 bp, Homo sapiens
tctttgcggtgcctttccccaacttaaacctctttatttataaacttacccagtctcagatatttctttataccaagacaggaatagcctaacacaggaaatggtactgaggaatggggcgtgctacaaagatacctcaaaatgtggatgcaactttggagctgcgtaacaggcagaggttggaaaaatttggagggctccgaagaagaacaagaggatgagggagttgggaacttcgtagagactggttaaatgattgtgacgaaaatgctgatggtgatatggacagtgaagtccaggctgaggaggtctcaagatgcaaatgaggaacttatgggaaactagagcaaagatcacccttattatgccttagcaaagaattgggctgtatttggtcacaccctaggga

SEQ ID NO: 609645 - DNA, 1990 bp, Homo sapiens
ggggcgggcgaggcgcgtgccggccgcaggagctccgggttgccgccgccgccgccgcccgcagcccacgtgcggccgctgctgcacccgagctcacgccccgcggccgctttgttgctcccggccggcctgcacgatgcacacgccggacttcgcaggcccagacgacgcgcgcgcagttgacatcatggacatatgtgagtccatcctggagaggaagcggcatgacagcgaaaggtctacttgcagcatcttggagcagacagacatggaagctgtcgaggctcttgtttgtatgagctcctggggtcaaagatcccagaaaggtgacctgttgcggataagacccctcacgcctgtctctgactctggggatgtcaccaccactgtgcatatggatgcagccacacctgaactaccaaaagacttccattctttatcgactctgtgcataactcctcctcagagccctgatctcgtggagccatcgacaaggacacctgtttctccccaagtaacagattccaaagcatgtacagccacggatgttctccagtcctctgccgtagtggccagagctctgagcgggggcgcggagaggggcttgctgggtttggagccagtgcccagctctccctgcagggccaaggggactagcgtgatccgacacactggggagagccctgctgcctgctttcccaccatccagactccagattgccggctttctgacagcagagaaggagaagagcagcttctgggacactttgaaactttgcaggacacacacctcacggacagtttactcagcactaacttggtgtcctgtcagccctgcttgcacaagtctggtggcctgctgctcactgacaaaggccagcaggcagggtggcctggtgcagttcagacttgctcaccaaagaattatgaaaatgacctgcccaggaaaaccacccctctgatttctgtctctgtccctgctccccctgtcctttgccagatgatccctgtgactggacaaagtagcatgttaccagcttttttgaagccccctccccagttgtctgtggggactgtgagacccatcctagctcaggctgctccagcgcctcaacctgtgttcgtgggacctgctgtgcctcagggagctgtgatgttggtcctgccccagggagccctccctccgcctgccccctgtgcagccaatgtcatggctgccgggaataccaagttgttgccccttgcccctgctccagtgttcatcacctctagccaaaactgtgtccctcaggtagacttttcccgaaggaggaactatgtttgcagcttcccaggttgccggaagacctacttcaaaagttcccaccttaaggcccatcttcgcactcacacaggggagaagcctttcaactgcagctgggatggctgtgataaaaagtttgctcgttcggatgagctgtcacgccaccgcagaactcacacaggggagaagaagtttgtgtgcccggtgtgtgaccgacgtttcatgcgcagtgaccacctgacgaagcatgcccggcgccacatgacgaccaagaagatcccaggctggcaggcagaggttggcaagctgaacagaatcgcctctgcagagagcccggggagcccactggtgagcatgccagcctctgcctgaaaggtccattaggacatcactcatgggatttttaaaaagcctctttccaggaatggaactgatggattcctctcccactgcctcacccaaaaaaaacggtcttggcggcctaggggaagatcggggagctggttttgatgaaagtatgttaacttttcttttccacttgggaccctgttcagtatcttttgtagtttcagaagtttttttgttttggttttttttttttaaagaaatggtagaaaatttgataatctgaatcaccagcattcaaacaaatatttcggcaataaagtttacaaaatctggattttt

SEQ ID NO: 609646 - DNA, 570 bp, Homo sapiens
tcccccgtgggggggtataataaccaggacgcctttttggggaccgctccgggtcgtcctgggggcgcccacccacaccgtgttggtgcccccccgtaggaaggaccaccggggggcccgttgtccatcccctccggtgattttttcccttttagcccggggccgggatggaccacaatttccccccggggagaccaccttgtgcccccttaggcgccttatttagggggcaaccccatgagagccacaagtttgtgcagcagaaaaaccagaggtggtgcccggtgtccgggaattcgccgcgggtttgtcgcggcaccccaggtgcccccggacgccggggggtttgttggaaataaagtggattgcgcccccgggcaggacaaccactgggttttttttttttgtgtttttttgtttttttttgtttttttttttaagtttgaagcacagttaaatatttttggacttggatagggttgattgtttaatgggtagataagggttcctaaggacatttttttgtagccgtcctgggttgtaaaaaaaaattgggcgtcccaaagccca

SEQ ID NO: 609647 - DNA, 181 bp, Homo sapiens
gttacataatgctataatctgccttggcagttttaaagcatcgtgttcatgcccactgacacaatgggactccacaaatatagtcaataatcatgataaaaaattataatatgattatcaagtgcagcaggtattgacgaaatccaaagttctcacttgctcactgtacaacggcctggga

SEQ ID NO: 609648 - DNA, 749 bp, Homo sapiens
cccagccactttttggcttgaacctcaggagttaattttattaatcatttacccaagaaaaatatgaacttagtagccctttttaagagtcaggatttttggtggcaacgcttgccagcttagttctgtctgtgaaatgttggcttaaaagccgaattgtcatgagcattccttgaatgtcttttactacacctcggtgtttgttgctatagactattgcatgtgcattacatgcctactgtaggcttctgatatgcatatccacatgcccatcatgggtggcctctgtatttcccctgcactgagaagccgttgtgttgtgtcgcctttaggttgacatcatggacatatgtgagtccatcctggagaggaagcggcatgacagcgaaaggtctacttgcagcatcttggagcagacagacatggaagctgtcgaggctcttgtttgtatgagctcctggggtcaaagatcccagaaaggtgacctgttgcggataagacccctcacgcctgtctctgactctggggatgtcaccaccactgtgcatatggatgcagccacacctgaactaccaaaagacttccattctttatcgactctggtaagaggaggtgggagggaggagcgttttgtgcacatgactagagtagctgaactcagtgtgttgaagaacttgtgcagaagattccctgggatgctggcaaataagttgcgtatcctctctgtgtgggtctgacggagtacgaac

SEQ ID NO: 609649 - DNA, 4002 bp, Homo sapiens
ggggcgggcgaggcgcgtgccggccgcaggagctccgggttgccgccgccgccgccgcccgcagcccacgtgcggccgctgctgcacccgagctcacgccccgcggccgctttgttgctcccggccggcctgcacgatgcacacgccggacttcgcaggcccagacgacgcgcgcgcagttgacatcatggacatatgtgagtccatcctggagaggaagcggcatgacagcgaaaggtctacttgcagcatcttggagcagacagacatggaagctgtcgaggctcttgtttgtatgagctcctggggtcaaagatcccagaaaggtgacctgttgcggataagacccctcacgcctgtctctgactctggggatgtcaccaccactgtgcatatggatgcagccacacctgaactaccaaaagacttccattctttatcgactctgtgcataactcctcctcagagccctgatctcgtggagccatcgacaaggacacctgtttctccccaagtaacagattccaaagcatgtacagccacggatgttctccagtcctctgccgtagtggccagagctctgagcgggggcgcggagaggggcttgctgggtttggagccagtgcccagctctccctgcagggccaaggggactagcgtgatccgacacactggggagagccctgctgcctgctttcccaccatccagactccagattgccggctttctgacagcagagaaggagaagagcagcttctgggacactttgaaactttgcaggacacacacctcacggacagtttactcagcactaacttggtgtcctgtcagccctgcttgcacaagtctggtggcctgctgctcactgacaaaggccagcaggcagggtggcctggtgcagttcagacttgctcaccaaagaattatgaaaatgacctgcccaggaaaaccacccctctgatttctgtctctgtccctgctccccctgtcctttgccagatgatccctgtgactggacaaagtagcatgttaccagcttttttgaagccccctccccagttgtctgtggggactgtgagacccatcctagctcaggctgctccagcgcctcaacctgtgttcgtgggacctgctgtgcctcagggagctgtgatgttggtcctgccccagggagccctccctccgcctgccccctgtgcagccaatgtcatggctgccgggaataccaagttgttgccccttgcccctgctccagtgttcatcacctctagccaaaactgtgtccctcaggtagacttttcccgaaggaggaactatgtttgcagcttcccaggttgccggaagacctacttcaaaagttcccaccttaaggcccatcttcgcactcacacaggggagaagcctttcaactgcagctgggatggctgtgataaaaagtttgctcgttcggatgagctgtcacgccaccgcagaactcacacaggggagaagaagtttgtgtgcccggtgtgtgaccgacgtttcatgcgcagtgaccacctgacgaagcatgcccggcgccacatgacgaccaagaagatcccaggctggcaggcagaggttggcaagctgaacagaatcgcctctgcagagagcccggggagcccactggtgagcatgccagcctctgcctgaaaggtccattaggacatcactcatgggatttttaaaaagcctctttccaggaatggaactgatggattcctctcccactgcctcacccaaaaaaaacggtcttggcggcctaggggaagatcggggagctggttttgatgaaagtatgttaacttttcttttccacttgggaccctgttcagtatcttttgtagtttcagaagtttttttgttttggttttttttttttaaagaaatggtagaaaatttgataatctgaatcaccagcattcaaacaaatatttcggcaataaagtttacaaaatctggatttttacaaccttttctattgatgttttgtagaaataagacagggtactaatttttatactggtttttagaaaaatatttatattgttggtgctcaaatcaccaatttctagctagatcattttgcagccttcttttcagtgtttaataacaaagtttttcctaatggcccttcttttagtaaactggacatgttattccactacaaaaaccacaagttatctggccttttagatctttttggaatcggacctggttgagtaaggacctcttaaaagggaaaaataaattttgccgtcagcttcttcataacgttttcaaggaaattctaggcaatcattcctgtcaccaaagaactaaaattttggttgactggaactagtgagctgtgtccatggtgtgtcatgaaggatgtaccccagagagtaacatgagccactgggcagatcccagggaccagtacttgctgcaggatctagtctgtaatagtcttggccatggctctgctgaaagcaagccattcagtttcttgtttgtacctaaaacaccaaaaaagaaacactcaaatccagctgctttgtcaattgtcagttctgactccttttgctgtggccttatccgtactatattgtgggtagagtaacttctcagaaaaaaaggaaatgtctgtattggttggatgaaactccaccagagcacagcttagctggggcgagatgcatgtgaaggcaggcagtgccaagattccgcttcctttgtttgccaaatactagaaacacaaggaaatgcaagttacgctaaatggcagtaatactacccaactgcctttctgttcattttgtttgaaggaaattgttttgaccaaacagaaaattacttggaatggtgtgttttacagtctacctagaaaatagatggacaatatttttcaactgtatgagcacgtagataaccgagagaatgtggccacctgtgttcaagaagccactgatactggtttttgttaaacattggaagttcaggcaatggaataaatgtaggaacatacagaatgttgcactaatttggtagcctgggaattttttttattgtgcagtatgtatttaaattttgtctatgttaattaccagcatttacctttatttaaatgatggtaaggtggaatattgaataaaattaggttttgtgttttgttctttgtagtctgataaaatctccacctggtcattcattgtgtgtgacttgatacccgttaacttgccccttagtatcagctgttacttgacacaaatgtgtgtgttattcagaggttttcagtctggacactccataggtgagtgtcgtgtcttcgtgagacagcacagttgtctcatgttgtgcatagttcatgtttcctcaccacccagtcctttctcctgctcatcaaaatcagcatacacatttttgactgtacacactataaatggcatcaaatttggatatttttcttaattatgacatgcaaagtaatgtgagtcctgccagtattctggtggataaggtcttctgagtatttggttgcttgtcacaacattctccaagcagtgatatttctaaagaggagatacatgttgaaaacggttttaatttacacttccatttcctgattacatttggaaatactttgtgtaaaccatcccccttccacctccatttgtctgttgaaagattttaagttggaaacagttcctgtctgaaaactcttctgagaaccacaaaccttgtgtatggattcggcatggagccctcagctggcggctctgggtgctgacggccgctggagaggtgggctcccctcgtgcactttattgcctgggcagttttgcttgatcttttgtgactttgagccttttaagtagtttgaatgataagacttaaaatgtttcataattatgttttatgtaacagactttgacattatttaaacgagcatgtgtaatgtaacttttctctttgaatcatataaaacttgattttac

SEQ ID NO: 609650 - DNA, 395 bp, Homo sapiens
tagaaattgaaacctggcgcaatagatatagtaccgcaaaaaaaaaaaaaaaaaaaaaaaaaaaaatttgttcggcggcctctgggccctctcgagaaaactttttataacaccaattccggtggggcgcgcgggggccccaagtatgggtataggtgaaacagtgtggccaaatagcgtgtgttcccataagaaaacccggggccaagaaacaaagggcgggggattctcacaccaaatataacaaaacccccggggggaacaaccgggcggtttggaaacaaattccacaaaggggagctgcggagaggccattaggggggaactcatatcaagcggggagtcccaggggggacccgcaaaattctaattaagccccccacccggggggcgga

SEQ ID NO: 609651 - DNA, 3946 bp, Homo sapiens
ggggcgggcgaggcgcgtgccggccgcaggagctccgggttgccgccgccgccgccgcccgcagcccacgtgcggccgctgctgcacccgagctcacgccccgcggccgctttgttgctcccggccggcctgcacgatgcacacgccggacttcgcaggcccagacgacgcgcgcgcagttgacatcatggacatatgtgagtccatcctggagaggaagcggcatgacagcgaaaggtctacttgcagcatcttggagcagacagacatggaagctgtcgaggctcttgtttgtatgagctcctggggtcaaagatcccagaaaggtgacctgttgcggataagacccctcacgcctgtctctgactctggggatgtcaccaccactgtgcatatggatgcagccacacctgaactaccaaaagacttccattctttatcgactctgtgcataactcctcctcagagccctgatctcgtggagccatcgacaaggacacctgtttctccccaagtaacagattccaaagcatgtacagccacggatgttctccagtcctctgccgtagtggccagagctctgagcgggggcgcggagaggggcttgctgggtttggagccagtgcccagctctccctgcagggccaaggggactagcgtgatccgacacactggggagagccctgctgcctgctttcccaccatccagactccagattgccggctttctgacagcagagaaggagaagagcagcttctgggacactttgaaactttgcaggacacacacctcacggacagtttactcagcactaacttggtgtcctgtcagccctgcttgcacaagtctggtggcctgctgctcactgacaaaggccagcaggcagggtggcctggtgcagttcagacttgctcaccaaagaattatgaaaatgacctgcccaggaaaaccacccctctgatttctgtctctgtccctgctccccctgtcctttgccagatgatccctgtgactggacaaagtagcatgttaccagcttttttgaagccccctccccagttgtctgtggggactgtgagacccatcctagctcaggctgctccagcgcctcaacctgtgttcgtgggacctgctgtgcctcagggagctgtgatgttggtcctgccccagggagccctccctccgcctgccccctgtgcagccaatgtcatggctgccgggaataccaagttgttgccccttgcccctgctccagtgttcatcacctctagccaaaactgtgtccctcaggtagacttttcccgaaggaggaactatgtttgcagcttcccaggttgccggaagacctacttcaaaagttcccaccttaaggcccatcttcgcactcacacaggggagaagcctttcaactgcagctgggatggctgtgataaaaaggtttgtgtgcccggtgtgtgaccgacgtttcatgcgcagtgaccacctgacgaagcatgcccggcgccacatgacgaccaagaagatcccaggctggcaggcagaggttggcaagctgaacagaatcgcctctgcagagagcccggggagcccactggtgagcatgccagcctctgcctgaaaggtccattaggacatcactcatgggatttttaaaaagcctctttccaggaatggaactgatggattcctctcccactgcctcacccaaaaaaaacggtcttggcggcctaggggaagatcggggagctggttttgatgaaagtatgttaacttttcttttccacttgggaccctgttcagtatcttttgtagtttcagaagtttttttgttttggttttttttttttaaagaaatggtagaaaatttgataatctgaatcaccagcattcaaacaaatatttcggcaataaagtttacaaaatctggatttttacaaccttttctattgatgttttgtagaaataagacagggtactaatttttatactggtttttagaaaaatatttatattgttggtgctcaaatcaccaatttctagctagatcattttgcagccttcttttcagtgtttaataacaaagtttttcctaatggcccttcttttagtaaactggacatgttattccactacaaaaaccacaagttatctggccttttagatctttttggaatcggacctggttgagtaaggacctcttaaaagggaaaaataaattttgccgtcagcttcttcataacgttttcaaggaaattctaggcaatcattcctgtcaccaaagaactaaaattttggttgactggaactagtgagctgtgtccatggtgtgtcatgaaggatgtaccccagagagtaacatgagccactgggcagatcccagggaccagtacttgctgcaggatctagtctgtaatagtcttggccatggctctgctgaaagcaagccattcagtttcttgtttgtacctaaaacaccaaaaaagaaacactcaaatccagctgctttgtcaattgtcagttctgactccttttgctgtggccttatccgtactatattgtgggtagagtaacttctcagaaaaaaaggaaatgtctgtattggttggatgaaactccaccagagcacagcttagctggggcgagatgcatgtgaaggcaggcagtgccaagattccgcttcctttgtttgccaaatactagaaacacaaggaaatgcaagttacgctaaatggcagtaatactacccaactgcctttctgttcattttgtttgaaggaaattgttttgaccaaacagaaaattacttggaatggtgtgttttacagtctacctagaaaatagatggacaatatttttcaactgtatgagcacgtagataaccgagagaatgtggccacctgtgttcaagaagccactgatactggtttttgttaaacattggaagttcaggcaatggaataaatgtaggaacatacagaatgttgcactaatttggtagcctgggaattttttttattgtgcagtatgtatttaaattttgtctatgttaattaccagcatttacctttatttaaatgatggtaaggtggaatattgaataaaattaggttttgtgttttgttctttgtagtctgataaaatctccacctggtcattcattgtgtgtgacttgatacccgttaacttgccccttagtatcagctgttacttgacacaaatgtgtgtgttattcagaggttttcagtctggacactccataggtgagtgtcgtgtcttcgtgagacagcacagttgtctcatgttgtgcatagttcatgtttcctcaccacccagtcctttctcctgctcatcaaaatcagcatacacatttttgactgtacacactataaatggcatcaaatttggatatttttcttaattatgacatgcaaagtaatgtgagtcctgccagtattctggtggataaggtcttctgagtatttggttgcttgtcacaacattctccaagcagtgatatttctaaagaggagatacatgttgaaaacggttttaatttacacttccatttcctgattacatttggaaatactttgtgtaaaccatcccccttccacctccatttgtctgttgaaagattttaagttggaaacagttcctgtctgaaaactcttctgagaaccacaaaccttgtgtatggattcggcatggagccctcagctggcggctctgggtgctgacggccgctggagaggtgggctcccctcgtgcactttattgcctgggcagttttgcttgatcttttgtgactttgagccttttaagtagtttgaatgataagacttaaaatgtttcataattatgttttatgtaacagactttgacattatttaaacgagcatgtgtaatgtaacttttctctttgaatcatataaaacttgattttac

SEQ ID NO: 609652 - DNA, 928 bp, Homo sapiens
  misc_feature (37)..(37): n is a, c, g, or t
  misc_feature (79)..(79): n is a, c, g, or t
  misc_feature (91)..(91): n is a, c, g, or t
  misc_feature (96)..(96): n is a, c, g, or t
  misc_feature (165)..(165): n is a, c, g, or t
  misc_feature (168)..(168): n is a, c, g, or t
  misc_feature (173)..(173): n is a, c, g, or t
  misc_feature (177)..(177): n is a, c, g, or t
  misc_feature (191)..(191): n is a, c, g, or t
  misc_feature (193)..(193): n is a, c, g, or t
  misc_feature (209)..(209): n is a, c, g, or t
  misc_feature (211)..(212): n is a, c, g, or t
  misc_feature (221)..(221): n is a, c, g, or t
  misc_feature (223)..(223): n is a, c, g, or t
  misc_feature (247)..(247): n is a, c, g, or t
  misc_feature (259)..(259): n is a, c, g, or t
  misc_feature (301)..(301): n is a, c, g, or t
  misc_feature (304)..(304): n is a, c, g, or t
  misc_feature (307)..(307): n is a, c, g, or t
  misc_feature (314)..(314): n is a, c, g, or t
  misc_feature (318)..(318): n is a, c, g, or t
  misc_feature (322)..(322): n is a, c, g, or t
  misc_feature (325)..(325): n is a, c, g, or t
  misc_feature (327)..(327): n is a, c, g, or t
  misc_feature (329)..(329): n is a, c, g, or t
  misc_feature (331)..(331): n is a, c, g, or t
  misc_feature (347)..(347): n is a, c, g, or t
  misc_feature (369)..(369): n is a, c, g, or t
  misc_feature (380)..(380): n is a, c, g, or t
  misc_feature (389)..(390): n is a, c, g, or t
  misc_feature (396)..(396): n is a, c, g, or t
  misc_feature (411)..(411): n is a, c, g, or t
  misc_feature (415)..(415): n is a, c, g, or t
  misc_feature (429)..(429): n is a, c, g, or t
  misc_feature (442)..(442): n is a, c, g, or t
  misc_feature (451)..(451): n is a, c, g, or t
  misc_feature (453)..(454): n is a, c, g, or t
  misc_feature (457)..(457): n is a, c, g, or t
  misc_feature (491)..(491): n is a, c, g, or t
  misc_feature (516)..(517): n is a, c, g, or t
  misc_feature (528)..(528): n is a, c, g, or t
  misc_feature (537)..(537): n is a, c, g, or t
  misc_feature (539)..(539): n is a, c, g, or t
  misc_feature (541)..(548): n is a, c, g, or t
  misc_feature (576)..(576): n is a, c, g, or t
  misc_feature (581)..(581): n is a, c, g, or t
  misc_feature (584)..(584): n is a, c, g, or t
  misc_feature (587)..(588): n is a, c, g, or t
  misc_feature (592)..(592): n is a, c, g, or t
  misc_feature (601)..(601): n is a, c, g, or t
  misc_feature (605)..(605): n is a, c, g, or t
  misc_feature (607)..(607): n is a, c, g, or t
  misc_feature (609)..(609): n is a, c, g, or t
  misc_feature (613)..(613): n is a, c, g, or t
  misc_feature (622)..(622): n is a, c, g, or t
  misc_feature (624)..(624): n is a, c, g, or t
  misc_feature (626)..(626): n is a, c, g, or t
  misc_feature (629)..(629): n is a, c, g, or t
  misc_feature (641)..(642): n is a, c, g, or t
  misc_feature (670)..(670): n is a, c, g, or t
  misc_feature (673)..(674): n is a, c, g, or t
  misc_feature (681)..(681): n is a, c, g, or t
  misc_feature (694)..(694): n is a, c, g, or t
  misc_feature (700)..(700): n is a, c, g, or t
  misc_feature (703)..(704): n is a, c, g, or t
  misc_feature (710)..(710): n is a, c, g, or t
  misc_feature (726)..(726): n is a, c, g, or t
  misc_feature (730)..(730): n is a, c, g, or t
  misc_feature (741)..(741): n is a, c, g, or t
  misc_feature (761)..(761): n is a, c, g, or t
  misc_feature (771)..(772): n is a, c, g, or t
  misc_feature (782)..(782): n is a, c, g, or t
  misc_feature (784)..(784): n is a, c, g, or t
  misc_feature (853)..(853): n is a, c, g, or t
  misc_feature (926)..(926): n is a, c, g, or t
aaacaagagaaagagggaaggacttctgacgccaaancatgcaagtaataacaaaggaacagagaaaaagaggaagaanaaaaagaaaatnagganaaagaaagagagaagcaaaggacggcacgagggcacagcagggcgtgggcagtactggcaagcatttcnggncaacngcgnccaacagcaggaanangaagaaacccccagancnnagcaaaagngnaacaacattttctccctgacagcntacattccaagncattccataccataccgctccactccacagttttataaaccnganctnaagaggnaacnaggnacnangngngcgcacaataaaaacnaactaaaaacaaatcagagggnagcagaaaagnaaacaaagnntccagnaaggcatcaggagancacngcgggggggccccncactttaccagcntaaagaagngnnganttttatttctcagcaaactcaatattcagaagcnttaccagcagactcaagtgaaaggnnttaaatacagnttacctcantntnnnnnnnngggaaatatttcatataaaacatgaacncaagngcnacnncatngaaaaaacngaanangngaanaggaaaaananangtngagagggcgctnnggaaaaagacatggaagaacaagacttnatnngactgtntttaactccgccncccacncgnnccccancccccaccacaagttnttcnggcagagatanattaaggcaaaggctcctgnagaggtacgnncacctgggcngngggcgggagactcaaggtgaacacactctgctccttgcagggtcaacagaaaggcttctccctcatgtncactgagccatcctgcatcccaaagtagactctctcagccatgtggatgaataggcctgtgttcaccacaccngg

SEQ ID NO: 609653 - DNA, 4110 bp, Homo sapiens
gagcggacgcggccgtcgggcgggttaagagcgtgctagcggtagtgccgctcgggcctgggtggcggggcaaggtctaggggccggggcaacgacgggaggcgggagcgccgcactgccttggaggcggggcaacgcttggaggcgggaacgcggcacgcgagcgttgggggccctaagcgtcgcgacctgggggcttcggggaggtagccgtggacgtgggcagagcgcgggcctcgtggtgtgcgggcactgtgggccgggcgagccccttcccgcccgtgtggttgacatcatggacatatgtgagtccatcctggagaggaagcggcatgacagcgaaaggtctacttgcagcatcttggagcagacagacatggaagctgtcgaggctcttgtttgtatgagctcctggggtcaaagatcccagaaaggtgacctgttgcggataagacccctcacgcctgtctctgactctggggatgtcaccaccactgtgcatatggatgcagccacacctgaactaccaaaagacttccattctttatcgactctgtgcataactcctcctcagagccctgatctcgtggagccatcgacaaggacacctgtttctccccaagtaacagattccaaagcatgtacagccacggatgttctccagtcctctgccgtagtggccagagctctgagcgggggcgcggagaggggcttgctgggtttggagccagtgcccagctctccctgcagggccaaggggactagcgtgatccgacacactggggagagccctgctgcctgctttcccaccatccagactccagattgccggctttctgacagcagagaaggagaagagcagcttctgggacactttgaaactttgcaggacacacacctcacggacagtttactcagcactaacttggtgtcctgtcagccctgcttgcacaagtctggtggcctgctgctcactgacaaaggccagcaggcagggtggcctggtgcagttcagacttgctcaccaaagaattatgaaaatgacctgcccaggaaaaccacccctctgatttctgtctctgtccctgctccccctgtcctttgccagatgatccctgtgactggacaaagtagcatgttaccagcttttttgaagccccctccccagttgtctgtggggactgtgagacccatcctagctcaggctgctccagcgcctcaacctgtgttcgtgggacctgctgtgcctcagggagctgtgatgttggtcctgccccagggagccctccctccgcctgccccctgtgcagccaatgtcatggctgccgggaataccaagttgttgccccttgcccctgctccagtgttcatcacctctagccaaaactgtgtccctcaggtagacttttcccgaaggaggaactatgtttgcagcttcccaggttgccggaagacctacttcaaaagttcccaccttaaggcccatcttcgcactcacacaggggagaagcctttcaactgcagctgggatggctgtgataaaaagtttgctcgttcggatgagctgtcacgccaccgcagaactcacacaggggagaagaagtttgtgtgcccggtgtgtgaccgacgtttcatgcgcagtgaccacctgacgaagcatgcccggcgccacatgacgaccaagaagatcccaggctggcaggcagaggttggcaagctgaacagaatcgcctctgcagagagcccggggagcccactggtgagcatgccagcctctgcctgaaaggtccattaggacatcactcatgggatttttaaaaagcctctttccaggaatggaactgatggattcctctcccactgcctcacccaaaaaaaacggtcttggcggcctaggggaagatcggggagctggttttgatgaaagtatgttaacttttcttttccacttgggaccctgttcagtatcttttgtagtttcagaagtttttttgttttggttttttttttttaaagaaatggtagaaaatttgataatctgaatcaccagcattcaaacaaatatttcggcaataaagtttacaaaatctggatttttacaaccttttctattgatgttttgtagaaataagacagggtactaatttttatactggtttttagaaaaatatttatattgttggtgctcaaatcaccaatttctagctagatcattttgcagccttcttttcagtgtttaataacaaagtttttcctaatggcccttcttttagtaaactggacatgttattccactacaaaaaccacaagttatctggccttttagatctttttggaatcggacctggttgagtaaggacctcttaaaagggaaaaataaattttgccgtcagcttcttcataacgttttcaaggaaattctaggcaatcattcctgtcaccaaagaactaaaattttggttgactggaactagtgagctgtgtccatggtgtgtcatgaaggatgtaccccagagagtaacatgagccactgggcagatcccagggaccagtacttgctgcaggatctagtctgtaatagtcttggccatggctctgctgaaagcaagccattcagtttcttgtttgtacctaaaacaccaaaaaagaaacactcaaatccagctgctttgtcaattgtcagttctgactccttttgctgtggccttatccgtactatattgtgggtagagtaacttctcagaaaaaaaggaaatgtctgtattggttggatgaaactccaccagagcacagcttagctggggcgagatgcatgtgaaggcaggcagtgccaagattccgcttcctttgtttgccaaatactagaaacacaaggaaatgcaagttacgctaaatggcagtaatactacccaactgcctttctgttcattttgtttgaaggaaattgttttgaccaaacagaaaattacttggaatggtgtgttttacagtctacctagaaaatagatggacaatatttttcaactgtatgagcacgtagataaccgagagaatgtggccacctgtgttcaagaagccactgatactggtttttgttaaacattggaagttcaggcaatggaataaatgtaggaacatacagaatgttgcactaatttggtagcctgggaattttttttattgtgcagtatgtatttaaattttgtctatgttaattaccagcatttacctttatttaaatgatggtaaggtggaatattgaataaaattaggttttgtgttttgttctttgtagtctgataaaatctccacctggtcattcattgtgtgtgacttgatacccgttaacttgccccttagtatcagctgttacttgacacaaatgtgtgtgttattcagaggttttcagtctggacactccataggtgagtgtcgtgtcttcgtgagacagcacagttgtctcatgttgtgcatagttcatgtttcctcaccacccagtcctttctcctgctcatcaaaatcagcatacacatttttgactgtacacactataaatggcatcaaatttggatatttttcttaattatgacatgcaaagtaatgtgagtcctgccagtattctggtggataaggtcttctgagtatttggttgcttgtcacaacattctccaagcagtgatatttctaaagaggagatacatgttgaaaacggttttaatttacacttccatttcctgattacatttggaaatactttgtgtaaaccatcccccttccacctccatttgtctgttgaaagattttaagttggaaacagttcctgtctgaaaactcttctgagaaccacaaaccttgtgtatggattcggcatggagccctcagctggcggctctgggtgctgacggccgctggagaggtgggctcccctcgtgcactttattgcctgggcagttttgcttgatcttttgtgactttgagccttttaagtagtttgaatgataagacttaaaatgtttcataattatgttttatgtaacagactttgacattatttaaacgagcatgtgtaatgtaacttttctctttgaatcatataaaacttgattttac

SEQ ID NO: 609654 - DNA, 115 bp, Homo sapiens
  misc_feature (35)..(35): n is a, c, g, or t
  misc_feature (77)..(77): n is a, c, g, or t
gacatgcgcaggcaggtgatggcggcgctggtcgnatccggggctttggagcagggcggacgaaaaggcccgtggcngagggggtgtccctcggggccgcggggtctttcagttt

SEQ ID NO: 609655 - DNA, 3775 bp, Homo sapiens
  misc_feature (23)..(23): n is a, c, g, or t
  misc_feature (31)..(31): n is a, c, g, or t
aaaatgagaggtaggtacagagnacttcccnttacatcctgccccacacatacatagcctcctgcaccgggtgtgttcatgcagcctgaaacccacggggatgtgaaaacagggttaactgagtgtctagatgattctgtgtaaaggtatggggagcatggtgatgaattaaatcccttttaaaatttaaagcaaccttttaacatggtacttttttttagtgcataactcctcctcagagccctgatctcgtggagccatcgacaaggacacctgtttctccccaagtaacagattccaaagcatgtacagccacggatgttctccagtcctctgccgtagtggccagagctctgagcgggggcgcggagaggggcttgctgggtttggagccagtgcccagctctccctgcagggccaaggggactagcgtgatccgacacactggggagagccctgctgcctgctttcccaccatccagactccagattgccggctttctgacagcagagaaggagaagagcagcttctgggacactttgaaactttgcaggacacacacctcacggacagtttactcagcactaacttggtgtcctgtcagccctgcttgcacaagtctggtggcctgctgctcactgacaaaggccagcaggcagggtggcctggtgcagttcagacttgctcaccaaagaattatgaaaatgacctgcccaggaaaaccacccctctgatttctgtctctgtccctgctccccctgtcctttgccagatgatccctgtgactggacaaagtagcatgttaccagcttttttgaagccccctccccagttgtctgtggggactgtgagacccatcctagctcaggctgctccagcgcctcaacctgtgttcgtgggacctgctgtgcctcagggagctgtgatgttggtcctgccccagggagccctccctccgcctgccccctgtgcagccaatgtcatggctgccgggaataccaagttgttgccccttgcccctgctccagtgttcatcacctctagccaaaactgtgtccctcaggtagacttttcccgaaggaggaactatgtttgcagcttcccaggttgccggaagacctacttcaaaagttcccaccttaaggcccatcttcgcactcacacaggggagaagcctttcaactgcagctgggatggctgtgataaaaagtttgctcgttcggatgagctgtcacgccaccgcagaactcacacaggggagaagaagtttgtgtgcccggtgtgtgaccgacgtttcatgcgcagtgaccacctgacgaagcatgcccggcgccacatgacgaccaagaagatcccaggctggcaggcagaggttggcaagctgaacagaatcgcctctgcagagagcccggggagcccactggtgagcatgccagcctctgcctgaaaggtccattaggacatcactcatgggatttttaaaaagcctctttccaggaatggaactgatggattcctctcccactgcctcacccaaaaaaaacggtcttggcggcctaggggaagatcggggagctggttttgatgaaagtatgttaacttttcttttccacttgggaccctgttcagtatcttttgtagtttcagaagtttttttgttttggttttttttttttaaagaaatggtagaaaatttgataatctgaatcaccagcattcaaacaaatatttcggcaataaagtttacaaaatctggatttttacaaccttttctattgatgttttgtagaaataagacagggtactaatttttatactggtttttagaaaaatatttatattgttggtgctcaaatcaccaatttctagctagatcattttgcagccttcttttcagtgtttaataacaaagtttttcctaatggcccttcttttagtaaactggacatgttattccactacaaaaaccacaagttatctggccttttagatctttttggaatcggacctggttgagtaaggacctcttaaaagggaaaaataaattttgccgtcagcttcttcataacgttttcaaggaaattctaggcaatcattcctgtcaccaaagaactaaaattttggttgactggaactagtgagctgtgtccatggtgtgtcatgaaggatgtaccccagagagtaacatgagccactgggcagatcccagggaccagtacttgctgcaggatctagtctgtaatagtcttggccatggctctgctgaaagcaagccattcagtttcttgtttgtacctaaaacaccaaaaaagaaacactcaaatccagctgctttgtcaattgtcagttctgactccttttgctgtggccttatccgtactatattgtgggtagagtaacttctcagaaaaaaaggaaatgtctgtattggttggatgaaactccaccagagcacagcttagctggggcgagatgcatgtgaaggcaggcagtgccaagattccgcttcctttgtttgccaaatactagaaacacaaggaaatgcaagttacgctaaatggcagtaatactacccaactgcctttctgttcattttgtttgaaggaaattgttttgaccaaacagaaaattacttggaatggtgtgttttacagtctacctagaaaatagatggacaatatttttcaactgtatgagcacgtagataaccgagagaatgtggccacctgtgttcaagaagccactgatactggtttttgttaaacattggaagttcaggcaatggaataaatgtaggaacatacagaatgttgcactaatttggtagcctgggaattttttttattgtgcagtatgtatttaaattttgtctatgttaattaccagcatttacctttatttaaatgatggtaaggtggaatattgaataaaattaggttttgtgttttgttctttgtagtctgataaaatctccacctggtcattcattgtgtgtgacttgatacccgttaacttgccccttagtatcagctgttacttgacacaaatgtgtgtgttattcagaggttttcagtctggacactccataggtgagtgtcgtgtcttcgtgagacagcacagttgtctcatgttgtgcatagttcatgtttcctcaccacccagtcctttctcctgctcatcaaaatcagcatacacatttttgactgtacacactataaatggcatcaaatttggatatttttcttaattatgacatgcaaagtaatgtgagtcctgccagtattctggtggataaggtcttctgagtatttggttgcttgtcacaacattctccaagcagtgatatttctaaagaggagatacatgttgaaaacggttttaatttacacttccatttcctgattacatttggaaatactttgtgtaaaccatcccccttccacctccatttgtctgttgaaagattttaagttggaaacagttcctgtctgaaaactcttctgagaaccacaaaccttgtgtatggattcggcatggagccctcagctggcggctctgggtgctgacggccgctggagaggtgggctcccctcgtgcactttattgcctgggcagttttgcttgatcttttgtgactttgagccttttaagtagtttgaatgataagacttaaaatgtttcataattatgttttatgtaacagactttgacattatttaaacgagcatgtgtaatgtaacttttctctttgaatcatataaaacttgattttac

SEQ ID NO: 609656 - DNA, 2975 bp, Homo sapiens
agattgggttttactttgttgcccaggctagtctggaactcctgtgctcaactgattgtctccagcctcccaaagtgctgcgattataggtttgagccgctgtacttgtacttcgcctgatttatttttaaatatattttgaaagattagcttgaaatctttgggtgctaacatagctgcatcttaagtgtgggaggaataaatgccttttggaggatttcttgacccaaatcatccaattccagagtaataagataccactttcttctgagtttgatgaacacgattttaaaatgacatgaattaccccttgaataaggtgcttagcgtttcctttctctttaatatgtattttctcacctcacaggggagaagcctttcaactgcagctgggatggctgtgataaaaagtttgctcgttcggatgagctgtcacgccaccgcagaactcacacaggggagaagaagtttgtgtgcccggtgtgtgaccgacgtttcatgcgcagtgaccacctgacgaagcatgcccggcgccacatgacgaccaagaagatcccaggctggcaggcagaggttggcaagctgaacagaatcgcctctgcagagagcccggggagcccactggtgagcatgccagcctctgcctgaaaggtccattaggacatcactcatgggatttttaaaaagcctctttccaggaatggaactgatggattcctctcccactgcctcacccaaaaaaaacggtcttggcggcctaggggaagatcggggagctggttttgatgaaagtatgttaacttttcttttccacttgggaccctgttcagtatcttttgtagtttcagaagtttttttgttttggttttttttttttaaagaaatggtagaaaatttgataatctgaatcaccagcattcaaacaaatatttcggcaataaagtttacaaaatctggatttttacaaccttttctattgatgttttgtagaaataagacagggtactaatttttatactggtttttagaaaaatatttatattgttggtgctcaaatcaccaatttctagctagatcattttgcagccttcttttcagtgtttaataacaaagtttttcctaatggcccttcttttagtaaactggacatgttattccactacaaaaaccacaagttatctggccttttagatctttttggaatcggacctggttgagtaaggacctcttaaaagggaaaaataaattttgccgtcagcttcttcataacgttttcaaggaaattctaggcaatcattcctgtcaccaaagaactaaaattttggttgactggaactagtgagctgtgtccatggtgtgtcatgaaggatgtaccccagagagtaacatgagccactgggcagatcccagggaccagtacttgctgcaggatctagtctgtaatagtcttggccatggctctgctgaaagcaagccattcagtttcttgtttgtacctaaaacaccaaaaaagaaacactcaaatccagctgctttgtcaattgtcagttctgactccttttgctgtggccttatccgtactatattgtgggtagagtaacttctcagaaaaaaaggaaatgtctgtattggttggatgaaactccaccagagcacagcttagctggggcgagatgcatgtgaaggcaggcagtgccaagattccgcttcctttgtttgccaaatactagaaacacaaggaaatgcaagttacgctaaatggcagtaatactacccaactgcctttctgttcattttgtttgaaggaaattgttttgaccaaacagaaaattacttggaatggtgtgttttacagtctacctagaaaatagatggacaatatttttcaactgtatgagcacgtagataaccgagagaatgtggccacctgtgttcaagaagccactgatactggtttttgttaaacattggaagttcaggcaatggaataaatgtaggaacatacagaatgttgcactaatttggtagcctgggaattttttttattgtgcagtatgtatttaaattttgtctatgttaattaccagcatttacctttatttaaatgatggtaaggtggaatattgaataaaattaggttttgtgttttgttctttgtagtctgataaaatctccacctggtcattcattgtgtgtgacttgatacccgttaacttgccccttagtatcagctgttacttgacacaaatgtgtgtgttattcagaggttttcagtctggacactccataggtgagtgtcgtgtcttcgtgagacagcacagttgtctcatgttgtgcatagttcatgtttcctcaccacccagtcctttctcctgctcatcaaaatcagcatacacatttttgactgtacacactataaatggcatcaaatttggatatttttcttaattatgacatgcaaagtaatgtgagtcctgccagtattctggtggataaggtcttctgagtatttggttgcttgtcacaacattctccaagcagtgatatttctaaagaggagatacatgttgaaaacggttttaatttacacttccatttcctgattacatttggaaatactttgtgtaaaccatcccccttccacctccatttgtctgttgaaagattttaagttggaaacagttcctgtctgaaaactcttctgagaaccacaaaccttgtgtatggattcggcatggagccctcagctggcggctctgggtgctgacggccgctggagaggtgggctcccctcgtgcactttattgcctgggcagttttgcttgatcttttgtgactttgagccttttaagtagtttgaatgataagacttaaaatgtttcataattatgttttatgtaacagactttgacattatttaaacgagcatgtgtaatgtaacttttctctttgaatcatataaaacttgattttac

SEQ ID NO: 609657 - DNA, 4100 bp, Homo sapiens
ggggcgggcgaggcgcgtgccggccgcaggagctccgggttgccgccgccgccgccgcccgcagcccacgtgcggccgctgctgcacccgagctcacgccccgcggccgctttgttgctcccggccggcctgcacgatgcacacgccggacttcgcaggcccagacgacgcgcgcgcagttgacatcatggacatatgtgagtccatcctggagaggaagcggcatgacagcgaaaggtctacttgcagcatcttggagcagacagacatggaagctgtcgaggctcttgtttgtatgagctcctggggtcaaagatcccagaaaggtgacctgttgcggataagacccctcacgcctgtctctgactctggggatgtcaccaccactgtgcatatggatgcagccacacctgaactaccaaaagacttccattctttatcgactctgtgcataactcctcctcagagccctgatctcgtggagccatcgacaaggacacctgtttctccccaagtaacagattccaaagcatgtacagccacggatgttctccagtcctctgccgtagtggccagagctctgagcgggggcgcggagaggggcttgctgggtttggagccagtgcccagctctccctgcagggccaaggggactagcgtgatccgacacactggggagagccctgctgcctgctttcccaccatccagactccagattgccggctttctgacagcagagaaggagaagagcagcttctgggacactttgaaactttgcaggacacacacctcacggacagtttactcagcactaacttggtgtcctgtcagccctgcttgcacaagtctggtggcctgctgctcactgacaaaggccagcaggcagggtggcctggtgcagttcagacttgctcaccaaagaattatgaaaatgacctgcccaggaaaaccacccctctgatttctgtctctgtccctgctccccctgtcctttgccagatgatccctgtgactggacaaagtagcatgttaccagcttttttgaagccccctccccagttgtctgtggggactgtgagacccatcctagctcaggctgctccagcgcctcaacctgtgttcgtgggacctgctgtgcctcagggagctgtgatgttggtcctgccccagggagccctccctccgcctgccccctgtgcagccaatgtcatggctgccgggaataccaagttgttgccccttgcccctgctccagtgttcatcacctctagccaaaactgtgtccctcaggtagacttttcccgaaggaggaactatgtttgcagcttcccaggttgccggaagacctacttcaaaagttcccaccttaaggcccatcttcgcactcacacaggggagaagcctttcaactgcagctgggatggctgtgataaaaagtttgctcgttcggatgagctgtcacgccaccgcagaactcacacaggggagaagaagtttgtgtgcccggtgtgtgaccgacgtttcatgcgcagtgaccacctgacgaagcatgcccggcgccacatgacgaccaagaagatcccaggctggcaggcagaggttggcaagctgaacagaatcgcctctgcagagagcccggggagcccactggtgagcatgccagcctctgcctgaaaggtccattaggacatcactcatgggatttttaaaaagcctctttccaggaatggaactgatggattcctctcccactgcctcacccaaaaaaaacggtcttggcggcctaggggaagatcggggagctggttttgatgaaagtatgttaacttttcttttccacttgggaccctgttcagtatcttttgtagtttcagaagtttttttgttttggttttttttttttaaagaaatggtagaaaatttgataatctgaatcaccagcattcaaacaaatatttcggcaataaagtttacaaaatctggatttttacaaccttttctattgatgttttgtagaaataagacagggtactaatttttatactggtttttagaaaaatatttatattgttggtgctcaaatcaccaatttctagctagatcattttgcagccttcttttcagtgtttaataacaaagtttttcctaatggcccttcttttagtaaactggacatgttattccactacaaaaaccacaagttatctggccttttagatctttttggaatcggacctggttgagtaaggacctcttaaaagggaaaaataaattttgccgtcagcttcttcataacgttttcaaggaaattctaggcaatcattcctgtcaccaaagaactaaaattttggttgactggaactagtgagctgtgtccatggtgtgtcatgaaggatgtaccccagagagtaacatgagccactgggcagatcccagggaccagtacttgctgcaggatctagtctgtaatagtcttggccatggctctgctgaaagcaagccattcagtttcttgtttgtacctaaaacaccaaaaaagaaacactcaaatccagctgctttgtcaattgtcagttctgactccttttgctgtggccttatccgtactatattgtgggtagagtaacttctcagaaaaaaaggaaatgtctgtattggttggatgaaactccaccagagcacagcttagctggggcgagatgcatgtgaaggcaggcagtgccaagattccgcttcctttgtttgccaaatactagaaacacaaggaaatgcaagttacgctaaatggcagtaatactacccaactgcctttctgttcattttgtttgaaggaaattgttttgaccaaacagaaaattacttggaatggtgtgttttacagtctacctagaaaatagatggacaatatttttcaactgtatgagcacgtagataaccgagagaatgtggccacctgtgttcaagaagccactgatactggtttttgttaaacattggaagttcaggcaatggaataaatgtaggaacatacagaatgttgcactaatttggtagcctgggaattttttttattgtgcagtatgtatttaaattttgtctatgttaattaccagcatttacctttatttaaatgatggtaaggtggaatattgaataaaattaggttttgtgttttgttctttgtagtctgataaaatctccacctggtcattcattgtgtgtgacttgatacccgttaacttgccccttagtatcagctgttacttgacacaaatgtgtgtgttattcagaggttttcagtctggacactccataggtgagtgtcgtgtcttcgtgagacagcacagttgtctcatgttgtgcatagttcatgtttcctcaccacccagtcctttctcctgctcatcaaaatcagcatacacatttttgactgtacacactataaatggcatcaaatttggatatttttcttaattatgacatgcaaagtaatgtgagtcctgccagtattctggtggataaggtcttctgagtatttggttgcttgtcacaacattctccaagcagtgatatttctaaagaggagatacatgttgaaaacggttttaatttacacttccatttcctgattacatttggaaatactttgtgtaaaccatcccccttccacctccatttgtctgttgaaagattttaagttggaaacagttcctgtctgaaaactcttctgagaaccacaaaccttgtgtatggattcggcatggagccctcagctggcggctctgggtgctgacggccgctggagaggtgggctcccctcgtgcactttattgcctgggcagttttgcttgatcttttgtgactttgagccttttaagtagtttgaatgataagacttaaaatgtttcataattatgttttatgtaacagactttgacattatttaaacgagcatgtgtaatgtaacttttctctttgaatcatataaaacttgattttacattggatgtgtgtcctgtgtcatttaactgtacctggtggcctaagtatacctagagactttttggaagaatctataaaattcattgtgtattggctc

SEQ ID NO: 609658 - DNA, 299 bp, Homo sapiens
ccggcatggtgtggtgttatgtgtcttttatagataattatccacgagtcaaatgcaaccggtctcatacaatatggtggtcgaatcgaccttcaaatcgtaattataccaataatgctataatttttgttcgagttataagtttgtgaaattgaaaagatagaagtgatctcttggagaaaatgaacgttttttttggtttagggagccatcagctaaagatgcatgtagcgaaaaatcgtgttttcggctaccctcccatgaccgggcataacaccacacaattccgggtaccgagc

SEQ ID NO: 609659 - DNA, 226 bp, Homo sapiens
gcattcgaaaaactgttttctgtgaaattggattgtttacaatcgaaggagaagttggacccagggtcccattcattcgttttgcgtggagtttctgtgattctctttggggttgtttattcctagtcttattggccaattcctcctccgcatcgaatcttgaccagatcgagtttgaccatttcctgttatgacttctaatctcaaacatcacctcgcgaaacac

SEQ ID NO: 609660 - DNA, 370 bp, Homo sapiens
ttggccacttgtctctaggctatgggacaatcatcccattcaccacttgacatccttggcattcttgactttcattcccccaaccttcagcaggttgggcccaatcctctttacctatgagttttcttctagaagaagcaatttgggtctgagaggagcattttgctggaaggccatcttttaaggcccctgcttgctgtcataacgcagagcagaaacttgcacactatttaaaggagctcctttccacctttcttcccaagcttgataccttacttctgctatgggcatggctgggaaggccccaccagctcccggttttggtgtttcggcaaccacttccggggacttgtgactggagattcttaac

SEQ ID NO: 609661 - DNA, 402 bp, Homo sapiens
  misc_feature (92)..(92): n is a, c, g, or t
cttcttcatccatggattcaactaaccttgatggaaaatattttttacacaatacaacatggcacaggcatggtgcctacatgcctgttaantcactgcctcaacctcccaaagggctgggattacaggcatgaggcaccatgcctgtaatcccagccctttgggaggttgaggcaggtggaccatttgatgttaggagtttgtagccagcctggccaatatgatgaaacctgtctgtactggaatacaaagattggccggtgtggtggtgcgcctgtaatcccagctacacttgggaggctgaggcaggagaatctcttgagcctgcaagacagaggttgcagtgagccgagagcgcatcactgcactccagcctgggtgtctcaaaaagatcctgtctca

SEQ ID NO: 609662 - DNA, 956 bp, Homo sapiens
aacagtgtatagcttgaaatctaggattactagcaggaacggagcactttacagcaactgagggatttatacatgaaaaatggacaaggattatgcattagtttattccatcacagcacagtccacatttaacgcataatacaagcacctgcagcagcaacagcattctatcgcagttaacagcacactagcatgatgtctccacatgcattcgtgcttggtcacatacagtgtgcacttggccagcatgaacagcagtcgtcagcggacaggcaacaaggtccagacatctcagccaagcaccaatggcaacaactagtgccatttcttcagcacatcttcctgccacaaatcaaacacatacacatgtataatagcagcatcttctttcatgaccctagtgcggcaccatttacacagacacaaactaccaggtagccctagggccacacgggctccgcaagacaacagctacaatcaatggtacacaggctaggctaaaaaatcttacgtaacactgcatcaggcaggcatctagagcccagggacagcaacagcaacccggaggcccacaaatccaacaggagcccaggccaatttcccacaccttgcgtagtcacaaacctaacgccaatccatacctttacaactaggaccttattccctggtggacatgggtaccccttttcaagacgggcgcgtatgaccgagctacttatactcaggtacggaacgatgactaataacatgttcaggtattcacacagcgcagacatactcacctcaatcatagctcgcaccctacaacctcaggcgaatgggtaaaagaagaagggcatccatccaagaacgtacactggaaaaaaacactcggcacccacccacggtagaaacctgactaaaaacggagaacggcacaccaaaacatggcccccaactgcggatggcgaccaccc

SEQ ID NO: 609663 - DNA, 306 bp, Homo sapiens
ggatcgacggcatggtggtgcatacctgtggtcccagctactagggaggctgaggcaggagaatcacttgaacctgggaggcggaggttgcagtgagccaagatcgtgctactgcactccagcctgggcaacagagcgagactctgtcaaaaaaaaaaaaaaaaaatggaaatcggctgggcatggtggttcactcctttaattccaattccatcactttgggaggccgaggcaggtggatcacttgaggtcaggagttcgagaccagcctggccaacatggcgaaaaccagcctctactaaaaat

SEQ ID NO: 609664 - DNA, 1061 bp, Homo sapiens
cgcccgccatcacgcccagctaattttctgtattttttagtagagacggggtttcaccatgttagccaggatggtttcgatctcctgaccttgtggtcctgccaccttggactcccaaagtgctgggattacaggcataagccactgcgcctggacctatccttccttcttgagtgaagactgaaggctattggatttaccttcggtgatatatgctctcgactagtgatcccacgacagtcctgcacatgcagttcagtatcttcgagatgcatatgaactgtattacttctcgtcttccaaattagagaaaatggtgaggttctccagctacctggtgtggccccaagggttgggaaagtgagcacgtaagagtggagagattctacagaagactccacttgtgcgcaactctttctgggcgctaccataaaagggtccgagagtgagataactgccttgcgaccatcacaaagtgtctatccctatatcccgagaatatacacgcgtgggggcacccataccggggagggcccaacaggttgaccaccacagaccgaagaggtctgccagagggcaataaccatctcttcaacagcagctaatattctcgcacaagcgggagaggacagaacagggggcgatactaagtggccacgaagtcggccgatgcgcaccaaacaaggagagtggagacatatcgagccaccgaggggggaaagccattcccgtgggagcaccccaaaaagggaggtacgaccacccgcgggaaccaccccggcacaaacaatgaaggagacccctacacagcagaaaacaagagaagacacattagggacacatctacacccacagggcgacggcgacaagaacaaccccaagcacacacaccacagacgcccgagagacagagacgcccccaacacgataaacaacgaacgaggcgcagaagacgcaacaccacatggagcgcgggagcaaacctgagcaaaaaccacacaaccatagagaaggaagcgcacccaagcgacaaagagagctcacggagagacacaaccaaa

SEQ ID NO: 609665 - DNA, 110 bp, Homo sapiens
tacagtggcctgtctatatatattctttacagcatgtacctaactatatactaagttataaccaaatgacttcagaatacacgaggacatcaagatgatacaaagtagtg

SEQ ID NO: 609666 - DNA, 469 bp, Homo sapiens
  misc_feature (469)..(469): n is a, c, g, or t
attacactcttgtatccaaagctggagagtgttcacttgacctgggaccacagtatcctacggctaaaggccacaagcgagtttccttcctaagcctaacgtgttgttggggatacagccatgctccaccaagctggataactttgcattgtgaggaaagagggggtttcttcctgatgaaaaagctgatcgtgacctcctgacctaatgtgaccagcccgactcttcctcccaaagtgctagaactaacagacgagagcaaccgggccctggcggaatgaacattcacatgattttctactgtcacgtacatatcaaaggtgcttgatatggaccacttaatcgtatcatcttttgcaagatacacccaaaacagactcagtgagagtactatacgataaaattacaccaaacacagcggacccaatggtatgacatgagccgatgtaggacattgaagaccacccan

SEQ ID NO: 609667 - DNA, 142 bp, Homo sapiens
tctgcatttcagtcccacagctcatcagctctcttcatctgtttttatactattttctccccacccccagctatcccatagtgtgtgctgcagagttatatgccccaaacatggtcatgctccaataaaaatgattctacct

SEQ ID NO: 609668 - DNA, 283 bp, Homo sapiens
ccgaggacccatctcgtgacggcgacttatccgcctgctggcctctccacgtgcgggattacacggcgtgagccatcgcgctcggcctgtctgtcattttaacattatatctctcagcactggactactgccacagactggtcacatgctaaataaatatttgtagaatgaatgaataagccttgaagatggacttttactttggacaagtctggtatcgttttgcaactccacacagtgttgtacttttttttaactacccatactcgccggtcaccgagat

SEQ ID NO: 609669 - DNA, 604 bp, Homo sapiens
aaaggagtgcggcgaggtctcattgcgctcccgaacagacctgacgtagatccgaagtggccctgtgccatctcaactatgaggtggacacccgtagtgcggcgtggagagtggacgccgctgaggagccaataaatgctcctgcaaccgtgaagtgtcttctgggagtgggtctgtacccggaagtgtggcagctccctgggccgcaccctggaagtgtgatgccacctgacgctacggggaagtaatggtatccggccaatttgagattcggagttaacaacatgggatgtgcagatggacggtcgcgacggagacactgctgtcccggacccctggggtgcgctggagtgacttggagtgacaactgcaggtacccaggtgatggaagctaagagacacgtggaggaggtacaccgcggaaccccagacacggaattcgccgaacggaaccgaagcggggccctagtgaagggaacacgaggtggacgtcccaaaaggaaccaaagggaacccaaggcgcatccacgaaggccgcaatcgacgcgaggcagaccccaagcatcgagaagagccacatgggacaagaggccgaccctccatc

SEQ ID NO: 609670 - DNA, 107 bp, Homo sapiens
aacccgtctctactagaatactacaaactagcttggcgtgatggcgcgcacctatagtcccagctactacaagcagctgaggcagcggaatcgctatgaaccccgga

SEQ ID NO: 609671 - DNA, 228 bp, Homo sapiens
  misc_feature (43)..(43): n is a, c, g, or t
  misc_feature (45)..(45): n is a, c, g, or t
  misc_feature (200)..(200): n is a, c, g, or t
  misc_feature (205)..(205): n is a, c, g, or t
gggcgtggtggtgggcacctgtagtcccagctactcgggaggntnaggcaggagaattgctcggacccaggaggcagaggggcggaggttgcagtgagccgagattgtgccactgcatttcagcctgagaggcagaacaagactctgtctcaataaacaaacaaacaaacaaactgtccaggtgtggtggcacagccctntagtngacgctaataaagaagctgaggt

SEQ ID NO: 609672 - DNA, 437 bp, Homo sapiens
  misc_feature (14)..(14): n is a, c, g, or t
  misc_feature (76)..(76): n is a, c, g, or t
  misc_feature (161)..(161): n is a, c, g, or t
  misc_feature (164)..(164): n is a, c, g, or t
  misc_feature (171)..(172): n is a, c, g, or t
  misc_feature (174)..(174): n is a, c, g, or t
  misc_feature (182)..(182): n is a, c, g, or t
  misc_feature (192)..(192): n is a, c, g, or t
  misc_feature (194)..(194): n is a, c, g, or t
  misc_feature (202)..(202): n is a, c, g, or t
  misc_feature (221)..(221): n is a, c, g, or t
  misc_feature (225)..(225): n is a, c, g, or t
  misc_feature (277)..(277): n is a, c, g, or t
  misc_feature (293)..(293): n is a, c, g, or t
  misc_feature (297)..(297): n is a, c, g, or t
  misc_feature (299)..(299): n is a, c, g, or t
  misc_feature (380)..(380): n is a, c, g, or t
tcacccccggttanctttgtgtattttgtcattaagacttacattatgtttgggtcaaacaaaaaacccaaagagnttttataaaagtttacaaccattaaacagtattgtttaatcccacaaatggataaagcaaactactatagctcaacaatacacanacnaggtctnnanatagtcantctatgtttntngctagctnccatacaatagatattgantatnctgagtctttacaaaggcattggctattttagacgagcaggttccagaaatncacttgtttgtttccnatgngnactaactgtagtgccatttcagttgaagactatgcactcctcagtgtcagacgtgagggtaagcaaactaggggaaggcanaggagggtttggagggtgacctgagcgggctctttggacagctcagcattactttct

SEQ ID NO: 609673 - DNA, 259 bp, Homo sapiens
gatgcttacggtatgtgctaccaaataggggggtgaacaacaaagaaagattaccacagatgacacgaataattttatttttggcattttcccatttaatataatctgggatacgagagtaaatacggaatttctctctcttattcttttacactagagctgatgggtcagatggtggtatcctgaccttccccagatcttcctgtcttgggcccttatacacatgcactgaattcaccaggataaatacttgacagat

SEQ ID NO: 609674 - DNA, 166 bp, Homo sapiens
gcgagtcccgactcaggtaatccaatccgctcagcctcccaaagtgctgggattacagacatgagccaccgcgcccggccatatttttctatacaaaccacatatatgtgtgtgtgtgtgtgtgtgtgtgtgtgtgtgtacactgctcttttaaaaacaacaacac

SEQ ID NO: 609675 - DNA, 242 bp, Homo sapiens
atctaggaatcgtgaggagatctgaggatatctattaagactctcttgagtagactcttggcgtacgatcctgtagagtaaattgaggcgcatgtactggataaactgatattcccactgtgcctagcatactatccagagtaaagcacagactacagggaacgggcttggcggaatcagcggggaaagaagaccctgtttgagcttgactctagtctggcacggtgaagagacatgagagg

SEQ ID NO: 609676 - DNA, 663 bp, Homo sapiens
agaccagaaccgggggccgtgttgtcatccgaccagagagagtacaaagtgggctgcccttcagtgccaagcgggctggagagctagacgtgccgagagctcatgaggatgggaagagattcggtgctgtcctggaggccctggagaaggggcagcccgtggatctgagtgccatgcccccggacctgaggatctgaagccccagcaggcttcctcaggctcccacagcacctcagtcattcccccagccgtggagcgagtgcagcagtgatggcactgacgtcccagacaaccccagtggccatacagagtcacagacagtgctggatgcctgcagagaggctgaacaagtaccggaggcgggacatccaggccggagtggtggggacgagcgcaaggtccggatgcatgagcgcattgccgagcgaatatcaaagatgctattcgagcacagcgagcaaggacggaaagtcacacttggctgacattgcctggttccctccaggattaccccccatcctggcttggattccactatgggtgtggacggaggacgcagtgggcgaggacatttggcggtggcagaagaaaatggcctctgcagaggattcagaccggctgctcacgacgaggacgcgggtagcccccagcaaggccacagtg

SEQ ID NO: 609677 - DNA, 579 bp, Homo sapiens
  misc_feature (81)..(81): n is a, c, g, or t
  misc_feature (566)..(566): n is a, c, g, or t
tagccaggatggtctcgatctcctgacctcatgatccgcctgcctcggctcccaaagtgctgggattacaggcgtgcaccnacgcccggccccaaagttctaaagtaacattctattgctaaagaaatcctaacctactatgtaacatttttctcttagttaaaaatgtgaacttattattaacctcaattttttagaggcctccaatctttttaaaatataaatatttttgattgacaaatcataattatacacttatgggggtataaacctcaatttttgtaaccctattttggcattttcctgtccttacatctcagcttaaatgctccctcttttgggaggcctttttctgccttcaacatagtagagccttttcccccacccctctgtaacataatgccctgttttatttttactgcttttattttcatgctttgtgggtgtccccactggagtgtaagccctatgggagcaagggctgacctgtgactgttttatctccagggccaacagcagtgttactgtatagtatgtactcaataaatatttgttggctttatctnttattttttaaaa

SEQ ID NO: 609678 - DNA, 851 bp, Homo sapiens
  misc_feature (120)..(120): n is a, c, g, or t
  misc_feature (176)..(176): n is a, c, g, or t
  misc_feature (206)..(206): n is a, c, g, or t
  misc_feature (296)..(296): n is a, c, g, or t
  misc_feature (334)..(334): n is a, c, g, or t
  misc_feature (358)..(358): n is a, c, g, or t
  misc_feature (437)..(437): n is a, c, g, or t
  misc_feature (448)..(448): n is a, c, g, or t
  misc_feature (470)..(470): n is a, c, g, or t
  misc_feature (546)..(546): n is a, c, g, or t
  misc_feature (563)..(563): n is a, c, g, or t
  misc_feature (571)..(571): n is a, c, g, or t
  misc_feature (631)..(631): n is a, c, g, or t
  misc_feature (695)..(695): n is a, c, g, or t
  misc_feature (816)..(816): n is a, c, g, or t
  misc_feature (837)..(837): n is a, c, g, or t
atagcccgggcgcccgcgggccccacggtttgaccgggtcgtggcagccggagtcgtcttcgggacgcgcctgctcttcgcctttcgctgcagtccgtcgatttctttctccaggaaganaaatggcatccgttgcagttgatccacaaccgagtgtggtgactcgggtggtcaanctgcccttggtgagctccacgtatgacctnatgtcctcagcctatctcagtacaaaggaccagtatccctacctgaagtctgtgtgtgagatggcagagaacggtgtgaagaccatcacntccgtggccatgaccagtgctctgcccatcatccagangctagagccgcaaattgcagttgncaatacctatgcctgtaaggggctagacaggattgaggagagactgcctattctgaatcagccatcaactcagattgtngccaatgccanaggcgctgtgactggggcaaangatgctgtgacgactactgtgactggggccaaggattctgtggccagcacgatcacaggggtgatggacaagaccnaaggggcagtgactggnagtgtggngaagaccaagtctgtgaaaaagaagcaaaaaaagttgaaggctcagctccattctactgntcacctgattgaatttgccaggaagaatgtgtatagtgccaatcagaaaattcaggatgctcangataagctctacctctcatgggtagagtggaaaaggacattggatatgatgatactgatgagtccacttgtgctgagcacattgagtcacgtacttttgcaattggcccgcaacctgactnacagcttcagacacgtgccanaccttcttgtccaa

SEQ ID NO: 609679 - DNA, 105 bp, Homo sapiens
gccagcaccaaccagacatctatgtacctctgtgccaccaccgcggcgggaggtccctcgggggacaatgagcagttcttcgggccagggacacggctcaccgtg

SEQ ID NO: 609680 - DNA, 118 bp, Homo sapiens
gcttaggatcataacaggggcgcatgtagggctggtgccggcatgtggtgcataatgcgggccgcctgagtcatctggcggcatgcctgggacaggcccctggacagcccccaccagg

SEQ ID NO: 609681 - DNA, 201 bp, Homo sapiens
  misc_feature (113)..(113): n is a, c, g, or t
atgtggagtgagacatcaacattgatgcagtcgtttaataatgtctgcagaagactagatatatgacctgcaggagatagtagggaaactgtacctggctcctcataaaactncctgccttctatctccgggaggatcgcagggcatttccgccaagacaggtgagactgcggttctgacctgcgggcctcaatgaatatg

SEQ ID NO: 609682 - DNA, 744 bp, Homo sapiens
gcaggttctgagaaacagacaaggctggtttgtggagagagaatgtagaagatgccttggctgaatgcttccttttagttttgtaattctcaggctctttcacttcctaaggtcatgtgtctttctaccttcaggtcctccagacctttgagactctgcacagtatcacactaaagtcccctctcttgggagcttgagttgttctagttgtatttttgttgtttgcaactaaagaactttaacacacttttccttgtgctgagctcagttaaaccaaaaccttatttataccaacaaatgacttaattaagctgagtgggtaacagcatcaagaggaacttggataatcatgggtagctgatagtagttactttaaagcaaaagagaacagtggtgactacacatggagtcgtaaagccccaatctataatctgtgcacatcagactgccagtgtgaagtgctggtgctttatatgagagcagaatcagaagcagttatgccctcagttaatgaacagtgtgaacaaaggaagggggacttttacagcttgcgtggagcagctgagcatttagaggcgaagggagtacacgagagaaaaagttttcacttcaaacacaggaggttttgtagtgcttattattttaggctgacaggctgcctgctttcatgtatcgatatactggctttgtaacacaacacatcatttaccacaatacagttcgatcacaaaaaacaaaacaaca

SEQ ID NO: 609683 - DNA, 1225 bp, Homo sapiens
gcccagacttcaggagatgttctgtctggcgtctcagttgacatgatcctggtgtgcgtcctttgtctgtcagcgtcactctatcgccttggcgagccgacgatcacagcctcatttttatcacattcatgctagtatctagttgggagcagaccagtcagtatagaagaaccagtatctgaagataggctagggagagcgcatggttgtactgtgctaatattgggctgctcagaagtggcaggaagagcgtctggagcccagacttcatactcatgcatgggtaagcttacccttagtaggtcacttatgggggactcttgcgggtataacgatcgatgcgtaaaccaagggaggtccagttcagctgcgatgtgtgtcaaccgcacaccactaaaatagaacatgtccatgtttgatgacgttcagaagagcccttgactttgggtcagccaaatccatatccttgattggccggccatgttcaagctaggaagtccctgttgtgcccacaaggatagtagttgttggagtacagtggagttcaaggatcccctatgcagtcagatgcggcaactgtttaagtgtcacgggttatcgaaaggacaccggaagtacgtgcacaaaaccagtggctagcaccctagctagtaatcaatctcccttggaccgtgtataggaacatgtagggccaccaaacgtacacttgtctcgactcaccttggaagaaagacgtttgtcggcatgcaagaccatggcgacatagttagtcctacttcaaaggcacgttcgcagtactccgttaacacatagttaagagccaggggggaagagcgccccaccttcccgccaatcttggaagcttgaagaaattcccacaaggtttgccgtacaaagggcgttcgccatacagacacttgtccactgggcgtgggctcaagaggacaaccctcttaaccattgcgtggtgccccttgtgagtcttacattatggaaggctacaaattttgtgactctcttggagtaacgactgggagcatctggatcaagagacgcgtaccccccgagggacttggggacccgtaaggcctcggataagggcacacacagggataactggacagcggaaatccttacaggctttgaccggctttgggggcaccacacaattaaggatccctgggacccctaggggagtaggcattgttggtccccccatttggtg

SEQ ID NO: 609684 - DNA, 374 bp, Homo sapiens
catatagtcactccaggtttatggagggttcttctactattagcgaacttttcgcttcgtagcgacggcttctcaaatcatgaatattattaatattactgctgttcgagaaatgaatgagcctacaagataataggatgtttcatgtggctgtcatgcatcgcggatataccgagtaacgtcgaggcattacaggataagccgagaaagtgttgtagggaagaaagtcagatttacgccgatgaatatgatagtagaaatggattaagacgtaagtatgagctcaggtgtaccctgagaatcggggacatcagtgaatgaagactcctctgatggcaaatacagcacctcttgataggacatagtggacataa

SEQ ID NO: 609685 - DNA, 102 bp, Homo sapiens
gggagactagtttaggaggaaacaggagtcggaagcaggaaaagcagttaggacaggctgcttctctagggccactgcgagagtccccctatggtacaatcc

SEQ ID NO: 609686 - DNA, 361 bp, Homo sapiens
cggtccccggcccgccaggccccggaagacgccgcggcgatctgcgagggcggatgccaggggcgggcggggtacggaagcccgaccacggcgcccgtccagcggcctcctgaacacgccaggtgtgagcgggcggtcttggtgccctatgccgtgcaggcctggacgaggatcactccgagctcagtctaggctctctggagcacctacgatggctcacgagcctatgatgagtctctgctgcatgcccgagcactagcgcctttctacaagggctctctgctcaccggcgttgtccgcagtttgtgactggtatgggtacatacagctgaggcccacttgtctgctacttgcttgcctg

SEQ ID NO: 609687 - DNA, 493 bp, Homo sapiens
ggcatccgcgtcaggaactgccatctcggcaggaatgcaaaatgcagcgtccctatgcttgtaggtgtgcaggtcatggtgggcttcacgagtaggaaagggtaagtgcggcccagtgtgcagggagaggaggaaggggtagctgagtccaggaagggggtggagcgtggacatggataatcgggcttcctactggaccatggtatatgatgagtgacccagtgcctccatccctccttctgcctccaccagttcctgtaacccgagatccggacgtgccagttctgcctcggtagaagacccttctgtaggattgcatttcaggctcagagaagtgtaccatcagcagctcatccctgtgcaatggagatcccatctatttatgatgtccaggttcgcctcatcgtacgaggctgtggacagtacataacctaacggtgcaagaaaaacgcaaaactactttgcagagtactggtatcaggcccagtgctgc

SEQ ID NO: 609688 - DNA, 297 bp, Homo sapiens
tgtaccccgctggccacatggcagctgtgtcacgctacctgtacccctcttctgcagacgcatcggggtgaggatctcctcgaacttggggtgcttgtcaaggtgcgccagttcaatgcatgcttccaggcagcccagtgcccagtttgattgggcagttgagcacttagcccagttgctgtttccacatgaagggttggccagctttcttaaagatctcctcaatcttcggcagccctacgcagaaggggggaaaaacctccttcagtgtggccccctcttctccagggagatgac

SEQ ID NO: 609689 - DNA, 364 bp, Homo sapiens
gccacgtcacctgtggtcctgaccccagtcttacaacttctccttccctcaggagcttctacattccacccaacacacactgctgcagcagatccagaccctggtcaatgagtgagatgggtgccgggcgcagtggctcatgcctgtaatcccagcattttgggaggctgaggtgggaggatcgcttgcaacccaggaggtgcgacaatcgcttgaaacccaggaggcgggagttgcagtgagccgagaacatgccactatactccagcctgactggcagagcaaaactccatttcaaaaaaacaacacaacaacgacacaaaactgtggcccttgatgttcaagtcgaccattccagcctctg

SEQ ID NO: 609690 - DNA, 428 bp, Homo sapiens
  misc_feature (50)..(50): n is a, c, g, or t
  misc_feature (72)..(72): n is a, c, g, or t
  misc_feature (332)..(332): n is a, c, g, or t
  misc_feature (370)..(370): n is a, c, g, or t
  misc_feature (378)..(378): n is a, c, g, or t
  misc_feature (415)..(415): n is a, c, g, or t
aggcccagaagcctagtgggtaagaatggttttgggggccaagcctgggncctgctgctctctgtagccttnggacactgctacctgcatctggctgatccagctccacccatggctcaaagtgccccagatacagttcaggccactgccttggaggacacaagctataagacttggtggcttccccatggtgttatgtctgcaggagaacagaatgcaagagtgaaaaaggcttgacagcttccacctaggtttcagagggtgtatgtgttgaaaagcctgagtgcccaggggaaaagcctgccacaagggtcgagctcctacagagagantctactagaacagtgctcatgggaaaatgtgggggttnggagcccntgcacagagttcatcatgggtactgcttgagttgggnttgtgggggaagg

SEQ ID NO: 609691 - DNA, 198 bp, Homo sapiens
gactctagacggatcccagacccagcttatgggcttactccaggtgacgacactgctggggaccatgtgtgcgacggttaccggtctaccaggacaggggacgacagggtgtcaggggacccagccccacaacctaggagaggattcggagggtccagcccttggggcagggaccagccctgaggcttaaatgaactt

SEQ ID NO: 609692 - DNA, 671 bp, Homo sapiens
  misc_feature (1)..(1): n is a, c, g, or t
  misc_feature (123)..(123): n is a, c, g, or t
  misc_feature (171)..(171): n is a, c, g, or t
  misc_feature (190)..(190): n is a, c, g, or t
  misc_feature (197)..(197): n is a, c, g, or t
  misc_feature (273)..(274): n is a, c, g, or t
  misc_feature (280)..(280): n is a, c, g, or t
  misc_feature (341)..(341): n is a, c, g, or t
  misc_feature (447)..(447): n is a, c, g, or t
  misc_feature (515)..(515): n is a, c, g, or t
  misc_feature (517)..(517): n is a, c, g, or t
  misc_feature (544)..(544): n is a, c, g, or t
  misc_feature (550)..(550): n is a, c, g, or t
  misc_feature (554)..(554): n is a, c, g, or t
  misc_feature (629)..(629): n is a, c, g, or t
naactggtaacttacacactttataatagaacaacaaaaataatgttcaatatatacagccttcgcatggactatctgactatacacaggcagagtgataacacaatctaatcttcatcatantctgtgcacaaaaagacaccaaacagacaacagtgctgcacaatacanggtgaaaatgacaacacanggtccangtgaaaacttcagcataatacaaaattggactgctctattgcaaatgacatctttctaaagtgcccacgcctcctnncctcangtggtatttacccagagtctgaagcagagattggttgtgtggctataagtctcttggagtnagacaaccatctgcagataagtttgctatcccctgcttcaaattacaatgttctctgggtcaagaaactttgtaagccactgtctttcatttcaacaactccagtnttgaaactattctgagttttgccactcagttctttttgatgccagttctccgatttgagagaccaatncnttgaagtgtaggtacattgcacgtganaaaggngtanaaaaagaatgacccttaacttggggactatgcttttcgagttgcgaaatgtcttttagatgtcatgtcaataggntgaggaaagtttttgcgtggcctcaaattcattatcaaaggg

SEQ ID NO: 609693 - DNA, 654 bp, Homo sapiens
tataaaccccggttctggggtgggtgtgggttttatactaagttgaaatgatatcatttacgggggaaaggcgcttggtgtgaaagttaggccttattctctcttgggtcctttctcgtacgaggggaggaaattgtgaagtagaatagaaacacgcgaccgtggaattacctccggctctgaacctcagaatcacgttaggaactttaatcgttgtgaacaaagcgaaaccttataatagcggggtgtgcaccattcgggaattgttccgtgattccaaacatcgaggtcgataaaccctattgtggtggatagtggactctaaaactaggatttgcggctgtttctcccataggggataacttgggtaccgatgaggaccaaagtttagtggggactcaatgtgagatattagatagatacgcattgtgacgtgggtaaaagatcatatagacagtgataccggacactcgcgcagactagaggaagatatacgagagactacccgaagagatacagacccaaaacagcgacaaaaataaagacaaatggccaagggataacgggccacagaaaaaagggcacacatgagagggatacgggaacaaggataaacagtggtaagggcaataaaaaaaacaataaaaagaacac

SEQ ID NO: 609694 - DNA, 524 bp, Homo sapiens
tgacacgccgagcacccacactgcacacgccgaatcgccacactgttttccacaatggttgaagtcagtctgcatatattgaaattgatgtctttagaataatgaattttctaatttatgaatactgtatatcccttcattaatttagcttacctgtactttctcttaatatcattgtgtagttttcagtgtaaagatggcatccttcattagatttatttctaggaagtagacttttaaattatactttggtatcttttaaaatttttgctttccaattgttgctaacataaaaatataatggatttttatatgctgacttagtatacagcatccttgacaaacttccttgttattcctgttagtgtgtctgacttaagcatgttaactgtgaatagtgaccgttttctttatgcctttccaattcttacgcttttcatttatttatttttgccttaaggtactggataggacctctagtacatgttgaatggaagtggtagtagtggtcttcttgcctcatt

SEQ ID NO: 609695 - DNA, 255 bp, Homo sapiens
gggggttgcccggggtaattcccttttttttaagacccgccccgggggggggggtttgggcccccgcaataccgggcccgccccccttcccgtgggggatgccaaattaagcctgggtttagttggaaggggggctttcccccctccccttccttaattttggggttgtgccctttggggtttttttacccccttgttttgggccccttttaaatttccggggggcttttaaattaaattctttttttgggccca

SEQ ID NO: 609696 - DNA, 348 bp, Homo sapiens
tcaaagtatgggagtttcaccacacagtttctgggacacaaaactaacgggaattctactagttgtgatcagtccttaggctctcctggacagactatctctcacagtgtcctattctcatgttgaggaccttgaagtccccttgttttaaaattttattccgaaaagttatgtgtgtaggagaaccagcttaatatgtctgtccatgtctgaacttattgcagaaattgaaaagtaccaagaagtggaagaagaccaagacccatcatgccccaggtaactttgagcaattatggatgcttaattctgtgttgacacctggagatgccaggtccagggaaaacaaga

SEQ ID NO: 609697 - DNA, 197 bp, Homo sapiens
tggaattcaccatgtgtccaggatggtcttaactcctaaactcaagtgattgtcccacctcagcctcccacagtgctaggattacaggtgtaagccacagcacccggcccagaatattttaaaataaacttgaagtgggcatttacagtgtttcttggagatataattttactcacagatgttgttattcatgagga

SEQ ID NO: 609698 - DNA, 790 bp, Homo sapiens
cgcagggccggcaccagctgcagagactgcagtctggctgccagtgatctcgcttccactcctcctttctgcagtctgatagttagaaaggcagcgaggaaggaatattcaaacatagacacacccgctgtagtttcctgcttctccgttttcactgagtgttcctgtggtcgtctgcggcctcctttctgtcccccgtgccagtagggctctcacgagatggccggcccatggtctcgagtggtgcgacccagctgttgttcatgagcatcttcagtcctcgtgattgtggtcatctggctgatgttatacgctcttctctgggaggctggcgaacctcactgaccgtgcccaaactgagaatcggcttctataacttctgcctgtggcaatgagcgacagccagtcaccctacagtgtcaccagcttccctgatgctggaagccctgggggtgcctcgggttggcctggtggcctggaccaggcttggctgtgtacgggtccctggtcctcacgcctctttgccccgccagcctctcctcctagcccatctgcaagcatgtgatgagcagagcgtggcggtctggcagtagtggcttcctggctgtgtcctctgtgcgtgctggcaggcggcctgggcctcttcctctcctatgtgtggaagtgggtcacgctctccctcccggggcctgggttgctagctctgggcagcgcccaggcttactcatcctcttgcttatagccatgctgtgtcccctctgaagggctggagggtgagagcaacttgaga

SEQ ID NO: 609699 - DNA, 311 bp, Homo sapiens
ggatttttttacaagatactgaggtaacggggtggtgctccaggaatcattggctcagcctgaagtgaccatcctctacctgagtcgggggacttagatccaggggaactcagagatattgttatgtgtatttcttgaggagaaaccaagaccccatcccaaggctgcaccattgtttcttgactcttcctcctttgtttctgcattccccacctactctgattagcaaatgtttgaatctgccctctggaactcagggaaggtcaaagaggctgaatgaagcccatttcctacaaaccagaaaatagagg

SEQ ID NO: 609700 - DNA, 378 bp, Homo sapiens
ggcggcgctcggcctcgcggctggcgtgccgggcttggcagcggccagcagttggcggcgagctgcgtctgcgcctgcgcggcgggcccgtgcccctcctccccccctgggcgcccccggcggcgtgtgaatggcggcctccagcggtgaggtgcgatgccctctgcgcatgctattgcgggccgtcgtgcccgcctctgtgcagccctgcggcccaggcgcgagtggctcctgctcggcgtgtgaataatgctgcttccgaccgcccgcttctggctcgcagccgtcgtgccctctgcctccacgcctgctggctgtcttcgccccgcggtggaggcggtgcccgattgctgcctgtgagctcgcatgtgatacttg

SEQ ID NO: 609701 - DNA, 664 bp, Homo sapiens
ggaaacagtggttgcctggtctaggactggatgtgccgggtgtggaggtggacaaacaatttaagtgggccatcgggatctggagggggccctcagaattatggaaatggccctggtagcttaggcggtcccccggggttgcaagtggccctcctggtcttgcgaagtgcccctgggcatttgggtgggccaccagcttttgggcctggcccggcccggcccggcctggccaatccatattggtggtccccctggctttgcatctagttctggaaaaccaggaccgacagtaattaaagtgcaaaacatgccctttactggtgtctatgatgagattttagattcttttatggctatcaagtacatcccaggctcagtgtgtccacaatacacgtgccaacaggtatgcccaacaggtgaagccatggtggccttttgagtctcggggatgaagccacagctgctgtcattgacttaggatgacaggcctataggttccacagaaaggtaaaaccttgtatcagggtagcattcacatcatttttataggggtagatcgtgcatattgctgtggcttactggatccagactggtacctagtatttcaggttagaactgtggtttgtttcattgatatggttgcttgcataacgtacatcttggg

SEQ ID NO: 609702 - DNA, 412 bp, Homo sapiens
  misc_feature (277)..(277): n is a, c, g, or t
agctagcaccatgagcttcaataccctgcccccatctgactggaccagtgatgggcacctggagcaaaggcagccagcccaacagggacttatgttgggaatctgaatgagaaatatggaagttccaaagaactggcaataggagtagaagcctaaagcttgcaagatagtaagaggcgtaaagaaccatgatgggccaaagttccaagggcgcaatagctataagaccaggaagccaactgcactgttggtgcaacaccctcaggactttgtgtgngtgtgtgtgtgtcctttttctctccagcttcatcactgatagaagatttcaccagcactcccccaggattgcctattttccagccatcttgttaaaaagttgttccttgtgttaaactaaatttgtctttgaata

SEQ ID NO: 609703 - DNA, 421 bp, Homo sapiens
  misc_feature (104)..(104): n is a, c, g, or t
  misc_feature (187)..(187): n is a, c, g, or t
  misc_feature (196)..(196): n is a, c, g, or t
gtatgcaacggaccatgcaagtacattgcagcgagaatgaccagcgtcaagaatggagctgctgttcacggaggcatgttggatttcggaatgctgaaatcccntcggaggaagagaacaggagcctgaaggctgacctgcagaagctaaaggacgagctggccagcactaagcaaaaactagaganagctgaaanccaggttctggccatgcggaagcagtctgagggcctcaccaaggagtacgaccgcttgctggaggagcacgcaaagctgcaggctgcagtagatggtcccatggacaagaaggaagagtaagggcctccttcctcccctgcctgcagctggcttccacctggcacgtgcctgctgcttcctgagagcccggcctctccctccagtacttctgtttgtgcccttct

SEQ ID NO: 609704 - DNA, 434 bp, Homo sapiens
  misc_feature (299)..(299): n is a, c, g, or t
catcagctcggacctcttattctcttcaggggataggggtccctggtggaaccccatctgactggaccagtgatgggcacctggagcaaaggcagccagcccaacagggacttatgttgggaatctgaatgagaaatatggaagttccaaagaactggcaataggagtagaagcctaaagcttgcaagatagtaagaggcgtaaagaaccatgatgggccaaagttccaagggcgcaatagctataagaccaggaagccaactgcactgttggtgcaacaccctcaggactttgtgtgngtgtgtgtgtgtcctttttctctccagcttcatcactgatagaagatttcaccagcactcccccaggattgcctattttccagccatcttgttaaaaagttgttccttgtgttaaactaaatttgtctttgaata

SEQ ID NO: 609705 - DNA, 878 bp, Homo sapiens
tggtgacgtagccgggcgctgggaccctcagggtcccacgggtattggtggtttctctcagggagccctcggcatcgttcattagttcgcctccaacaggtgggcccggaatgataaccgtgtggaaacgaagtaaagcccaacgggtcgactgttagtcaacgctggatcgtctccgtcccaccgggaatcacatcaggagcgacatgaagggtccaacgtccatcagttcactgaggccctgtcaggccctccctccggaacgtcaccaacggttggccgtgtgagtaagaccgattaccctgcattcatcggggtaggagcccccaagcctctgaccccctacaggactctggcaccccgtacgcccaaggagataacctcggagcgacggctgctgaaagagactgtccacctgccggaaccaccggagcccggaggcttgggcggctccgccctgggctggcattcacgtctcctccagtggagcgagaagttggggccccatgactggggtagagctggggacgccacgtgccattcccatgggccagtgagggacctggggcactctgttctagctgtaggcctgagctcctccagagtcctcgaggagggagcgccagttcgccacctcgctcacagacctacacagcccaagccctgctctgggaccagcccatgagggcccttcagaccccagctgtctgcgcgtctgactctttgtggctctcagcaggacaggccccgggcactgcctcacagccaaggctggaactgggttggctgcagtgtggtgtttagtggataccacatcgtgaagtgattttctaaattggatttgaattcggctcataactctattggtcatgaaacac

SEQ ID NO: 609706 - DNA, 597 bp, Homo sapiens
aaggaaaagcagtatgtgtcgtttctatgaaatgaagccagaccgagatgtcaatctcacccaccaactaaatcccaaagtcaaaagcttcagccagtttatctcagagaaccagggagccttcaagggcatgtagaaaatcagctgttcagataggcctctgcaccacacagcctctttcctctctgatccttttcctctttacggcacaacattcatgttgacagaacatgctggaatgcaattgtttgcaacaccgaagaatttcctgcggtcgcctcttcagtaggaagcactgcattggtgataggacacggtaatttgattcacatttaacttgctagttagtgataagggtggtacactgtttggtaaaatgagaagcctcggaacttggagcttctctcctaccactaatgggagggcagattatactgggatttctcctgggtgagtaatttcaagccctaatgctgaaattcccctaggcagctccagttttctcaactgcattgcaaaattcccagtgaacttttaagtacttttaacttaaaaaaatgacatctttgtagagaatttcgtggaaacatgggaaac

SEQ ID NO: 609707 - DNA, 964 bp, Homo sapiens
gtacacagctaatagagcacacccgtctatgctctcaatcatattgggaatattcatacggtagaggcagactaatacctaccgtagcctggtgatagctggattggttccaaagcataagacatcttagctcttccaacttctaagattcttgtccctaccacgtaatccctctaaacactccccttgttacacactttaccttgtttacgattcccacaacgtaggtaacacgacctcctttgagcacaccttagggactcacctccttgttgcatgagtagtccacatacatttatgcacccatagttaagcctacatcccgtcaggcaccaattatgatatcgttcaacgtcttcaaaactcacgacttatccataagataaatcccacacatcatatacagcgtgatcctccccataacccaacttggacgcacatcttttcaacctattaaaagaacgtaatctgttagatataaatgtcacatgtaacatcatattacatccttccgcgagttaagtccgtgctatctaggagttatcaacactcgaatctgaaaacttaatgagcccaatatctacaatcacacctaccatggtcattattacccatcagtggttaatccatacacaaggctctgctctgtcatggaacggttcaagaacctagtaatccggtacactcggctaacatcttaccccgagcctgtttaccccctagatattactcgtagaccattacactagtaatatagcaggcgaccgctcttgcccaagttggacgacatgtcttcaatcggggtccgcgcgataggccattatacccgtgctccatggtctgcttcttgccctttgttccttcaatttaggggacctggtatgcaatggctgccctcgaagggttccaccgctgaactgctaaataaaaaccagtgcacaattgacctggccgtgaagaagcg

SEQ ID NO: 609708 - DNA, 664 bp, Homo sapiens
agcggtccttccgtcggtgtcgcgcggtcgcctcatggaagccccgggagggcggcggaggggtggcctgcagtgcgggggcccggaggggcagtcggcgcccgaagccaggttgcacttccgagtggcgaggttcgagtcatggaggcagggtgtcaatgcatagggatgcaggtccattcccattgccactgcttgcaccatttaccatagagttcttttgcgagaccaagctggacgcctatgatccttacctgattgccatgtcttcaatttacttggtcggcaaagtggaaagagctaggcaccatgcggatcgtacgtgacatcgatcgaatgtgtaccaatcaggtactttaacgccagagaggtgagcccctggaattggactcccgcgttctgggaactccgggacagcatcgtgcagtgtgagcgttctcatgctgagagttctgcgcttccaggtctccttccagtattgcacagcaagtagcctgctaccagtacctggtgtccctccagaagctgggctgaaccgccagcagctggcagacggacctccatgttgccgtcaccgtctgggccctgctgcgggacagttaccatggggcgctgtgcctccgacttccaggcccagtacattgccgtggacggtagctctacc

SEQ ID NO: 609709 - DNA, 635 bp, Homo sapiens
ggaaggcaggggcttgaggtctgcagggcgagaactgatgacatggggcaagcggacagaagccacactgggcaaatccaggccaaggcagctggacaagtggacagcgggcaccgagtaggggagacaagccctaagcctcccgtgggcctagaagcatgtggacagccgggagcagcaggagcagggaggcagggccaggagatgcctctccaggcagagatgggagcgcccaggagggtcacaggtgaggcaggcacagccaggtgagatgcgctgctgttctccggatgccctccgtggagccagtctgcttggacccccatgctctgccctcttctgggacgctggagccctggaaggtctggttctgaacattagaattcaggagaagtaaccgggaatctctcgggaggtgtatatctctaagagtcgtggcagcatctactcgggagctgtctgggaaagctgctccttgccactcctccttgggacacagcaccatgctgtgagaagcccaagccccgtcgggggcccctgtcaggaaaccaggcagccctaggacgtgccaccccaacaggactgcaggtcacgcggcccacggatgttggaccacaattaaaaccaatcaagag

SEQ ID NO: 609710 - DNA, 310 bp, Homo sapiens
gcccacctgctcgtagtgagcaccggaggggcggcaaggtcgtgctcttcctcctctcgaccgagcactccagagagctggagctgggcattcccggttgggtggtgaccctggctgtgtggcctgcacgtgatgcaccatgtatgtcacacagatgctgtgccaagctcctgcgaacttgtactagagtgagtgagatcagacggatgcttccaggcctgcacacggggcagcatgagcagcacgtgaccagccgtggccctcagccctttgcaggctgctgcagtgaggcagggaacacactggactc

SEQ ID NO: 609711 - DNA, 394 bp, Homo sapiens
aggtatgttcagaaagagggagaactagcagtcttggtgtcacctggggtcacgaggccgggaaggaggcagtgcagtttggcctaggtagttcaccatacccttgaacaggcctgggaaggaagcagacaaagcgtgccaaggtgttccacactggggtccaccaggctgggaaggaagcagagaaacttggccaaggggtcaaccatgctgctgaccaggctggaaaggaagtggagaagcttggccaaggtgcccaccatgctgctggccaggccgggaaggagctgcagaatgctcataatggggtcaaccaagccagcaaggaggccaaccagctgctgaatggcaaccatcaaagcggatcttccagccatcaaggaggggccacaac

SEQ ID NO: 609712 - DNA, 125 bp, Homo sapiens
tcctcaaagactttgagcatcaccacacctgaccaatttgtttatattattttttttggtagagacaggttctctctgtgttgcccaggctggtctcaaattgccgggctctagagactgtccag

SEQ ID NO: 609713 - DNA, 182 bp, Homo sapiens
gggtcgatgagcagatgcttaacgtgcagaacaagaacagcagctactttgtggaatggatcccaacaatgtcaagacagccgtctgtgacaatccacctcgtgccctaagatgcagtcacctcattgcaatagcacagccatcaagagctttcaagcgcatctggagcagttcactccaat

SEQ ID NO: 609714 - DNA, 499 bp, Homo sapiens
tgagacggagtctcgccctgtcacccaggctggggggcaggggcgcaatttgggttcactgaaacctccacctgggggttaaaacaattttccggcctaagcctcccgggcagttgggattacaggccccccccataatgcccagctaattttttttttttagtagaaacggggttttcccctgttgccagctgggttccaacccctggcctcagggaaatttgcccacctaaccttccaaagggggggggttaacagggggggcgcccccccccgggcgagtttttttttttttttttttttggaaaaagatttattttttcccccagcctggggggcaggggcaaaacttgggttacgggaagcctttgccccccaggttaaaactattttttggctaagcctccggggtagctgggacttcgaggcccccccccacccccccggatattttttttttttttttttaaaaaaaaaatttcttttttgcccaaatgag

SEQ ID NO: 609715 - DNA, 697 bp, Homo sapiens
  misc_feature (490)..(490): n is a, c, g, or t
aaacctccactcctaaactcggtgtgtgtgtccgtgtcctaaattttcctgtcgcgtgacaatgaaccccagggtatataccccagacaacgtagtcacttcataatggggacctcatccgagataccaaggtgcaacattcaccgaaacgatgaatagatgaggggactccaactctgtcctttcatttcgaggctcttggcttccattttagaaccaaatcaaaccaaatactgggcccccttcagccatttaaaaacgattagtgtggctgccagccttcatgggttgctgggcatattggccatgtttgaaccagcttcctttcacggaagacttagccatcaggtggggctggaagaagtcctgaggcagctgaggatttctgaccagggctagctcccagtgttatccaaaggcttctggactggccccagcctccaattgcctcgatggggtgtcggcaacaggatctccaactttccttttngtaattcctcctttcctgtctgcgaccgccatatctcttatcctctctgtatacaatgtgtgggaagctttacagttcagggaagtaatcttgtttggcagaccaggaatgtcatagtccatgtaaaccgtatacctgatcaaacaatctgggagcccatgtaatcagacaccctcctaaacctggctataaatctgcacatgggcc

SEQ ID NO: 609716 - DNA, 313 bp, Homo sapiens
cctgggttaccatatctttgatcatcctcagtatcagatcaggttcttcagcctccaccattccctagctgaggtctgatcaacctggctatcctcagtgagaatgtttaggttggcttagccaaatcctccttacccctaatgtttcctcttagtaattttccatccactgacccccacctgcctatgctgtattcagagctgagcccatctctctccccagtgcagaatctcactgcagtggtctggtccctacatctttaatccatgtctgagttaatgtctgtactaggtgtcagataggcgttcccca

SEQ ID NO: 609717 - DNA, 531 bp, Homo sapiens
tttttggagggttttcggttttaaaaaaaagggggaacaatattaataaggggggaagggggaaaattaaattcaccccattttctcttggctttttgagaagggggcattttgaagaagattgaaaccgaactggttaacccacccttgatttccggggaaaatccctttgggcgttgaataaaaaaccttttaaaagggggtggacaataggggggtaatattccaacaaaggaggctgaaaccttattggtgaaatgatctttacaataggatcgcgctgtattccctaggaaaattggtcggaggctcaagtaatagaaccaatggagtatatgcatccgtttaactgggaaaaattaacacaaacgtttagagagagggatctgcttgcagtatcacacaacgatattctaaaggcaaggttcataatctcggacactccgaaacattagaaaagatatttcatctaataaaggcacatacggttatatccgcccttctggcgaaaacaaagattatataaccacc

SEQ ID NO: 609718 - DNA, 1091 bp, Homo sapiens
tactcccccagcggagagcatggggggtgccctgtgttggtgacttacgactctgggacaagtaagtcaatgtgagacgagttcagtcgtctgggtttttgccccttttctgttcatgttcatctggctcacgagcatctggtcatggaccgccagcaaccatccgagacgtcgtccgagttgtgaactggcagcagcagatccgtcaacaatcatggggcatccgatgcaccatcatgaaccggcacctcgttacacatcgacccaagcatgacgaagaagcacgaaaaaatacgaacagaaagacgggagcaacacaggtgaagccgcagacgcacagcactacgcgcacccaacaagagagcaacccagcacaagcgacagcaaccacacaacaccacaaccaagcagccccgcgcaccggagacacgcgacacacacagcgcaccgagcacagacacacgcacacacacagacgcgcaggccacacacacacagcaccacacagacacatcaacagaagatagacactcggcagcgcagctcagccacatcagcacgcacgacaccacacacgaatcaatcaagcgcatccagccgcgcaccaacaaaccagacagacccaacactccccgcagcacaaccgcctccgcgacacacgacaacacaacccccagaacacgagaacacaaacgcacacgacagccggaccacaacaaaccaagacaccacacggagacgaagcacgaagcaaaccgacgcgagagagcacgacagaagaacaaagccacaaaacgaaagagagcgagagcgacaagacaagagcagaaaaagacaagaacaagaacagcgaggcaagacgaaaacacagagcggatcgatacgagagcacaaatgagagcagacagagaaaacagaagcgaggagaacaaagacaagagaagcccgcgacaggaagaacaagtagacaacagaaaacaacaaacagtccaaccgaccgaccaacccacagcggcgccaaggacgagacagagcagacacgcaacgcccgaagccccgcccacggacgcaaagagtcgaatagagtaaaa

SEQ ID NO: 609719 - DNA, 823 bp, Homo sapiens
gataaaggggagcgcagagggttgcggtgggactaggagcgcggcggggccggcggcagagctgtccggactgcgtcgtgtggcccggggggcccgggcggtggataagcagcgcgtgcctcgagtctatgcgattcggtgtgctgccggtggcggttctgcctggagaggttcgattgagtgataagagacttcagagagtttatggcataagagatgaggttaacttctaaagtatggaaggcagatatgaagtcatattgtacaagcgtttggagggcaaagtactcagatcttaaactctaatgatgtaactgggcctaagagagtctgatagaaaaactaaagtagcaacagcaggagtctgcagagctaggtaaaacatcctttgttaatgcggactatgctaacgcgacatggaatcgaggatgaatgctgagaggtgtaggctagctcaatagtccaggtacctcagagcgaatgtccatgctagcccgagctgttgcccaactgaagaatcaacaattggtagaccccagcgatcaacttgtttttcctaaaatatgacaacggtgaactggaaacagatctaaagacaaactggatacaagcccaaaatgaactgagtgcctggaagtttacgcctgataggtaaacaaatcatactccccagtcaagacttcccctgacagtcccactacgagaaagctgtggtgggacagccaagtactcgtttccacaccaagactcaagactttttggggcaaaaaaaagccaccatttcttacactgtccagctgtaatggttaatgtaaaacttacg

SEQ ID NO: 609720 - DNA, 416 bp, Homo sapiens
tttagtatctccattaattattctccaaaattcaggtcctctcataggaacttttatatccatgacaactgtgtaggctggattgctccaattactccaatatcccagtccatctagcctcttacagcgcacctgaacagcatagactgcacacaagtctggaactgggagactgacagattttgattttgcatcataaacctcatacatcttccattgtacttcttttccacttaaaccatagcgaatctggaattgaaggttattctctgggaaagactgggcttttcccaaggatattttcaataatccaatgtttatagtaatttctggctttcacactgggatgggagggcagtggcttcaccacaggaatccgggaagggacacatgttgggtgggagagtccaagtgtt

SEQ ID NO: 609721 - DNA, 783 bp, Homo sapiens
gacgccggtgcacgcgggggggcccgggggccctggtggtccctgggtatgtgttgaaccgctggtggtcttccgcggaggtttcggcacgtggcatccggggccgctggtcgcggccgtgtgacggggccgcgtggcctgagtgccgcggatgctcgcggagcgcaaggcctggagcgataatggagtggatgccccgtcaccgaagttgtggccgcttggtccaaggacatgaagatctaagtccctggagtggtgatctatctcttctccctgcccattcaatggatatcatagcatcattgatttcttcctgggggcctcatgtcaaggattgaggttttgaagattatagccagtcgtcaagtaagctagacccgtagccaggtccagctggctacctacggttgcaatggccatttgttagctattcggcggcactacaatggcacagcagtcaggtactgggtgttgaagtgctccaaggaggtggccaccgtcatccgtgggggccatcatcctggccaagctctccatcgtccccgtgcgcatgaggctactgggggaacagagatcgtgcaatgcgcccacatctgtcccttgcgaggtgactaggccgcgtgcggctctgtgctggtacgcctcatccctgtcaccaggtgcactggcatcgtctccgcactgtgtctaagaagctgctcatgatggctggttcgatgactgctacactcaacccgggcttgactgcacctggacttgcaaggacttggtgcctttagactg

SEQ ID NO: 609722 - DNA, 584 bp, Homo sapiens
acgccggacctttgctatgggggtgccaccggacgcccatcaatccggagaacagggccccacttttaaatgtcctcccaccctgttttggcggattattcaaaatagcaccgcgccataggaccaaaaattttgaatacccctccactcgggtgggagtcaaacacgcacttgctaaggttggtaaacagtggtaagtattcgaacagcctgacattcttgttgtgacgatgccacccctcggtttgagggctctaagttctgtgtatgcaaaaaaacccttctgtgtgttattatattcgaggcttgcatgctcccaaggtatcgcaaagctagacggtcccctccgaggacaccacatagggttcaggtagtagatctcacgcggccagatgtttcaaggtgggatgtttgaaagctaagtccgtggggcgaaatgtccatcgatgtcctcccccttgatagagattcccacgggaactgaaagtaatcattggcgccacttacaaagaaaataaaaaaaagctttccgagcgtgtgtcttagggggacataaaaaaaggaccattttgccaacaaaatca

SEQ ID NO: 609723 - DNA, 292 bp, Homo sapiens
  misc_feature (170)..(170): n is a, c, g, or t
ctggtatagggagggcgcctctggaatgagggtcccctgacctgcttcagggtaaggtcagagagtccttccgaggttttatggcctatgctaaagaagaaccatgagggtaaggtgaaagtgaccttcttacttaaattgttttctcaaatgccacagttccatatttnggtggaatgttttctgaaccccatcagggcgcaatgagagaacaatctggggggacaagacaaggagatatcagatgggggaggtttgtggttgactacatcactcttggaggcattcgccg

SEQ ID NO: 609724 - DNA, 656 bp, Homo sapiens
ggagaactactcagtgaggctgaggcaggaaaatcacttgaacccaggaggtggaggttgcagtgaactgagaccgtgccactgcactccagcctgggtggcagagcgagactctgtctcaaaaaaaaaaaaagaaagttgtgaatttgatgtaagcttaggaaattgaattaaaatttataggcatctgtattaattgtacaatttgacacgggattttcttttatccttagtttctttcacgggactctagaaactttttatcagaattatactggtaaaacattggggggagggatcctgagtaggtgatgggtcagaaagatgccttcagtttggtcagtgtctaaaagttaagtctgtttaggccaagcatggtggctcacgccttgaaatcccagcacttgtgggaggccgaggcacgtggattcacaaggtcaggagatgagaccatcttagccaacatggtgaaaccccgtctctactaaaatacaaaaaatttagccaggcgtggtggtgcgtgcctataatcccagctacttgggaggctgaggcagggcgaatcgcttgaacccgggaggcacgaggtcacgccattgcactccagccttggcaacagagcaagaactccgtctcaaaaacaacaaaaaaaaaac

SEQ ID NO: 609725 - DNA, 525 bp, Homo sapiens
  misc_feature (421)..(421): n is a, c, g, or t
  misc_feature (448)..(449): n is a, c, g, or t
tttttttttgggcagcagaatcaggtttattggagggatttgacattgctgaatcgggacactggatagagcagctggacaggagttggtggcagtcctggaaccctggatcttaagaaatagagaaactttccattcttggagtgcataatggctctcttaataaactctacaacagattgacagcggtcctcaaacttgggatgacaccacaggctgaaggttcctctgtagtgctccattctagtgtggtgggtgataccctgtgatcggaaactgaggctcaggatgtaacgaggatcagaactgtctcgtaccaggaaagaaccatctggtttccctttcagcttcatctctgcatcttcccaattcattggcccccaataccaaccacacttctccaactctcgaaggctggctncaaagctgctcgagtcaggccgtagannggacactggagtgctgtgggggttggctgtgcagggattcagctgctcggatgggagcagctgaggaccatcgttg

SEQ ID NO: 609726 - DNA, 1733 bp, Homo sapiens
cttttattatatttatttattgtttattattaaataaaacccaagagagcattattgttgtggtacaattgttgtgtgttcttatacgctctcgccaatgaaaaaacaaagactccacggaggatatgctccctctcgcttgggtgtgtgtgtatttgctcgtcgtgagtcaattgatctagagagcgatcaccgtatactgccgcagcgagtggagggtgagctcaggaaacaagacatggaaacaccacaatagtggtgcggtggagtgcgaaaatgcacacatatataatatcgtgcgtacactatgttgtctccgcgcgtgcgtcgtatgtgcgatatgtgaggcgcgcgtatacaacatatgcgtgagtgggcgcgtgctatctgtcgcccaccacactagtgtgtgtgtattactagcgcgcgtgcgcgcgtgtgtggagtgtttactcaaacaacacatatatgtctcacccacgagcgcgcgtcgtgcgtgggagccccactacacaccatgggattatacagcacaatatgtgcgcgcacacatgagtgtgagacaccgcacgtgccgggtccacaccacacacacacacgaaaagagaagttacacatcaagacagcgcgcacacacgtaggggagcacgccgcacatcgcaaaaagaaaaataactccccccggagggaggggggacgccccaccagagacgtaaaatcagcgcgcgataatcagccccccgcagggctttcctctgtagtggagaacaccacacgagtgggtgggcctcccccacataaaaaataatgagcggcgcgacctcgggaaaaattaataatataccaaggcaacgaggcagccgcacggagggacggccggcggcaggtgttataaaaaacacgcgtgggcggaagataactggtgtgaaaccaacagcggggcaatggctcagtggaggggagcaccactatgtgcgagcagcaaaggcgacacccctatgcaccactcctggggggggggtgggagacccccaacaaggtttgagaaccaacaacataccaccccaacaacgggaggaactaacaaacacgcctacaacgaggggaaaacaaataatataaaagcattccacacgcgggtgctaaaaacccggggtggttcacacccacacaccgcggccgaaaaaattcggattaggcgcgcggcatcagagcaaatatagatggaaaccaacacggggagatatacaatgcgcaagcagcatacttataacccgagacggggcacaggaacaagacaacacaacgagaccaacacagaagcgagaaaaacaaaacaaaacacgaacagcagagcacaagcacagacaggcacctacacaacgcggaggacaacgaagcgtcggacaaaacgcgccgacgggcgacacacgtagctcgacacagagaagccagcgcgtgagaaaatcacacgccggcgcgaaagcaaacaaataaacaaagcacagctcacgaaaccaacgcagacgaacaaacacaagaagcgagacaaaacaaacaatcaaaaaaaacgacaaacaacacagcagaaggaggcaggagccaaccaacaacacacagcaaccccgacgacaaagacaatccacgacatgaagcaacaacatgagcacaacatagagaaccacgaagacagagacaaagcagccatacacacgatataaacaacaacgaat

SEQ ID NO: 609727 - DNA, 507 bp, Homo sapiens
cggtcccatctaatactcaacaatagaaaacaaagaacctactttaagaacaggacagtgaccttaacggacacctcactaaagaagatataagatggcgagtatgcattgaaaaaaagtcacataatcaggaaaatgcaaattaaaacaataccactacacacctattagaatggccaaaacccattaacagtgacaatatcaaatgctggtgagaatgtgaacagaaactcccattcattactggtgggaatataaaatggtaccatcactttgaaagacagtttagaggtttcttgcaaaactaaaggtattcttaccatatgatccagcaactgtgttccttgctatttacccaaacgaactgaaaacttatgtccacacaaaagacacgcacacagatgtttgatgtttatagcagctttattcacgattgccaaaactagggagcaaccaagatgtccttcagtaagtaaatggacaaataaacccgggtatatccagatt

SEQ ID NO: 609728 - DNA, 181 bp, Homo sapiens
gtatcactaagctcgctttcttgctagtccaacttatctatatacaggttcctattgttccctacagtccaactatctaaactagggggatattatgcaagggccttgagcatctaagatatctagcctaaataaaaatcatttaatttatcattgcaaataaaacaaacacacaacaaaa

SEQ ID NO: 609729 - DNA, 827 bp, Homo sapiens
gaacggaagtcgctgtgggacgctgaggaagccaggatgggactccgagcaagaagacgtcaactccaagcccccagccttccaagagagctctcccgagagacccttcgtcggaggtcccgagcaagaggaagaattcggccccgcagttgccgctgtgtgcagtcgtccgggcctttcgtggaaggctctatcgtccgcatctcgatggagaacttcctaacatatgatattgtgaagtatctcctggaccccactgtgaaatatgatcgtgggagccaatggaaccagggaagtcgagcatgtgtgtgtgccattgtgcctgtggttaagctggaaaaaccgtgctttccatgggacgagcaagataaggtgcgggtttttggtcgaagagaggatgtctagaggcatggtggaaattggaatgggttcagggctttcttggaaaatctgggtaatcaccgggtgagattggatgtggcaaaaaaatcaagtcctttgtggttcatcaacaaaaaatctaaaaccagaaaataggggaaagagacaagtggcagccttaaatattcaaggtgggggaatcttgtggcagtttctccctcaggaccacagtgggagacttgtgtaaaactcagcaaaatggaattcctcgaagccattgaaaagtcaatggtcccccagaaatggccaaatttcactgtggactcaaaacttagggggaacgaaacagtcgagaactcatgaagagaactggttttcacgcacaggttccaggaggagtttaacaggtgtgggggcatgacaggcgctttgtttacaaacacaag

SEQ ID NO: 609730 - DNA, 780 bp, Homo sapiens
aaacactctagtcttcccctcaaatcatgcatgcaaaataggaggacagaggtggtgactcaactggatacaggtgctcaatagatcgaaggcttgatgagtgagtgtcagcgacgcattacaagcatgtaagcacgatacctgactgagccattggcaccataccttgagctaacgcttcctctgttttcctctacgtgtgacctatgtgtgaagatggcgaatagcagttcacctgtgcgtatttcgcagtcgctcacggcaagtgggacgcttaagctttgagaggtgcttgtcttgatcttagactctcgctagcgtttagcctctacgaacgtagactttcgagcaagctatagctgcactgacacatacatgtcgtagttctctaaagattcgtgttcttccagagtccccggcctgtccccaggctagagcaatacgtagcatacttgtccatcttatgtcagtctcttcgtgtagacctggtgctgctttgatgtcctcactcacctcacgatcggacatcaagtggagtgggccccgagaggatacattttaattccagtaatggtaggtagatttgtcctgctttctaaaacatctcctcatttcatattgccactccatatggattccataacgggaaaactgactgggtgtctcctcctttagggagggtaactgcaatagagtggtggccatcttctaaatctgtgaggaacagtagtcgatttcccttgaaggcgcgttacatatgtgactgtgtctcacaataac

SEQ ID NO: 609731 - DNA, 125 bp, Homo sapiens
agggtggtgtctgagaactctgtgtatctgttcagcaggggatctgtatatatctagtctattaatctaaacttagcggggtccacctagtgctgtccagctagcaaagatgtctgtcttttggg

SEQ ID NO: 609732 - DNA, 883 bp, Homo sapiens
ttcctggccggctgcgagggccgtccggcgacgtgcgctcccgcctgctgggccacctggcagcctgcctgcgccagctgggaccctcccgccgcccggctcgctgtccccggctgcccccgagaggccccaggcccgaggtctactgccgggcctgccctgcttgctgccatcgctcggcggccccctttccctctcgctctgcgtgccgccgcttgctgcctggggtctgaccctgggcggctgccccgcctgcccccatgggcggggggccggagggggcccgggggtgggggcccctgggaagggcccggtgggtttgcgctggaatggctttgttgcgccccttgagaaactgtggcaatttcgtggcgagggcgggggctgcggccccccggggatttccataagggcgtcgccgtggtgggcgccgtttttatgtcggcccggggaggaaccttgttggtaacggccaagggagcgacaaagacaaccccggtttagttttatagttataaagttttctcccccaagcggaagactcacacgccaacacacgaactccggagtacagagacataacacaagaacaccacaaacaaaccagaaagagggacggacggcagccggcgagccttaaaaagaaaggaatattcccacgccatgacgagggggcgggccgccacacaaagaagctattaacacgagacgagttagaaccctcccaggaggagtagttatactgctgtgggcaacacccaagaagggggggggcgcgcgcccccataatatataggaggcgcgagaggaccgtacagacagaagtaagtacataataaacacagagcgagcgcataatagcgccgacaagcaatgagtagcg

SEQ ID NO: 609733 - DNA, 1253 bp, Homo sapiens
cacccacgttctccttggcagccaggaagcgggcaggctccctgcacattgtctggccagcaggaaggcgccctcctccaggacgtcgaggagcatggatggccgatgtgcacctgctccgaggcattacatgtccttccaggactccagaagcttctggccggagcagattgtccactgtctccaccacggcactgcacagtgcagagggcatggtgctgtgagccccccaacaccactctaattccatgggggtgggcatctgcatgccctctatctcaatcctccacccctaatccaccccatcagcatggagcccacggtcctatacactggagacacccctgggtctcaccttgatactaatccattacaacgttctactctcgctctgtgcaatctagcaaagagatggagagtgatgtcaggccaggacatctggcgtgccggataccctcaaccctaatacatgccacatcatggactaactctctcgctcatgcgcgctaccactgaccccagggcctgcgctatcagaccacaccatcctcagggatcccccaaccctcaggaccactccgcgggcagcacaggcgatgaggaacccgcgcaaaacccctggccggaccaaggcgcagccggctccgacacccctacagcagagaacaggccactggcccggatgaccagccctggacacgaggaagcgacccaacgaccacaaacaacccaaagaaccactcaacgcacaccacaccaccaagcaaataacgaggcccaggacaacaacacgacacaaccacaaccgctggaacgcagacaaaggcagcgcaaaccaaagaacagagcgcggcacagaaggcaccgccgaaaggggcatcacagaatacaaaccacgaagcacatacgccaacccaaacaacgaacacaccgaccacgagacagcagcaaccgcatctaagcgggagcgccaatgccgggaactagcgacagagttaccaccatcaaaacatacacaccgcgacgacggcagcgcgaaacccggcgtacagcacatagagccccacacccccacacagacgccgccacagccaaccgcacccgagcaacgccggccacagagccacccgccgcgcaccgcccacaccaagaagcacaacagcaaccacagcacgccgcgacacgaccaccgcccaagcacagacaccggccaggcgagagccacccgcgccgatctatgccgcagcgcgagt

SEQ ID NO: 609734 - DNA, 619 bp, Homo sapiens
tggccatagagggaccccgcagggcagaccgacgttgcactgaggcgatctgagctgagcacaggggtaaggatatattcctggactgtgtgctgctgtcaccgagaacatttgcaaatctgctgacacattacagtgggaatatcccctggacgcatggaaggcccagtgccctgtcatttgagcagtgcaggcacgtcaccagcccatggggatgtcagtattcatgctgctctttgatataaagttcgcatcttctatatggtttgatgatgtttagtgggatcagtgatgcctgtttgttaattgcttacagaagatttgggcttaaaaataaaatcttggatcaggtaacattctctgttttaaattttattgatatttctgaattccaaggaaattacttacatatcagatggtctttgaaaccttatttttttctattatttttagtattctctgcactctgtcttatatttctgccgctttctcctgcataagtaaaacaggaagatttagttagcatttgaggatgaaaattatcaagcctatattctcaaaaacaatctgggattggagttaattttaatgtccactttgtgtccgtcttgccccttta

SEQ ID NO: 609735 - DNA, 137 bp, Homo sapiens
cgctcctcgtgtggttgccaagccaagccgctgctacttcatcaccaaattgcaatcgctccttcctggaatccttttgcctagcttcaccaccaaatcgttagcgctccttccttcttcctagacttccttcacca

SEQ ID NO: 609736 - DNA, 1159 bp, Homo sapiens
  misc_feature (285)..(285): n is a, c, g, or t
ggtcaatgggtatcgaggcagaggcctttgccacctggtggtgttcgcgctgcgtctggctgtcatccggaccaggtctcgtagaccggacggtaggtggcccggggagacaggtggacctcggagactggagcgtcccgaactgggctggagcctgaggggggtccgtgtcgcagtagagagagcgtgcagtgaggtctgcatgtggagaaggcgaggccctgaacaggctgcggaagtacccagagcatgctggtccatctggacaggttggcagagtacttncagtactgatgcatagttggctagaataccagaacctacgggtgggactggacagagtggcactagaagcaggctcaacgcaggttgattcccctcgatagatatggcgctcagggaggcaactatatcgttgggacactgtacaattgctgccacgtgagcacggctaatccagtgtgagataacaggctgtggcaggcacggggagagtgggcggtaataatgagtatcattgggggcacaggcgagccgtgacggtaaatgaacagtgcccattttccacaagcaccagaaattcttgggggaagaattagacttgagtaccttagccccaggaagcaggattgggaactgggaacgtggggttacctttgtggggaccatgggcatgatgcgacacaaaggtatactcgccttggaaacgttaataacgcggttttcagggtaacacatcgagagaggacttaagcaggccaatttccagctcgaatagggtgaacgccttggggcaaagatccacggacagacgtacaaagaaggagcaacacgggaacaaacaccgaaggcaaggtaacagtatgcgcaaggaagaagacgcaacggacaaagacaggaagatcggaacacagaagggaacagacctagtgggtaacacgaggcacccacctctgacagaaaccaacagagcaaagcaagagaaaagaagaggcggggcgcaaaaaccagaagaaggcttgcggcgcgggaagaaattcaagacagggaatacaaaacaaagaaaccagtagagatagaggcgaatgaggcagaagagtcctggcagaaagaagggaagagacaacacacggtgacaacaggcaaggaaaaacatgac

SEQ ID NO: 609737 - DNA, 329 bp, Homo sapiens
  misc_feature (88)..(88): n is a, c, g, or t
  misc_feature (176)..(176): n is a, c, g, or t
  misc_feature (201)..(201): n is a, c, g, or t
  misc_feature (217)..(217): n is a, c, g, or t
atccgccccggtccccgtccccttccctcccccctgccctaagccacctccacctctgtcctggccgcctcagggcaccctgaaaggntcatgacatgcggctgcgcttttggctcctcatttggctcctgctgggatttatcagccatcagcccacccctgttatcaatagtctngctgtctatcgtcatcgtgagactnactttggtgtaggagntcgagaccaccctgggcaacatggcaaaaccccatcttcacaaaaattgggtaatttgataattatcattattggggtttcttgagacggtacaacatttaacattctcttt

SEQ ID NO: 609738 - DNA, 115 bp, Homo sapiens
gagcatacacatagactctataaggtcttattcaacatgatatgcttgtcaatctactgctacatgagtgacgatgtattgatgtgtgacatcatctgcaggctgtgaaggtcac

SEQ ID NO: 609739 - DNA, 940 bp, Homo sapiens
aatatgatactaagcatgtaccaactcacttctaggaatactagtatatcgctcacagctcatgatcgctccctactatgcctagtagggactaatactatcgctgttcgtgatagctactctcatgaacccgtcaacatgcactcgctctgtagcacaatagggtgcgcttatagccgatgactagttcttggcgcgctgggaaagcaggtcggtgggacctagcgcctacatagttctcgaaatcatcgcaagcacatagtggcactagacatagggtacatatacctaaacgtactccaatgcttgccactaatcggcccaagaattatatgactagcactgacctgactgtgccagaagggccgcgcttaattatgaactcaagcgagagaggcagggccacgggccgtaatctatacaggcatcatgcccctcctactatttgtattaacacccaaatcaaagaacaaatcctattgaagcatgattcgacagaagcttatggcgcgcgacccccagtaacaagctcacatccttaggtacagtaggtaggatgatacgtacacattcgacaagtcatgtgaagccaaggcggccagttgaatccaggtgaaccccaagtagtcacgcaggacaataaagacgaatctggaccaccacaaataggattgagagctgcgacgagacaagcgggacggactacaagggcacactccgagtgcggggctgcagcacatcgagatcgtaagcaggaaaggtaacgccagtcaccaggcaagaacggagcagaagatgggtggccggaaacaactcgcagaacacacgcgccaacaacagagcaaggaaaagacaagagcgggacacagaactagacacaacacgcggcgcccgacacgagcaaacagcgcgcagagggaaaagccagagcaaacaggcc

SEQ ID NO: 609740 - DNA, 261 bp, Homo sapiens
  misc_feature (137)..(137): n is a, c, g, or t
  misc_feature (235)..(235): n is a, c, g, or t
actgagtatgggcaatgcactttttatgaacgttgagagcatccttaaaacctcagagagtttgacctgcaggtggacaacagaaaagcagaaagctgaagaagccatgaagagactctcctacatcaagccagaanggtttcagatgccagtgacaagacccagcaacgcacgaaagagccctggggagcgctgctgctgatgcacagagggcaaaagaactggggccggggancatgagaaaactctccagtcgagatt

SEQ ID NO: 609741 - DNA, 371 bp, Homo sapiens
tcagaggattaactacaggcacgcacaccatgccagtaaatttttgtatttttggtggagacagggttttgccatgttggccaggctggtcttgaactcctgacctcaggtgatctgcccgcctcggcctcccaaagtgctgagattacaggcatgagccactgcgcccaggcaaaaaatttaaaattgtaaaaatcagccaaacatggtggcattcatctgtagtcccagcaacttgggaggctgaggtgggaggatttcttgagcccaggaggtcaaggttgcagtgacctatgactgcaccactgcactccagcctggacaacagagtgaggccctgtctcaaaaaataaataaataggagtttgagg

SEQ ID NO: 609742 - DNA, 846 bp, Homo sapiens
cgtggttgagacgcgcagagaagttttctgctcgtgaaagagaggaggaatacagcctctgtatatagtacgtccctacgggctcaagagatgcgtacccgcgcagttttcaacgtgactttatgacgcgcaatgtttagcgaaacttagactcttataagcctctcctggggaaggaaacaattaacgggttctttaccccaccccggggttaaaacgaacctctcctctccagggcggccagaacatcgttcgtataaccaacgctgttggtaggcagcggtcccgcgcctcccctgtttatcccccccacaaggcgcacacagcgttagagacgaacaggaagggaaccttaccccgtgctagaattagttgtcaaaagtgttgagtgtattaacatattctttaggggaggttttttaaaaaagaggctgtaaaccccaggtgggctctaaaagcccttaaatcccctgcccagcgggaatgattgccgcctcattaaacccctctgtgacacgtcttttcttaccccccatcgaatcggtgcaagccatgactagcggggtggtgatgtcgagtcagaagccaccttgtgggagagtcattaaagatttttgagagtgacaacttgggacagccaccaactccgccgaggaggtcgctagtaaacaataaaataacgaaaaaatatatggggaagtatgttaagagttaatactccaattctttttcttaagagaaaaaagagtttatttttcaaccccgcccacaatgatggagcccccgaagcaacaagcacacacgcttgggacccaaaacttagggcccaaaactgcccacaaaaca

SEQ ID NO: 609743 - DNA, 755 bp, Homo sapiens
ggcagtgagcggagatcacgccactggtctccagcctgggtgacgagagcgaaactccatctcaaaagaacaacatgcaagcaaaagatgaggagcctccatgcattgaagctgggacctcggaaagttgataaaatataataaaggcaaaattgtactggcttgggataggtttgcctaatatcatgaaatgcctccagatattattcttcagaccggatgtctaccctggaaagtgcgtgggcttttccaggttcccaggtcataccctaagtcaagcttgctacgaagatcataccaagctgctgttagcatggagcacatctcagagaaggtgtctcctgtcaggaaatatgtccagtgcaagcctaaggaatgtgtctggtcgtgatgttcagaggtatatgtgcgaggtgtagttatgagcaggcgtggcatcgacaaaaataatgtgaaggcagaagagatttggcgctagagtcagtttatatattagaaaacaggaaccaccgttctaaatcattggagactcgcagacatggagtttctgaatgattgattgtgtgtgaaacttaatatctttagcaactggggacacccgaagtatactgttgatgtcgatgtcaggctccagggcacagcaggcaaggacatctagaagagtgggtacagaagggcatgcccacgtgtccagaactatgcaagaatgccttattctcttggatgataccgcacccataggcacttgagaactg

SEQ ID NO: 609744 - DNA, 313 bp, Homo sapiens
tatatgttgtgttcccttcttccccgtcccccccccgctggacaatatcggatgtgttccgcggtcacttgtgcgaagaagtaaacgaactgttaaaagagcattatgtgtcggcgtgtttttccccccccccaaaaaagaatttttaagtatatatggggggttttatagtgctcgcgtttgcgtcttttgtgtttgtatgtcaggtgccgctaagttagtttagcgctcgagggagaggttgtgtggttgctttctatcccacttgtaattgtagtacgtggcatttttttaggccctaatataccggctg

SEQ ID NO: 609745 - DNA, 278 bp, Homo sapiens
  misc_feature (45)..(45): n is a, c, g, or t
aacgatcgagctcggtcctggagctggttttctcctgtctcagcnctccccagttgctgggattacaggcatgcaccaccatgcccgactagtttttttacttttagtagtgatggggtttcaccatgttagccaggctggtctcgaacccctgacttcaggtgattcgcctacctcggcctctcaaagtgctgggattacaggcatgagccactgcgcccggccagttttgggtcatatattaactaatctattttgggtcgatttttgtttatggt

SEQ ID NO: 609746 - DNA, 268 bp, Homo sapiens
ggacatgcctccgccggggggctatgggcccatcgacaacaaacggaacttgccgcgtcgaggactgtcggcgctacagcttgctcgtccatatgagatttggaagcctctcgtctacggaacctgacatcctccgtcgaggtgctatcggcccatcgccaagcaactaaactttccgcgtacttcactgtctcgctatcgcatgtttgccctagggattggaagcctgatctcagagccactggacctatatgatgtgtacccgtca

SEQ ID NO: 609747 - DNA, 195 bp, Homo sapiens
caatttttttggggcccaagcctagaaaagagaaatgtggtttgaatccttattttaatccttgtttgatagaagaggggaagttttggggccctaatttttcccttccctggggttgggctttaatccgtttaaatgtttttttgggcccccattttcgcttccataaaagttttattgtttagtgcccttcca

SEQ ID NO: 609748 - DNA, 538 bp, Homo sapiens
  misc_feature (45)..(45): n is a, c, g, or t
  misc_feature (58)..(58): n is a, c, g, or t
atattttatacagaaggtttccgccaagcagattaaattcagcanatccttaccagcncagggtttagtggccaacggggccgttccatggacataaaagactttctccgattggtccatgggttcaacgccaaagggattccttttttcttggggtttgggaaaccaaaattttccagggccaaaaaaaaaatggattttggtttttttggtttttagaaaaaaaaggctttggttttctgagaccatatttacttggccatttttgggtccaaaccaaccccgggggccccccttaagatttttgatttttaaggtgggaaggttttagggaccaaaggtttttatataaaggtgggcccatctatttctaaaaattttccaggtcaggggccgcaaaaacggcccccttttcccttttccttttttaccggtttttggaaaaaaaaggtactttttttttttctgttttaaaccggaaggccctttttagggccttaggtttggttcccccggaataaaaaagtttaaaatttga

SEQ ID NO: 609749 - DNA, 559 bp, Homo sapiens
  misc_feature (77)..(77): n is a, c, g, or t
ggcgtcttctcgcgcggatggtgaagctgaatttggtacgctggaccctcggacagacagcaagagagagacaagcncgaggcctgacttctagcactcctgagtttgagccctatgagcagtggaacctagggaccaccaaggtatccagatataattctttcctcagtaatagaaaaaagaatctgggatctaagaagatacctactcagttttctaagtgactggcgcatgtcattgtcccacttataccgggatgggcgaaggccgcattgagtgatgatgagtgacgagcgggcagaacttctggagatcactgcactggcgatctcgcagaactgagttcaacccctaaccgatcagcgaccacgtggcgagaccaagggaagaaggccaccttacggggatgtgcggcagagcggagactcggaatgatagagaggcccaggcttgtggaggcaatacgggcccgtagactacgtctgcgccaggacaacgtgacatcaagcgcagggcgtcaagaacaggggcagcggcaggaggcagagtcggaagcatc

SEQ ID NO: 609750 - DNA, 151 bp, Homo sapiens
ccaagataaagggcagacagagaggaattagagagattgaggacagaggacacggcaggaaacttaacaaggggggtcagagaattaaaggagaggacagaagggacacaggagcttcccaagggccaattccaggaggatcagagcatca

SEQ ID NO: 609751 - DNA, 187 bp, Homo sapiens
  misc_feature (123)..(123): n is a, c, g, or t
  misc_feature (127)..(127): n is a, c, g, or t
gggttgtggtgctggagtttagttgagtagtaggaatgcggtagtagttaggtaatataaatagttaaattaaaatggctatgttagggttgtacgggagaactgctattattcatcctatgngggncgtaacttcgaggagtatgccaagattttgcgtagctgggtttggtttaatccacctcaa

SEQ ID NO: 609752 - DNA, 1115 bp, Homo sapiens
tctttccattttaaatttaatttttaaaaaaagacatggaggttagggtaagaaattatggaaggttacatttttaaatctgggcaatggctaacagtaaggggaataaaataaataagtttttaaaagttacaaggtttatagactatactttataaaaaatatgacctggaattagaagactatttaaaataaggtggaatacaacacccaggaaggggactttaaggcaagggaaagggcaacattcatatttaccaccaaggaaattaaaggacccaatagtgggagggttaacgggaccggcccagaaaacttttagaactctgggtggatcagggttctcccagccctcgtgggagggcctccatatagtgggtgcaaaacgttctcttttattaagataccgtggggccgtgggaatttaaatataacattagccaggtcgcggcaagcgcaaatttcacactctttgggggtcacacgggggtcaaacttatcacgtggctcaacaaaaacacaaacacaaaagagggggcggcgcacggctaccaaaaaagaagagtttaccgccctctcggagggggggcgcccccaagagcttacaacgcgcggttatacccccacacgggctatatccccgtgggtgccccaccacagggtgggggtccccccctataatacgagcggcggaagaactccgacataactacaccaatgaaagcgcattaaaggggccccacgcgtgggggcccccggagaacaggatctaatcacacaccaacaagggggcagcgagagtggaaaacgcgtgagggaaaaaacaaacgcggcgcgcacacacacccccgtggggcgcgaacaccccccctccagggggagtaagcaacggcggaaccaccccgattacaaccctatccacgtgtggagcggcggcggcgtcacccccccactcacctgctggggggccgcaacaacaacaatacgacccctatccaccagcgagagcagatctttcccacgaacggggcccctaaaagcgggggcacacaccacttccaccacaacacagcgcgcccacaacagcgctggcaaccaacatggcgcttgtccaa

SEQ ID NO: 609753 - DNA, 811 bp, Homo sapiens
  misc_feature (23)..(23): n is a, c, g, or t
  misc_feature (71)..(71): n is a, c, g, or t
  misc_feature (76)..(76): n is a, c, g, or t
  misc_feature (78)..(78): n is a, c, g, or t
  misc_feature (88)..(88): n is a, c, g, or t
  misc_feature (90)..(90): n is a, c, g, or t
  misc_feature (98)..(98): n is a, c, g, or t
  misc_feature (112)..(113): n is a, c, g, or t
  misc_feature (117)..(117): n is a, c, g, or t
  misc_feature (125)..(125): n is a, c, g, or t
  misc_feature (133)..(133): n is a, c, g, or t
  misc_feature (139)..(139): n is a, c, g, or t
  misc_feature (195)..(195): n is a, c, g, or t
  misc_feature (200)..(200): n is a, c, g, or t
  misc_feature (236)..(236): n is a, c, g, or t
  misc_feature (243)..(243): n is a, c, g, or t
  misc_feature (256)..(256): n is a, c, g, or t
  misc_feature (264)..(264): n is a, c, g, or t
  misc_feature (281)..(281): n is a, c, g, or t
  misc_feature (289)..(289): n is a, c, g, or t
  misc_feature (295)..(295): n is a, c, g, or t
  misc_feature (304)..(304): n is a, c, g, or t
  misc_feature (315)..(315): n is a, c, g, or t
  misc_feature (326)..(326): n is a, c, g, or t
  misc_feature (341)..(341): n is a, c, g, or t
  misc_feature (362)..(362): n is a, c, g, or t
  misc_feature (374)..(374): n is a, c, g, or t
  misc_feature (380)..(380): n is a, c, g, or t
  misc_feature (396)..(396): n is a, c, g, or t
  misc_feature (404)..(404): n is a, c, g, or t
  misc_feature (428)..(428): n is a, c, g, or t
  misc_feature (432)..(432): n is a, c, g, or t
  misc_feature (453)..(453): n is a, c, g, or t
  misc_feature (469)..(469): n is a, c, g, or t
  misc_feature (480)..(480): n is a, c, g, or t
  misc_feature (498)..(499): n is a, c, g, or t
  misc_feature (510)..(510): n is a, c, g, or t
  misc_feature (515)..(515): n is a, c, g, or t
  misc_feature (526)..(526): n is a, c, g, or t
  misc_feature (550)..(550): n is a, c, g, or t
  misc_feature (795)..(795): n is a, c, g, or t
gcgatatcgacactctgcacgtnctcctcaaacttggagatctcctcctccagcaagtatgtacccacctngtagnantccaccaaanantgaatctntagcttccggatanngtancccacccncaccagcntggccnccccccagaccagcccgtccagctggatagagcgcacacaggcctccagctgagcnatgtncgtctcatcatcccaaggattgaaatccagcagganggagganttggccaccagtncaggcttnttggacttcttctccgngtactgcngtagcngctcctccnggagctgtgcngcctccttgtnctcctcctcattgtnactgccaaacaggtcaatgtnatcatcctcgtnatcctntgctggtgtgggtggntttttggntggggggtccatttggcgcatggntgtnttgtgttgggtttgtggggtngtggtaagtggcaggngagttcttttncagcacgttcagttgggnntccagcttggngatgntttgttggagntcctgttccacgccacgcagattntggttctccacttccagactggcaatccggacgacgagctcaccatggtctccgctggtgccgctggaggccccggggcctgagcttccagccagggatttctggatgttctctctggctctcgcaatgtcacggaggatcacgctggcgccgttctcctggggggaggcacctgccacaggcccgttcatctgctcgtagaatctcctttctgcgtcgtcatatttgaacttgtcgaaccagancttctcatgtgctagg

SEQ ID NO: 609754 - DNA, 153 bp, Homo sapiens
tagtcaggatcttcgtcccactcagattctacaggaaacgttctgaccaggaagcaatcgggtggcagaggtagctggtgtaccagtcccacagccttataaccattctaagttattggcattgacttcgtcattgttgttagcgcgtgctgt

SEQ ID NO: 609755 - DNA, 581 bp, Homo sapiens
  misc_feature (57)..(57): n is a, c, g, or t
tctcatgcagagagctgggatcttcttggccattaaagtatattgttcacccccacnccgcgagaaccaagctcaggagttgcctgcctctgcacacatgctgagtgtgctgtttgtgtatatggcaggaccgtccctatggggcatgtgtgagctccgcagctgggtcaggctcctcggtccaggtttacttcatcccgcctggacgtgatttggctttgaactgtctcgcatgcagccacaaagcaacttccatccctgtggtatgctgatagctgtactcattgaaacagtggcctctccaagatttaaggatattgaacaaagaaactgggactgagtgacttgttacatgaacaagttcagaagggcagagaggcacatcatgtacagacttgtggagcacctttcgtttcacctgcgatgcatgcttactcagcataacgtccctccctcattggatgtgatgtactcaggccttacagggcttatccaccagattatattacacctgtacttcccaaccgcacactcgcttggcgtttaagtgtggatattagaaatataatatttcttaaaca

SEQ ID NO: 609756 - DNA, 282 bp, Homo sapiens
cagatcgcccgtggtaatgccgatcgggtggcggtgctctcagccttctactttggccagaccaagactggcgacggcgacgtcccgacgcccaccgagggccatgaggggctggatcagcttgtcactgagcttggtgacatcgacgccagcacgaactgcaccttcccgctcgacgactctgacgtcgttgtccgggtgggccgctacggcacctacgttgaggatccggtgggcaatcgagctaatggcgacgacgctctgcctcctgaagagctcacc

SEQ ID NO: 609757 - DNA, 250 bp, Homo sapiens
aactggacagaggaaaaaaatatggatggaacgacgcacgcatggacggaggaaatgaagccccaccacaatggatcacagagttttagggaggcttcacatagagcacatgaaggggttcctgtggccctgctaccagaaggagagggaagaaggatgctgagatggcccagatgggacaggatggacctgcagggccagataccaaagccctgacctgcctaagcatatgttgttcccaccctaccct

SEQ ID NO: 609758 - DNA, 190 bp, Homo sapiens
aaacaatgcacatctatcatctagacactgggatccaccctcagctgagatgccaaggtgtctgtgctgattacagccaacctccctcagtctccgtgtgcacgctgctctcaggcagaggccatgagaaaaggatgatgacccagtgagaagctgggactctgtgaggctaactctcggggatcctcta

SEQ ID NO: 609759 - DNA, 265 bp, Homo sapiens
ctcagtttaccctccgcttgaatagatacggggaataaactaaacacgagggtgacacaccttctcccaccttgtcagctgaagcaggagagccttccctgcccaccccatggtacattatctccagcatctccaggccacagctttcaccctttagcctagtggaaaagagctgggaaacgtggctttgccatcaagggagaaggggccattatgtttaccacaaagacccgattgttactgaaaccaaactgggctgcttttc

SEQ ID NO: 609760 - DNA, 189 bp, Homo sapiens
  misc_feature (6)..(6): n is a, c, g, or t
ttggtngctctcgacgagctacccctccctaggtgggcgaggggtctgggtgggtgtttgggctcctaccacgggggctccctcctagcaagggttggctggccctcctttccatctggcccccaaggccaggcatctcacttttcctcccacttttctgggggtcacggcagctcgcacttcgtcact

SEQ ID NO: 609761 - DNA, 898 bp, Homo sapiens
  misc_feature (251)..(252): n is a, c, g, or t
  misc_feature (258)..(258): n is a, c, g, or t
  misc_feature (264)..(267): n is a, c, g, or t
  misc_feature (269)..(269): n is a, c, g, or t
  misc_feature (272)..(272): n is a, c, g, or t
  misc_feature (669)..(670): n is a, c, g, or t
  misc_feature (718)..(718): n is a, c, g, or t
  misc_feature (720)..(720): n is a, c, g, or t
  misc_feature (724)..(724): n is a, c, g, or t
  misc_feature (735)..(736): n is a, c, g, or t
  misc_feature (748)..(748): n is a, c, g, or t
  misc_feature (759)..(760): n is a, c, g, or t
gtattgtgtttaaataaacttgaaccaaatttgatacttttttttttttgagatggactgtcactttatcgcccaggctggagtgcagtggcgtaatcttgactcactgcaaactccacctcccagattcaagcgattctcctgcatcagcctcccgagtaactgggactacaggcacgcgtcaccatgcccggctaattttgtacttttagtagagacagggtttcaccatgtaggccatactggtgtcnnactccngacctnnnntnatntgtccgccttggcctcccaaagtgttgggattacaggcgtgagccaccgcacctggccaatactcctttctaagctccgagcatgttggcacatttgatttggtttgctctttctttatctgtaggccatttgatattgggccatcattgaaagaggcctgtctttcttcttcttttctaaaaagcaatctaattgaatgacatgggctctttttttgagagatgatccgtagttccctaacatatttgtgtgtgaagtttaggacaattagctgaggtgtctgagcactagtacctacatttctgatattttgataagatgaactcgcttaatgattttggagatagaaatgaaagaaaaaatagagctctataggagttagattaaaatatcagnnttggaacatcatgaattattgtgatctccgtaaggattttaggctggntntaanggctatgtgcnntttgtatgtatngaaaaaggaannttctcattgaaactgacttgtcaaatatttctctccaaaattgtttgcagcattagtgccagcagtagttcccaagggctgtctcagccatcccacccagacgactccgtatctgagagccagtgatgccccacctgg

SEQ ID NO: 609762 - DNA, 1310 bp, Homo sapiens
  misc_feature (1310)..(1310): n is a, c, g, or t
gccaaaggagagtgcatggaggacaagtcctgatagttcggtgatccaggtagagttccatcacacgcgcggtcaaggcttcttcactatatgttaccatgacacgtgcaagaagaacgtggtaagggtcttggctttgaagtgtcgtatatagagaaatatgcgttgtggtagtcaagataggctcagaagcaccagcgtttccatgcaacactgacagtttgctgaggagtgtatacgatgggcattacgacgcgtgtgacaaatacacattgtgaattagcctttatacggtaactagggtacactctgccgttctgaatagactatggatcctctggaccttcctcacaaagcatgtcgtgggggagctttttctcgatcgtggactgacaaggctgcaatttcatacgctagctctcccgagtttccgcaggcgtgcacagaggggcgtgactttatgccaatgaatgcaggacacacacacagttacgcaggctgtctgccagagtcctgggggcttcctttgtcccgtgcataccccagacggggcagccctgtggcctgatgaaccacctaactgccgtatgtgaggttgtcagacagttcgtgtatacggcatctattccagtctttactgtgcaactttgggggtcactcccattgatggagctccccagcgatcactacagtgagtgctacctgtgctgctggacggtgtcatggtttggctgggtggactaagggtcttggtcgcagggcatcggcagaatcgctgatacgacactttcacgcggtgctctagcagagagacacagacattcctccccgtggatgtggacctgtggtcccttattaccacgagatacggggacacgccaacgtctgtcaccccggcgtatgtgcccattctaacaccacccctgtgacctgggcacggcctttggaaaaacataagaggttgggcccacaacaaacgccaatctgggcgacttcgggagacgacacagctcccagaacaggggcgacaccaccttccgacaaagagcagaccaagcaggacgagataacctaacaaccaggaaggagactccacccaacagcgtgtagtacagagagagaaccaacaaaccacccgctagagtcaaaccaaccacagccccgaagggaaatcgccataaaaggaaacacaacagagtggcagacgccaatcagacaagagaagaagagaagaagacaagccagcgaggcagcgccacaaccaaacaagcaaacgacgcccgctgacacaaagaccaaacgaacagagn

SEQ ID NO: 609763 - DNA, 616 bp, Homo sapiens
attccatctttcactccgggatgaattgggaaaagttgacttggtcacagaactccgtggatgttgagcactggtgctccagaatgaccagttggtaatattgcgaaggggtgggtgatacttctggcttctcctgatgcctgtttccggtctggttatgacttggttgggtaactattaagggactaaaagtgagtaatgtgtaccgggtccctttggcataaaactggttatgacttgatcccagtggttaaccaattggggctggtcagtctgacccatacattactgggtcatagcaatgtgggcgtttttcaaggggtgaagcataccaggtcttaaacccgaggggttaccttaccaggttccctttaacaaaacacagtaaaccctggccggctattgcaatacacctagtggccttatattatcgcctattttactataattggaggaatccacactttttaaacttccactggttttacctttccccaagtgggtggggggcctcctggtcacctaacgggggtgtggttactttcagaaggtccccggttgggaatttccatctgaaccggggccttgggttcttccgatagtcacaggcttggcg

SEQ ID NO: 609764 - DNA, 230 bp, Homo sapiens
  misc_feature (195)..(195): n is a, c, g, or t
  misc_feature (214)..(214): n is a, c, g, or t
taatgctcggtgagctctgaggatcccccgcgtacagttgcggagccagcgagagtctctgcggtctcccgtgcgctcaagcacaagcccccaactaaaagccttgtgtggaaaatctgcttggtgcataacagattatctggtgagccagtgtaggagcacaaggcagtaatttccctcctctgcaggggaggncttgtgagccttgcgagcncggagggaggccccac

SEQ ID NO: 609765 - DNA, 117 bp, Homo sapiens
ggccggaccgtctatcttctgaatcctcgaatcttctttctcgtttctctacagcggcacaaactcattaacaaggcttctcggtctttcatcttttcaattgctttgaatcttgaa

SEQ ID NO: 609766 - DNA, 882 bp, Homo sapiens
gctactcgggaggctgaggcaggagaatggtgtgaacccgggaggcagagcttgcagtgagccgagatctcgccactgcactccagcctgggcaacagagcaagactctgtctcaaaaaaaaaaaaaaaaatgagaataccgaaaacttgggaagcaatattggcacatagttcttgatatagtcaaatctactgtgttactcataagagggtagcgcgtttattcatctgtgaaacggcagacataatacttatcttacacaggttgcaagacgctcaaggcacaccatgtatgtaacagttcctgctgtaactatgaactcccatcctaatacccttttacctctctgtgggtttgtcttgacctggaaattggggctaaaacttagaaaaaaattcttacatgataactcagtgatgctaactcatagtttagggtgttcgctcatagataagactataacatcagctgggcgcgggaggctcatgcctgtaatcccagcacttgtgggaggccgaggcgggcagatcacctgaggtcgggaggtcgagaccagcctgaccaggcttggagaaagccccgctctctactagaagatacacacaattagactggggcgtggtgggctcaatgcctggtaaatccccagctactggggaggcatgaagggcaggagaatcgctttgaaacccaagggaggcggaagttgttggtgaaccgcagaatcggtgccattgcaactccaaggctggggcaacaagagcaaaaactctgtgttcaaagaacaaaacaggtttaattcccgacaaaacactagcgccaacaacagtgttaaccgcggtggagggaagtccataatgcagacaatctgggacaggaga

SEQ ID NO: 609767 - DNA, 579 bp, Homo sapiens
ccaagacggtcggggctgctgctaactccaggaaccaggtgtacagttgttgaaacatgaagtaggtctacacagtaggaactcatgtcatttctgctaagtaaaccagagcgaagtcgaggcggagggtctcggaaaagttcattgtagagggctctagagagattgggaactattaggagaccaactgatgcgagctcagagtcaagtagcatccttctctaagagcaggaggtcatgagtagctttctgccagagggagggtgtcacgagctgctcactgtgataggcaaaggatttgaggacctgatgactgtgaatctagcaaggtacagagcaacaggagaggtacgtgactgtacggaggagcaagcctagaagctggtgccattgagatggtaacattcttggcagggcgaggctgcatgtctccaaactctgtcaaccatcccaatatcgtgccatatcgagccgcttttatggcagacaatgagctgtgggttgtcacatcattcatggcatacggttctgcaaaagatctcatctgtgcacacttcatggatggcatgaatgagctgg

SEQ ID NO: 609768 - DNA, 139 bp, Homo sapiens
tgagcaagtgtgtatctcgtggttctacccgcccagttccaggcggctctgggatgaatatgaggagctcaagggtctgggcaggtcaaggcttcccggacacggatcactttggtctgattcctgccagctggctcag

SEQ ID NO: 609769 - DNA, 344 bp, Homo sapiens
aaattaaacttacaaatagttctcaaatcagcttttagcattacagccttaagttcttacttttaaagagacattttcttcctaatgtctaaccattggtaccattttgctgcctacactgtttcatatagagagtgtcgtgttaactgttaaatttactgaaacaatttttccccagggtcttattttgtggtagatagcaacgatcgtgaaagaattcaggaagtagcagatgagctgagagagagagagtgagccgagatcgcgccactgtactccagcctgggcaacagaatgagactctgtctcaaaaataataataataattaatataaccatttttg

SEQ ID NO: 609770 - DNA, 386 bp, Homo sapiens
aaattaaacttacaaatagttctcaaatcagcttttagcattacagccttaagttcttacttttaaagagacattttcttcctaatgtctaaccattggtaccattttgctgcctacactgtttcatatagagagtgtcgtgttaactgttaaatttactgaaacaatttttccccagggtcttattttgtggtagatagcaacgatcgtgaaagaattcaggaagtagcagatgagctgcagaaaatggtaagaaatatactttaaattcatcattttcaaggtgtgcttttctggattaaactggtggtggtttagtacattttgactatgattagattacacaaatggattgggggggctagaaataaacttaagaaacgata

SEQ ID NO: 609771 - DNA, 2243 bp, Homo sapiens
  misc_feature (973)..(973): n is a, c, g, or t
  misc_feature (1984)..(1984): n is a, c, g, or t
  misc_feature (2016)..(2016): n is a, c, g, or t
ttagggcccgccggccgtgttttttttcccggcccttagaataccttttagggaaaagtgccccaggagcgttccctgcaccttcaatgtcgaatgaccttcctgtttcggaaagtgtgcagtttttctaagtcacgccatgctagggaataaacacgttggaataggccacctaccagacccacattaggcggcacctactagaaaaatagattaaatcgttatcctggcaatgagtcctaatacacttgatcattgctgtgaattttaaaaggtgtagcaggccgggcgcggtgagtcaccgcgccaggcccgatcataaacacttttaaagtgaagaggctttccgcttcctcaacataaggagtaaatctttaatgctgcttctaggaaaaaaagtacaagaaaagcaagacttcctccttgccttctctttaaaaagcaacagccgatgaacacgtgttggagcgctctcgccttgacagaattagagatcttcagaatcacttggcgtggtggtcgaagcgtctagccctagctcattagggtgccacagtttctcggcccacaagtcagcttttaaccacttttctccgcaaaagaccggaccggtcttcatgcgtcaactaaagcaagcgtctggtcccgtgtgtgaaacgtgtaagttcatggcatcagggaatacccatcgcgcataccgtaatagaagagggcgaggttcctcacctaacccataatgctcagctcgcctttccggaagcaaggactatcaccccgacaataccttcatccgggcggaagcgtctcaccctgagtctgatttggcagtgacgaagcgaggtattgtgggactttgtccgtctcccagtacgcatgtgcctcagccggcctctcccggctcctggggccacgtccgggcggtggcgccgtcgagagatgcacgtcagcgaaactggccaatcccctgcagcgnaagcgcagtggctcgggcgcaccggaagcgcagggggatggggcggcggtgacgcgattctgtccgcgttggaggggccgggccgctgctggagtcgccgcggccgccgcgtgacgtggcacagccagagcctaaaggctagagccggagctgccgcgccagtcgcctagcaggtcctctaccggcttattcctgtgccggatcttcatcggcacaggggccactgagacgtttctgcctccctctttcttcctccgctctttctcttccctctcgtttagtttgcctgggagcttgaaaggagaaagcacggggtcgccccaaaccccttctgcttctgcccatcacaagtgccactaccgccatgggcctcactatctcctccctcttctcccgactatttggcaagaagcagatgcgcattttgatggttggattggatgctgctggcaagacaaccattctgtataaactgaagttaggggagatagtcaccaccattcctaccattggttttaatgtggaaacagtagaatataagaacatttgtttcacagtatgggatgttggtggtcaagatagaattaggcctctctggaagcattacttccagaatacccagggtcttattttgtggtagatagcaacgatcgtgaaagaattcaggaagtagcagatgagctgcagaaaatgcttctggtagatgaattgagagatgcagtgctgctactttttgcaaacaaacaggatttgccaaatgctatggccatcagtgaaatgacagataaactagggcttcagtctcttcgtaacagaacatggtatgttcaagccacttgtgcaacacaaggaactggtctgtatgaaggacttgactggctgtcaaattgagctttcaaaacgttacatgacacttggatatctaaccaaggacatgtttgataaaatgggctaggcttgttacaacaaattagttggatctgggttattaaacagtatctgggactggtntgggcagaatattaaacttattttgttgccantattgtttaccgagtataatgttgctatttagcaatgtgcttggttttacagaaattctccttggagagtttctctttaatttacttccatagcgtaatgctggcatagttttgtgaactttaataaatgtttgagtgtttttgggccacacaaatagtttaagtcactgaatctaggacataaaacggacagggataacatgacacggtattttccccaaattatg

SEQ ID NO: 609772 - DNA, 1370 bp, Homo sapiens
  misc_feature (84)..(84): n is a, c, g, or t
  misc_feature (103)..(103): n is a, c, g, or t
  misc_feature (131)..(131): n is a, c, g, or t
  misc_feature (135)..(135): n is a, c, g, or t
  misc_feature (139)..(139): n is a, c, g, or t
gaagggttgcaggctccccagtcacacccctgcccgaacaggaggcgtctccagcaaggcctgcaggccccacggaggagtcancccccagtgcgcctctgcngtccccagaaccacctgctgggccgccngggnagcntgcttctagttgtattctgattgaagacgagatatccggcgcgactggagcgagcacaggctagaagaggagaagcaccaaatcgagaggagggagaaagactcatagaagagagtcggaagaagcagaggcagcaggcgagccggacaccagatgagacgcgacgtacatccagtcgctcacaagacagaagagccccggtaacatacgaggggggcgcgtgcgcacacgatggggcaccacacctacagacggcgcacacccaggcgaccatcacgtcacccacagagacgcgtcgcgcacaacactggggagagcacgaggcgaagagcgccgctcagacacaacaactccccacaccaaaagagcgaccccacacgggggagggtgcgcgagcacgcagatcacgcctatcgataccataccctacgcgagagcgagcggggcgcagcgcccacccgcgagaggggcgacaccagcgcggcgtaacaaccggccagacagagcgcgcagagacacgacctagagagcaggagaagagcaaacaacaaatgaggagacaacacctcacccgacggacagagacgcaccgcccaacacaccgaccacgcacgagaacaccaaacgagagagaagagagcgaagacacacccgagagagacacgcagcaaccagcgagccgaaccacaccggcggccccgagcccgacaaaaagaaaagaaggaacacgagcgacagcactgaacggacccccacctgcccgcaaccgcaatcacgggcagagacaacacggagagagacaacaccaccccccaaagcgacgaacagaccagcagcggcgcccgatacagaggcgcgggggcaccccccaacgaccaaaccgccgacaacccagacgaccaagacgagacggcgagccaagccacaagccaccacacaacgaaccgaccaaagagccggcacgacagcggagcaacacgcacgccgcaacacacacacaccgcggcagaacaagtaacaagaacagaacagaaagcgaagaacagcagccaccacgagcacatccacgccatccgacggcgacgacagaactatacaactgacacgagacaataagcacaggcgcgtcaacagcagaacacagccgcgcgcagacaaacacccaccacacgcaccgacgcaaaccccaaccagcgccacgggaggccagagaagagcatcgaacggcgcc

SEQ ID NO: 609773 - DNA, 276 bp, Homo sapiens
ctagaggatccccgttgaaatgggcacagaaattaaaacaggcacgtccagtatttcttcggaatacattatattaaggccaaatgttgaaaagactttcctttgtaacactggattagagaagacttttcagtgtgttatctctaggatgatcagtaattcagcacttaaaaactgcagaggaaactgaaagttatgttccaggatgactttccgttgtttaccatattttcttagatttggtcatcatcaggaagcatttgttataattacaat

SEQ ID NO: 609774 - DNA, 2107 bp, Homo sapiens
  misc_feature (837)..(837): n is a, c, g, or t
  misc_feature (1848)..(1848): n is a, c, g, or t
  misc_feature (1880)..(1880): n is a, c, g, or t
tttttttttgtattgatgaaaggtgaatagaaaaatattttatttttaaaatattttttaaaatagaaatggcatctcactatattgccaaggctggtctggaacttctgggctcaagtgagtctcccatcttggcctcccaacatgctgggattacaggtgtgagccaccatgcctgacctgtagtcccagctactttgggggctgaggtgggaggatcacttgatcccaggaggttgagtaagccgagatgatgccactgtacttcagcttgggtgacaaagtgagacccttctctttaaaaagcaacagccgatgaacacgtgttggagcgctctcgccttgacagaattagagatcttcagaatcacttggcgtggtggtcgaagcgtctagccctagctcattagggtgccacagtttctcggcccacaagtcagcttttaaccacttttctccgcaaaagaccggaccggtcttcatgcgtcaactaaagcaagcgtctggtcccgtgtgtgaaacgtgtaagttcatggcatcagggaatacccatcgcgcataccgtaatagaagagggcgaggttcctcacctaacccataatgctcagctcgcctttccggaagcaaggactatcaccccgacaataccttcatccgggcggaagcgtctcaccctgagtctgatttggcagtgacgaagcgaggtattgtgggactttgtccgtctcccagtacgcatgtgcctcagccggcctctcccggctcctggggccacgtccgggcggtggcgccgtcgagagatgcacgtcagcgaaactggccaatcccctgcagcgnaagcgcagtggctcgggcgcaccggaagcgcagggggatggggcggcggtgacgcgattctgtccgcgttggaggggccgggccgctgctggagtcgccgcggccgccgcgtgacgtggcacagccagagcctaaaggctagagccggagctgccgcgccagtcgcctagcaggtcctctaccggcttattcctgtgccggatcttcatcggcacaggggccactgagacgtttctgcctccctctttcttcctccgctctttctcttccctctcgtttagtttgcctgggagcttgaaaggagaaagcacggggtcgccccaaaccccttctgcttctgcccatcacaagtgccactaccgccatgggcctcactatctcctccctcttctcccgactatttggcaagaagcagatgcgcattttgatggttggattggatgctgctggcaagacaaccattctgtataaactgaagttaggggagatagtcaccaccattcctaccattggttttaatgtggaaacagtagaatataagaacatttgtttcacagtatgggatgttggtggtcaagatagaattaggcctctctggaagcattacttccagaatacccagggtcttattttgtggtagatagcaacgatcgtgaaagaattcaggaagtagcagatgagctgcagaaaatgcttctggtagatgaattgagagatgcagtgctgctactttttgcaaacaaacaggatttgccaaatgctatggccatcagtgaaatgacagataaactagggcttcagtctcttcgtaacagaacatggtatgttcaagccacttgtgcaacacaaggaactggtctgtatgaaggacttgactggctgtcaaattgagctttcaaaacgttacatgacacttggatatctaaccaaggacatgtttgataaaatgggctaggcttgttacaacaaattagttggatctgggttattaaacagtatctgggactggtntgggcagaatattaaacttattttgttgccantattgtttaccgagtataatgttgctatttagcaatgtgcttggttttacagaaattctccttggagagtttctctttaatttacttccatagcgtaatgctggcatagttttgtgaactttaataaatgtttgagtgtttttgggccacacaaatagtttaagtcactgaatctaggacataaaacggacagggataacatgacacggtattttccccaaattatg

SEQ ID NO: 609775 - DNA, 1996 bp, Homo sapiens
  misc_feature (726)..(726): n is a, c, g, or t
  misc_feature (1737)..(1737): n is a, c, g, or t
  misc_feature (1769)..(1769): n is a, c, g, or t
tttttttttgtattgatgaaaggtgaatagaaaaatattttatttttaaaatattttttaaaatagaaatggcatctcactatattgccaaggctggtctggaacttctgggctcaagtgagtctcccatcttggcctcccaacatgctgggattacaggtgtgagccaccatgcctgaccttctctttaaaaagcaacagccgatgaacacgtgttggagcgctctcgccttgacagaattagagatcttcagaatcacttggcgtggtggtcgaagcgtctagccctagctcattagggtgccacagtttctcggcccacaagtcagcttttaaccacttttctccgcaaaagaccggaccggtcttcatgcgtcaactaaagcaagcgtctggtcccgtgtgtgaaacgtgtaagttcatggcatcagggaatacccatcgcgcataccgtaatagaagagggcgaggttcctcacctaacccataatgctcagctcgcctttccggaagcaaggactatcaccccgacaataccttcatccgggcggaagcgtctcaccctgagtctgatttggcagtgacgaagcgaggtattgtgggactttgtccgtctcccagtacgcatgtgcctcagccggcctctcccggctcctggggccacgtccgggcggtggcgccgtcgagagatgcacgtcagcgaaactggccaatcccctgcagcgnaagcgcagtggctcgggcgcaccggaagcgcagggggatggggcggcggtgacgcgattctgtccgcgttggaggggccgggccgctgctggagtcgccgcggccgccgcgtgacgtggcacagccagagcctaaaggctagagccggagctgccgcgccagtcgcctagcaggtcctctaccggcttattcctgtgccggatcttcatcggcacaggggccactgagacgtttctgcctccctctttcttcctccgctctttctcttccctctcgtttagtttgcctgggagcttgaaaggagaaagcacggggtcgccccaaaccccttctgcttctgcccatcacaagtgccactaccgccatgggcctcactatctcctccctcttctcccgactatttggcaagaagcagatgcgcattttgatggttggattggatgctgctggcaagacaaccattctgtataaactgaagttaggggagatagtcaccaccattcctaccattggttttaatgtggaaacagtagaatataagaacatttgtttcacagtatgggatgttggtggtcaagatagaattaggcctctctggaagcattacttccagaatacccagggtcttattttgtggtagatagcaacgatcgtgaaagaattcaggaagtagcagatgagctgcagaaaatgcttctggtagatgaattgagagatgcagtgctgctactttttgcaaacaaacaggatttgccaaatgctatggccatcagtgaaatgacagataaactagggcttcagtctcttcgtaacagaacatggtatgttcaagccacttgtgcaacacaaggaactggtctgtatgaaggacttgactggctgtcaaattgagctttcaaaacgttacatgacacttggatatctaaccaaggacatgtttgataaaatgggctaggcttgttacaacaaattagttggatctgggttattaaacagtatctgggactggtntgggcagaatattaaacttattttgttgccantattgtttaccgagtataatgttgctatttagcaatgtgcttggttttacagaaattctccttggagagtttctctttaatttacttccatagcgtaatgctggcatagttttgtgaactttaataaatgtttgagtgtttttgggccacacaaatagtttaagtcactgaatctaggacataaaacggacagggataacatgacacggtattttccccaaattatg

SEQ ID NO: 609776 - DNA, 155 bp, Homo sapiens
tttctggatatctgccagaggacgtgctctgagtctgggctggtgtgctctcccactaggagtgctaggagctgtcacaggtgtgacggtcacggggcagcctttggggtctcgcagcgagcacacgcaagtgaagcacacgcgtggtaccgggc

SEQ ID NO: 609777 - DNA, 2132 bp, Homo sapiens
  misc_feature (973)..(973): n is a, c, g, or t
  misc_feature (1984)..(1984): n is a, c, g, or t
  misc_feature (2016)..(2016): n is a, c, g, or t
ttagggcccgccggccgtgttttttttcccggcccttagaataccttttagggaaaagtgccccaggagcgttccctgcaccttcaatgtcgaatgaccttcctgtttcggaaagtgtgcagtttttctaagtcacgccatgctagggaataaacacgttggaataggccacctaccagacccacattaggcggcacctactagaaaaatagattaaatcgttatcctggcaatgagtcctaatacacttgatcattgctgtgaattttaaaaggtgtagcaggccgggcgcggtgagtcaccgcgccaggcccgatcataaacacttttaaagtgaagaggctttccgcttcctcaacataaggagtaaatctttaatgctgcttctaggaaaaaaagtacaagaaaagcaagacttcctccttgccttctctttaaaaagcaacagccgatgaacacgtgttggagcgctctcgccttgacagaattagagatcttcagaatcacttggcgtggtggtcgaagcgtctagccctagctcattagggtgccacagtttctcggcccacaagtcagcttttaaccacttttctccgcaaaagaccggaccggtcttcatgcgtcaactaaagcaagcgtctggtcccgtgtgtgaaacgtgtaagttcatggcatcagggaatacccatcgcgcataccgtaatagaagagggcgaggttcctcacctaacccataatgctcagctcgcctttccggaagcaaggactatcaccccgacaataccttcatccgggcggaagcgtctcaccctgagtctgatttggcagtgacgaagcgaggtattgtgggactttgtccgtctcccagtacgcatgtgcctcagccggcctctcccggctcctggggccacgtccgggcggtggcgccgtcgagagatgcacgtcagcgaaactggccaatcccctgcagcgnaagcgcagtggctcgggcgcaccggaagcgcagggggatggggcggcggtgacgcgattctgtccgcgttggaggggccgggccgctgctggagtcgccgcggccgccgcgtgacgtggcacagccagagcctaaaggctagagccggagctgccgcgccagtcgcctagcaggtcctctaccggcttattcctgtgccggatcttcatcggcacaggggccactgagacgtttctgcctccctctttcttcctccgctctttctcttccctctcgtttagtttgcctgggagcttgaaaggagaaagcacggggtcgccccaaaccccttctgcttctgcccatcacaagtgccactaccgccatgggcctcactatctcctccctcttctcccgactatttggcaagaagcagatgcgcattttgatggttggattggatgctgctggcaagacaaccattctgtataaactgaagttaggggagatagtcaccaccattcctaccattggttttaatgtggaaacagtagaatataagaacatttgtttcacagtatgggatgttggtggtcaagatagaattaggcctctctggaagcattacttccagaatacccagggtcttattttgtggtagatagcaacgatcgtgaaagaattcaggaagtagcagatgagctgcagaaaatgcttctggtagatgaattgagagatgcagtgctgctactttttgcaaacaaacaggatttgccaaatgctatggccatcagtgaaatgacagataaactagggcttcagtctcttcgtaacagaacatggtatgttcaagccacttgtgcaacacaaggaactggtctgtatgaaggacttgactggctgtcaaattgagctttcaaaacgttacatgacacttggatatctaaccaaggacatgtttgataaaatgggctaggcttgttacaacaaattagttggatctgggttattaaacagtatctgggactggtntgggcagaatattaaacttattttgttgccantattgtttaccgagtataatgttgctatttagaacgggtggtggttacaacatttctggggagatctctttaatatttaccagaggtagcgattgtttgactttatgttgagggtc

SEQ ID NO: 609778 - DNA, 209 bp, Homo sapiens
ttacttttccacagggtacttttccagagggtacttttccacaggtgggaatgtggggtgggagcccctaaacagagtccctactgggggacagctctctaccacctagtggagctgtgagaagaaggccactgtcctccagaccccagaatggtagatctgctaacagcttacactgtgcccctggaaaagtaccctgtggaaaagta

SEQ ID NO: 609779 - DNA, 248 bp, Homo sapiens
ctccgtcggcctcactcatgtcacaatcttctccaacgtactggaaccctgctgtgagaagtgtagctgtacatttacatggtctccagaacttcctttctgggaacgagtaggactctggagaagtagacatggctctctcttgtgactcttggggaactggagatttatgttgggtagcctcagattggagctgagtattagagagctcatggtgcagatgatgaatgtactcactcctccccaga

SEQ ID NO: 609780 - DNA, 205 bp, Homo sapiens
caaacccaattagtcaaatttaagtctacagaagtggtatcagatcaacagggaaattatggactcttgggtattgggataactggatactctccctaaccaccacacaaacagtaaaaaaccatgggtgaattctattaagaatggagaaaattttccaaaaatggctcaaagtccagaagcattaaaggaaagattgatcaaa

SEQ ID NO: 609781 - DNA, 934 bp, Homo sapiens
  misc_feature (382)..(382): n is a, c, g, or t
tgttgtgagcgataatgtaatcttgtgctggcgggttatgtcccccccccgttcctgactgtgcgttgtattatatgtatggcgccagcgttgctgtttccggacgttgagctcgagcgcccctgtatgtaaggtggggcagcccccatgtgtcccgggtgtgtcggccgcgggtgtgtccaaggtgctctgcgctacgcgggataggatgggtacccgcgtctgctttttcgtgataagatttatacgcagcacttgtttgtatgttgccgctcgctcgtcccgccgtctcgacactctccatgggtatgccgatgtttttggcctcccctccgtggctatctcgactagggttgacactcgggatggtgttgacacgccnccgacggtatggtgcttgcgcccttcccgcgctctcgttctgctctcactgttaagtgggaggccccctcactccgcccccccaattacgacgggcagtttgttgtgacccccacaaggggggtcgcgctcactctgtttcacgaaaactggttctctctctcccttccagtaccactaattggtcggtgcttaaacatttgccgcgaacccactctcctagcaggactcctctcgacgccacgcctcgcgggttatatgcgctgctctacattgtccagacgctgccagccggcgttcatttgttctaattgccctcgccactccaagatctccaatgagttcccccgatgatatggctacaacgttttaatagatgggaagccccctcgttataatagctttccacggtttggggcgcccaccttatttgtccaccccgaagaacgcctgcacgaccttgttcctccatgacgccccccctttgagttaattctccccgcgactctacgcaacttgttaatgcgcctcctatccccaaacgcccaacagc

SEQ ID NO: 609782 - DNA, 1972 bp, Homo sapiens
  misc_feature (973)..(973): n is a, c, g, or t
  misc_feature (1938)..(1938): n is a, c, g, or t
ttagggcccgccggccgtgttttttttcccggcccttagaataccttttagggaaaagtgccccaggagcgttccctgcaccttcaatgtcgaatgaccttcctgtttcggaaagtgtgcagtttttctaagtcacgccatgctagggaataaacacgttggaataggccacctaccagacccacattaggcggcacctactagaaaaatagattaaatcgttatcctggcaatgagtcctaatacacttgatcattgctgtgaattttaaaaggtgtagcaggccgggcgcggtgagtcaccgcgccaggcccgatcataaacacttttaaagtgaagaggctttccgcttcctcaacataaggagtaaatctttaatgctgcttctaggaaaaaaagtacaagaaaagcaagacttcctccttgccttctctttaaaaagcaacagccgatgaacacgtgttggagcgctctcgccttgacagaattagagatcttcagaatcacttggcgtggtggtcgaagcgtctagccctagctcattagggtgccacagtttctcggcccacaagtcagcttttaaccacttttctccgcaaaagaccggaccggtcttcatgcgtcaactaaagcaagcgtctggtcccgtgtgtgaaacgtgtaagttcatggcatcagggaatacccatcgcgcataccgtaatagaagagggcgaggttcctcacctaacccataatgctcagctcgcctttccggaagcaaggactatcaccccgacaataccttcatccgggcggaagcgtctcaccctgagtctgatttggcagtgacgaagcgaggtattgtgggactttgtccgtctcccagtacgcatgtgcctcagccggcctctcccggctcctggggccacgtccgggcggtggcgccgtcgagagatgcacgtcagcgaaactggccaatcccctgcagcgnaagcgcagtggctcgggcgcaccggaagcgcagggggatggggcggcggtgacgcgattctgtccgcgttggaggggccgggccgctgctggagtcgccgcggccgccgcgtgacgtggcacagccagagcctaaaggctagagccggagctgccgcgccagtcgcctagcaggtcctctaccggcttattcctgtgccggatcttcatcggcacaggggccactgagacgtttctgcctccctctttcttcctccgctctttctcttccctctcgtttagtttgcctgggagcttgaaaggagaaagcacggggtcgccccaaaccccttctgcttctgcccatcacaagtgccactaccgccatgggcctcactatctcctccctcttctcccgactatttggcaagaagcagatgcgcattttgatggttggattggatgctgctggcaagacaaccattctgtataaactgaagttaggggagatagtcaccaccattcctaccattggttttaatgtggaaacagtagaatataagaacatttgtttcacagtatgggatgttggtggtcaagatagaattaggcctctctggaagcattacttccagaatacccagggtcttattttgtggtagatagcaacgatcgtgaaagaattcaggaagtagcagatgagctgcagaaaatgcttctggtagatgaattgagagatgcagtgctgctactttttgcaaacaaacaggatttgccaaatgctatggccatcagtgaaatgacagataaactagggcttcagtctcttcgtaacagaacatggtatgttcaagccacttgtgcaacacaaggaactggtctgtatgaaggacttgactggctgtcaaattgagctttcaaaacgttacatgacacttggatatctaaccaaggacatgttgatttggagatataactatttgtgcnaatatgtacgagatatgtgtattacatgagctgt

SEQ ID NO: 609783 - DNA, 636 bp, Homo sapiens
gcacgagggcctgcgctggtacaggctgtgaccatagggaagtggagctctgggacgcgcccctggcttttggataggactgttgcccagggggcgtggcggtgaccgagatctagtactccagggccggaggatgattagaccatgcatgcgttaacgacgctgcggaggtccctgagccagacacaggggaacggacagaggccaatggcgcacattaggccctaaccagagtcgcactctggcgtctagcaccggttgcggccgggacctgtcatggcaagacttaacctatgagcgtgtcatgggcctaaattgtgcaatgggtcttatgaaggactaaccacatgggggcctgcggcgatgatgagcaccttagggaggggtctgtggactgtgaccatgcctccttggtacaggccggtcccataaggttttaccatgtgcctttcccagttactcatggtaggcttgagggcgggaaaatgccctcaagagttgagggagcttttaggaacgggccctgggcccaacatgggtggagaagcgatatcttcttcccaaaaaatctatacaatttagacttgggggcctcgtaggatacctctgccctgaagagtcctctgttgtttttga

SEQ ID NO: 609784 - DNA, 1907 bp, Homo sapiens
  misc_feature (973)..(973): n is a, c, g, or t
ttagggcccgccggccgtgttttttttcccggcccttagaataccttttagggaaaagtgccccaggagcgttccctgcaccttcaatgtcgaatgaccttcctgtttcggaaagtgtgcagtttttctaagtcacgccatgctagggaataaacacgttggaataggccacctaccagacccacattaggcggcacctactagaaaaatagattaaatcgttatcctggcaatgagtcctaatacacttgatcattgctgtgaattttaaaaggtgtagcaggccgggcgcggtgagtcaccgcgccaggcccgatcataaacacttttaaagtgaagaggctttccgcttcctcaacataaggagtaaatctttaatgctgcttctaggaaaaaaagtacaagaaaagcaagacttcctccttgccttctctttaaaaagcaacagccgatgaacacgtgttggagcgctctcgccttgacagaattagagatcttcagaatcacttggcgtggtggtcgaagcgtctagccctagctcattagggtgccacagtttctcggcccacaagtcagcttttaaccacttttctccgcaaaagaccggaccggtcttcatgcgtcaactaaagcaagcgtctggtcccgtgtgtgaaacgtgtaagttcatggcatcagggaatacccatcgcgcataccgtaatagaagagggcgaggttcctcacctaacccataatgctcagctcgcctttccggaagcaaggactatcaccccgacaataccttcatccgggcggaagcgtctcaccctgagtctgatttggcagtgacgaagcgaggtattgtgggactttgtccgtctcccagtacgcatgtgcctcagccggcctctcccggctcctggggccacgtccgggcggtggcgccgtcgagagatgcacgtcagcgaaactggccaatcccctgcagcgnaagcgcagtggctcgggcgcaccggaagcgcagggggatggggcggcggtgacgcgattctgtccgcgttggaggggccgggccgctgctggagtcgccgcggccgccgcgtgacgtggcacagccagagcctaaaggctagagccggagctgccgcgccagtcgcctagcaggtcctctaccggcttattcctgtgccggatcttcatcggcacaggggccactgagacgtttctgcctccctctttcttcctccgctctttctcttccctctcgtttagtttgcctgggagcttgaaaggagaaagcacggggtcgccccaaaccccttctgcttctgcccatcacaagtgccactaccgccatgggcctcactatctcctccctcttctcccgactatttggcaagaagcagatgcgcattttgatggttggattggatgctgctggcaagacaaccattctgtataaactgaagttaggggagatagtcaccaccattcctaccattggttttaatgtggaaacagtagaatataagaacatttgtttcacagtatgggatgttggtggtcaagatagaattaggcctctctggaagcattacttccagaatacccagggtcttattttgtggtagatagcaacgatcgtgaaagaattcaggaagtagcagatgagctgcagaaaatgcttctggtagatgaattgagagatgcagtgctgctactttttgcaaacaaacaggatttgccaaatgctatggccatcagtgaaatgacagataaactagggcttcagtctcttcgtaacagaacatggtatgttcaagccacttgtgcaacacaaggaactggtctgtatgaaggacttgactggctgaacaggacattccagttaagcccactgggagatcctctagagtattatcaca

SEQ ID NO: 609785 - DNA, 1212 bp, Homo sapiens
gaaggaagagcggcttgcgtggtgatcattactagcttgttcaatgagagaaccagtatggctgctgagggctgattcaggaagaacaccggatcgtcaacgcacgctgggtaccacatccagggaaggatcgcacaacgtaccactcgtggatcggaccgacaaccgataggcccgtgacactctgatcacgaggagcacatccgatgccgagacgaaggaacaccagcactgacggaaaggactgagagtcagacgtgcaatttcgttgttgcatgctattcgaagaagacaaggtgatcgcattcaagtattatacaataactgattgatagctaatagaaagagaaaagacttgataatagtagaaatgtatatagtctcaaagaacgaggagcagataatgtcaacaatgagttagtatcgccaagatagtggatagagggagaaatgatgaagatcaatatagacagtactaagaaatgagtgacctcatcaaaatacattagataaaaatgagaaatagattaacagacagaaaaatatggggtatatattcttagtgagagtagaataaaagaataaaaacatgtagaacgcacagttgagacaaagttgcagagacgatgaagggaaaaagatagaatgtggtactaaaattaaattgtagagggtacaataggaaatagaggaaaattaacaaataatagagaagatatggaaataggaaacagaaagagtacaacaatatagtaaacaattgataataggtgaacattaatacatagacatagttggaaagaactaacagagaacactaggaccaattaatcataaacacagtataatggtacgtattgtatagcaacacaattggaattatgatatcaaagagaattacgaaaaataacaaaaggaaacaacggagcatagcaaacaacgaacaagacccacagagccacatcactaccgcaaggcacgcaaaaatactagacgtagaagccaacacgaaaacgtacaagcacaaacaacccaggacataagagaacaagcacgagcacaacaaaagataagaagaacatgagacaacaccaaacaagaacacaccaacagacaatcagaaccaaacgaaagcattgaaacgacataagggcggaacggcacgcagtaatagcacaaaacgacgactcggctatacaataccaccaaacg

SEQ ID NO: 609786 - DNA, 1150 bp, Homo sapiens
  misc_feature (21)..(21): n is a, c, g, or t
  misc_feature (24)..(24): n is a, c, g, or t
  misc_feature (37)..(37): n is a, c, g, or t
  misc_feature (891)..(891): n is a, c, g, or t
  misc_feature (923)..(923): n is a, c, g, or t
aagcatggtatcaacgcagantgnccattacggccgnggcagtcgcctagcaggtcctctaccggcttattcctgtgccggatcttcatcggcacaggggccactgagacgtttctgcctccctctttcttcctccgctctttctcttccctctcgtttagtttgcctgggagcttgaaaggagaaagcacggggtcgccccaaaccccttctgcttctgcccatcacaagtgccactaccgccatgggcctcactatctcctccctcttctcccgactatttggcaagaagcagatgcgcattttgatggttggattggatgctgctggcaagacaaccattctgtataaactgaagttaggggagatagtcaccaccattcctaccattggttttaatgtggaaacagtagaatataagaacatttgtttcacagtatgggatgttggtggtcaagatagaattaggcctctctggaagcattacttccagaatacccagggtcttattttgtggtagatagcaacgatcgtgaaagaattcaggaagtagcagatgagctgcagaaaatgcttctggtagatgaattgagagatgcagtgctgctactttttgcaaacaaacaggatttgccaaatgctatggccatcagtgaaatgacagataaactagggcttcagtctcttcgtaacagaacatggtatgttcaagccacttgtgcaacacaaggaactggtctgtatgaaggacttgactggctgtcaaattgagctttcaaaacgttacatgacacttggatatctaaccaaggacatgtttgataaaatgggctaggcttgttacaacaaattagttggatctgggttattaaacagtatctgggactggtntgggcagaatattaaacttattttgttgccantattgtttaccgagtataatgttgctatttagcaatgtgcttggttttacagaaattctccttggagagtttctctttaatttacttccatagcgtaatgctggcatagttttgtgaactttaataaatgtttgagtgtttttgggccacacaaatagtttaagtcactgaatctaggacataaaacggacagggataacatgacacggtattttccccaaattatg

SEQ ID NO: 609787 - DNA, 156 bp, Homo sapiens
taaatttttagtagataaccacatctccctacatggcccaagcgggtctctaacctcggagctcaagggatcctccggcctgggcctcccaaagtgtggggattacgggagtgagccaccacaccgggccttaaattacttctactcgggaaagtg

SEQ ID NO: 609788 - DNA, 1132 bp, Homo sapiens
  misc_feature (873)..(873): n is a, c, g, or t
  misc_feature (905)..(905): n is a, c, g, or t
ggagagccggagttgccgagcaagtcgcctagcaggtcctctaccggcttattcctgtgccggatcttcatcggcacaggggccactgagacgtttctgcctccctctttcttcctccgctctttctcttccctctcgtttagtttgcctgggagcttgaaaggagaaagcacggggtcgccccaaaccccttctgcttctgcccatcacaagtgccactaccgccatgggcctcactatctcctccctcttctcccgactatttggcaagaagcagatgcgcattttgatggttggattggatgctgctggcaagacaaccattctgtataaactgaagttaggggagatagtcaccaccattcctaccattggttttaatgtggaaacagtagaatataagaacatttgtttcacagtatgggatgttggtggtcaagatagaattaggcctctctggaagcattacttccagaatacccagggtcttattttgtggtagatagcaacgatcgtgaaagaattcaggaagtagcagatgagctgcagaaaatgcttctggtagatgaattgagagatgcagtgctgctactttttgcaaacaaacaggatttgccaaatgctatggccatcagtgaaatgacagataaactagggcttcagtctcttcgtaacagaacatggtatgttcaagccacttgtgcaacacaaggaactggtctgtatgaaggacttgactggctgtcaaattgagctttcaaaacgttacatgacacttggatatctaaccaaggacatgtttgataaaatgggctaggcttgttacaacaaattagttggatctgggttattaaacagtatctgggactggtntgggcagaatattaaacttattttgttgccantattgtttaccgagtataatgttgctatttagcaatgtgcttggttttacagaaattctccttggagagtttctctttaatttacttccatagcgtaatgctggcatagttttgtgaactttaataaatgtttgagtgtttttgggccacacaaatagtttaagtcactgaatctaggacataaaacggacagggataacatgacacggtattttccccaaattatg

SEQ ID NO: 609789 - DNA, 128 bp, Homo sapiens
tggatctgatagttacaaattgtgttacttgcctgggattttttgaacgtttgtaactgctgtcttcctagtccaaacagctgcagtttgggcatttttctttttaattattcttcctctgacttatg

SEQ ID NO: 609790 - DNA, 176 bp, Homo sapiens
tgtagatggggacataccccagggcgggaattttgtatggagccatcatggaaaaacagggatgggttttataatatacaaatataaaaatctataaagggatatttttagaaaaacagcccccccctgctttttttgaaaatagtttgaataagaataaaatggatttttccaga

SEQ ID NO: 609791 - DNA, 698 bp, Homo sapiens
  misc_feature (32)..(32): n is a, c, g, or t
  misc_feature (209)..(209): n is a, c, g, or t
  misc_feature (224)..(224): n is a, c, g, or t
  misc_feature (245)..(245): n is a, c, g, or t
catcccgagcctcccaaagcagaaatgcagcngccgccgccgccacctccaggccactatggcgcctgggctgcccaggagcttcaggccaagttggcagagatcggagctccgatccaggtaatcgcgaggagctggtggagcggctgcagagctacacccgccagactggcatcgtgctgaatcggccggttttgagaggggaaganggggacaaagccgcnccacctcccatgtcggcacanctccctggaattcccatgccaccaccacctttgggactcccccctctgcagcctcctccgcagccccacagctccaccaggccttggtcttggtttcctatggaaccaagccaccaaatttggggcccccgaccgtcctctccgtgtgggtgacgccagatggcactgtcagaggaggagcggctgcacgttggctcagcagcaggcggcattgctgatgcagcaggaggagcgtgccaagcagcagggagatcattcgctgaaggaacatgagctcattggaggcagcagaagcgggcagagtgtgtaactaggagcagggaacgaaagccggcagatagccaacgatgggcacccaggccctcggcccccaaaagacatggcgccacgatttggtgtgcgcactcctctgggtcctcgagtaagctgctccagtgggccagatgggacaac

SEQ ID NO: 609792 - DNA, 130 bp, Homo sapiens
tcctgcatggccatttataagagcagaagagctttatctatattccctcttctttgatacagactgggctagcatataagaaaaacataggtctagtgaaggacatactgattagagctttaatcagtgt

SEQ ID NO: 609793 - DNA, 114 bp, Homo sapiens
  misc_feature (47)..(47): n is a, c, g, or t
  misc_feature (110)..(110): n is a, c, g, or t
  misc_feature (113)..(113): n is a, c, g, or t
cgaccgaacaatggctaatgaaactaacctgaaagcaaatgataacnatacacaggactaaagggcgaacctgatctcttatactagtgccttagtcatctttattgcanaang

SEQ ID NO: 609794 - DNA, 414 bp, Homo sapiens
  misc_feature (399)..(399): n is a, c, g, or t
gcaaccacactttataacaactcactctcgtggtagcaaattcagtcccatgagggagaactcacttctactccaatgagaaaggcactaatcactctcacaacatcatcacctcttaaaggccccacttctcagcatcattatattgccaactaaatttcagcataaattttggtggagacaaaccacatccagcccataacaactacccaccttctttctgcttcattctctgccctttctttctgctggctcccctcactcttgttcctttccctttctgatctttctctcctattctttctccttcccttctgtgctccctctagtcctttccctgcttaccaggatggacttcagcctctgtgtctccatttcctgtctggcatctgcatgggnttttgttttccttgg

SEQ ID NO: 609795 - DNA, 146 bp, Homo sapiens
gtgtgcaggctctaggaagagtctcatggctccaaaacacatttctctgacccgtggcctcttgggttcttggtacagtcttcttgtatgtggtcatagaatatgcctgcattgagatgactaagaagtcaagcgacaatacttgg

SEQ ID NO: 609796 - DNA, 354 bp, Homo sapiens
aaaaccccccatttacccccccccccgccctcaagactgtgggctttgggaagccccgcttaaatgtttggccccccccaaagttggaatggggccggcccagggaggccccttgaaatttacccccttttgtgggaccaaaaattgttttaagggggccggccaacctgttttttcccctccctgggaagggggcccaggggccgcctttaatgggccccccgccccgggttttattttttttggaggccaccctttttttggttttttggggttttttataatccaaccgggttttgcgggtttaatgcccatttttcctgaaaataaaaaatgaaattttttggttcccca

SEQ ID NO: 609797 - DNA, 1632 bp, Homo sapiens
  misc_feature (624)..(624): n is a, c, g, or t
  misc_feature (1265)..(1265): n is a, c, g, or t
ccgcccgcctactgcctgcgccgtgtgtgttctgctccgggtcggcgctcggctgtgtctcacatgtggcgccctccatttcgccagcggtggttttttatctcctccctccccaggctcgttttggtgggcgggtggtgctccaactgtctagctccgacggttggtggttcggagctgtgcccccgcggggagggcgtctgttctttttcgtgggagggctgctagcagttgatgtagcggcccaccgggtgtcctcttgggcgtggttgtgtctccaacagtggggccggcccgcgttggtagttcgttgcgttgtcaccggttgtgtgtgtcaggggtggggtttgcccccccgagtctgttgctgtctgctttgtggcgcccacacgctggttgttgctccctgcgcgtcccccagccgagtagttttgtctgttcccgtgcggcgcgtttcgctgttggtctcccatcctcctacagtgggggggccctttactcgactcctcccaggggtgcgttcgtcttccttctactcctcctgtggggtccgcccccttgtagatgtttaatagatgacatgggtggcgtggcgctgcgctcctcccgctcgatcgtcccttnttggtgtgtgggccggctgtgtgctccaccgatgtgggggcccgcccaccgatggggcgccgaccatcaggggggttgtttattccccggcgtgtttagtgttaatgcgtactattatcgcggggaggattttttctccgtgtgtgtgttttcgttcgccccccgctgttttggtgtgatttgtgcggccgccccggttgtgttggttatgtcgtgctgtcgtccgctcacgacggtttgtccgtcctctttgttaatgatgggcggtggttctgccccaaagcctgtgtttttcctccgtgggcaaccaataatgccgccgctgtgtgtgccccaacgagttactacattgtggggggtcggtgttgtggacaccccaccacggcgttttaaaagaaagggtgtttttggcgtctcctcgggaatgagccccgcctgttctacagggtccgccccgggttttgtccaccacatagtggtgtgagtccgcatagtcttgtggagaacgccccccctcgtctggtggggggcttctctcgtagagagagttcccctcgtagatatgtatctctaatacctgtgggtttgtggtgatacagagatttctcacacacatatgacacaattgtttttgtagaggntttatatctctctctcatgtgagatccacattctcactttataggctatatctacgagaagagaatatctcttgagacacacccacgctgtgagatctctccacacaaccacgctctcaccacacgccaccacgcggaagatatgtcgcgtgtggctgacacatcttgccaggcccgaaaagaacccgtggcccttgtgaaagggcccaccaagattctccacccaccacttattggtggctttctccccgggccagaccttgggagaaaggcgcgcccatacatcttctccagacgtcccccctttcccctaaaataagttaagtttgttaaattcatactttattaaccattttggaccgtccca

SEQ ID NO: 609798 - DNA, 366 bp, Homo sapiens
  misc_feature (12)..(12): n is a, c, g, or t
  misc_feature (35)..(35): n is a, c, g, or t
  misc_feature (64)..(64): n is a, c, g, or t
  misc_feature (91)..(91): n is a, c, g, or t
  misc_feature (98)..(98): n is a, c, g, or t
  misc_feature (108)..(108): n is a, c, g, or t
  misc_feature (190)..(190): n is a, c, g, or t
  misc_feature (335)..(335): n is a, c, g, or t
caatttaatggnaattaaccctgctccctgaatgnctgggtaaataatgaaattaaggcagaantcaagacattctttgaaactattgagnacaaagntataacatanccagaatatctgggacacacctaaagcagtgataagagggaagtttacagccctaaatgcccacatcaaaaagttagaaagntctcaaataaacaacctgacatcccaactagaggaactagagaaacaagagaagaccaaccccaaagctagcagaagatagaaataaccaaaatcagagctgaactgaagggaaattgagatgcaaaaaaagccatacaaaaggntcagcaaatctaagaattggttttttgaagg

SEQ ID NO: 609799 - DNA, 727 bp, Homo sapiens
gggacccacggagcgaaagagcgagcggccctacggccgtcgggggccggggcccgagatgttatctgggaagaaggcggcagccgggtgggggctggtgcaggggagcaaccgcgacggaggtgggccctgggacagagggtggctccggaagaacgggtctagaggtgcctgcgcaaacaccagggggtcttgtcgggcccgggccgaggctgggaccggggttcgaatgggggagcggcaaaagccctggaaatagagaagtctctctggggtccattcgcccccagggggctccgtggttgggaaaccaggcatgaggactactggagggacgcacagcgctcgggcactaatgttgaacgaggccttgggttctgtggaggacccttgtggagaacgtgggaaattgagaagagacaccccgaagggccggtgggacaccagggcggggcgcaaacaggaggcgagggtaaaaggacaagagaagtagagtaatgaaagctgggaccccaaacttctacagaaaggaatacgtccccacgtccgacagaagagacaataatggcccaagacgcgtaggaaggggaaagagaggctccccccaaaagaacgccgagaaagccccgaacggagtaaaaaacaggaaacggagagccttgaaaaaccaggggaccaggcaggagaggctcagagaaaagactggtccggagagttgcacaaggca

SEQ ID NO: 609800 - DNA, 258 bp, Homo sapiens
ccatggtatcaacgtcactgaaacgagatttcaatgatcttcgagtacttcctgcagagacacatgagaagcgggacttcgtctccgcaggggcttggcccgaagtgtcagcggcgtatggagcccccgtggttggggtcttgttcagcttggaggagggtgcgtccttcttgaaagcaagttcctgacccttggagggatctacctttgcttcccatgatcatccaacgttcacccctgaacattttgtcctgagca

SEQ ID NO: 609801 - DNA, 144 bp, Homo sapiens
tagacgctcccccaaacgcagagaggactgggccattctccttagagagaagtggggtggcttttaggatggcaagggacttccttggtcaacgcgagaacctctctgcgtttggagctcctattcaagtcctctctgcgtttg

SEQ ID NO: 609802 - DNA, 221 bp, Homo sapiens
tgtattggtggtgctccgtccagaaaaaattcccttcttgcctggggactagactactaacattaatcacaagattataagttatgctttaggagtcatgtagctggagactacaagattctggccctccctaaactgctcctacagtcaggacttgagatggtttccagactctacccttgatggatcaaccggcaccacccagatcgagcaccaccaat

SEQ ID NO: 609803 - DNA, 197 bp, Homo sapiens
aatttaagtctttgtatttttttagagaccaggtcttcctcaggctggagtatagtgatgtgatcatagcttagtacagccttgaactgttgggttcaagtcatcctcctgcctcagcctcccaaagcactaggattataggcgtgaaccaccctgcccggccatgaagttaaatttttggttattagcttgttgag

SEQ ID NO: 609804 - DNA, 483 bp, Homo sapiens
tggttgcttttgctgacgaccatacgctcagccatgcccgaggcgttgcctaagctgtcagcgtgctactctctcttcctaccctggaggctattctgcgtcctgacgtcatgtagctgcctagccgcgtagttccgtcctatcatatgtaaacggacccggtttcaacgtcatacatggccatacgtcgcacatcacgctagcactctctgacgaatcgcctaccgtttatctcttcttaagccttccccattccgcatccgggatgaaccagttcactctgctacaggccttccaacgagatcctgcaaccgtgggtcccgcctttcacacgagctctaacgaatgtgactcatctaaagtgcacgcgcttttgtaggccatccccgttcatcttgtacctgaacgctcgccctaaggcttatctgttcgtatccgaactatatctctctgcatttatcactggcgcctcctacgctgccg

SEQ ID NO: 609805 - DNA, 140 bp, Homo sapiens
gtactaagatccgagagacgacgaggactgtgcatggggaagtgtttagactgggttcgagtggtgtttctccagtgcttaggtcgataatctgtcttggtgtagggttggctggacagtgggtagacacgaagactctg

SEQ ID NO: 609806 - DNA, 544 bp, Homo sapiens
atctagaggatccctctccaaaaaataagaataaaaaaggaaaaagaaaataccatcagacgctggtcagcatactgtcaccacagcctcacgcaggcgactacatccttgtacccagcgtccgcggggcctcctccccaagaatgccgcatttggagcccacattcccagggaccccagaatccttcccttaacagtgctccactccagctgcactgccccctccacatctgcctcatgttcagggccaagggccccataccccaggtcagcccagggaagacccaggccgcctgcccatgtatgccaggccaggactcactccagggcagcataattcctcttcagtgagagtgaacatgggggtggaagctgaacgaaggatcccaacacagacctgcgaggaagaccacagcaccaggtgtcgacagagcaggccagaaaaaaaacacttcagaaatggagaactggctaccaaatacaacctgagattattttttacaacgtatttattgcaaagaatgctggacacagtgttgcatgt

SEQ ID NO: 609807 - DNA, 1353 bp, Homo sapiens
tccgcctcttcgggagagattttagcgcacgccggggagcagacgtgtgaagtctgtcccccacatctaccgaggcgatataataccggtgggacccacagcaacaacaagcacagtggtgcgcgggaaaacattggggcgggggaaccgtggataatatgcgccgcgggggcacttgcgcgcccaaaataggagacccggtggcgcgacctaatgtgccgggcgcgaacgacaaagtaacacgcccccacaaaatggccgccatttttccccagaaagtgccccagcgtttcccatctggggggaaaaaagggagaaaacttggggggaactacccgctgggggccgcgccccgagggggctcttccccacgagaaaagagggggaaagtatccaactgtgtagacccgctgtgccgggctttggctcggggaatccccctcgagatgctgcgagcgttgcgaagacccccaaattgtggttaagggtcacaaaaaagacccggcgtgaaaaaaggcctgtgtgttgtgtttaacgtcccctacggggtttcacccctatgcccacggtagttctctcctgagaaaaccactcggtttgcgcacactgttgtttcgtgcgaagcacacgggccaactaattgtggtattatgtggacgccctctatgtttctctgccacaaattgctttttcctaaagagaaaaagggcgagaccgggaaaccaaagaaaatcgggggaactattccgagggcgctagctcgcctcgggccatcctgacgcactctgggttttcgaggaataaccttgaatcggcgacactagtgccctcattttagcgtcggcatcctacaggggagagacagtgcatttcttgcgcccacacatttctcgtggggaaaaaggttttctaaataccttctcgatatgcttccactagtctttcctcgtgttaaggccacaggggtcccacgagaaacctgggaactgatatctttttttaatatgtgaaagccctgggccacctgaaagaataacactggctccacctggacacccaaaagagggaatggaatcctcccggcacagggggcctttctaaaagccttaggaaaaaggaaactgaaactatattcacacatttggaacttttcaatacctactctggacgctgaattttttctttcctaaaacacgggaaaaatgaatgcttaccaaagcactcttttttggtaatttgctttggatccctcccccaacagcctcggtgtttttaaatggagacaaataaaccatcaccttttgtaccaaaacttttcaacgattaaaaaacaaaccaaaaacaaaaaaaaaa

SEQ ID NO: 609808 - DNA, 249 bp, Homo sapiens
taacttacctctgaaaatctacaactgcaataaacttcaaaccaaagcttacgatagtatttacaccgtatccattctagaataatgattcatccttgtcctcaaggtggcttagagttggaagacaggcaatgtcatgttatattattttcaatcaaactaaggtctattatggatacagcaacagcttaagatcacgctgccataaggctgttggtgaatggtccactaatatctgatgggtccgtc

SEQ ID NO: 609809 - DNA, 286 bp, Homo sapiens
  misc_feature (17)..(17): n is a, c, g, or t
  misc_feature (141)..(141): n is a, c, g, or t
  misc_feature (179)..(179): n is a, c, g, or t
  misc_feature (258)..(258): n is a, c, g, or t
  misc_feature (260)..(260): n is a, c, g, or t
  misc_feature (263)..(263): n is a, c, g, or t
  misc_feature (270)..(270): n is a, c, g, or t
gcggcaagggctttcgnggcaagagttcgggcgctgttgcagcaccagcgcacacacacgccgagcgcccctaccgctgcccccacttgggcaaagcttcgggcagagctccaacttgcaacaccacctgcgcatccaacnacggcgagcggccctacgcctgctcgcactgctcacangtcggccagagctcagcgctgctccagcacctgcacgtgcattcgggcgagcgtccctaatgctgtcagctctgcgggnangtntggccanctccagcctcaccaag

SEQ ID NO: 609810 - DNA, 984 bp, Homo sapiens
  misc_feature (225)..(225): n is a, c, g, or t
  misc_feature (726)..(726): n is a, c, g, or t
  misc_feature (964)..(964): n is a, c, g, or t
gtagtccgagtggaccatgagctatcttgagtggcagtgtgcgatcgtgatctccgtgaagacctggtagctgctttgcgcgtcatggccttgcaactatcttgcaccttgacatgatggcacgattgccaggaattcataagaacgcgtttgttcacttcatttggacacatcgctgtgtgactcgtcaaactatacacatccccatcgtgaatccggagaacntgtgcctgatgagcctctatgtgagctcgtatatgccagccaggaagacaagaggttacgatggagcatggattacattagatagctacgtacttgttcgtactggataaatgtgtgggacacttagaaactttaccgcttggaatttatcctgaacaaactgaactgcgcaaatgacataaaatggataaagtacgatcacgacaaggtgatagtaatgtaacatatcagacgagaagcatgtccgtggtgattagataacggaatggtcaagatggtcatatatatagctgcctgacaggaaactatcgtcccagtggtgatgacacaatccttatggtaataggaagattcacacagatctgacgaacggttgatatgaaaagtgaggtctagggggaaaaagcagtattatcgtactgggtgactgggttcaaaggtaaacacttattgaaaagaaggttaagtacacacacatttgactgaacaagacacacatgntgaaggacccttgtggtaagaggaaagtgtggtttaaatttctctgttgtaatcacaacattttgttgtgaattgaggccatttttcattctgttttgtaactttattctggttaaaaggttttctccattaagtgttacaagtaaaaaagtatgcatggtctagtaattatggaatttcattctctcgcatgttttgtttcaccttatcattaagggtcattagtcctaagaaggtntggatttttaagaaaattgg

SEQ ID NO: 609811 - DNA, 110 bp, Homo sapiens
ctaggtactctaaggatccagtcaccgcgtgtgggatctgatcgcgatgcggggtgtagtgaccttcgaagtgtattaccacggctgtgtcgatgcttcaaatgtcgttg

SEQ ID NO: 609812 - DNA, 1315 bp, Homo sapiens
cgacggacggacgacgacgacgacgacgacgacgacgacgacgacgacgacgacgacgacgacgacgacgacgacgacgacgacgacgacgacgacgacgacgacgacgacgacgacgacgacgacgacgacgacgacgacgacgacgacgacgacgacgacgacggactgacgacgacgacgacgacgacggactgcataggctgctgctgacggaggctgacgactgacggcagtagcgaagaacagtgcgatacaacctggggtggatctaagcagacacgattgcggttcagagcatatagtcctgttaacaaatgcattcatattcgtcggtaggtgtcatcaaataagcacgcaatagtgcagtatgtgcaatcgtggatatctaataccacccaatgctcctgtgcacacttgttccggcgacgacaacggtcggatggctgatacagcgctgtctgtccgaggtgagggtatcgtctacaagagtgcgttacttactgtcgtacatgtaatcatcccacagtgtgtagtgtagtgcgagagatcacgctcgctgtcacgtacccttcggtcagtatgtccggacatggcgacagtccaccgactgcatcgcacgtccacttgtatttctattatagagtatgcttcagccaactcgtggacacctaaactatatcatgatccaatatctagtagcctctgctactatcaccataactacatacgaccacacaccaatctccattacacacctacctcaatattcacattcttcatcattccttctcatacgtatccataccctcatctaccgcactctctcaaccaatcgaagtacaacttactctagtcccattctctatctcaatatatacataactattacaccatacatcacctatcaacccacacgcctacatgagactcacacaacatatactccacaacacatctctcacatactgtcgcatccctactacatacaactaccaatacccaaccttacgcacacaatcaatatgctcacatctcataactattcatcccactatcctctaattagcttatcactaaattacacatatatccgacaccgtccttaccgctccacatacagaatgcaacagatagtgattatatacacatcgctccatcaacataaatacccatacataacatcacaacttccccatacacaactcacacataaacgtcctcatataatgacaactaacacaccatcaacacaactcacatacccactcgaataaccaaccacacacattcacacgatccatatcgattatcc

SEQ ID NO: 609813 - DNA, 847 bp, Homo sapiens
caggtttaagtcatcctgctcaggttgggcatagtggctcatgcctgtaatctcagcactttgggaagccaaagtgggaggattgcttgagcccaggagttccaaaccatcctgggcaacagagggaggaacccctctctctaccaagaaaaaaaaaaaaaaaaaagagtttaaaaaacaaatttagctgtggcacctgtggtgtggttgcacactctcagttaggctgtgaggtgtgaaaagggttctccttttaccctgtggggaaagaactgtaaagcttgcagtgtgaagccatgtgaactcgtgtgccactgtggcacctctcccagtctcgtggggagaccaacaggtgtgcggaccccttattctttcaaaagggcttgacgcgtgacaagggattccctttataacccgtgggaagacttgaaccttgcagttgacccatgtgattcgttgccacttgcactctccagctctggggggaaccaacggttgggacgcccttaattcttcaagagaaaaacaaatagaaaaaaaggtgctcatctctctctcctctcacaacctatccgggttgtgagcaacttgtgggggcctcactcccgggttctgagagacacccctctcgtggtgcctattcacgggagtcactcccctaggaagaggggctctcactttttttaaaacagacgcttgggaggggacaggggggcagacactttacaaggggcccggttgttgttggtgtcgctgagcatgtgcggatttttccccctttttcacccggtgtccccagggccccgtggaacgggggttccccaatttttcttgggcgcgcattgtg

SEQ ID NO: 609814 - DNA, 973 bp, Homo sapiens
  misc_feature (973)..(973): n is a, c, g, or t
ggggtgttggaggcttgaaggtagctttaaattcgtgtagtcctgggagctcgcccttgtcggctgagtagtcgggctttacggcgccggatggctctggtacggtgaagtctcgtgcgcaataggcgtccatgagacatgctgtgatcttccattgagtggaggcgggacagtgtgccacacgtttacacaaggccaggacgattaagaatacgcaaccaaatttgtcgcgcgttgaagtaaaagtacgaaggtgtgcacttgttgtttgtcgcagtctgtgtatcaaatctccttggcctataagcaatcctccaacgtcgtcgtgctgcctcagagctgggattacacgagttccatcttggacatagatcagcaagctaaagatggtgactacatagaagccgcctgtaagagcagatcactctgattccaggagctacgtcatccaaatactaacttggtctccttggatgcttttggacgtaatcttaatattagctggtctttgatttgatggacactgatctagaggttatacataaaggatagtagtcttgtgctgacatcatcggggatcaaaggctacttgttgatgactcttcaaggattagaatttgaggtcatgcattgcatcctaacatagggatctgaaagcaatcaactgtgctcgatgaagatggagtcctgaaactagccgatttgtggctggccaactatggggagccaacgcagctgatccataggtggcacccggtgtttcggccccagttaatattgcagcatggatgagtggtaggtgacactgtggccgcgtgaataaagagaagaaggggcatatggagaatagacgtgcggcagagatttaaatggcccgggacggtgaattgtcctcaatgatatacggagacgcgcatgggaaagaaccgctaaacagagcaaatacgtggtaccatcatccataatgacgtgn

SEQ ID NO: 609815 - DNA, 208 bp, Homo sapiens
caggagcccaagacgaaggaagtaaacgcggaaaaccccatgggggctccccccggagttgcttttggaaacccccgggtttaggtttgggggtggggtcaaggaactttgggcatcgggaaaatggttaaatccagtggaaatgactcctgcgtgaagctgggatcctcgagggtcatgatacttaacagtaaaaagatgggctaga

SEQ ID NO: 609816 - DNA, 499 bp, Homo sapiens
  misc_feature (69)..(69): n is a, c, g, or t
  misc_feature (90)..(90): n is a, c, g, or t
gcgacggattcactttttccctggccagccggggggccccttggatttacctgtatccgggcccgcctncagaaaaaggtgtcccccccnaaagtctccccacaggagtttcccaggattgtgggccgcatgttcaaccaattccacaagttaattgaggacaaggcaaaggggcagtccattatgggcctgaagggtttttttaaaaggggaatgaaaaaggccttgggtgacaccaagtttttttttgtgttggggaagccccccccaataagcctgcttggtgtgggcctaagttcccagaaattttttgggggccctggtaatggcccctaaggttggagcccccatggccagcccaggctggttttgttttttgtccggtcacccaatccccactccctggggggcgtgattcccactcctggggggccccatcccccagttcctcaaaaaagggtttttatttttggggatttaaaaaaaacttccccggtta

SEQ ID NO: 609817 - DNA, 960 bp, Homo sapiens
tgcctggagatcgctctgtgcacgatgctgcgggtacggcgggagccgcgctggacccaacgcagtttttccgagcagtccgcctgtgctcacgtcctccgctcccagtcctctactgcgcagccagagacctgctatggccagctgtctatactcggggaagagccgctgcttcggaacgacccctgttggccaatgctggcggtgcgaccatgcaacgaagatcggccaacactgagcccgctgacgacgctgccaagagatcgagcgccttcgcccaaaggcgggctttcacccctggaagcgctcctcgtccagctgcaacctcggctccagcctctcgggcttcgcggtggccaccgggggccgtggctcgggcggctggcgggcggctcgggcgccgccaacagcgccttctgccttggcctccacgtcgcccacgtcgtccgccttcagcagcgactacgtgcggcctcttctccaactcggcggcttgccgctggcggcaggcggccggtggtgtcccccgcaggaggcgcggttggccagtcggccttcatttccaaggtgcacacgacggcagccgacgggctgtacccgcggcgtgtggcatcgtgcacccgtacgagtcctggttacaagtcggggttccattcgacgcttggcggcgggcgaggttgaccaaagggcgcggcgtcgcgtggtgggacgtgcacaggcagcccgggctcgtggcctggaagtgcagaaacccccgcatagagggaggtcccaagaagctcggttgcaactttgcggcgccccccacaaaggccatcgatgagcactcagcaagattgggcaccctaacaaagcccgaactttcaggttcggctcacgacaataccggcacttacagaatccaacggtgccctcaggattacctacacgcgccagccagactccccaactggtttcacc

SEQ ID NO: 609818 - DNA, 222 bp, Homo sapiens
  misc_feature (177)..(177): n is a, c, g, or t
aacacctcacatcaacacctaaaccctcacaccatctacactaccactgcctgcactagcactaccaccgcctgtactaccaacaaaatctgtaccctcaccatcaacacctaagaccctcaccaccatctacacgtaccactgcctgcactagcactgaccaccggcctgtactanccacgtgccaccaagattctacgggtttgatgatcctcttcctcc

SEQ ID NO: 609819 - DNA, 1301 bp, Homo sapiens
  misc_feature (215)..(215): n is a, c, g, or t
  misc_feature (235)..(235): n is a, c, g, or t
  misc_feature (448)..(448): n is a, c, g, or t
ggtcagtcagtgcgcggccaggtacgggccgatcgtggcccgcggcggtcctggcgaccgccatggcggccgtgcttgtgactttggactttggacgacggacggaaggctatgcgtgggtgcgatggtgcgagtccgagagcttcagctcccgcggactgctgtgtccccattgccggagttgagggcatgctggcctaggacgccgtgttggngatcacctattgaacgaggntggaggtcgtgaccttgtagtactcatgcgtgtgaagcgggtctggcccgagagtcggcatcgaggcctccacgtgcgtttgatgcttgcctgcgttgtagctaggtgcaagggcggcggctaatggcaacagagtgttccatgagtagcagacatagcggtagcaaaaggcatcgcaaaccctctagagcgcaaatagactagctagtagcncattcgacacatcgctccagtacagcgagagagcccaaacagtgtgttgccagcgacatgtcccataggcaccacaagcctactacaactaccgggggcactgcagccaggtaaacaaatctcctagtgagctccagctgcaacgacacgcacccctctacatctgtgggtggcgacaacttggcgcgccatatctgtgccgtttgcccaggtaccatcgggcttgcggcacagatcctcataacccgtcactacccttgtgggcatgcgcttcaagggtgtggttgagccggaaggccctccgtttccagcggtcgaattccttgcggaagggctggaaggcaggcgcggccaattcctttgccccgttgggtgacacgcactaaaccgagccctcgtgcgcctttgccttaaccccttggcgcccttggacgcagtctccaccgcgttgaggccccccctggtgacgcacccattgtgcttccccaacattcccccccaaggggggcccaattccaattccctcaaaccccgcagtggaaacccttccccaacagggcccgcggcaagcaaacaccaatccaatggcctttccaagtctcaagagcccctagggcgaccccatacctagtctcccaaccatccatttggcaaacccccgcgaacccctactctggcaggcacgcttccctttgccaccaaacgcgggaaagcgtcctcttcactttcccaacatgctacaggggcgggaccgagcccccgcggtctccacaccttcacacacaacagccctcatcttcctaggcgcggcgcgcaacccccaaccttcgcaaccgctctcccacttgtgggc

SEQ ID NO: 609820 - DNA, 104 bp, Homo sapiens
ctcaacgctttatacttcaaaataatacaattcctttaaaaatcaaataatattccttattatactcatttttttattccaagtttttggctacagtctgctac

SEQ ID NO: 609821 - DNA, 85 bp, Homo sapiens
tatcccggtcatcttgctacacgattacttcacttacttgaactactagccctactattaagagccacagcaagcttacatgttc

SEQ ID NO: 609822 - DNA, 241 bp, Homo sapiens
gcagatgcgcctgcccctgggtgacagagcgagaccctgtctcaaaaacaaaaagaaattggacagaggacctggcataagttcggagagtgagtggcagaaatcagagagtaaatcagatgatatcaggcctggtagaaatcatcaaagtgatggctttagtagtctcgcagcagccacggttctcatccttggctctagacactctttttagcacgtatgatatgaatctcgggattta

SEQ ID NO: 609823 - DNA, 999 bp, Homo sapiens
  misc_feature (255)..(255): n is a, c, g, or t
  misc_feature (387)..(387): n is a, c, g, or t
gcgctggtcgtctcatgccgtgtaactacctagtgaatcctgggacggccgaataccgggtagtggatcgatcgagcgtcgtcgtgcagagtcggcgatccatccttgcgtgaggcgaggcgtgagacatcgccgtggtctcatttttatcacattgggactgaatgtatccccggagcgggtagtatggctggcgcgccatagtacgatcactccagattactatggatagagtctgagagtcagcgcaagaantgtgcattcgaaccatcggcgcacggcagagacgttggcgtaaggaggtgacgcgccgtatgcatccactgcatacctggcacatgcctagagccattagacgaagtacccaacgcagagactcacctgtcntctggtatctcacacacaagttgaagcaatcagctaacagggaccttttgcttttaattgctcattaccctggggggagccaaaggcctgaacagcttcaacgaatgaatattccgtgggagggccgtgaactttacaagctctcagcggaagtatttccggagggggtcgaggatcccatgtatatggcattcccatgtgtaatctctctccgttacccgtcgaaactagccagacattgccagctcccacgcgtgaaccagcgctggtcaagtggcctggtatccgtcatcgcgaggggcccttgacacgcttagttggaataatgtttacagaggaaggatggttaaaaggggttagtaccaacgtcaggaagcctatacagtagtacaactatcgggggacacgcagagacgcacgtgcccaatgataaacctgattccgtcggatttactgttggaggaagggggtaacctcacagggggaaccactggtcggaatttgggtccaacagtgggcttcgaccagaagatcaccagcaaaatgctctgagtgagggttactttctgacttcaaaaggcaattgggaaagaagggcttttgaaggccagg

SEQ ID NO: 609824 - DNA, 341 bp, Homo sapiens
  misc_feature (42)..(42): n is a, c, g, or t
  misc_feature (48)..(48): n is a, c, g, or t
  misc_feature (96)..(96): n is a, c, g, or t
  misc_feature (115)..(115): n is a, c, g, or t
caaagtgttaccatgcggcattacaccataaattattttaanaaaaangaatttggggccggggccacgttggctcacgtctgtaatccccagcantttgggaggctgagacagncagatcacttgaggtcaggagttcaataccagcctggccaacatggtgaaaacctgtcttactaaaaatacaaaaattagccaggcatggtggcgcatgtctgtaatccccaactacttggcaggctgaggcaggagaattgcttgaacccgggaggcagaggttgcagtgagccaagattgcatcactgcactccagcctgggagacagagtgagactgtgtctc

SEQ ID NO: 609825 - DNA, 1369 bp, Homo sapiens
ggtccatatgctagcaattgagagactcaggtcttgtagtaaccatgttgcgagtagcgcgccggggcaaacaatcgagggtgcaagccgacgagactacttgtttgcattaattcgtgctaacaagagctaagcatactgagaagggatccttggtatgtagactcacttaatgcccaatagctatgggtcaagtaaagtgtgcctactgtgggagagatcactggatgcacaactcgcagaactctcgatggtaactgttaaagctgcttggactttcccattatgcgagctagtcagtcatgtgcgacatgcatgccatgtaggggctaacatgacaacacgccattctcactaaacgatgtactagtgctatacacgtacttatctgcaatgctaactgcttgttgctgttcaatccgtttgcttgctaactccaaaccataatacttatcgtccgaacggcagtgtactctactttcgagtcatgcaaatgagggactacacttattctacccagatgctcatccaatattcgagatagtgagccacaaacgtcgctattctaatggtgcccacggagtagcatatcgacttgaatccgtcaaagggggtctgtgcatggagattaagctatattagactaacaattgtcgtggagatgcacataccacagtgagggcacattcttccgcggaacatagtgcagcctgaggacaggaccctatagcggccacacacgccaatgctatagaacgtgtgaactaactcgtccaacagttgtgactaggttgcactcaagttaacaagttgccgcaaaatattttgcgatcaagcggatcgctccacattacttagtccggcgacacacttagcacaaggaaaagatttcgagactatacgagagaaactccccctatacatccctacacttcccctttaggcagggttggctcaaagggaatacttttactccccccacttgggatacccactggtctcgacttcaacgaacatgcggttaaaggaaaccgcgatcgaggacctccaaagctcccgtacaaccgtacaggaactggcggaacagttcacccacacagaaccgatgtccgcgaggatatacaagacggacccccaggtacagaacggcacagtgtttaacaagtggtaacggaataccaacccacatgaaaaagacgtagacaccccaccatggggcataacagcctggtgcaggatatcagcacatatctcctagcgggacacaggcctgcacacgacactatccgtccacacacacttcacaaccactacactgccgatcccaacgcggccttactcactccataacgacacgacccacatccac

SEQ ID NO: 609826 - DNA, 891 bp, Homo sapiens
agtttttgtgaaaaaagaataatgttcttgtggagcacctgagagtctcccatgaggaacagtgaactgagcctccaggtaattaactgcataggcatgttcagttcgcatcctgtatattttgcacatacatctagtattagcgacatacagtgtggagtataaaacagttacacccttggcagagagaactgccggtagccatgattttcgttagtgagaccatatttatgattcagttgcaattgtcagataggatgtgaacatggaaattcatggaaaatagtataattttcttatataaaaggttttgtatataatgtgtgtcagtgactatgtttcaaaatcatgttcatcgaagacaccttttttctaaaataggcattgcatacacatatgcacacgtatgtgcacgtgccacacattttttgtataaatgttgggtattgattataaaagtgttgtcaaatgttttgatttattcgtgcatatagacagtggttgggctttttctctgaattgtagaatttctatgcgcattgatgcacttgaaactaaggaaaattatttatctctgagcactggaaacttattttcgcatatttctgtaatattgcagtccccagatccagaacatgggaagttagggaaaatgtgtgattttgatgttgtctgaattaactgtcagtatttacagtacacaatgacaacaaacttctttttaaaagacagtttcattgtactgcaaaaatctgaatatttatatttcttgttctctttctttatatgttttgcattttaatgatgttgagccactggaaatttgtaacagattaatttgttataggagtttaaatgtgttgtcatgtctccgtgtcttgtcctgggctg

SEQ ID NO: 609827 - DNA, 138 bp, Homo sapiens
ggcgcctgtcacctggaacggcggccaagccgacttcacgatgccggcggccacgggcgacagcgcacaaaccgcaaacgcagtcattcgttccgaccgtatcccgctggcatctcgtgcgcgcaagtccggcgagac

SEQ ID NO: 609828 - DNA, 431 bp, Homo sapiens
  misc_feature (26)..(26): n is a, c, g, or t
  misc_feature (157)..(157): n is a, c, g, or t
agcgtgggcaacatggcaaaaccccntctctacaaaaaggtacaagaaatttagcaggcatgggcggcgcgtgcctgtagttccagctatttgggaggctgagttgggaggatcacttgggcccaggaggtgaaggctgcagtgagtcaagattgcnccactgtactccaccctaggcgacagagcaagaacctgtcttcaaaaaaaaaggaattcttagaaatatacaccagatattaccatacatatgaactcatatatagagggttataaacttttgcagatcatttacctgcaacattgttgattttactccatgaattctctattcacattgcatcatagtacacacacctgcaacccaaatataagtaattcctagacagctttgatacatccccagagattttatgtacaattcatccagctaa

SEQ ID NO: 609829 - DNA, 847 bp, Homo sapiens
gacggcaagtgtactgcgggctggtccgggctcctcaggttcagactcgacgcgttatccagtcggttcgtggagaggagaggtgcactttacaggtccccgagtgaacacaaaggagaaccctcgcaccatatccaggccctggtccaggagcgggcccatatccactcttatccatcactaggaccgaatgggtccaggaccgtatggggggacccgtacccacctcctcaagggtaccccgtatcgaaggagtagccacagtacggctgtcacgggtggacctcaggagcctcctaagaaaccacagggtatgtggtagaagaccaaaggaagagatgagctaggactcatccatccgtgcctcacagcctgttggaggagcctctctgttgctgctgtctctgtggacatgctcacctgaccagaccagcccagccgtcctgtccgtgccagctctgttgacagctctgacaggtgtgcctgccccatctcttctgattgctgttaacaaatgagtagctttgagagacgacctctaccttcaggtactatgggatctagattaattgggggtcgctacgtgttgactttcaaggtgacttggatctcctttaagtggtccacaatccgatttcttatcgatcttctacacgatgtgctaaatgatttttttggcaaaggtcagttgtgcaaaactataatttgagttataccttcagggtagtggccaatgtagaacatcaagctgggagccttctcgttacagcggccgttttcataattggcaaggcagtaaacaaaaaaaacaattgggggctccgcaaaaatttaaactgggggggca

SEQ ID NO: 609830 - DNA, 133 bp, Homo sapiens
  misc_feature (6)..(6): n is a, c, g, or t
ttcatnaaattaatatgccacgtttttttaactaggtaaacaagtaaaatgattatattccaggagaattgcttgaacctgggaggcagaggttgcagtgagcttggtgatcatgccactgcactacagcctg

SEQ ID NO: 609831 - DNA, 488 bp, Homo sapiens
  misc_feature (61)..(61): n is a, c, g, or t
  misc_feature (253)..(253): n is a, c, g, or t
  misc_feature (414)..(414): n is a, c, g, or t
  misc_feature (417)..(417): n is a, c, g, or t
  misc_feature (480)..(480): n is a, c, g, or t
tggtaaggaaattgggtaaggagcttccttccttctcttcccttcccttccttttcctttncttttcccttcttttccctttttccttccttccttccttcttttcccttcccttcccttcccttgcttccttccttccttccttccttccttccttccttccttccttccttcttttccttcttttccttcgagatggagtcttgctctgtcacccacactggagtgcagcagcctgatcttggctcaccanaacctctgcctcccgggtccaagccattctcctgcctacccagtagctaggattacaggcacccagtaccacgcctggctaattttttatttttagtagagatggggttttaccatgttggccaggctggtcttgaacttctgacctcaagtgatccaccntgntccgcctcccaaagtgtttgggattacagcttgagccaccatgcctggcctacactgtgaccnttttctta

SEQ ID NO: 609832 - DNA, 115 bp, Homo sapiens
gagaaatgcctggataaaggggcccatgtctccccccttggagcccttttgatggagatgaggggccgttgaacagaccgggttttgtgagtatagtggtttgagatgcaaagtg

SEQ ID NO: 609833 - DNA, 501 bp, Homo sapiens
gctggaagtggccgagacgccggaaggggcgtccgtcggtggctgaaccccctgcactgccggagctgttgtttaccctgcgctgcgccgtactttaccctggtggctgtggcggggtgctgggtgtgccgtggggtcccgtgtccatccggtacctgccactcgggcgcaagctacggggccatcgtaggaggagccgagggattgaaacgagttgagccaccgagcacaacggggaggtagaggcgccgggtatttgggccttccaggccgcctgcgcaaaccgagaatgccccaaggcactcgaacgatcttaagatcaaaacaccaggtgtggtggtagcgcggtaggaggaatcgcacggtagaggagaagaagccggacgtattgacgacctgagggagcatgacaggcccaccgggatgcgtggagacagggaattgacggaacgagtgggaaaatcggacgggaaaaggcacacagacccccaaggaggagaa

SEQ ID NO: 609834 - DNA, 925 bp, Homo sapiens
agcgggctgggcgacgcgctgtggctggcggtgccgtgctgggactcgtagtgcggtccgtgccgagacctgacccgcccgccctgcggccccgcagcagctccaagaaggaaccaatgagacctgaggccttccctgctgcccgtgaccctgacacctgccaccctctgctcccctgcctgtgcatgcctgtgcagccaagcggcagtgtgatctgacccctgttcttgctgtgcctgtgtctgctggccatgttggcccctgcgtgtgcagcctgtgcctgagatgaaccccatgtgcccccagtctaccccatggcctctgctctacgtgggggacctccacccgacgtgaccgaggcgatgctctactgaggaatgttcatgccctggcctgggcccatcctctccatccgggtctgcagtggacatgatcacccgacgctccttgggctactgcgtatgtgaacttccagcagccggcggacgcggagcgtgctttggacaccatgactttcgatgttatacaacgtggcaagccagtacgcatcatgtggtctcagcgctgatccatcacttcgccccaacgtggagctagcgcaacatattcattaccaaatctggacaaatccattgcatcctaaagcactgtatgatacctcttctgcctttggtaaccatcctttcctgctcacgtggctcgctgatgacacactggttccacgggctacgcgattcgtacccttcgaaacccacgaggctcctgcacaagctatcgcccaccccgcctggcctggcccacatgactgccaccgcatcggtggccgattcagtctcccacaacacgccagccgccctggcactgggcccaccctccgccctctcccttcccactcgggaacacatgctaccacaccccaccgccc

SEQ ID NO: 609835 - DNA, 911 bp, Homo sapiens
  misc_feature (1)..(1): n is a, c, g, or t
ntaagatatacaaagcggcagtttctgtacacggccttctttcagacttgttctgcgtaccacacaacctaggtctcacttcatacacatggaatatatcttggagcccgatttacaccagtgggcttggaccttggatcaatccaggctcttggtgtgccgccaaagaccgcgtgtccaccccacttctagggttcaaaaacctagaaaggggccacgcaatgtgtgacaccgcgaaccccaagatgctcggtccacatgactatttcatcccgtgtcccgagaacactaaattgggtgcatgagcagagcccattatggccaggtccccaaggctgccaaaaaaccctggggaacagcgccaaccgttttcagctctgggaatcgcgtggaacatacggctccccacaagagtgtatctggaacactccccctccctccgagtatattgcccccctttcttgaggagaggggaggccccatccaggaacaccaccgccaccttgttgaggcgtctgtgaaacaccaacgcccaatggcccccaaaagacgccacttgtgaaacgtgtttattggaaagaattccccgccttttgtagaggaaaatgctccaaggccgtgaccgattaaatggaaaccctctctttcccaggaagggtaaaaaacttggttgctgccaatcaaactgccctatggctttattatactatccccattttcaagcctctcctcccctctcccctgagattatgagaaagaaaaatgaagatcccaagcgttaattcaacctgtttttcctttttccggtggtgtaaaacccacccccccgttcgtaaaaacaaaaatttttttaaacatttcccccttttttttgggcttccattaaaaaaaaatgggaaaaaatttaaaaa

SEQ ID NO: 609836 - DNA, 107 bp, Homo sapiens
  misc_feature (3)..(3): n is a, c, g, or t
  misc_feature (30)..(30): n is a, c, g, or t
aanttcaaggcttctaacaagatgtacggnggacatgggtatttggcctttcttgattaaattctctgctcccctgcaaataaagcctttttacacatccaaaaaaa

SEQ ID NO: 609837 - DNA, 116 bp, Homo sapiens
aactggctctttcttcctatggaaatcctacatccgtgtatgctgagctggtaaaatactttgtaaattacttattaaatatttcattctgctttaacaagccgcaaggtgcaaac

SEQ ID NO: 609838 - DNA, 502 bp, Homo sapiens
cccacggggaccgagaccaccccccctaccccgatctgtgtaaaacacaaataaagccattgagagcaactacaaaaaaaaaaaaaaaaaaaaaaaaaaaaaacttgttgtgggcgccccgcccgcggcgcccccgcggaaaagagttttctaacacccactcggtgtggggcgcggcgcggggccccccaagagggtacggtggcgacaccggtggcacaagagggtgtgtttccccagaggggagaaaccggggcccaaggaacacaagcggcgcggggatcttctctcccacacaaaattaaaaacacgcgacgcgggcggagcacaacgcgaacgcgcgttcgcgggaaaacaactctgcagaagaggggaagagtccgggaggagaccactcatgaggggagcactcatactcaagcgaggggagttcactcaggacgacagcctgcgacattaactacaaatttcaccccccccacgccggggtgagccctcgagt

SEQ ID NO: 609839 - DNA, 793 bp, Homo sapiens
gcgggcagatcacgtggtcaggagatcaagaccatcctggctaacacggtgaaacccccgtctctactaaaaatacaaaaaaattagccgggcgtggtggctggcgcctgtagtcccagctactcgggaggctgaggcaggagaatggcgtgaacccgggaggaggagcttgcagtgagccaagatcgcgccactgcagtccagcccgggcgacagagcgagactccgtctcaaaaaaaaaaaaaaaaaaagattaattgggaggtcaccaaaaacgggtccaaaaaattccggggaaaaaaaagggactttttaacattaatttaccaaaggaaacctattacgaataatttgctgtaacggtgttacaccagtctttaaaatggcagctatatacgggcttggacatttttgggcagcaataaagataactttacccaagtggagattcatacagtccaggttttcccagatgcttaggagacgcacagtttggcctagcatttctgttcaagaaaggtttggcggtctgtggtgacataatcttacatgagttgtttctccccagaaatggagttctccacacgacacccttgggcaacaaggggcttggcgttgggggtatcccggtgcggccttccaaagggcggacctttcttcctttccaaattcaaggtcatggaaacctctcggaatttgagaaccttagctatgcaaaccttcattgctgaggaacatggtgaaagccccaccactttggcctagaagccttgcattggtaattttaactggt

SEQ ID NO: 609840 - DNA, 110 bp, Homo sapiens
aaacgagggctcttcggtcgggtcctcccacccccaggtaggcggcacggggttctctccttcttcttccggcggtccttacctgcgtcggggggtaccggagctcgaat

SEQ ID NO: 609841 - DNA, 224 bp, Homo sapiens
  misc_feature (2)..(2): n is a, c, g, or t
cncatagtctattatgctatatgataatataatagtcttctaggaaatcaccccttagagatagttggaagacctacatgatctctaactttggtgcattttaatctactaataaaatgaaatgggaagaaaagaacaaacaaaaggagttggcagggaaacagggtatttttttctatttcagaatgggtggaaaaatatagcatttttagggtttaatctgg

SEQ ID NO: 609842 - DNA, 200 bp, Homo sapiens
agggagggtgcatagtagttgagctctgtacatgtcgggtcggagtacgcgtatcgatgggcagtggagggggcgcaatatgcatcctaggcctataaatattccggagtatacgtagcgggtaatgttaacaaccgtgtacctctagaactatagctagcatgggcaaatttaaaggcggtgatatcgactcgggcgca

SEQ ID NO: 609843 - DNA, 285 bp, Homo sapiens
ttttccccttccccttccgggggggggggccccccttggccttaaaaccttcccccccaaaaattcttttttcgttgtttagggggggaaagttggggcccccctttttcggggattggttaaagccacccagggttaaccaccacccatttttggttgggggccccaaattccccttttgaccccaggattggggggttttcaggcttcttcttggagtgggggtttccttcaaccagttggggccaaagggaaggggtttattaaccccttgggggcctgcca

SEQ ID NO: 609844 - DNA, 195 bp, Homo sapiens
ccacgccgaaggtcacactgcacacgcgagcctccacactgcacacgccgaatacccatactgcacacgccgagtgtccatacacttcttgaaaaagcgaagtcgccgatcttcacggatcggcgatttggtctgctcagtgtgggctttcggcgtgtgcacgtgaagatcggcgattttggtttggtcgctcgg

SEQ ID NO: 609845 - DNA, 1174 bp, Homo sapiens
taaggggatcgtgggggggagaataacgagtcatagggaacccaacgggcgcgtttgaggaaccaatttcgcctcccctggtagtttcccttccttcaccccccgccacttgtatttttagccagaagacacctcttccgcggttattatcaaaaaaagggcttcttacagtcagtagtaatagggatttctttttgtcgcccttttattaaagggccgccatataaatccccattggggaggtcccgcgcgagaagtgggagcctcttcttccaaaggaagccagccaacgccctggtttgtaagccacccacccgtgcgtgttgtgtgtaagagaagatgggctaacgaatcaattgtaggttgtccaaccaaaaagagaaagcgcgggtttctcaacacccacacaacttgtgggtgcattttctgggacgggcacattttgtgatgaccaaaagggctcaaaggccgtgaaaaacaaacaggcgttatttttcgatggttatcatcatcatgtttaatcttccccccatgtatcgcacctgttgttatcggcaaaaatttgttgtttacccaccccggttttgtctccacacacgattgtatatttctacgcaagcactttttataatctccccccgagcgagagagtttttcctcccctctctcctatatagaataagaggcccctttttctcccacaaacacctttacgcccggtgacgtcctaccttgttagcaccataattttttagccgcccccccttcgccccggagtcccaggtgatgtgatgtgttcccgacgggtcgtgtcgccccccggtagattagcgccccgtgttagttgtaaaccaaatagatatattaaaaacaaacatgtggtcctgctttgtagatctttattactagatagatttttccccgttgtcctttacacacccctcttctccgaagtttcctcttaccccctccttcttttgccatccttccccttccccttttttctgagctagcccccagtccccttcattagcacttctctgctaagccaaaatccctttcctttcctcttttttttccccaaattttaccgatcctttctcccaacccctggccttccttttcttttttctcctcaattttcccccttaaggtccctttgcccccccctcca

SEQ ID NO: 609846 - DNA, 147 bp, Homo sapiens
tcgagtataaaatttttttcagtcgagcaggaaggctggtgccagcaggctgtaattgagaggaagaagttagatttaacaattgtagacacaccattaggggagttaaaattgtacagcagtgacatgttctactccaatcacttg

SEQ ID NO: 609847 - DNA, 120 bp, Homo sapiens
tgagatggagtttagctcttgttgcccaggctggagtgcaatgacgcatacttagttaactgaaacctacatctaccgggttcaagcaatcctcctgcgacagccacctaattagctggg

SEQ ID NO: 609848 - DNA, 335 bp, Homo sapiens
  misc_feature (108)..(108): n is a, c, g, or t
  misc_feature (187)..(187): n is a, c, g, or t
  misc_feature (271)..(271): n is a, c, g, or t
caactggtattctcagccataccatgggctcatattttagaaaccactcttgcccaggcatggtggctcatgcctgtaatcccagcactttgggaggctgaggcgggnagatcacgaggtcaggagatcgagaccatcctggctaacatggtgaaaccctgtttctactaaaatacaaaaaaattanccaggcatggtggcgggcgcctgtagtcccagctactcgggaggctgaggcaggagaatggcgtaagtaaacccaggaggcggngcttgcagtgagcccagattgcaccactgcactccagcctggacaacagagcgagactctatct

SEQ ID NO: 609849 - DNA, 576 bp, Homo sapiens
tagacggtgaccctctgcctgtctttcggtctccctctgatgctgagccaaagctggactgtactgctgccatctcggctcactgcaacctccctgcctgattctcctgcctcagcctgccgagtacctgggattgcaggcgccgccacgcctgactggttttcgtatttttttggtggagacggggtttcgctgtgttggctgggctggtctccagctcctaaccgcgagtgatccgccagcctcggcctcccgaggtgccgggatggcagacggagttgcgttcactcagtgctcaatggtgcccaggctggagtgcagtggcgtgatctcggctcgctacaacctccacctcccagctgcctgccttggccccccaaagtgccgagattgcagcctctgcccggccgccaccccgtctgggaagtgaggagcgtctctgccgggccacccatcgtctgggatgtgaggagcctctctgcctggctgcccagtctggaaagtgaggagcatctctgcccggccgccatcccatctaggaagtgaggagcgcctcttaccggcagacatccatct

SEQ ID NO: 609850 - DNA, 257 bp, Homo sapiens
atatatagtcatagaagatttgtggaaggagagctttcagaaaccaggcaatgtgaagaattcacctggaaataagtataaaacttcagggtctgccatcttaaccaggaaaaactagggcagacctttgttatcttttgtgaaatcatcgtacaagcaaactatcctggaatcccttcccctagaggtaatgttcaagccttagaactcctcattctcatgatgctatttatgtacataattataacccaagttaa

SEQ ID NO: 609851 - DNA, 524 bp, Homo sapiens
agacgtccattctgcatacttaaactatccctctcaaatagagccttccatttttaaatacgctccagaatctcatccattaaacagacacacacacacacccaactcatgagacctcaaccactacattcagtcatccccatcatggctaaatttctggaacttttcagtcttcatttcctcccttcccactggtccctcaacctgcttccaaattccatctccagctgtcagtaaggtcaacagtgactgacaggtaaatgcaaaagactctccaatcatcagcatacttaattctgccagcagaatcagatactctcctcctgggttcctgtgatacaaccttctcctagttttcctcctacttctccgctcacttctctgtcttataataacccatctttctcaattcaaccacattctaagcatatgactcacaaatctacagcccatgtcttccatcacactccagagtgtaatgcttgccctggatatcacaaaggtgtatcaaatccataaggtcc

SEQ ID NO: 609852 - DNA, 256 bp, Homo sapiens
atggtatttttatgttatgaaaactttgtttcccttgaaacagagttttgctcttgttgcccaggctggagttcaatggcacgatctaggctcactgcaatcattgcactccagcataggtgacagagcaagactccgttctccaacacaaaaataaataaaaataagaaaaccaattcactacaatggtagttttaatcttttgaaaactttgtacccctttaaatcagatttaagttcattatcgcccaggttg

SEQ ID NO: 609853 - DNA, 120 bp, Homo sapiens
ttccaagtagattttttttattagcctttcatatttttaatcgaaatgtcttgacagtaaattgtttttacaactacaaatttatgtgaaggaatgacggtgagggaatgatgaaaatga

SEQ ID NO: 609854 - DNA, 1027 bp, Homo sapiens
attagagtgtataattacaccaggtaaaggctggcaattggacttggtagctgtcacaggggttaggaatcacccagaagtgcaggcacaggcttcgtgactgacaccactcagtaggtcaagctgctggcttgtgcaacagctgcagcctccatgggcagcttgcatctcctccaaatagcagtgagttgctatcatgcaaacctggcatgtgcacacactgcaagtcaacacagctgccagatcattgactctttgtccagccagaactggacagcagcaaccatttaggctcactgcaagtgtgtcctgatgtccattgagcaagtgcatggctcaagcggcaactcatgtcttggcttatgtgaacatcatgtcaaatcatcttcatgcttcgttcctatcagataaccactttatcatacattctacaaacaaatggtctttgttaataacgttggagggcacaacaagcatacacagacggagggcaagagaatattgttccccaatgggatttcggcgataccctgtgcgccatccattacacatgtacccacgtggcatagggagagaaacgagcacgtcaggtacaacagcatatactcttccaaagatactttactcatcatctgtactcccttatagtacaatcacctggtacttcctgtagctggggagaattcattggcatcaaagcaggaaattttctatttaacaactttcgcacaactatgggggaccaggacacggctcaggttccatggatggctaaatccacagtgcaatttgggcgcagcggccgccgcactggggacacgcatgtaaatgggaagacccaggagcgacaggaaaaaccaaggacccggggccaacaaactagagggagaaaagcaaaacaaccaaacatagtacactgacaacacatccaacacacaacaacattggcgacaactgagcacgtacaccccacaacaagggcagggagacataacacagacaaaggagaaaggaaggggagaacacg

SEQ ID NO: 609855 - DNA, 889 bp, Homo sapiens
  misc_feature (887)..(887): n is a, c, g, or t
  misc_feature (889)..(889): n is a, c, g, or t
tgcagtggctcgcgctgtaatcccagcactccgggaagccgaggcggatggataacctgaggtcaggagttccagaccagcctagccaacatggcgaaaccccgtctccactaaaaatacaaaatgtagccgggcgtggtggtgcatgcctctaatcccagctccttgggaggctgaggcaggagaattgcttgaacccaggaggcggaggtgcagtgagccgagatctcaccactgcactccagcctggatgatacagcgagactccgtctcaaaaaaaaagagactaataggccgggcatgttggtcacacctgtaggcccagcactttaggaggctgagccaggaagaggctgagcccacgagttcaagaccagccttggaaacacagtgagaccccaatcttaaaaaaaaattagctgggcatggtggtgtgcacctgtagtcagtcccagctatgccagaagggggaggatcacttgagccgggaggttgaggttacagtgagcgtgctggcaccactgcttgagtgacagagcgagaccctgtgttttaagaaaaaaaaacggcagtagtagtaagagtggtacaggacataccaacaagggaggccttcggagggacattaaggtcacgaccaatctgatagaattttgcaggaatacttaagaagaacctactttatttgtggagagtaggttgggcatttctagttaataagagctaaatttttataactaatacggtgaatctattaattggaagcagggggggggaactgtcagactggccgcaggtcaccacgggaagaagaggcagcgataaatagagagagggggagaaacagcagaggggaaaggacacaataataggagtgagaagaggcngn

SEQ ID NO: 609856 - DNA, 398 bp, Homo sapiens
  misc_feature (192)..(195): n is a, c, g, or t
  misc_feature (199)..(199): n is a, c, g, or t
  misc_feature (202)..(203): n is a, c, g, or t
  misc_feature (205)..(206): n is a, c, g, or t
  misc_feature (212)..(212): n is a, c, g, or t
  misc_feature (300)..(300): n is a, c, g, or t
gatcagtggtgatgacacctgccccgggtcacccgcattgtgggtcactagatgggtgctgctggtacatcggtggccgtgtcgcagcttccactacaacccagggcaaagtgaagcattccatcttgaatcaagccgatattttccactgaaatgacttacttgctttggcctcttgtggctgagccgctnnnngatnccnngnntctggntgggctataaaggggctcctctggctggcaccattcttcagcccgtcctttccagtgtgggagggagccaagggagctcattaccagnggacaaaactggatgaatggggactcggctctgctggcaggctttcactgcggcatcatgcgacccggactcacagtgcagccagacggtgacccgtg

SEQ ID NO: 609857 - DNA, 451 bp, Homo sapiens
ggctggtgtaggccgtcattgtaaataataatctgttcttaactgacttgcctagctaaataaaggtaaaatactgactacagttgtggtaggtacaatatctaaactgaacaaaaaatataaatgcaacatgtaaaggtcccatgtttcatgagctgaaataaaatatcccccaaaaattcaataagtacaaaaagcttatttctctaaaatgttgaacaccaatacatttacattactgttagtgagcatttctcatttgccaagataatccatgtagtatatcaagaaggtgattcaacaacatgatcattacacaggtgcaccttgtgctaggaaaataaaaggccactctaaaatttgcagttttgtcacacaacgcaacgccacaaatgtctcaaattttgaaggagaggtcgacgcggccgcgaatttagtagtagtagtaggc

SEQ ID NO: 609858 - DNA, 170 bp, Homo sapiens
cccactactactgtaccaggtctgtattagtctgttctcatgctgctaataaagacatagccatgactgggtaatttataaatggaaagaggcttaatatgactcacatgatccaccatgactatgggagggctcacgatacatggtatgaaggcaaaggtagaagcaat

SEQ ID NO: 609859 - DNA, 327 bp, Homo sapiens
acaggacaacatatacacaacaaacaaggtgcaagcagtaactactactaatcaacgcacataatcatacaaagcccccgcacgcaggaggatcctcccgaatcaaccgctgacccctctcctacataaattatacagcttcctacactattaagagtttaccacaaacaccaccccatcatagtcttgcacccacagagagcaatcctacctccatcgctgaccccactaaaagcactcatcctggaccgtactcctaatcacataacctattcccccgagcaatctcaattacaacatatacaccaacaaacaatgttcaaccag

SEQ ID NO: 609860 - DNA, 336 bp, Homo sapiens
acattccttcttagaagacttgactggtcttacattgctgcatcaagaaaccccagctgcttagatttgggacatgaacgacgatgagaccattttagatggcccccctgtggggctgacttttccctggccgcctgctgaggagctttccatcgccaaagcaggactgctgaccccaggcctggtgattttgggcccctcctccataccccgaggtttgggattccccccttttctgcccaggagtggccagtgttcggcgttgctcgggattcaaaatacccccagttcaaagctaaataataaccttggccttggccttgctattgccctgga

SEQ ID NO: 609861 - DNA, 1644 bp, Homo sapiens
  misc_feature (288)..(288): n is a, c, g, or t
  misc_feature (304)..(304): n is a, c, g, or t
  misc_feature (435)..(435): n is a, c, g, or t
  misc_feature (496)..(496): n is a, c, g, or t
  misc_feature (723)..(723): n is a, c, g, or t
tgtttctggagagtagtgcgggctagcaggttgtctaacatggtctgcaccatatggacgagccatgctcaacacaggatgccatatgcacggatgcccatctatccctctggttcgagcaacacgtcttggtcgcatgatgcctgggctgcgtggtgccaatggctgtgctggtgtcctcgcacatgtgtcttacgaatctaggatgctagtgacacaatggtgctacgcctctcagagcgagtctctcacgtgtccaatgagtgtcgagtggtccatgtcgcgagnccagtattctgccccnaaggaagagtgagtgcccaagacaacgggtgagtgtgatggacctaccctctgaggtggtgcctaccctgtcgagggcgagtctaacttgcgtggccataatctgctgctagaccgtaatggcttggcgtnatgcacatcgtcggacgccatctcgcttggctccaccgataggatggcatccctccgtagncagacggatcgtctcgctagcagagcgtgcgtagcggagagagccgtagcgcacggggaggcagcgggagcgtccggacatggtgtccaaaggcgtcctacgtggggaccagaagggtcctagatcgtacggaaaggccgcaatacgtagctatggggcccgcaaaagagagtgtacggcgctatgggcagagcgaaatgtgcctcgggcgcagtaaatagtacccncacccgctttttagataacactaagggcacacacggtgacaataatcgcgaagcacgggggcgatcgcgaccgaagacgcctttgggattagcgcccaggggatggcccttgaaagaagagccaccgctagcctagagggtagccccccttagtgctagggttggcccaccgtggatggtggccgtggggcgaagggtgtacgtggcccgtggagagcgggggtgcgttgcggttgaggcccctaggggcgcgtggcgttggggcatggggtcgcgttgcctttgggcgaaggcgaattgggggtcctccggcgcattcgacattttggtacccctcgagatccacacttctcgccctaagtggggggaacagaaacccctagcttgtggtcgcgcacacattggacaccgttggcccgtatttccaaaacatagagcgcggggccacaactacctatggggtccgagaggacaatatttccctgagggaacccaatatatcacacttcacccaagtgggatgcgggtccgaacaccaaaaggtccttgggtggctggaaccaaagagcactcggggtgttggcgcccactcacacaggggcgccaccacaggaactcggcagccccctgggcgtgttttcgccatggcacctgtctgttctttaacaaaatgttccgggtcttgaacacaccgcgtggtgagtggaaacaccacccgtggttgtctgaaagccgcgctttttgtaatacatccaccctggctacgatacataacgggagaacactctcggttgtgatggtagacccctggattggtacaacgtatcatcaaggcccgcacactgaagggggcctctgcggaagtcgtcagcctaccgcaggccctatgaccctttcggtgtaataactcatcgctagcag

SEQ ID NO: 609862 - DNA, 242 bp, Homo sapiens
ccccgggccccccccccccccccccggggggggattttttttttgggcccgaacggtttcccaaaaacccccggccgttttttttggatggggaaaagggtaccccctttttttttctttaacccttttgggggggatttacccccggggggtttttcccaaacggggttttttttatgttccaacccccgggatttccaattagaaggggtccccaaaaatttaaattttttgatttggta

SEQ ID NO: 609863 - DNA, 968 bp, Homo sapiens
ggccgtggctcgtctgtggggggcgaacacgccgggtcctcgtccgtgtgcagtggctcacgcctgttaatcccagcactttggaggccgaggcaggtggatcacctgaggtcgggagtcaagaccagcctgaccaacatggagaaaccccatctctactagaaatacaaaattagccaggcatggtggtgcatgcctgtaatcccagctactcgggaggctgaagcaggagaatcgcttgaatccgggaggcggaggttgcttgtgagccgagatcgcgccatttccagcctggcaaccaagagggaaacctccgttctcaaaaaaaaatcaccacaagcgagggatgagaaaaggaacaacatctaggtttcacaccccagggccattgtgttgaccgttaaggaacttcgtgccgacaggaaggaaacgggggcggatcacataaatgcaatcctccaccacaggcgtgggggggcacaggcgggcagagctcccggtccccagggcacccgggtccacaggggtcatcagaaaccttgtggcccaacccaaggagaaggcccctttttacactacccacaaaagggcctgtgggacgaacttgtcacgacaaaggcgcaggaaaattccctcgtgcgaaactgtggatcataggctaatcaagtgggcctcccaggcttaaacgaggttgcgaacaactggctcggaatgttggctcggactgcgaaaacctacgtcgggtcggggtcaacagacgctggagggtgacagaagggcgggtcaacccccattgaggcagcgggggggattaccccccttttacaggtggatactggcgtggaggggaccctatggtggccagaaatggacgcagggggatcacacgtacaaacaaccaaagccagtacagcgatggacgcatcgctgggctgtcttcccggcacatttgcttcccgagattagtg

SEQ ID NO: 609864 - DNA, 1886 bp, Homo sapiens
  misc_feature (574)..(574): n is a, c, g, or t
gctgaccttcatgacgcctcggactccagcgccatggctgctccctccgaggaagttcttcgtctgtggcggaaatctggacacgattgaatcgtggctggaatgcttatgtcgtgggcggagctcactctagtagctctgatagcggctagagccaatcggtgccagagccgatcacctgagtgtgagtcttgttgctccaccgctacttgcactattactcgaccttcgtcgcacgtgtcatgccaatgctacgatcctcaaatgcacttagcttgctgcgacttggcgccatgcacaccatgccctcatcaacagagcgatgcaccgttaaatcgggagacttattcagcatgggtgcgaagcattctacgccctcttgcgtctatgcaattcaaacgtacctagtctgggagcaccacagatgggggttgcgtgtccatgcgtgagcgcagcttcacgaagcaggacatgaggcagtgggtctctagagtgcgtagcatcagtacttgtaagcactggactttgcgcgcgcacgaatgtgaggttgcgcctcccaatgcactacgtgggncaacgcatggtgggaaaccttgcgccgtatgcattaccgatcctgccaccgatgatctacttaggtgttgcggaactgcagatgcgcactgggaactttgggacaatcgtgcgcggcacacgaactttgcggcctcaaatccgaaccttcgcctgtcaacgaggttctcagcaatacgcacccgactgcgctctgacaccaaacatactgagttccaaggttctttgcgttcacactctcaaacggagtttgaaagaaggacgtatacattaggaggaacagcccagagaaagtggtcccagaattatttgcctcgcgcggggacattccaagtgtgcaatgaaccaccatttgccttagacattcgcggcgacccctactattacagaggcctgagctttgtagacacatcggagacagacacccgtggcggcggggacttaaactccaccctctaacacccgagaggtgccaaacactagggacgtttcacatgggtgagcacacaatgcgctaggcgttgcagggaatgttcctcaggaaaacgcggacagatggggcttttgtccaaaatgggtgcccccaaaatgccggttttcactccttaggaaagaatagtgtagaaggttgctgccctctccatgacagagaaaaattcccctgatctcgattacaaatttcagaggtgcgcccccggcggcacttttcttagctgcacgtattgtaggcggaacaccagccacatgtccataaggggcgtccgcccatttcgttacagcaagggacacagaacacacatatgacactgatatcggcaacatgtgggccattgcaccacattaggataggagagagattaagacaagtgaccttacacacacattacatataagaacgccacgtacaaaatgttgcgcacgggcgacagtgatttgacagcatcgaagcaggggcgccagacgaagcacacagaggataatacgatcgccgacatgtaccaatacatgttcgagccacataataagcccccagtatcccgtgtgcaacaatgaagagacacaggaggaacacaccattagttgacagaggatacacaaacaaaacaggaggacgcgagcagataaccacggctcgccagctaatatccccccgatgcacagtcagtgccgaacatggctaaagaagatagatccagaccagcggacgagcagactgaacaaggtcgggacgacactaatagacacacgaatagcagcacgactgaagatcgcacaagaaacgcgaaggtagacagcaatgactagagcagacg

SEQ ID NO: 609865 - DNA, 282 bp, Homo sapiens
ctcccctgctccagtcccctggaaggggctgggtgctggggagtgggcctgccaacaggcagggtcaggcgaggttttctggaactagccttagcttctcaaatgggccttaggacacagcccatggtgggagggggcagcgccaggctggctctgaaagccaaggaaagctaagaactccacctctaggcccctgaagcatggtcagcgtgggtgtctggctggatggggtggggcagtgaccccctgaactattctacggcttcgtcggtcaggataccg

SEQ ID NO: 609866 - DNA, 625 bp, Homo sapiens
  misc_feature (42)..(42): n is a, c, g, or t
  misc_feature (198)..(198): n is a, c, g, or t
  misc_feature (200)..(200): n is a, c, g, or t
  misc_feature (208)..(208): n is a, c, g, or t
  misc_feature (250)..(250): n is a, c, g, or t
  misc_feature (258)..(258): n is a, c, g, or t
  misc_feature (263)..(263): n is a, c, g, or t
  misc_feature (321)..(322): n is a, c, g, or t
  misc_feature (344)..(344): n is a, c, g, or t
  misc_feature (370)..(370): n is a, c, g, or t
  misc_feature (377)..(377): n is a, c, g, or t
  misc_feature (401)..(401): n is a, c, g, or t
  misc_feature (407)..(407): n is a, c, g, or t
  misc_feature (415)..(415): n is a, c, g, or t
  misc_feature (455)..(455): n is a, c, g, or t
  misc_feature (546)..(546): n is a, c, g, or t
  misc_feature (620)..(620): n is a, c, g, or t
tgaaggttttacgatgctttgttttcattagccagtcttttnctactggacttgaatggccggttgcgttaaacagttctgggaccgttcttccaccactgtttaagagtggggtggcaggttttaggggtaatattcgatttagccttctgagctttctgggcagacttggtgacctggccagctgccagcggcctncntgtccacngctttgatggcacgccaccggcaactgtctgtctcatgtcangaacagcnaaagnggcccaaaggtggactagtctgagaagctctcagcacacatgggcgttgccgaggagnnggatcaacagtggcgagcatcnccagacttcaagaatttagggccatnttcgagngttgtggcggaacggcgatgaggnttttcngtcagctnggcgaacttgcatgcaatgtgagcggtgtggcaatccaanacaggggcatagcaggcgcttatttggcctggatggttcaggataatcacctgagcagtgaagccagctgcttccattggtgggtcatttntgctgtcaccagcaacgttgccacgacgaacatccttgacagacacattcttgacattgaagcacacattgtcnccagg

SEQ ID NO: 609867 - DNA, 653 bp, Homo sapiens
  misc_feature (653)..(653): n is a, c, g, or t
ggccgggcgcggtggctcacgcctgtaatcccagctctcagggaggctaagaggcgggaggatagcttgagcccaggagttcgagacctgcctgggcaatatagcgagaccccgttctccagaaaaaggaaaaaaaaaaaaaaaaaaacaaaaggacaaaaaaaaaaaaaaaaaaaaaaaaaaaaggtgggggggcggccggggccccggagaaaacactttttaaaacacacatcgcgggggggcgcgcgggggccccaagggggtaaggaaacacgtgggccaaaagcggggttcccaaaggaaacaccgggggcaaaaacaaagggggggggtctctctccaccacaaataaaaaacgcgccgcggggggagcaaacgcgagggggtctgtgaaaaaactcccaagagaggggagtccgagagaggggcccaaacgggggcctcttaccacaagggggccccagggaagaggccaaggatactcaaataatatacccgcccacgggcccgggggggggggagcaactaacggcgcaggcaagaaaggggaggcgaaaaacagagacgcaaccacaaacaacacaaaggcggagaaaccaagacaaaaaacaaagacacaactgaaggaggacaacggagacaaacacggn

SEQ ID NO: 609868 - DNA, 159 bp, Homo sapiens
acgtttaataccttacaaaacctgaaagatgctcaataattcagtcacagaaggacaaatgctgcatgattccacttatatgagtttttgtaaaatagacttatagaagtagcaaatagaatgtgattgctaagggatgggggagggggagatgagttg

SEQ ID NO: 609869 - DNA, 205 bp, Homo sapiens
  misc_feature (39)..(39): n is a, c, g, or t
aaagggggggggggggaggggggtggccggctttggtgngtgattttttttttcttctttggtcatggggggcgaggggaaagggatgaattttccccttccggccttttcaccccccgggcctgttttttttttttgggaaaaatttccccctggctttggggccccccctttttttttaataaaaatggcccggggggtggga

SEQ ID NO: 609870 - DNA, 316 bp, Homo sapiens
actagaggactcggctcattcagttctttgagataagctcgatctatctttttggatagctggattcagtttgctagaattttgcagaggatttttgccatcagtattcatcaaggatattggccctgaagttttccttttggtttttggatctctgcaaagttttgggggcaggatgatgtagcctcataagaatgagttaaggaggaagtttcctcctcttcaatttggttggaaataagtttccagtaggaatgggaacagctcttctttgtacatttggtagaattcagctgtgaagccgtctggtcctggg

SEQ ID NO: 609871 - DNA, 198 bp, Homo sapiens
  misc_feature (123)..(123): n is a, c, g, or t
ccctgtgtatgcacacctagggtcagttttgcaggtttaagccatttaccaagatagttgtaggtaaagaagggcagatttattagaagaaattgctgaaacatattgttggacagtgggccnagctcagcagacgaaggggctacctgcagagaggcaagggctggaggaaagttttatagggtcctgctgaagggt

SEQ ID NO: 609872 - DNA, 178 bp, Homo sapiens
aagccaccttcctattcctactgacactggcgtacttacttaaaaaaaacttttcattgtaaaatattgcctatgtacagaaaacatacatgatcaacttaatgaattatcataaaatgaacacctgtataaacagttctttgatcaagaaattgaacactgacagtaggcaatattt

SEQ ID NO: 609873 - DNA, 309 bp, Homo sapiens
atggcatgtagtgatgacactctggacttccgactcaacaggattcctgagcttgaacgtgcatagtaccacaattctatgaagaacctactgccccagtctttgcacggattaatagcttcgctgcctggctgttattcttccgtcatatagggctttctcatcgaccttaggattgctacgtggttcagcttactgtcatgtagaatgtcctcgctttgtggcttccttagtctcctgcccttgccttgaagtcccagcattgatggcagtgcctcatcttcaacttttgtcctcactacatgccat

SEQ ID NO: 609874 - DNA, 119 bp, Homo sapiens
agatgggaaagttgctgagacaagaaatgcctagtggaattatagtgctagatacaaaattcacacagtgaaagtgcacggactctggggacgactgggaagtgtcctcagccattcag

SEQ ID NO: 609875 - DNA, 617 bp, Homo sapiens
ggatagcagaacagctatcaggaggccatggaaatctagaagtgagagtagatgacattgagggatgtgtcccatagaactctctccggaggagtaggcaatgtctgaacactgcacagcaaaattaatataggaatgtgatgtaagagaactacagaaacctggccttcctgggtattgctctctctaagccagacctgattacttatctggagcaaggaaaagagccctggaatatgaagcaacatgagatggtggatgaacccacaggtatatgtcctcattttcctcaagacttttggccagagcagagcatggaagattctttgcaaaaagtattactgagaaaatatgaaaactgtggacatgagaatttacagttaagaaaaggttgtaaaagtgtggatgagtgtaaggtgcacaaagaaggttataataaacttaaccagtgtctcacacactgcccagagcaaagtattacaatgtgggcactatttgacagtcttctataaatttttaaattcaaacagacatacgataagacatactggaaagcaatgcttcaaatgtaaaacatgtgtcaggtcattttgccatccgttaacacaaaacccaac

SEQ ID NO: 609876 - DNA, 105 bp, Homo sapiens
ggtcactgaggtcatagaggtcacacgctcatgggagcttaggaggtcaaatattcacaggctcagaagatcatgaggcggtcacagggtcaggaagccatgatg

SEQ ID NO: 609877 - DNA, 185 bp, Homo sapiens
catgctggtcccccgtccgattgccatgggctgctgcttgtgctgtgctgactgctctttctccttctgcggctgctggcctcagctttgtgcttgggacagtgactcggcagtcagcacaaaccagtactccttgtgagcctgcctttcatcagtgctgatcatggtgccatctgggacggggt

SEQ ID NO: 609878 - DNA, 399 bp, Homo sapiens
accaggctgtaactctctatcacccccataacagcacacacagagatacaagaatgaatctataacagcatgatcaattgtatgtcagtgtaaatggattcatatctagtgttggacgataacgtgatgtaatccccaacaattgtaattgtaagtccttttgattctagccatcctgataagtgtgaagtggtatctaattgcggttaagatatgaatattcccccatggctaatgttgcacatttttcatgtgcttatagtatgctatacacttttgtaaagcttcgtcccctgatatgatactcttgattctctctctgtatccaaattgacttgagaccagagcatgccaactatgttattaggcaactagaaagaaccaggaagataactacta

SEQ ID NO: 609879 - DNA, 181 bp, Homo sapiens
  misc_feature (176)..(176): n is a, c, g, or t
ctaattaaaagtgcatattccttttcaatcgcattcttgatcaggtcttcgttcgtgccgttaatgcctaacgattccagcgcgattttaacaatatcaaccgcaccagacttcttcggctcggccgctagggattgtgtcacacctaacttttgcatggccacggttgcagcctnagcaa

SEQ ID NO: 609880 - DNA, 286 bp, Homo sapiens
taatttaaataaaatttgttcgggggataaaatggggttgcccgtgaagaaaatttaaacccccctctttcaggtaccgggttagggaaaaaaccatttcccctaggggttcaaaaccttttaaagaagcggtttgtcttccggttcaaaaaaaagggaggtttgggctttttttctgttaatagggctttttccccttgattaaatgaaggaaggtttctttttgaagagatttattttctgtaaataaaaattcgttgtacccataaagttgggttttccctca

SEQ ID NO: 609881 - DNA, 192 bp, Homo sapiens
ttatatgttcgagtccctaaaagagacacccaagatcccccggcaagacagtgataattgacactatttttactttacggtagacgtgtgcccagaccaaaacttctttttccccctctaacatatcaatcgtacattgacaacttctcgtatttgttaacggttgtttatgaacgttttttacagtagttt

SEQ ID NO: 609882 - DNA, 131 bp, Homo sapiens
agcaaacatcctggttgcatgtttttcaaccagtcatcaagcatgtcaggggcacatcatggttttcacacagcccttttcatcattctgtcttcatttgattctgaataagctaagttggtcgcatcatg

SEQ ID NO: 609883 - DNA, 1275 bp, Homo sapiens
aaaaaatggtggtcgaggctggtttaattggcacggaggagagagagagagagagagagagagagagagagagagagagagagagagagagagagtagtagtagtagtagtagtagtagtagtagtagtagtagtagtagtatgtgtatgtatttgagtatttttgtgctgtgtgatgtgagatgacatgagatattattcatcatatttattatcatgatatcatgatcatgatcatgcagcagcagcagcagcagcagcagcagcagcagcatgcgcatgcgcgctgcgccgcgcagcgcagccgacgagagctgcgcgaagagaagaagaagacgagacaagaagacagctgccaggccgacatgatgactgatgctcgacacttgacagaagcctacatgcaggacgactgacgcctgcatgcactgacggcacgactgacagactacaatcagatcagaaacaaccacaagcgacaatcgacaaacaacgccccatacatgcaacatagcaatcaagtccattaattagtcgttcgttcgtcgtccggttcgtccgtcgtccagtcattcgtcgatcatcagtccgttcttcgttagtcgtcatccagccagtcagtcaagtcaggcaaggcacagcacgcccggtacggcacgcagtacggcaaggaagcacggagggacggaggtaggtacgttcgctcgttccttcgtcgactatacggaggcatgagcagtgccaagtcatcgctaaagacatgcgtacggtatactcagctataaccacccctagaagatcatatcagatacggaagatatcacatttcgcttaacatttcttaggtatagcgtatcgcaattcgcaagcgtatgaactacgacaagcccaggacagcgcaaggcaacgaatagccccgcgattgacaagatagcatgtagacagagccgacagagaaaggattgaaaccaacgcgaaatatagtacaattctatccataagaaagcgtccctaccaccttatccagtccatcacataacccacaactaaacacacccactcaaacactaacgcctatgtcccactctttcctcctctcactttcaccactcttactctttccttatatacgcactctcaccctctctcatcaatacacacaatacactcccatacgaactaccaaatcaaattctatcacaatacgtacacactcatcctccatcacactcatcttacataaaattaaaattcacaatacacttcctcatccag

SEQ ID NO: 609884 - DNA, 93 bp, Homo sapiens
  misc_feature (34)..(34): n is a, c, g, or t
  misc_feature (38)..(38): n is a, c, g, or t
caatcactgacttgccccaggctccggtgtgacncgtncagcttatcgacagtgacgctgtaggtgaagcggctgttgccctcggcgcggatc

SEQ ID NO: 609885 - DNA, 135 bp, Homo sapiens
  misc_feature (133)..(133): n is a, c, g, or t
cccactccaccttactaccagtcaaccttagccaaaccatttacccaataaagtataggcgatagaattgaaaccttgcgcattagatatagtaccgcaggaagatgataatcataccacgcatatatagcangg

SEQ ID NO: 609886 - DNA, 476 bp, Homo sapiens
gtactggcactctagtcatttgaaccgggaggcagaggtagcagtgagctgagatcacgccactgtactccagcctggggatagagcaagactatgtctaaaaaaaaaaaaaaaaagaaaagaaaaaaagaaaaaaaaaaaagatttaagtttttaatatttatttttcttcttattaaattgatccggccttggtggggaaaaaaaaacaatttggaaaaactccagagattgggatgtacaaaacaaaactttgccaccatccaagagcgacagttaacaattccttgggtatatcccagggtggtgagcttggacaaaccagtacggttaaaacttttacccacattcatcttccaggggtctggattccccgggtacagtcacttatgggccggcctcggggtgaccaagtatcatcgggggtcaccatttacaaggcggcgggcacacccgggacatatagccggccccaa

SEQ ID NO: 609887 - DNA, 406 bp, Homo sapiens
cggcacgaggtttatcagtctcttttttgccccttttctttgatataatgtgaattaggcttcttagcgaattacctgtacacattcttaggctacaaattttggcatgttcaaatttatcaaagatttaaaaatgaggttgttgaattttaaaaatgcacacattcagttttaaaaacacagacacagtaagtctgaaggaattaaatcagtgtgcaaaagttcatgagcaatcatttaagtcttgtgattacatttttaaaatgtttaagtatttagaaatttaatggtcgggtgcagtggttcatgcctgtaatcacagcactttgggaggtcaaggcaggccgatcatgaggtcaggagttcgagaccaacctgaccaatatagtgaaaacccatctctact

SEQ ID NO: 609888 - DNA, 350 bp, Homo sapiens
  misc_feature (79)..(79): n is a, c, g, or t
  misc_feature (242)..(242): n is a, c, g, or t
  misc_feature (261)..(261): n is a, c, g, or t
  misc_feature (272)..(272): n is a, c, g, or t
  misc_feature (315)..(315): n is a, c, g, or t
  misc_feature (340)..(340): n is a, c, g, or t
tcatcagtttacatgatatttaaattgtgaagaacaataaccagtacaactggcataaacaggtttgggcccagcgcantgcttccttaccagggcatgcagctcagctaatggggtacaggggcgttggggcataccaggggcaaggctggtaggctccaggggttcacaacgtgttaagttcattacatttgccaaggggatggggaagtgttgactaatgctgtgagcctaggtaagtnggagatgggcactcctccngttaatttccnccagggcttctgtgtcttggaagttttcgacccactattgggnggaaaacaaggcaatttggggtttnatttggggtt

SEQ ID NO: 609889 - DNA, 1095 bp, Homo sapiens
gctgaagaaccaagttcaggcttcatctttggatatcaacagtactccaagtcctcttgtctgctgttgactgactttgctaaactaccacttctacgacgagtgacagacttcttactcttactgggacgtttactacttggacacgtgtaactgccgaaccgacacgtgaactgggacaaacgactgacgcgcacgtctctgacctactgaccgctgggttaccactacgaccactcgttttacgacgggacacgacttgaacgtttgacacttactgacactggttatcaaaacagcagactatttaagggaaccaggaccataaacgacacgttccacagaccaatttggtgtacgttcagacacttacttgacgcaacaatgggtcatgtacatgtgcagcatgaggacacaggaagaccaggtcgtttaggaaaaacctaatggagcctgtggagcacacaataaattagccagcaacatagctattcatatccacatgccagactggactgctgcacagcaattcagcatcacacaccgaccctcattatatctaaatacgcgcatctatggttgcacaatcacgttgcaacgacccaactgacactactttaacggtactggagtaacccttaacgatggtagcgtctggggtcaactaacgatcagagggccatatctacgacacgccttggttaactcctacaaccaaggggtcacaagaagaaacactgggcaacaacatggatgggatcgtcatttactgcacttgggcctaacggtatggaactccatatatccccggaaagaccaagttgtatcaaatcctggagctggacacaggtaaaaaacacaacgcgtcttatacaagaaggacacacggacagcaggctcaccaacaaacccaaccgatcaaccgattggaacggggccaactacatggacacatacgccaattgaccacaaaggaccgtaaatggatgccacaatgacaaggacaccaacacgacaaagcaaccacgacaacggaaaacacaaagaggacaaccaaacggaaaaacaccaggcgcgcacaaagggagcaaggaa

SEQ ID NO: 609890 - DNA, 123 bp, Homo sapiens
gcagaggcgtgagactccagatctgactccaaattaccctgggtctagaattcagcctatcaaatatcttctgattttagactttgccttatacgtttctctggattttagatctataccacc

SEQ ID NO: 609891 - DNA, 103 bp, Homo sapiens
taaggtttacacattttttctccccccaatttttttttggggaaaaggggggggaaagggggggggggaaaaagggggggggggagaagggggtccccccccc

SEQ ID NO: 609892 - DNA, 546 bp, Homo sapiens
tgactagaggacccttcaggagagagtctgtgaaacattctctgtaggtgcgggacagtctggtggctgaccattaacgtccactccagcaccgagtgctggacacttggtggcttctgttcaactttcctggcttggagcccagatcttgtctcatgagcagagtaactactgaggaggcttctcagatgggaagttggttttaagccagaaatctggagagatgtcatgcccggcagcagcccccacgggccccggcctttgtggggcagtgtcactgtctggtgttccaccagtacccatgctgcaaggagtggggcttggctgctgtggttggcttgtccttcagtggttttccagattgtgtgcagttatcatgaggagtttgttgctgggagtttacaggaaaagggaggaaaaggcatcgcaagttgtccagtccattgaggatgaaagtacgtcactcagggtgaatagataggttgggacgagagttgcctgtatacagacagtgcctggtatcatatttttggggggactttaagc

SEQ ID NO: 609893 - DNA, 391 bp, Homo sapiens
aacgcgctgatagcctccgtactaaaatacaaaaaattagccaggcatggtggcgcgtggctgtaatcccagctactcaggaggctgaggcagaggaatcgcttgaacctgggaggcagaggttgcagtgagccgagatcatgccactgcactccagcctgggcgacagagcaagactccgtctcaaaaaaaaaaaaaaggaaaaggaaaaaggaaaaaaattttttcagtttaccccaaattgggtggtggaaaacggggggtttatttttaagcggggggggggcccaccccttatatccccaccttttggggggcccgggccaggggactcacaaggccgggaaatggaacccttctgggttaacaggggaaaccccccttttttcct

SEQ ID NO: 609894 - DNA, 502 bp, Homo sapiens
ggtcgactgcgtcctcttgagatcatcggggtggtgccgctgatagccagtacctctcggtcgtaatccttgcccagccggatcagcgcgccgtcattccgcgcggcgacaacaaatggccgttcatcaaccaggccagccccccaaacatggctttttccgacaatccttccacgatggaaagttggtcacgcatcagttcttcgagtccggggtcgcgagccatgagtcgtaccttcctatgccctagagcttcctgccgaaacgaaatgatgctccgtagccgagtcgggtaaatggttgctgccatcttccctcagcctggaccggaagttccgctatggggctgggttctgtagaggccgcgcttttgcaattcaggaatgatcaactccacgaagtcttcaagcgagccgggactgatcaacggattgatcatgtagccgctggtgccggagatacgtgcatgctcctcgaatcggtcgacgacttgttgcggggt

SEQ ID NO: 609895 - DNA, 210 bp, Homo sapiens
  misc_feature (122)..(122): n is a, c, g, or t
attatactttaagttttagggtaccatgtgcacaacgtgcaggtttgttacatatgtatacatgtgccatgttggtgtgctgcaccattaactcgtcatttacattagggggagggggtgcnggattccagtgactaaaggaaccattcaattttattaattctctgaatgaggggaggttttaagatttaacgaatatatctgcgtctc

SEQ ID NO: 609896 - DNA, 143 bp, Homo sapiens
cgcgggcacctatcctaagtctacgattgtgtgtgacgaaggtaggtttccccaaggaccacattgtctcttttcaccaatttcccccgactcctcttagctaaccgatcattctgcgccggcggtacccgagctcgaccttc

SEQ ID NO: 609897 - DNA, 651 bp, Homo sapiens
tggagacagagtctggctctgtggcccaggctggcgtgcagtggtgtgatctcggctcacttcagcctccgccacctcaaggcagttcaagcaattctccgtgcctcagcctcccgagtagctaggactacaggcgtgtgccacctctcccggctaattttttggtattttagtagagacggggtttcaccgtgttagccaggatgatctcgatctccgtgacctcgtgattcgcccgcctcggctcccaaagggcctggaattactgggcgtgagccaccagtgcccagcctcaaatatgtttttaaaaaatatcatggtcctcctcctcttaagattttttaaagttatttggtcaagtacttaagtagtctggctcaagtacttgtgtttacaattaaaatggatattatagcatttaatagaagaaagtggtttatggtttatccaaaaagaatgtcagctatgacctgttgtagacttaaaaaactacatgtttcgtgaatatttatacatgtggaatgatcttggaaatatccaggattcttagtaatgtatttccgtgaataaatgtctgtttcatgaatttctaacttacattgtgtggggtcttctgccaacaattgctttataattgtggtccaacagttg

SEQ ID NO: 609898 - DNA, 1038 bp, Homo sapiens
  misc_feature (182)..(182): n is a, c, g, or t
  misc_feature (187)..(187): n is a, c, g, or t
  misc_feature (209)..(209): n is a, c, g, or t
caccgctgtgaaccacaacaacttggcttctgcacgcgcgctcccccggggtatgatccattctctcgctggtcctactatatgggtgtgttctacatataattccagcctttcggtttgtccctcttcaagtgatagggcggaccttctctcttatatttaagatttggccttccccaccncaggngggggattcaaaagccctggtnctctgtataaccttgtttgtatcaccccgctgtgatgtgttgtgtccgtcctccccctttataagatgggctggtgcgctttgtactcacctcctctaatcgctgataggactccctcttgtggcgcgttttaatttttattttaattgccacaccaccttgttcgcttcgtcacataatcactcccactgggtgcttttagttcgtttcccgcaaccgctgtgctcgcgttataaatttttcgctgtgttggggggcgacatcctctcggtggcacaagaaccactcacaccttctcgggacgctcagttacgcacattgctgtagagagacgtgtgcaccccaccggtcgttcataacagccgcgacgtcttaacttagtatacctgctcactgtgtgagtgcccaccaacatactagttgtcccgcacgcagtacgcacaagtgttgcccctcgggggagtaagacacgccgcgcagtcactagttgttaagagagtgctacaagatcacaaccacataaggagtgttataaacgctccgcaatctttgtgagtgacacaggagcactgccccgcattggtgccaccccgcctattttaaaaggttctgttgtgttctaccgacattgtgaatgcctattcgggagtactgaggttcataacccgcgagtgtattccacgtccggtgtttatttattctcaatttccccccgtttcggaaggtccaaagaaataaagagccttttttcccaagacgcctttccccctagaagaaattttttccacttgggtttaaaacccccccccccccaggaacaggggtttta

SEQ ID NO: 609899 - DNA, 475 bp, Homo sapiens
  misc_feature (19)..(19): n is a, c, g, or t
  misc_feature (82)..(82): n is a, c, g, or t
  misc_feature (144)..(144): n is a, c, g, or t
  misc_feature (166)..(166): n is a, c, g, or t
  misc_feature (208)..(210): n is a, c, g, or t
  misc_feature (225)..(225): n is a, c, g, or t
  misc_feature (239)..(239): n is a, c, g, or t
  misc_feature (301)..(301): n is a, c, g, or t
  misc_feature (316)..(316): n is a, c, g, or t
ccgcattccccccagctcnttagtgggcacccaacgctaaatggttccttaagccgctaatgactaattttaagggattagngctgcagcaatcaactgtaattgccaggatgtaacaggatttggggggccccagggctcccntccagcctcccggcaggccgangaggacagtgccacctgccggggtctctgagggatcaacctnnntccctccctcccacntgcacctggcaccngggcagccagcacaagaccattgcagggttagtctgtctctttccttcccacagacaactcngttgcaaagttttgngagaaatccctgggttttctgcagcccctcacttctcagagtgggggtcctggaagcaccctgagaaaagggaaggttcctcagggtcctgccttggaagcaacttgttgaggaaatctaccttttaacaagtctcttcccgcagcttcgttacacaca

SEQ ID NO: 609900 - DNA, 911 bp, Homo sapiens
gacatgttgctggcgggagagcggcggggccgagagcgtgactcgcccgctccggctgattcccccgcgcgcctccccgcgcgtcggcagccatgtcccgaggaaaagcccaaggaggcttgtgcacgacagagaatgaccacatcaacccttgaggggtgccggccaggacgcgctccggtggtgcagtctcaggatccacgagcgcacacccgccgctgaagacaaagcttgattgaagggccataccgtgcgaaagaagcgacaggggtcttgtccacaatggagcgcaggcactccagatttccagcgttccgacaggtgggcaagccaaacttccacttgaaaacttgacacacttcaaaggcaacaggtttggcgagcatgcggacaggaccggaaggaaccaccaaattccggacgttgttcccaagccaggacaagaagctgggcgagtggtgtgtgcccgtgaagaagcaaggcccctggacaggtggacacaaaaggttttctaagaaggggccccggttccccccaaggtcctggtgcgcggatcacaatttccttcgacaatttggcgttggttggacatgggtgaacgccaatcggtttgcaccagttgtccggaacccacaaagtgggtgttctggcaggaaaaaacttcggaagagggaaattttcaacccaggaaagtgaaatgttttcacacttctctcttggggaatggcttcattccaaggctggcataacttcaaaaaacttgatttatttgtgcagaggtggaattgaaattcgtggtacacgtataaacgttggtggccactccagggacattgggtacactcttgtggggtcgccaggtaacacaagtggaggttggcaacgaatatttgtggggaaacctttgggcg

SEQ ID NO: 609901 - DNA, 1214 bp, Homo sapiens
  misc_feature (355)..(355): n is a, c, g, or t
gatacgacaccgcgtgtttgttggccaccccctctcttgctccgctgtgaggctctccctctcacctcccgcctgggttgtggcccccctcctttatgagatgccctccggggcggcacagtcagacgacgctcgccggggcgtgttgatgcttccttcgtggccgcggcgcggggccggcggggactagaccgcctttgtgtctcccccccgtgtggtactgctctgtgtgtggtcccgctcgttgtggctctcgtttttttgggggtggctcgccctgcttttgtagtgctaccagttttgtgctctatcctaacaaccactcggcggggtgtgtgctcgcgcgcctccggcnatgttcctcctccgggggagttttgtgtttgtactacacctcgccttttcctaggcgaaaattttttgttgtgtgcgcctcgtccctcctcctttgagaattgatatagaatgacccagcgggtggtctctatctaatgagagagaatatattgagagagaaaggagtggaaacacatacattctgttataaagtatatagataaaataaataagaagaacagaggggggggagggagctcgtcgagaggagagagttgtgtgtgagccccccccccttctgggggggtgcgggtgcgctcctcagtggatgcaccgcctgttgtccctttgttcgctctctcgctcccgcggagaacttgtgtttttttataggggggctgccccacagcagtgtgtcccgcccacacgtgtggcgccaccttttttctccacccttctcgcgctcacctctggcgcacacccgctccacacacccccgcgctctctttattgtcttcaggtgcgccccctcggcgcgggtgcccgccccccctctgtgtgtgggggtgtctcccacaaggtgtttcccactgggggccgccgcctcttgtcccccgcccctctcctcttttctctcccgcgcccacttcccgctctcttgtggggtcacacgcgcgcgcctctcccccgccgacacactccccccgcgcgggccctcgggggtgtgtgggggtcccaccccctctttcccacggggcctcgttcgccccgcgttccctcctctctcccccgcgcgggtggggggggggggggggtgttttggccggggttttttttttttttgtgcaaaaaaaaaaaaaggaggccgttttttgata

SEQ ID NO: 609902 - DNA, 290 bp, Homo sapiens
  misc_feature (5)..(5): n is a, c, g, or t
tcganctctagaggatcccccgatgaatcatcccggagagattgcagtgctggcctctgtcgcattaccgaccgttgtgctggtcaacaatgcccagcgcgagcatcaggaatttatgcaaaatgttcgtgctgtggcggaagaaaatggcgcagcaatccgggctttgcctgcagacggcatagccgtttttccgctggcggatgattatgcggatttgtacctgctggcacggaaaggcatggcagaaaaattgttgccggttgttcagatccgttactgccagcgct

SEQ ID NO: 609903 - DNA, 1514 bp, Homo sapiens
ggttgtgctatcgcgacgaggagttctgcgcctgccagaagatcgattccctctcgtttactgcctcgatgaagcacgagccaacaaagcctccgatgaggaagcgttcaatacgtgttcaacgcgtagaggataagcacgattcgatggcctagcttgaccctctgcgatgacgtttgccctgtggatatgcgggcgtgggactggaggttgatactcttgcaggaatcgtccgaccaaggaggaagagctagaggagtggaagcaagagaagtggagtgcaggtcgtgctcggtagtagaaccagttgcgtctgagagacaaccaaccgcatggagatagtgtatgtagtggcgactgtggttgagaggtgacgcgtagtgaagatacccctacagaaagtacacatccccgagtcaactctttcatgggagcaaagatactttatgaccgtagacgtctaggatacttctacgatcggactggacattgggcgccttaatgggaccgatctatccgtttagtttagaagcacaaattcggcgtccagttagaccaattcgtttagaccaaaaggaaaggggacgcggtgataaccccatattcttgagctagtttacaggaacaagtggcagtcctgtggagtcggcaaggggactggcgataagggagaacgtcgggacgtgggcgaaggaccaagtggcagctcatataggctaagcggatgggcaccaagcacacgtggaggtaagaacccacacggatacgattttcgggggtgcttccgtattgttgcgaactctagaaaaccggcgagagaatcgcacggcgcttagtgtgttcgctcctgtgggcgggcctaggatatatggaaagtgtggccgtaaggcgatgaattttagagcttccgaatgcggcaatggggtttgcgcacacaacgagaggcggcaactctgtggacctgggacagccagagggaacacattctttcggaaacgtaatgtgtgccacgccttgtctggaacggaatccgccgttttggtagacggacgacggccgttgtttagcccctgtggtttgaaaaacccttagaagagttggttcctttagacgacaagggggaatctgattgaactcagatattcaagaagcgttgcccttctgcagtttgggtttcaaccgcaaatcgcgcgagcaaaggaaggcgcatatatttgagcaggggggataccacctgagtcactgcatagagggagtcaagacaaacagcaacaggctgttgccctcggggaaatagaaacgcacgcggcaggtaccttgtgcaaaaataggtgcgccctgagtagtttggtagtccagtagcacatcgcatgaggtcaggtgttaggccaattaatgtagtggagcatatgcaggggagccagccagaggtagccacataatcagcagaaaatacttcaggagcaaaaattattaagaagttaggcgcgaggcaaagctatagtaacggcgtg

SEQ ID NO: 609904 - DNA, 887 bp, Homo sapiens
  misc_feature (24)..(24): n is a, c, g, or t
  misc_feature (351)..(351): n is a, c, g, or t
  misc_feature (471)..(471): n is a, c, g, or t
  misc_feature (480)..(480): n is a, c, g, or t
  misc_feature (538)..(538): n is a, c, g, or t
  misc_feature (542)..(542): n is a, c, g, or t
  misc_feature (563)..(563): n is a, c, g, or t
  misc_feature (570)..(570): n is a, c, g, or t
  misc_feature (573)..(573): n is a, c, g, or t
  misc_feature (580)..(580): n is a, c, g, or t
  misc_feature (595)..(595): n is a, c, g, or t
  misc_feature (601)..(601): n is a, c, g, or t
  misc_feature (614)..(614): n is a, c, g, or t
  misc_feature (632)..(632): n is a, c, g, or t
  misc_feature (637)..(637): n is a, c, g, or t
  misc_feature (642)..(642): n is a, c, g, or t
  misc_feature (657)..(658): n is a, c, g, or t
  misc_feature (661)..(662): n is a, c, g, or t
  misc_feature (665)..(665): n is a, c, g, or t
  misc_feature (683)..(683): n is a, c, g, or t
  misc_feature (702)..(702): n is a, c, g, or t
  misc_feature (705)..(705): n is a, c, g, or t
  misc_feature (715)..(715): n is a, c, g, or t
  misc_feature (729)..(729): n is a, c, g, or t
  misc_feature (732)..(732): n is a, c, g, or t
  misc_feature (761)..(763): n is a, c, g, or t
  misc_feature (770)..(770): n is a, c, g, or t
  misc_feature (778)..(778): n is a, c, g, or t
  misc_feature (787)..(787): n is a, c, g, or t
  misc_feature (789)..(789): n is a, c, g, or t
  misc_feature (794)..(794): n is a, c, g, or t
  misc_feature (797)..(797): n is a, c, g, or t
  misc_feature (802)..(802): n is a, c, g, or t
  misc_feature (808)..(808): n is a, c, g, or t
  misc_feature (820)..(820): n is a, c, g, or t
  misc_feature (823)..(823): n is a, c, g, or t
  misc_feature (826)..(826): n is a, c, g, or t
  misc_feature (836)..(836): n is a, c, g, or t
tttccatacttccgaacaagcgtntcacatccataaccaaaaattagatgagaaagaaaaagaactcttgtgcttcgaattgacttcattgcactaaatagcattccacactgcggttccaggccacagggtccccgggggagggggagacaaagggggtggctgacagggagaatccaggaccaccattgccactcccaccagaccagccacacccccgtcccacacagtgggcatccaaatctgatttgaaaaacagtctccaccaccaaaagaaaaatcccatgagacaatgaccacaagccaatcacccacccaaacccgccgaccccggcccccgggagaggcggncgggagaccacacatctcacatcaaccctaccatgaggagattaccccacgcgtccggggtcacccaaaccggagcgccaagaaaacccccgtgtcagggaaaaaaaaaaaaaaaatccncctccattnaacagtggagcaaaggacctgaccaataattttgtccacgttttcatttgaaggaatncttnatgcccattttatgaaatgtntttagcncanagtaatnaacagggatccagcntgccangggcgaaaaattntccagatggtcgccaagnaagantcccnccccccgattgtccnnccnnccntgtgggcaaagtggtggnggatgagtaaaagggagcngcngaggggaaantccatccggacccnccnaggggagtgggtggtcccagtaaggaccnnnagtaatnttttttcnctcaatccntntcccnttnagccnccagtntttgttgttttnccnccnacctttttcnttgaaaaattttcaccccagccaatgttagggagaaaataaatgtttttgc

SEQ ID NO: 609905 - DNA, 197 bp, Homo sapiens
tcctgttggagggtgtggaggaaagaatggaaatgatttctgaagaggcaaaagagagtatgtattccgtggaacaaaacgtgagagaaaagtgagttttgaagctgtagaagcacttatgtcaatgagctgcagttggagagtctgagttttaagaagatacgttgaaaacagacctgttacaccaggtatcctgg

SEQ ID NO: 609906 - DNA, 102 bp, Homo sapiens
  misc_feature (88)..(88): n is a, c, g, or t
tgtatttttagtagagaccgggtttccccatgttttcttggatggactagaaaaaaaaaaccctcctccgggtgtttcagccccccanagggccgggcccct

SEQ ID NO: 609907 - DNA, 1055 bp, Homo sapiens
agcggactcctggagcccgcggacccgagcacgcgcctgacagcccctgcgggcccggcgcgcggcgtcgccaggccagctatgggccccgacccggtgggcgcctgagaccgttggctcatgggagctaccgccgcgctacttcgaccatgggacggaggtggaccatacgctcagggtgcgaggagtcggtggctagatgatcgaccgtaaggtgtactaactgtcaagctgatgttcatccgccgtgcgaatccgaggggtgcatcccgggctcagtcaggctcactaccgtaccggggcatggattggccacggcataccctattgtgggcacttccacatggaagctataggggcttttgtgaacgaacgatattagtgaatctgctctccgtgcattggacgaatgtggtgctctacgatgtcatgacttcagccctattgaccgcaccagcgcaaaggagacctataacgagggcttgagctagtagatagaggtttcccaggggaagctttgacgtgctcgctacctatgctgggtacgtcgggattgcgcgtgtcttccacctgaatggagggccaaccccagttgtacctgtctttcgccttgttctggttatcgcgtgtcgttgtcatcgagttcgtttggacgtggcgcttggtaatgggtgtgcaacgagccatgggttcttccttcaccctttttttgggagttactttaatcgcggggaccgttgtcccttggttactggccactccgtttcctgttcgcgttccttagttgacctgcggtggcgtgtcctccagaggttgttctggtgctcaggggccctcacaagggcagtaggtacctttgagcaattggcacgcccaaattgatacaatatttgcgcggtccaacccaatgatacgggtgatcagttttcaaaggccacaccccattcaaaacatcgctgggcgaagaacccgaattcgttgagctcttaacaagtttccaattttgtagggtcggcggttattatggggccctacccaattggaaaacagaggcg

SEQ ID NO: 609908 - DNA, 155 bp, Homo sapiens
cttgaccgctctgagctagacctagccccggacccactccaccttactaccagacaaccttagccaaaccatttacccagatgaagtataggcgatagagattgagaccctgccgcaatagatatagtaccccaaggggaggttgagaaaatttt

SEQ ID NO: 609909 - DNA, 129 bp, Homo sapiens
cggcatccctgtcaagccaagcgcattgaccacgacagacagacacgatgcacggcgggacccagggccaagatccaggataactacaccgaagaaggacatgaagagcgtctccaccgagcaggaggc

SEQ ID NO: 609910 - DNA, 425 bp, Homo sapiens
  misc_feature (197)..(197): n is a, c, g, or t
agatcttagagtcggtagtgtggagggtgtggtcacagtgtggtcagcagacagaatgaaaagcatgtgaccaggagacaggtcgtaatgcataccaggtgatagacactgcgacagagatcatacagtgcccccgccctaagcctaaagctgagatgcccagcctgctcagccatggcccacctgcagctcctgcncaaccagcgcaacagctcctcaggaagggagggcgcctctcccctcatgaatgtatctgcaagtgcacagctttgcccatctctggggcacgaacaagtccaaagtaccaacatagtcttaggttggctggctgtgcccatcgagttgggacaaggtcttccccagaggagaagggggcaggcccacccagccgggaatcagtctgtgagcaccaccaactccccatg

SEQ ID NO: 609911 - DNA, 204 bp, Homo sapiens
agcctctgatgtctgtgctgctgtcagcaggcagcttcgtatcactgacaacagaggtcggcatgatgaggacctagtcatacaagaaggatagcccaatcgtacaaccacgataatttggagattcaccagatcccctcagagtttttgtgtttttgtctgtgtatgtgtgtgtgtgtgtgtgttgatggaagcgtcgcgcat

SEQ ID NO: 609912 - DNA, 665 bp, Homo sapiens
  misc_feature (1)..(1): n is a, c, g, or t
  misc_feature (12)..(12): n is a, c, g, or t
  misc_feature (47)..(48): n is a, c, g, or t
  misc_feature (120)..(120): n is a, c, g, or t
  misc_feature (260)..(260): n is a, c, g, or t
  misc_feature (263)..(264): n is a, c, g, or t
  misc_feature (321)..(321): n is a, c, g, or t
  misc_feature (423)..(423): n is a, c, g, or t
  misc_feature (543)..(543): n is a, c, g, or t
  misc_feature (590)..(590): n is a, c, g, or t
  misc_feature (628)..(628): n is a, c, g, or t
ntttaacttttngctaacggagcgagccactggtgtgggtaacaggnnatccgccactagaggcgtgccgagtgtaggatagcaccgcgtccgggagcgccagccctacactcacccgcnccatggcctctgcctacgagctagcctgcatatactcggccctcattctgtacgaccatgaaagagacagccatggaggataagatcaaagccctcataaaagcagccggtgcaaatgttttttttgaggggggcagcanacnngcaaaggccttgcaaaaagaaacatccggagcaccatatgcaatgcacgggccgctngaccatgttaaaaaaaaagtgcttccaagcagaaaggcctgaccccttcattgattatggatcaacttaggagaatatagcaaacctcaaatcccaagactncggcgtctctggataagaccagtaattagacccttttaactaaacactcttcgaaaaagaggtcaataaaaagttatactactaatcatcccatacaacttttacctttgggtttacatnaccagattaattatgtggtaacaaacactctataagaccaaaaactnataaaaaatgataattggtcaccatcctaggcaatttnaaattatagtgttaccaatctattacaagataataca

SEQ ID NO: 609913 - DNA, 308 bp, Homo sapiens
cgggagttgctgtttttttttcaaacgtcatccatacaataaaaaactttgcttttaaaattccatttacatcagcggttaaaaaaaagtgacaggggatgaaacatgaagctgtaaagggcctttttggggggggtcacacaagggcccccaattttgcaacaagacggaggccccccccctgcacagtacattagggacattgggggacacagcacgcgttccaaataatttacacattaaaggaaaagctgccgggtctttgcatgcttcctatttgattccccaccctggaggtttgtttgggc

SEQ ID NO: 609914 - DNA, 892 bp, Homo sapiens
ggaggagaggagagcatagcacctgcagccaagatggcatgtgggcagcaacagagtgtcctgatggagagcccggccggtacttactcgcggagctcccccgtgggccggattttggcgattccctgcttgccctagtgcaccgtgaatacgccttgctttatctgtgcgtggtggtgggtggtccatgatcgtcttgtggtgatctgtgtggtacgcgcctgctgcatgaggtgcttcacacatggatgctcagtagatactagcatcggacgaataggttactgggagcactgatgcattcgggtgcagctcgagataggcccgaggccaacggcctggtccgctgagctgagacacgctaggttgaccatcatgcctagcacgtatcgtcactactatggcatacctaactggtgcctctgcggtgttgtcatgagctatccaagccacgcttgcttagatacgcacttacaaaggccaatgacccatgagtcaacgcatgactagactacaaatctcatgcacagcactagcgtacgcagaaaggagacatacccacaagagtctttgaagagcatcctcagcttagcaacaacgttccgaccagagcctttcacaggatcggaaagtgcatcctcctggccagggtcgcaatagacaccagcaagatggccctaacggtcttagagcatgaggcccagcgcatagaaggagagcgacgactgctagagcatacagacaaccgctcacgagagcggagaccacgtgcctatacctaggggcaatgggccggtagagacaacacatgctgatggacgacggatgaccgactcttacactacaatacatagggaacgagcctcacggggtccacgtgcgacagcaccca

SEQ ID NO: 609915 - DNA, 233 bp, Homo sapiens
ctctgcttgagtgaagttcatgtattctctgagagctcgtacaagagggcgatggcagttgacgttgatgtgatgcaacgctcctgctcgtccttccgggtatagtgaagcgtgtctccccggtccgtgccgtggcgatgatgtccgccttgcacaccaggaagtctgtcagcgtggacttgccatgttccacgtgcgcgcgatgaccgacatgttactgtgcgttggcccaa

SEQ ID NO: 609916 - DNA, 176 bp, Homo sapiens
ctaaacccgactccaccttactaccagacaaccttagccaaactgactttacccaattaaagtataggcgatagaaattgaaacctggcgcaatagatatagtaccgcaggaaaagttgaaaaattataaccaggcttattatagcagggactacccctataccttctgcatattg

SEQ ID NO: 609917 - DNA, 468 bp, Homo sapiens
  misc_feature (168)..(168): n is a, c, g, or t
  misc_feature (468)..(468): n is a, c, g, or t
ggagtggcagagttaaaaggttgtgacagggatagtgtgacttgcaaagccaaaaatatttaccatctcagcctttatggaagtttgacaacacttaatttagtggaatgttattgttaagaaatatctattaaattgtacaggatttatcattcaaacccagttgtngacctggcactctagaagctgagcacagatgttctctagcccacttgtagtaccaggaagtcatagcaagggcaggtgaggctctgagaccgtctgagaggctgcatctccacagactcaccctggtataagatcacaatgaggtgtggagtgggagggagcagtggtgtatgtgtgtctagcccaggcctaactgcattaaaggggagaaaacagactttgttatagttgaagcagctcccaatttaaagcaatcatttataactggggctgttccctaagaatttagcataattcccn

SEQ ID NO: 609918 - DNA, 330 bp, Homo sapiens
  misc_feature (112)..(112): n is a, c, g, or t
  misc_feature (318)..(318): n is a, c, g, or t
  misc_feature (324)..(324): n is a, c, g, or t
gccaacatggtgaaaccccgtctctactaaaaatgcaaaaattagctgggcgtggtggcacatgcctgtagtcccagctactcgggaggctgaggcaggagaatcacttgancccgggaggtgggaggttgcagtgagctgagattgcgccactgcactccagcctgatgacagagcgagactcctcccccgtcccacacacaaaaaaaacttaacacggatataatttattaagggagccagtcactatttcttaaacaattttattatgtatttattttaggcctcataataactgggtttaactattattatttntccccnttttta

SEQ ID NO: 609919 - DNA, 855 bp, Homo sapiens
  misc_feature (28)..(28): n is a, c, g, or t
  misc_feature (64)..(64): n is a, c, g, or t
  misc_feature (73)..(73): n is a, c, g, or t
  misc_feature (79)..(79): n is a, c, g, or t
  misc_feature (100)..(100): n is a, c, g, or t
  misc_feature (168)..(169): n is a, c, g, or t
  misc_feature (182)..(183): n is a, c, g, or t
  misc_feature (186)..(186): n is a, c, g, or t
  misc_feature (219)..(219): n is a, c, g, or t
  misc_feature (227)..(227): n is a, c, g, or t
  misc_feature (234)..(234): n is a, c, g, or t
  misc_feature (249)..(249): n is a, c, g, or t
  misc_feature (261)..(261): n is a, c, g, or t
  misc_feature (290)..(290): n is a, c, g, or t
  misc_feature (303)..(303): n is a, c, g, or t
  misc_feature (321)..(321): n is a, c, g, or t
  misc_feature (325)..(325): n is a, c, g, or t
  misc_feature (327)..(328): n is a, c, g, or t
  misc_feature (334)..(335): n is a, c, g, or t
  misc_feature (339)..(340): n is a, c, g, or t
  misc_feature (343)..(344): n is a, c, g, or t
  misc_feature (347)..(347): n is a, c, g, or t
  misc_feature (355)..(356): n is a, c, g, or t
  misc_feature (372)..(372): n is a, c, g, or t
  misc_feature (384)..(384): n is a, c, g, or t
  misc_feature (387)..(388): n is a, c, g, or t
  misc_feature (391)..(391): n is a, c, g, or t
  misc_feature (396)..(396): n is a, c, g, or t
  misc_feature (662)..(662): n is a, c, g, or t
  misc_feature (671)..(671): n is a, c, g, or t
  misc_feature (730)..(730): n is a, c, g, or t
  misc_feature (749)..(749): n is a, c, g, or t
  misc_feature (753)..(753): n is a, c, g, or t
  misc_feature (758)..(758): n is a, c, g, or t
  misc_feature (761)..(761): n is a, c, g, or t
  misc_feature (771)..(771): n is a, c, g, or t
  misc_feature (846)..(846): n is a, c, g, or t
ccacaacaaactagaaatcctctaccgnagtggaataagagagaacactggaacttccacagancctacaganttttcnggatagcaacacatctttganaaataacagtgctgtaccactctattagattctttccattttttattaattgacgcacagagaaaagnngcaaaatgattannggnatttatgttttttaggcagggtgttggctttanaccaacgnaaaaganaaacagatgaatatncttttgatcttnattttctttctcttattctcatggtaggntgagatgcttttnaatgtgatgttatatgcntaangnngcttgnnttgnngcnncangttttttnncctcctcggctaagcnggtctccttatngtnngcnttgcngcacttctctacaaaagctgcgaaatcatccataacagctttcagttgctcttttgttgccttgggcttgtgtttcacaagctcaacaagtgcagtttgtttcttgatttgtctctccttctcagaaagtgtgcatatatctgcatggaaggtgaatgtttcagcattaaactctttgggaacgtatgtttcatcgacttccagagctgaaaagcatggtcgcctgttcaccaaggattctgtgcagcatttggtgactctgtcanttactggcnttttctcatgcaacacacataactggttcaggaccacggatagatagtcttctgcacanggcattctttttgcttcangatntttanaanatttgctgcncacttttcctaggtttcttgagacctctacaagagttggagttgacacttggggtactttcttggtgtaacgatntaatagcgc

SEQ ID NO: 609920 - DNA, 287 bp, Homo sapiens
  misc_feature (133)..(133): n is a, c, g, or t
gctaatatggctttgctgttgaatgaaatagattatagtcgatgagactgactctcgccttatgtgaccctactggagcagaagattgtgtgctaccaattcgacccatttactgcattatgcagcctgtatnaactttgatctattggaggtcattttcaactttccagtctatggaccgcatgctgacgtgagcaagcctctttcaagaacttgcttgtcagttctcgcccttggacactgttctttagcagatgctagtcacgatgacagtttgtgggtaccga

SEQ ID NO: 609921 - DNA, 219 bp, Homo sapiens
tataagcccagttcagtaaatcttcaattgcacaagttagttgtaatccttaagctctagtgtgttacatggaatgtgtccatatgaataatagatattactctatcgtgatggcagtggacgtatgataaatattaatgttgacaagctgtcataatcttagggtcagtaccctaaagtaacctttgtgtcgagatataactgtcctgataagagact

SEQ ID NO: 609922 - DNA, 235 bp, Homo sapiens
cataatcgattccacgtttttctcgaacggacagaactgaaccccaacctgtttgacaggccgcagaccaatgccgatccaaggcaggctgccatcggtaccgtctcgtcgcccgcatagaactccgatgcttcgcggtacattcccgttccttcaagacgtacgtggcttcgcctatgaccttctctacttacggtcagcagttacaaagtccgctccactactctctactgct

SEQ ID NO: 609923 - DNA, 220 bp, Homo sapiens
accgccgcgccggccttcatctccttgagcaccggaaacagctcgtagatgaaatcgggcaccttggacggcgcacgcttggcggccgcaccaatcagcaggttctcttccaccgtcaggcgcgggaagatctcgcggccctgcggcacataggcgagcccctgcgagacacgctcgtacgcgggcagtttctggatggtgcgcccttcccaatcgatcg

SEQ ID NO: 609924 - DNA, 172 bp, Homo sapiens
tgcaagacacatgcttgcatccaacactcagtctggcaggcagatgaaaaacggggaaccatttgtgatgggtccagcatttgccatggacacagatgccgaggacccggtatgctattaggcatgcaagttctccatcttcaacatttctcccgcatagcatggttacacg

SEQ ID NO: 609925 - DNA, 954 bp, Homo sapiens
  misc_feature (300)..(300): n is a, c, g, or t
  misc_feature (455)..(455): n is a, c, g, or t
  misc_feature (458)..(458): n is a, c, g, or t
  misc_feature (513)..(513): n is a, c, g, or t
  misc_feature (536)..(536): n is a, c, g, or t
  misc_feature (582)..(582): n is a, c, g, or t
  misc_feature (584)..(584): n is a, c, g, or t
  misc_feature (596)..(596): n is a, c, g, or t
  misc_feature (642)..(642): n is a, c, g, or t
  misc_feature (661)..(662): n is a, c, g, or t
  misc_feature (665)..(665): n is a, c, g, or t
  misc_feature (674)..(674): n is a, c, g, or t
  misc_feature (683)..(683): n is a, c, g, or t
  misc_feature (739)..(739): n is a, c, g, or t
  misc_feature (835)..(835): n is a, c, g, or t
  misc_feature (848)..(849): n is a, c, g, or t
  misc_feature (864)..(865): n is a, c, g, or t
  misc_feature (913)..(913): n is a, c, g, or t
ctgctacgaataactggcacgagggaatttttttaaggagcacgcattagtgtacacagtgtgagagagagtggacactatataaaaatatgggtcaaaagacatcgtgatgcgttagagtcaacatttagcgtcagacacaggagacacacacgtgtgatatcacgatagacgctgtgggcgcctcgatatcagaagaaagaggtgtctcttatatcacgacagagcgacagcacgcgtatatacatatataacactcctctcaacacacaatagcgtcataagatgtttgcgacatgngagaaagcgtctatagagagtgcgactatatatttataaaagatgtgatatgtgagactcctcgtgcacatagagtctctaatatttatactcgcgtcgtgtgagaagacatcgtgtaaatattatagagtgatagtggagtatgagtaccacgngcngcgctcacatcgtgatctacatatcaacacacacctctatagtagacgactctcncaactatacatcttcacgatgtngcgcctcgtgggcgttctcacgaagtagtgaggaagaaatatatantntcgcgtcgtgtngtgagtactgcgtttctactatccatcttatcagccgtctgtggtngagtataaaaacatgtggnntgngtgcactantagtcactntatgtagaaaaaacactcacacaacatcgtgcgacgcgactattatttaaaataantatgtcgactagtgtgctcaatactgcatagtgcgaccacctacgaagtatgcgtcgttgagacgcctcgtctgtgagaaaattgtggactactangtgctgctgtttnntttgcgacaactagnntgtgtgttgaaaacaacacaaactatggtgtatgatggtgaagaatantaatttctacaggatgtatccactattattacctgcataag

SEQ ID NO: 609926 - DNA, 2238 bp, Homo sapiens
ctacgtacataaccctaaagctactccactgctaaaactacatcgtcccaacaattatattactaccactgacatgactttacaaaaaacacataatttgaatcaacacaaccacaccacaagccgtaattattagcatcatcccccatactattttattaacacaaatcaacaacaacactatttagaatgataccacacaactatcaccctccgcaccccctaacaacacacccctccataatactccattacctgactccctcacccctcacaactcatggcaaagaccaaacgcacaactgtattccaggtgaaagccaacatatcagcagaatacaacaacatcgtaaccgtctctactatctaactcgtcccctacagaaatcttccatttcacgttacgtaaccacattacacaggtcaatcgagcagacctacagtacatacttgtggagtatcgtctctgtcgaccaacacacgacattagtcacccgacgcaccatgggagaaaataaaatgacagccacgaatgaaggggcgacaacacggaccaggaaaacgaccagaaaaccggcagggcgaacaagaaacaagacacgtacgtacacataacgcaccccatgagagtagagcacaccacaaaccacgccataacagatcaaaacagcaaacgataacatagtacgagcagacaccaaaacaggcgcatagggaatacacgtaaaaagcagatacagacacttagacacaagtgtgcaaccatggcgcacaacgaaagcgtaatcaacaaacaccagacagcccaacaacagctacagcatgaactaacacaacaagagaaaaaaaagaacaagcaaagaacaccaacaaaaggcaccacaaataaggacacacaacaaagacagataaaaagcacaaaaggagagaaacacacacacacagacacagacaataaaaaaccagagagccggagaaacagccccagccacagcaacccacggacacaaacttcaaaccaaccaaacacacggcacaacaagccacagccaacaagaacatactaagtcaataaaaaagacagacgaaaccaagcaagggaacggcatcagatcacagcctcacaccgactcttgctaaccgtcgaaaacaacgagcaggacaaggaaaccagacagaaactagacgagacgacagaacgcagaagacacaacacacagaaaaatcgaagaaaaaaccagaacaacgaggagcggagacgaagaacagaagaagaacagaagcagcggaaaaagaaaaagagatacagagaaggaaaacgaagcaaagaagaacaagaaaacgaagagacaagcaagaacgacgagacaaagaacaaagaaacaagaagagaagaagaacaaaaacgaaagacagacgaagaagaagcgagacaagagaagactaaagcatgaaaccgaacagaacacgaacagaacgagaagaggaggaccaccgaaggaagtgaagacaggaggagacgaggagccaaaccgcaagaacagagagagacgaaaacacagacgcggagacgaaagagaaggaagagaaagaacacgaacagagaaaccgaagaaggagggagaacgaagaaacaagagcggaagagacgagaagagagagaaagagacaggaggagagagagaaggagagagtgagagaagagcgagaggcagcgaagagaagaagagcagagaaaaggacgaaaagaaaaacgagaacaaaagatgtgacgagaaacaagaggaaagcagagggagagactcgcaacaaacagaagaagaaacacgagaagaccagagaagacaacgacgaacgagcacgacgagacgaagagacaagaactagaaggagagagaagagaaagaagccaaaaggaaagcagacgagacacacagaagaactaagcagaaagactaggccacgaaaggagaggagcgacagccgaaaaccgaaacgcacagcgagcgaaacgacaaaagaagagaacgaacacgaacgaccaaacaagcaaaacaaaaaagagcaagacacatagaacaagagcagggcgaccacaggactgagaggaacgaacaacagacaagagagaaactaagaacagaacgagcaccgaagacaacacaagtaacgaagaaagggacgcacagcacgccagacagagccagacgacacagcagcacgagaaaaagccacaac

SEQ ID NO: 609927 - DNA, 227 bp, Homo sapiens
gtctctagaattgtggtcaacccatctgtgaagcactaggatcatgggtatgccgctgtgcctggtccatccatatctacgttaatagacagctgcaatgtactctgcagtagcaattatgccttctctctagatacgaactggcacatgtatgtgtgtatataagcagcgttgtagcatctcatcctggctaatggcacgtggtccatcgtgatggatttctgtac

SEQ ID NO: 609928 - DNA, 903 bp, Homo sapiens
  misc_feature (632)..(632): n is a, c, g, or t
gatgtgtgtgtagagaggactcacggcctacccggcactgtggaggaagctgggggtagacgcgctgttcgagacggtaagatgtggcctcggagagcagtaaggttgcgccgccagcttccgctacttcatgccgagcggatcaactgaactcggggggtgcggctcgcacgaaagaagagccgactgtggaacatcatcgtcgaagcagagcgcaaggggtcgcgtagagcagtgtggagcaaagcgcctccgtctccacagtgtgactggccctcgtaatctctgggacctcacgggcgtgagagacgcgttggagacgggtgaatccccccgcgtgtaatcgaaaccaactttgaaatactcctcctgtgtacggcgtggggcgaatccctccgtggtacacactcgggggcctggggttctctagtgcgtgtgacccgtcgacttccccattgcggcccactgccccccccggggcaggggccccactctccccgcaggcagaaggactgttcttccatggtcgcggctcttatctcagcccaacctggaggaactactccccactgggggcttgaccaaactccttttgcagcgcgaccccttgcttcggctaggcctcagccatncgcatcccctttggggcgttttggtctagggaacaattgggtcatcgagcatcgagtacaagggggaataagcaacatttcctttgggacacagggcgtccttcgccgagacattaaatatccggtaacccccaagagcacccgttacccaattaatgcgcgcccgttcccaaagcgccacttaaccgccacgacttgaggccacagaagctttcccattgtttccgcgcccacattattcacactccaggtacccatcacctcaccccaa

SEQ ID NO: 609929 - DNA, 420 bp, Homo sapiens
  misc_feature (83)..(83): n is a, c, g, or t
  misc_feature (151)..(151): n is a, c, g, or t
  misc_feature (237)..(237): n is a, c, g, or t
  misc_feature (240)..(240): n is a, c, g, or t
  misc_feature (350)..(350): n is a, c, g, or t
  misc_feature (358)..(358): n is a, c, g, or t
gccgaattccgtttttacccaaaattaaccagcgccttaaatatggtgcccgcatttgaaaacagacatgatgcaaggaggcntgtacggctcaggtggagaaaggtatgactcttatgagtcctgcgactcgagggccgtcctgagtgancgcgacctgtaccggtcaggctatgactacagcgagcttgaccctgagatggaaatggcctatgagggccaatacgatgcccggancgngtcgccaatggcctcaggctatgggcgcatgtgggaagaccccatggggcccggggccagtgcatgtctgggtgtctcggctgccctccctcttctcccagaacatcatnccccgagnctccgggggggagcccgcgtggccgaagctggaaaccaaacctaataaagttttcccatccc

SEQ ID NO: 609930 - DNA, 100 bp, Homo sapiens
gacagaccctcctcttagttcacacattatttcaaaggcacaagtcctcgtttcggaacgcaaagagaggcattatttttcccaaaggagttacacggtt

SEQ ID NO: 609931 - DNA, 765 bp, Homo sapiens
  misc_feature (322)..(322): n is a, c, g, or t
  misc_feature (402)..(402): n is a, c, g, or t
gccggctgcggggtacgagtccgcgacagactccgggttaagccaagcgccgcgcaatgctgagttcccggatgccggagaggcatggatgatcgtgctaccgagatcaggctcggcgaagatccggatgtgtccgatgttgaagcgcggaagattacgaatgaattgaggagacatatatgtttgagtgagagacacgttccgtggattgtcacgagttatcgggtgcatgtggtgcgcgcgagaccagatggagaagaagtcggagtgatcaaagagtggagcgagaggaattctgcttccctgttggtgctaggggaancagacacgaaggtgtcagatgtgtcgagccgatactgtgctgttcatatggatgctagtggacgaatacaggacttcagnctcctgattatcgaagcttggaactctctcgtgagatctcgaaggtgctctctagataaccaaatcgattgtcttgaattgaaggtaaagcgtttggcccgtcttcgaataagccacagggaagacaaattatctccaaatgttcggagggagaaaggaaattagaagaagggggatagggcctacatgggacaccggctatgcgaattgttcggagccagcaccaacccttgtggtcggcgattgtcccccgtttacggacggaccgaattggataccgctgaacataggagacccggtatgaacactatccgcgatggaaagtttctattcgttaacccaaaggatttaccggccaaggcg

SEQ ID NO: 609932 - DNA, 119 bp, Homo sapiens
  misc_feature (58)..(58): n is a, c, g, or t
cccattggtgataagccgtcaagcattgctgataggttttacctcgggggacccacangcgtccgcggattcagcatgcacagcatcgggccacagagcgaaggagactacctaggtgg

SEQ ID NO: 609933 - DNA, 383 bp, Homo sapiens
  misc_feature (30)..(30): n is a, c, g, or t
catcactcctgctcaggtccttttggcccntggtagtcatgtggccccccctggatgcaaaggaggccaggatgtgcagtttccccatagtggcttcccagccacaactttttacttaaatggggggtatgtattatggtgaaaggttacccttcctggcccattttcccttaaaacttttaacttgcccctcctagtccaagtcccctttcaaatgaagttttttttgcccccctttcaccccctgggtcccttagtgctgggtatgtgactgctgtagcattcccctgcccctggtgcaaacagcttcccttggaaatgggtatgtccaacgccttttttttttttgcaaaaagagttttttataaaaggaaaaaagtgga

SEQ ID NO: 609934 - DNA, 609 bp, Homo sapiens
gatatcctgtgcaggagcatctcattccttttgttgctggcaagctggtacttggaggaagcctcaagagctcgagttgtctccctcggttgcagtggagacaaattggccttatagtctggccatatttcagcttattcttcagcttgcatcagggcaatgtcattgtcatattattaacgagtacctgcttcttgtttcccattactgttgtagttagattgaaataggactacttctatctccaggtcccgcttctcccctcctacgctgaccttgtattgagtgttccttgtcatccatagttgaagaatgtgctgctgtcagcacaaagtactcagacaccacagcccccatacagctctcgcgtcccttagaagggcgaatgactgagatcttggcctgccatggttgcttgtggtaatcggtacccttcctgtgttcccaaaccatgccacagagactcagagactggctttcatcgatcatttggtagaaaacatcttccaggttttccatatccttgactttgaacacatgttgctcattgtctttcttggaagacacagcatagatgtccacttggttcaccaaaggcccgaacccaaa

SEQ ID NO: 609935 - DNA, 1122 bp, Homo sapiens
ggcttctggagggaacgccgcgatggctgcgcagggagacgccccaggtccagttcaaactggtatcggtcgtggatggtggtactggaaaaacgaccttcgtgaaacgtgcatttgactggtgagactctgaccaacgatggtagtgtacgccgcaccgtctggggtgtaagacgagttacagtaccccgtatgtgttccatcacgcaagcgagtagagacctgattaacgttcaatcgtaatgcggacagccatgccagggctagggagaacagttgcgagtggacctgaagcagactggctacttcatatctcaaggaccctaggttttgcccatcgaataatggtcctgagtgtaatcgatcggcagaaggttacttacaagagaatgtggcctgagactggtactagaggatgctgagtacggaagtgatgtgaagaagcagtcgccacactggttgtccgtgtagggaagcaaagtaggggatatcaagggacaggaaaagtgaacggcggaaggtctcgatcgtcttgcgcagtcgagacagacagaagtctggcacgtactacaagacgatatcgtgccgaagagacgtaagcataccacgtctgactgggcgcgcttgcctctgggttttgctcaggaaggctcagttgcgattacccgtacactttgggaagttagtaggccgatgaccgtggttctcgtgcaccagccatgaagttggtcaggtgcacctcaggttccgggcaagccaacaaggtgatgaggcgacgaactttaggaagtgttgcgttcagtaaccaacttgctcttcccggggactgacctgcattcgattgtagccctggttgcagtaacttgaagccctgggatgcgcaagtcgctcacggaagaggttctcacggtcacgagtaagagcgaggctaggtcgctgttggattctcaggccggttggctaggcagatgttgttggcaccactgcatttattgatcgtagactggaggggaaacatggttgctaaaatactgtagggggatgcctaagggacgacaggagtggggattacgggcatattgatagttggtagttaaacagaattaaattggctcagagggg

SEQ ID NO: 609936 - DNA, 416 bp, Homo sapiens
  misc_feature (261)..(261): n is a, c, g, or t
caacacgtacgatatgattaccacattaaggctattgtacagccatgaggtataatatcaggaagaatcttgatgtgagccacacctcttttagagtgagaaaacaaacacatttatatttttgtcaattgtccagaagaggacacactctgatatattttacaactagataaatgcacattaggaagcagtacaggttgtcaagacatgctggcaaaatatattccacttttcagacaagtcaactagcacagatggtcnaaacgaaagcctttacagcacacatctgggcacctgccctgctcaaggtgccagtcacaaaatacatcacagctcaattttcattatgcaactgttataccaatattgcttttcacctgctcaagcattaggtcttccagtttgcactttgtata

SEQ ID NO: 609937 - DNA, 335 bp, Homo sapiens
ccagatctattttaacacatcacattgagaattgcaggagaataattacccagtaacccaaagggatacacatgcttatatattcttcttcatagggaaaaagaacatggggaaatgtggctgatttgagggatggtaaatgatttttaggggaaatgaatgggtctaatgctcagacaatggttagtaaatagttttctttggaaattgaatgggacagagagaagacagtggtttgggacaaagtttgtctggtgtctaattttcaatctcttcctctgtgttatgagtttattcttctctagttaaatttcagggaaggcaattgtgtttct

SEQ ID NO: 609938 - DNA, 685 bp, Homo sapiens
agggcctcttcacttcctgtacaggccccagaatcctagaaaaagcgcctacttatgtgataacatctagaacaaaaaaaatcccctttccacaagacaaaccacccgtgctcctgaaccagtgatgtgtgtcgcattgtaaaacgccagtaagtttcagagtcccctagtgttgcacagaaacatgggtcaacagtctaccatgcaaatcagctatggtagccgatgcacaatacgttcaaggagagtttaaggatggcccatccacgttccatgcagatatatgcacactttctaagaaggaaacccgctcttctcccaatgtgctcttgttgagctcgtaaaccacaagtttcgagccaacaaaagaccccatgaaagctgtcatggattatatcccagcctttgtagataagtctttcaagcccttttataaggacacgttcttttcccaggacggtaaaaatcctgtttctacaacacaagcccctttaggcattacaacatcacatttaaaagcgtcccaccctaccataagaatcatacaaataaaatgatggtcttgagctcattcaggtgccattcctaatcgttggtgtcaaccccacaccctgtgtaaaagacataaatttcgttaatcatactgcccaaagccctgtgcttcagttagtctgaaatggaaaga

SEQ ID NO: 609939 - DNA, 382 bp, Homo sapiens
gggtgcctcctggcagagtggcactggcgcgcccgtgaggtggcaccagtgcccgggaggaggcccgaggacacagatgccctgcctgcccgtgggatagcaccggcacccggcgaaggcccagcccctctgggaggtggcaccggcgcccggcgaacgcccgacgaccaggatgcccaacccgcccgtgaggtggcaccgacgcccagtgaaggccagacgaccaggatgcccagcccgcccgtgaggtggcacaagcgcccggcaaaggcccgacgaccaggatgcccagcccgctcgtggagtggcacccgcggctggcggaggcccagcccgctcgtgaagtggcaccggcgcccggcggaggcccgcggtcctcacc

SEQ ID NO: 609940 - DNA, 152 bp, Homo sapiens
agtcgtatgcaaacacatgcacactatgcacacatgcacacttacaaatgacacatgcacacacattgcacacacatgcacacacactgctgaacacatgcacaacactgaacacatgcacacacatgcacacaacacataacacatgcaca

SEQ ID NO: 609941 - DNA, 345 bp, Homo sapiens
atccttccctttcttacgtcaaacaaccgtattttgatttggcgattcattctgaattccatgaattacagcacaacattctttttataatacagcaactgagacttcttaccagcagcaaataatctaataatggtggtgggcttctctaaaagaattgtgtggcgcaaattaaacactctaatgtgactttcccggggagggaaaaattctttttagatattacttttagacaccattgcgaaaaaaaaaaatctcttatattttaaaacttaattttctacacaggctctagccccggggatttcttaagaacattttttttaataacagccctatattaaa

SEQ ID NO: 609942 - DNA, 153 bp, Homo sapiens
ggggggggggggcccccccccccccccttttttttccttttggggggcccccacccccttttgaaaaaacccccccccccccggggggggttttttttttttgggggaaaaaaccccctttttttaaaaaaaaagggggtttgggccccccca

SEQ ID NO: 609943 - DNA, 459 bp, Homo sapiens
  misc_feature (44)..(44): n is a, c, g, or t
  misc_feature (98)..(98): n is a, c, g, or t
  misc_feature (414)..(414): n is a, c, g, or t
atcaacagccatctgctccagagatcactaatgcccagtaactntgggtgaattgattatatataatgaacaaaaagaatgtgccaaagtgggccctnagtctcttcaaaaaaaaaaaaaaaaacccaaaaaacaaactagcttccacacttaaaaccaaagggcaaagaaaaaaacaagatataaacagcagtttgctcccactttcacttgattaaagttcgaaatactgggacccacttgctatgtgtgtgtgcatatgtatgtgtgcttgttgtatgacattatttcattgcacatatgaattcctaaacctagtttcacatttatatgttggggtcactttgaatattgtctactttgtgataaagcaaatgatattttattttgtgaatatgcattaaatatgtgttnatttgtgttaaagattattaccaaatatgtctatactctcaagga

SEQ ID NO: 609944 - DNA, 412 bp, Homo sapiens
agaacttgcgtgagccatgataagaatgacaacagctcttctgatcatcagcaacgcctgctggaccatcaactgcttaacatgatgctcatacgtcattcatgacaacgacaggatagcgtaaggactcatgaccacagaccatgccatgactaggccacatcagagtgcagatggcccctggaagaagctagcgcttgatgtccagcagggctatgcggagcatcatacctgactctactggtgctgtcgaggaagctgacctgggcattccagatctagccgtgaagctcactggcatgagcttacgagttccagtgtcaacgagtctgtgaaggacctgtcctgacgcttagaccaatcctgctaatatgatgacatcgataaggttgtggtgagcgcggttggctgc

SEQ ID NO: 609945 - DNA, 651 bp, Homo sapiens
gctaaagaaactacatggaatcatttttggatcatgaaaaatgtgtttggatcttttataagaaaaagccattgaacttattgatgttaaaaatgcaactatacttggcaaaataaaatcaagctgtgaactgatgcttactgatattctgttagataagaggtgttagaaacatatttgatttttccatgagtcctgcacacaagtacacgcacagccccttattacagcactatatattcaaaagagtatgcaattgaaaacaatgggggtttttttcttgttggtccttaggagaatatcagagagcctaaactatgaacattggtgttactggcctgatttctaccaccggctggatctttggcctgttttcattggaaggatcatagattggcatttggacagaccattcctagcgaaatactggccctttcgcggagcttggaaaaccctgggggaaaaacagaaagctgggaagataagaaggaagaagaagatgtcacgggggcaaaatatgggcggattccggatttgtccaaaggtgctttacattcagtagaatggaaaaaccaaaacaaatgcatgcatagggccacgccctggcaatgaaaagaagccaagaacctggacaatttgggggatgaaaac

SEQ ID NO: 609946 - DNA, 148 bp, Homo sapiens
cagagtgagacttcatctcaaaaaataaaagaataaaaaaatacgtggttattatctctccatcaatcctcacaacaaccctaacataaccattcttaattaaactatttatattatcctaactactaccgcattcctactactctgg

SEQ ID NO: 609947 - DNA, 1037 bp, Homo sapiens
  misc_feature (881)..(881): n is a, c, g, or t
gttgggcggtgctgtttcttccgctcgtcgatcgtgcggctcttcctctgcgcatgtcggctgcggcgcggcggtcggagacttggcctaatatcttcggcgttgctctgagaaggaagaattggcccgataccaatgcctagagctgctcgctaagatccactcggtgtgcggaaagtccccgccgacatacgagcgtgggccacgtaatagtgccgctcagtgaatacagccgctccctcttatccggtcggggctgacaggaacgtcctcgatcgcgtacagtggcccggtgacctgttgggcgccttcgcagagacttcgctcggtgtattcatgaacgttcgaacgcgaggctgtctcactccgggagacgcctgtcgccattccagtagggttgggtgtagggcagcgatcgcgtcagcgagtgttctaaatagcctgactcgtggagtgctttcgatgaggcgccaggccgaatcgggtgccgcatgccaggcagcgctcagctggaacgcgtaccctgccgtgggttcctggttccgcaaggataccatacccttggtgtgcccagtcccaacgccgttacagagcatgtcaacgctagtcaagtagtccccatagaagcatcgagttccacggttagtgccctctgacccgggcattgaccgggcggaatgcagcaagcacgctttcaaggttgcacatgagcctatgctattggtacacttgggcggatttagtaaagcttaggataagcacttctccgtggtttatacaatacttaagccttttccgaggtttgtaacacgtatgcagattggagccttttatttgttcacggtttaaattggcacaccacatttgtgcttgtgctatcntacacggtaacgttcggtttgcgaacaagtttctaggttatgcttttaaaaccggtttcacgttgtccccagttcccgttttttcaaggcgttcaaccgggacgttggaacagcgttgcctgatagaccacggttgaatacctggtgtctccagcc

SEQ ID NO: 609948 - DNA, 212 bp, Homo sapiens
cgcacccaccgcccctgcccaagagcattggggcatggcgtacgagaccaaacatcctgctattggctgggtgaaatgagacatggagcgccgatccggcttgacatggatcaagccacggtcgctatccagcaggagtcagtgcaatagtggcccctcatcacccagaatggactgcaaaactgaacgtcgacgcggccgcgaatttagta

SEQ ID NO: 609949 - DNA, 402 bp, Homo sapiens
cactcgtggtcagggagtgctgttcaatactgggtcaatggaggtctcagattgtgaaaaaaaatccaggtttggaagacactcaataaactgtcacttaaagagaaaatatcagagtgggcgcggtggcttatgcttgtaattctagcacttttggaggctgaggcaggtggatccctgaaggtcaggagtttgagagcaacctggccaacatggtgaaaccctgtctctttaaatacaaaattagttgggcatagtggcatgcacctgtaatcctagctactcaggtggctgaggcaggagaattgcttgaacctgggaggcagaggctgcagtgagccgagatcatgccactgcactccagcctggacaacagagtgagactctatctcaaaaaaaaaa

SEQ ID NO: 609950 - DNA, 1051 bp, Homo sapiens
tcctgtggatggcttcatccctggcttccttcctttctctttccttttttattttgtgattttttgtcaaaaagaagcccttaccgggttttattatttttgttctgtcatagaattgtattatttaagacagtggagtaaggaaaagggtgccagggatgggtttacatagttattttgagtgcattgtaaaacattttctattaattattgctgggttgatcactactgtttaagatgttaacataaatataattccttgggggggagctagagaagggttgtgaatatttcaaggtctccttatgtatgatagcaacgagtatattgtaggtgccatattttggcgggcgaaaatggaatgcgcggtgggtttattctgatagatgcactaatcgatgttcgcctgaagtaacagtgaggccaccaacccagaatgcgctctgtgggaacacctggctggtgggatcgtcctcctcgtgtccacaccctataggagggagagtgtacagcgcaaggcggggtccgtactgacataccacgcaatgagtagtccgctgcagaaatgaaggggaggcatcaagtggtttcgttaacaaaccagggtgaagatagagaccttttgtcacgctcccaacaaggagtactaggggctgcgccgcatcgtggggtaagacgccctcttccaacctgctggcacaacgaagacgcggaagagaccgctattgctgcggaaacaccgcgtaatagatcaggagacgggtcggccacatgtctgcccggcgcgggattgtcgtagaacacggtccgaaagcaccgtgggggaaacaaactcagaaaaaacatgtcccttgacacacagaaactagcagccaaatatcgggacccaagcacgaacgtacaaagggcgtcgggcggcacaaaaggactagcgccaagctgaggcgcaaccccacataagacgcgaaaagcatagcatacacccgcgggcacacggtgctcccaccggaaagtgacggaacaacccgaagagcaagcgaacccagggaaa

SEQ ID NO: 609951 - DNA, 473 bp, Homo sapiens
  misc_feature (17)..(17): n is a, c, g, or t
  misc_feature (60)..(60): n is a, c, g, or t
  misc_feature (92)..(92): n is a, c, g, or t
  misc_feature (125)..(125): n is a, c, g, or t
  misc_feature (135)..(135): n is a, c, g, or t
  misc_feature (143)..(143): n is a, c, g, or t
  misc_feature (162)..(162): n is a, c, g, or t
  misc_feature (178)..(178): n is a, c, g, or t
  misc_feature (222)..(222): n is a, c, g, or t
  misc_feature (232)..(232): n is a, c, g, or t
  misc_feature (287)..(287): n is a, c, g, or t
  misc_feature (365)..(365): n is a, c, g, or t
  misc_feature (418)..(418): n is a, c, g, or t
aaatcgacgaaaccctnggcccctgcccaaaaaggaaaaaacctgcccgccggaaccctnaactgaacttccccaaatggaaactgcccttncttgggctgggaaaaaacccctttccctctgtncccttctttnctctgtanccttcccttcccagcccanactcccagggcggaanttggatgaggccccgtccggagggagccatctcttgctcccgangctgggaaantcctttcctgtggggctcctagggcccctctgcctgctgtgcctgggtggggaancggctgccctgagccccaggtcttgtgggaggctgcgaggacgagagccctggctggagcccccgttgctgttcccanagggcctcggtttttcctaaacttgctctgcatgctgtacaaggctgccccgncgtcatagacttaaaggactgcaataaatgtagagttgatgtctaacaaaaaaaa

SEQ ID NO: 609952 - DNA, 177 bp, Homo sapiens
gggcagatcgtgctcagcttgacttgtgaggtgttggcagcgcgactctcgtcgtcagcagccgtcttgtccgtcggcagcttcagatcttcctagccggtgttggggagcttggacttcaccatcttcttcttagcgttggcgcccgtgatcttgccgttgacaggggacagcgtg

SEQ ID NO: 609953 - DNA, 81 bp, Homo sapiens
aagtggttgctaactacctagaaggatatactaataaaactatttttagactatcttctgtcgacgcggccgcgaatttag

SEQ ID NO: 609954 - DNA, 158 bp, Homo sapiens
cccagaacgctgcctgctgagattgaaccactgcactccagcctgagtgacagcgtttgactctgtctcaaaaacattaacaaaagcggaacccacttttgctcttaaaagtatccactgcaggccgtgcacggtggctcatgcctgtaatcccagca

SEQ ID NO: 609955 - DNA, 540 bp, Homo sapiens
  misc_feature (527)..(527): n is a, c, g, or t
ttgacgcgtctcctttggtttgaatactagaccattctcttcaagacaacgcaggattgttgggtgtggtggctcacgcctgtaatcccagcactttgggaggccgaggcgggcggatcacaaggtcaggagattgagaccatcctggctaacacggtgaaaccccgtctctactaaaaatacaaaaagttagctgggtgtggtggcaggcgcctgtagtcccagctacttgggaggctgaggcaggagaatggcgtgaacccgggaggtcaaggctgcagtaagcagtgatggtgccactgccctcagcctgggcaacagaacaacatgcaatcttaaaaaaaaaaaatcctggccaggcacagtggcttatgactgtaatcccagcactttaggagacggaggcgggcagatcacgaggtcaggagattgagaccatccgggctaacacggtgaaaccccgtctctactaaaaatacaaaaaattagctgggtgtggtggcaggcgcctgtagtcccagctactngggagggtgaggc

SEQ ID NO: 609956 - DNA, 228 bp, Homo sapiens
actaaggaccgtcttgctggggcttgggggccaggagaagtgagagcgatgtgaatcggcgagagtagtctcgaaattctgactcgtcctgaggtagatcttcatctctctgcaatctctcgagcccatctgatagcaggtctgcgtcagggttgcctgcctgaggccaggaacagtgcgcgcgtacccctccttctgctcctgccagtccagcacaagaaccccacg

SEQ ID NO: 609957 - DNA, 1362 bp, Homo sapiens
  misc_feature (17)..(18): n is a, c, g, or t
  misc_feature (522)..(522): n is a, c, g, or t
ggcgccctccggagccnngcgctgcgggaggcccgggagcggcagtggaaccgactcccagaactccggacgtgtgcggcgcagtgagtcgcagccatgttcctggttaactcgttcttgaagggcggcggcggcggcggcgggggaggcgggggcctgggtgggggcctgggaaatgtgcttggaggcctgatcagcggggcctgggggcggcggcggctggcggctggcggcggcggcggtggtggaggcggctggtggcggtggaacggccatgcgcatcctaggcggagtcatcagcgccatcagcgaggcggctgcgcagtacaacgcctggagcccccgcccccacgcacacattactccaacattgaggccaacgagagtgaggaggtccggcaagttccggagactcttttgcccagctggctggagatgacatggaggtcagcgccacagaactcatgaacattctcaataagggttgtgacacgacaaccctgatctgaagactgatggttntgggcattgacacatgtcgcagcatggtggccgtgatggatagcgacaccacaggcaagctgggctttgaggaattcaagtacttgtggaaacaagcatcaaaaggtggcaggccatatacaaacagttcgacactgaccgatcagggaccatttgcagtagtgaactcccaggtgcctttgaggcagcagggttccacctgaatgagcattctctataacaatgatcatccgatgctactcaggatgaaaagtgggaacatggattttgacaaacttcatcagcttgttggtccaggcttggacgccatgtcccggtgcctttcaaatctcttgaaaaggatggcactggacaaatccaggtgaacatccaggagtggctgcagctgactatgtattcctgaactggggccccagacccgcccctcaccgccttgctataggagtcacctggagcctcggtctctcccagggccgatcctgtctgcagtcacatctttgtggggcctgctgacccacaagcttttgttctctcagtacttgttacccagcttctcaacatccagggccccaattgtgccctgccgtggaagttcccccctgggctctagggacactctaacaaggctctgtccacgggtctcccccattcccaccaggccctggaaaaaccaaactccgtaactctcccctgtacctgttgccagcctaggcaattgtgatgcttcatgcccgaggggccttttctcaatcgggagataaccaggcctgaagccgggaaccttaaggtggtccaggggccagtccagaggggcgcacaccggccaaagctgttaattgc

SEQ ID NO: 609958 - DNA, 1427 bp, Homo sapiens
  misc_feature (17)..(18): n is a, c, g, or t
  misc_feature (587)..(587): n is a, c, g, or t
ggcgccctccggagccnngcgctgcgggaggcccgggagcggcagtggaaccgactcccagaactccggacgtgtgcggcgcagtgagtcgcagccatgttcctggttaactcgttcttgaagggcggcggcggcggcggcgggggaggcgggggcctgggtgggggcctgggaaatgtgcttggaggcctgatcagcggggcctgggggcggcggcggctggcggctggcggcggcggcggtggtggaggcggctggtggcggtggaacggccatgcgcatcctaggcggagtcatcagcgccatcagcgagggactggacgtgcgcgaggtacagactccgtgatgccgccgtgctgcacacgtcaaacaattacgtccgagagcagttggggcctagacggagacgtgagggaaggtcgcggcgaggttccgggatgatcgtcgttttgtcccaatgcgtgggcatgtgacgatgacgatggcatggtccagacgccgagcaggaacgtcagttgagaccattctcgtcagaatacagcgttgatgcatcacagacgagaccctgatctgaagactgatggttntgggcattgacacatgtcgcagcatggtggccgtgatggatagcgacaccacaggcaagctgggctttgaggaattcaagtacttgtggaaacaagcatcaaaaggtggcaggccatatacaaacagttcgacactgaccgatcagggaccatttgcagtagtgaactcccaggtgcctttgaggcagcagggttccacctgaatgagcattctctataacaatgatcatccgatgctactcaggatgaaaagtgggaacatggattttgacaaacttcatcagcttgttggtccaggcttggacgccatgtcccggtgcctttcaaatctcttgaaaaggatggcactggacaaatccaggtgaacatccaggagtggctgcagctgactatgtattcctgaactggggccccagacccgcccctcaccgccttgctataggagtcacctggagcctcggtctctcccagggccgatcctgtctgcagtcacatctttgtggggcctgctgacccacaagcttttgttctctcagtacttgttacccagcttctcaacatccagggccccaattgtgccctgccgtggaagttcccccctgggctctagggacactctaacaaggctctgtccacgggtctcccccattcccaccaggccctggaaaaaccaaactccgtaactctcccctgtacctgttgccagcctaggcaattgtgatgcttcatgcccgaggggccttttctcaatcgggagataaccaggcctgaagccgggaaccttaaggtggtccaggggccagtccagaggggcgcacaccggccaaagctgttaattgc

SEQ ID NO: 609959 - DNA, 92 bp, Homo sapiens
ggtgaccaaccaaccattgaacctaaattatatgtgtaacaatttcttaaagtgtaacgttagtttgaaacacccccttctgtcgtcttctc

SEQ ID NO: 609960 - DNA, 1468 bp, Homo sapiens
  misc_feature (17)..(18): n is a, c, g, or t
ggcgccctccggagccnngcgctgcgggaggcccgggagcggcagtggaaccgactcccagaactccggacgtgtgcggcgcagtgagtcgcagccatgttcctggttaactcgttcttgaagggcggcggcggcggcggcgggggaggcgggggcctgggtgggggcctgggaaatgtgcttggaggcctgatcagcggggcctgggggcggcggcggctggcggctggcggcggcggcggtggtggaggcggctggtggcggtggaacggccatgcgcatcctaggcggagtcatcagcgccatcagcgaggctggcttgctgcatggtacaacgccggtgaggccgccctgcacccacaacagcaacacaagttaacaccagacagttagatgtgccagactgagggaagttgatgtgatgtgtcctgtgcaggttcctggatgacatctttggcccaagctagagctggaggatagacattggaggtgtcaggctgccacaaggaagctcattgagacacttctcagagtagagtgatttgtagagcaactgaacactcctagatctagaagaagcttagatatgtgttatttgagcagtttgagcacgatttgtcagcaaggcattggttggcccgtgagtggagtaggcagacacacacagtgcacaggcttggtgctatctgagggacatacaaagggtaactatgtgggaaacaagcatcaaaaggtggcaggccatatacaaacagttcgacactgaccgatcagggaccatttgcagtagtgaactcccaggtgcctttgaggcagcagggttccacctgaatgagcattctctataacaatgatcatccgatgctactcaggatgaaaagtgggaacatggattttgacaaacttcatcagcttgttggtccaggcttggacgccatgtcccggtgcctttcaaatctcttgaaaaggatggcactggacaaatccaggtgaacatccaggagtggctgcagctgactatgtattcctgaactggggccccagacccgcccctcaccgccttgctataggagtcacctggagcctcggtctctcccagggccgatcctgtctgcagtcacatctttgtggggcctgctgacccacaagcttttgttctctcagtacttgttacccagcttctcaacatccagggccccaattgtgccctgccgtggaagttcccccctgggctctagggacactctaacaaggctctgtccacgggtctcccccattcccaccaggccctggaaaaaccaaactccgtaactctcccctgtacctgttgccagcctaggcaattgtgatgcttcatgcccgaggggccttttctcaatcgggagataaccaggcctgaagccgggaaccttaaggtggtccaggggccagtccagaggggcgcacaccggccaaagctgttaattgc

SEQ ID NO: 609961 - DNA, 180 bp, Homo sapiens
cgacggctatgggatctgcccaggactacacccgagttcggcagctagtccttgcaggacaggatctgggttctcaccatgtggaatctcttctctgttagcttcttaccagctcaagaacgcccctctcgaaagtacgactcttgcgaaatgaacctagcttgggcagtaaagcatgaa

SEQ ID NO: 609962 - DNA, 779 bp, Homo sapiens
cacggagttcttggggagctctgtgaaggccccatgggacagagacattgatgtcataggggagcacatgctgctgagctgtgagggtgagcaggtgaatagcacccgggccagcctgcgggacagccccagcatggggcagtcccaacgtggccctgaggacaggggaccactgaggagatggagaggaagggcccctgtcgggagcctcaccccagattggagctgggcctgggaaggtgtcctgagcccctcagcccctcgctgggtggctcaggaactcactgctcatctctggtttctgagcagtttacagagaattgctaatgggtttatgaatcatgggaaacagagaatgcttttttatttttctgctactgacctctcaaaagaaatttccagatgcctcatataagtcaattccatataatcgaggtcaagcaatttcacgactgtgactcagcatttaaatctcctaaaggcagatatttaacccaagagacagagagcttcacttcacaggattcacactatgctgaagattctggggtgtgcagtacatgtgcctgtgtgcgtcctctttgagcaagagtcaacatgtaactggccaatcttgaacaagatgctaacaggtccaccatgctctgtgtccaattaagaaacaaaatgaaagatgtccctggtactccactggctgggaatcaagatgacactccctaggggggcattacatcccttaggtctctccggaaaattccagtcatgctagcttccagaaa

SEQ ID NO: 609963 - DNA, 471 bp, Homo sapiens
taccagctactcaggaggcgcggcaggtatcacgaggtcaggagatcaagaccatcctggctaatgtggtgaaaccccgtctctactaacaatacaaaaattagctggatgtggtggcaggtgcctgtaatcccagctactcaggaggctgagacaagagaatcacttaaacccgggaggcggaggttgccatgagccgagattgcaccattgcactccagcttgggcaatgagcgaaactccatctcaaatttaaaaaaggcctaggtcaaggctgggtgtggtgatgcaagcctgtgaatccagctactcggaaggctgaggcagggggatcactttgaccccaggaggctcgagactgccctgagcttgtgatggcaccacttgcacctcagcctcggtgacagtgaaatccggtctccaaaaaaaagccacgtttagacaacatttcctccttaagcaggctggggt

SEQ ID NO: 609964 - DNA, 352 bp, Homo sapiens
aaggagcggaaggcgacccagaggatcaccgaatacatcagccagcagagacgtagctagcagctgccatctagagaagcataactagaatgaggtaataatactagaagatgaactagaaaagctagtagtactaaagaaacacaagaactagtgtacagaggctaatcccatcctagaacagaaataaaagtagattcagccccacgtacaagcaagcaacaatagctagggaagaggccatttctacaggtcgacaaactgctacgaagaaatacagataaaaaaggcaagcctgaaatagcatgtgaaaacccacatagtacagtagtacctatgaagcagccaactc

SEQ ID NO: 609965 - DNA, 266 bp, Homo sapiens
ctgtagttcagagcgcaatgaataggttttacaagcacttatgttagagaaaattagttcagtgaagaagagcagagagatgccgggtgtggtggcatgcctgtaatcccggcattttgggaggctgaggcgggcagatcacctgaggtcaggagttcgagaccagcctgactaacatgatgaaaccctgtttctactaaaaatacaaaattagctgggcatggtggcacatgcctgtaatcctagcaactcaggatgcttcttga

SEQ ID NO: 609966 - DNA, 593 bp, Homo sapiens
  misc_feature (38)..(38): n is a, c, g, or t
  misc_feature (264)..(264): n is a, c, g, or t
  misc_feature (269)..(269): n is a, c, g, or t
  misc_feature (280)..(280): n is a, c, g, or t
  misc_feature (289)..(289): n is a, c, g, or t
  misc_feature (303)..(303): n is a, c, g, or t
  misc_feature (357)..(357): n is a, c, g, or t
  misc_feature (367)..(367): n is a, c, g, or t
  misc_feature (371)..(371): n is a, c, g, or t
  misc_feature (451)..(451): n is a, c, g, or t
  misc_feature (527)..(527): n is a, c, g, or t
  misc_feature (590)..(590): n is a, c, g, or t
aaaaaaaggggaccgcatgctgtcagggcagcgggggngccccacgcgcccaccctgggactagggagcagagtagaaaccctctctggagggtcccagggctaactggggagccagccctcccttcgaggtagaccatcggcggagggaaccgggaagtagctcccgatggtggcagtggcttcctcagtggtactgctgatagctggggtagcctggggccggggtgccatccttagggggcagctggctggggtcctccanggaantgggggcgcanttcggaacntcgcctgggcctgntgtagcgagtcaggaggattgccaaccgccctcaattgatgggccaacaaggantgccccccantcanttgcctgagcccaccatggccagtgggccactgcgggcagccagcacagccccggtcaatgctccactggtgaaaaaatnccagggatcctccttgccccgaagccgcaccaggccacagtcgatggtggagaacaggcccccccacactgcgaantaccctccaatctggggggctcgaatcctcaagcattggcactacctctcaaccaggtgccgnaat

SEQ ID NO: 609967 - DNA, 105 bp, Homo sapiens
ctgagccccagaggtcaagccatagtcaagcccctgcactccagttgggtgacagagcagccctgtatcaaaaagaaacaacaacaagagcgaaactccgtatta

SEQ ID NO: 609968 - DNA, 81 bp, Homo sapiens
gtcgcggacacgggtatatattactgtgcgagagcgggagtctacggtgcctgggatgcttttgatatctggggccaaggg

SEQ ID NO: 609969 - DNA, 371 bp, Homo sapiens
  misc_feature (294)..(294): n is a, c, g, or t
  misc_feature (328)..(328): n is a, c, g, or t
  misc_feature (357)..(357): n is a, c, g, or t
cgcgtccgaagtaacttacccaaagacacacagtttgtaagtggtaaagctgagttcaagtgcaaaatcatctgactctaaagctttttcctctctgcatttagcctctcccatgtaagtccagcactgaaggtcttcattgcacagccccagatgcctttccagcctgacttttaaatatcccctatacagtcaaagagcattatggagggtctagcaggctcagaggaagtcaagaggaaaaaggcagttcaaatatttttttgtgggggaagcaaaaaaaaaaaagcacanctaaacaaagacatggacatggcataaagtaagngacaaatatctgctgaagtgcataaatgntcagagaaaaggca

SEQ ID NO: 609970 - DNA, 781 bp, Homo sapiens
gagctcatattaaatatgggttattgagctgggctaggtggctcctgtctgtgattgcaacactttgggaggttgagacaggaggattgcttgagtccaggagttcgggagcagcctgggcaacatggcgagaccacatctctacaaaaaataaaattagccagcatgatggtatgcacctgtggtcccggttacttgggaggctgaggtgggaggatcgctttagcccaggaggttgaggctgcagtgggctgtgattgtgccactgcactccagcttggattacagagtgagactctgtctcaaaaaaaaaaaagaaacaaacagaacacactgtgtcgggcccgacatcgaacacgagagaaaagcgtggacaaacccaattcgctgtggaagacggggggcccacaaggtacgagctgacactcggcacaacgccgggtcacacaaggaaaacccgggtacacagacaagcggcctcggacccccccaccgaacaaaaaacacgcccctgggcgacaccgcagcagtgcagaaaacaaaaaccgacaggacaccttccatggcggcacacaacagggggcataacaaccaaccagcgtgcccaaacgagacgcccaccacaacataccgccgccatgggtaaacaacagacaccacagacacaaagagacacaacaaacaccaagaacacagagacagcgaccaacaactaccacaccaaccacaaccacagagacaacaccagaacagcacgcaaaaaaaagaaacgacaaatgaa

SEQ ID NO: 609971 - DNA, 922 bp, Homo sapiens
ggagctcggctcttgagacaggagtcttgctgatgcctctggccaaataaacccctttcttctttatctcggtgtctgaggagtttgtctgcggcttgtcttgctacatttcttggttccctgaccaggaagcgaggtgattaacagacggttgaggcagctccttaggtggctttagcctgccctgtggaacatccctgcgggggactccaaccagccagagcgacgcggatcctgagagcgctcccgggtaggcatttgcccaggtgggacgcctcgccagagccgtgtgtggcaggcccccgtggaggatcaacgcagtggctgaacactgggaaggaactggcacttggagtccagacatctaaaacttggtaagactagtctttggaacttgcccactccatttgtgtggaagcgtggtctgatcacccacggcatgcctttatcggcactttggttttggttttgacttggtttgaattgcttgacggaactggtcttgggaacttgcccgctccatttgagtggaagcgtggcctgatcacccacagcgtgcctttatcagcacttcccctggtggtttggttttgacttggtttgaattgcttcacaggactgggtcttgggaacttgcctactccatttgagtaggaacttgcctactccatttgagtggaagcatggcctgatcacccacgggtgcccagttaccggcactttggctttggtttgacttgacttggattgcttgatacttgggattgcctggaattgcttaggttgggtgtgacctggctagattctcgggtactcctatttgggtcgatccgggtgggggttactggcccagcgtgtgtgtccctctttacctgtcctcggtggggggagcgtttgcggtgacgctttgtttggctcacga

SEQ ID NO: 609972 - DNA, 233 bp, Homo sapiens
  misc_feature (1)..(1): n is a, c, g, or t
ncgagaattctggatcctcccctcccccacacacacacacacacacacacacacacacacacacacacacacacacacacacacacacacacacacacacacacacacacatgctgtccttacactggcttacctccctatacacacacacacacacacacacgcacacactgtcctgtacctccctatacacacacacgctgtccttacactggcttacctgcctatacaca

SEQ ID NO: 609973 - DNA, 321 bp, Homo sapiens
  misc_feature (18)..(18): n is a, c, g, or t
  misc_feature (74)..(74): n is a, c, g, or t
aggaatccgcaggtcttntgactgctagttttaaccctttgaagccttgtgagtcactcgcccacacacacccnccatccagtcctcccaggccatctcttccatacggatggtaacatgccaagactgtcctagaggaaatgatcacgatcacgtggaggaggaaacggacgtgggagaaggcccgccaaaccagcagcctcaccccgcggtttactccgctgcccaccccactttgctccgggggctggcaggcttttggccccacgccaagcccagctcctatctgcaacaagatttatgatcagtaaaaaaaaaaaa

SEQ ID NO: 609974 - DNA, 117 bp, Homo sapiens
cacaccttcgccaggggtggaggcacgcatctgtagtcgcagctactcaggaggttgcaggtgggcggattgcttgagacccaggagttcgaggttgcaagagagcatatgagtgcc

SEQ ID NO: 609975 - DNA, 258 bp, Homo sapiens
gtctatagaggatgcccgacagactgcactgactgtttgccactacagattcatacgaatgacgaggttcagggcctgaccctaacggcccataccacctgtagcgaagcgacacatccatttgcacggacctgcttctgcccctcctcaaacctcaccgctttccctctttgggacagctctgatccccctgcttcctctcctccctccccctggaagaaaaacactgggcagaggaatcccccacctccccgcggg

SEQ ID NO: 609976 - DNA, 376 bp, Homo sapiens
  misc_feature (26)..(26): n is a, c, g, or t
aaacttaaagttgtgggatttcccgngcggggggggcttgtggaggtgggcagactttcctggtgggggggaccggcaagagaaaaggaagagtcctgggggaacaaccaggaagccaacaaaataagccccgtgtgattaaccaactgtttctgtatcgcgccgcaaccattgtcgttgaggggggggggctattcccgcctggggaatggccttgtataagggcgggggacacaccgcggaacaaaccgaggacaaacaaccaacgcgtgagacaaaccggcggggggaggacatggagtcggggttggtatacgccgcgccaggggagacaacacagggcaacaacaacgcgggccacccgggggcacaccgt

SEQ ID NO: 609977 - DNA, 138 bp, Homo sapiens
tctagaggacgctggatgacttctgttgactgctgtggactggaactggaactgtctcgagggcgaggagtcacctcttgatatcatagtagtctgggttgtcgatctggtcctggtgacgccgtcccaaagcacagg

SEQ ID NO: 609978 - DNA, 414 bp, Homo sapiens
ccgtcgacctcaagttatgtatttgtgctctttcagcaaataagagccgctattagtacgactcttcatagcataatgtaagggtttccttcctatcatcccagctcgaatgcaccttatcaaggtgacctgaccggcttctgtttcttctcttccctctagcccacacgcccgttcctgtctgccatcctgcccccagtctaagttgcgcccttctcccaagccccgtcttggccgtgccctttccctggcaccgcccaccagacctgccccggcacagccctcgctcagcgggccagggagctcatggtgtagtttcgtgggatcgtggcaaagcccacgtgtttggggaacacgtcaatgtccttaggtgcctgagaggtcgtgaggcagtagttctgcatcacagttgtg

SEQ ID NO: 609979 - DNA, 289 bp, Homo sapiens
gactatagacctgacaaataggaataatactatcaacttcagcgaacagtcgcaaggaactaaatcccatgtcttttaactctcgtccactacaactctttcccaaaaagactcagttcaaatcttgtaggctgagccactatcattttatcagctattagaaacaggctgaaagtatgtaatagctgataaaacgacagaggttcacccaacaagccaactttgatgatgatatcatggttcatcatcaaagttctgaaaatcgtttccctgcacagtaacagcattc

SEQ ID NO: 609980 - DNA, 279 bp, Homo sapiens
actctgaacactgggctcaaatgatcctcctgcctcagcctcccaagtagctgagactacaggtgcatgccaccatgcctggttaatttttaaagtttttggtagagatgaggtcttgccatgttgttcaggctgatcttgagctcctggcctcaagcaatccccctgtcccggcctcccaaagttctgggatgactgatgtgagccaccatgcctggccatcctccattcttttttcttttgagatggagtctcactctttccccccatgcttcagag

SEQ ID NO: 609981 - DNA, 160 bp, Homo sapiens
gtagtttttaagctagagtcaaagaacagaaaacaatatttgtagaacagaagaaaagatctcaccttcattatacagggtgcaacacaggattgcacagattagccattttgtgataaaaagagagatgaaaattggcagcaaccccatatatattatt

SEQ ID NO: 609982 - DNA, 1057 bp, Homo sapiens
gtaacctattagtatgcggtgctttacgcattccgacgtctgctatcgagttacgtaggtctttgggcgtcgaccggctcgatagtccatcccgtactatgcctagcaaggaatacatacatatcgcgtgttcattataggctagctctcatacaccctcaaacccaatccctcttagccaatattgtgcctattgccatactagtcttggccgcctggactttacgggggcctagccatagtagtctcaatctccaacaatatggcctagactacgtacataacctaaaccctactccaatgctaaaactaatcgtcccaacaattatattactaccactgacatgactttccaaaaaacacataatttgcatcaacacaaccacccacagcctaacttattagcatctatccccctactatttgaaaccaaatcaaaaacaacctatttagctgttccccaatcttttcctccgaccccctctaaaagcggccccgtcctaagtagctaaacgtaacctggacctctacccgctcaacaaagtcgattggcaaagccctacaggccacagtatccagggtgaaacacagttattcacggaggaacaagtcgaactcctctaatacttaaattcttcccttaccaatgtctcgctgagattcaatagccatgcacaacaggcagagacgaaaaataaatcgagtactgacatatgtgccaaggaaagacacattataccccagactggagacacagaaaccgaagaaggaaccagcccacgacacctggaagcagtgcacaataactccaatacagaacaccaaaaacgacctttcacggaaaagagcaaagatacacccaacaaccaagctacgaacatacacaaccacaatgccaaaacatacccgaccccaatacataatgacagacaataaagaaatctagcacacaaacaaagaggtaaagaacacaccaacaaaacgaagaacaaaaaagcagaacaacttatatgaatacgacgacaacgaaacagaagaaaagagaaaactaagaaaa

SEQ ID NO: 609983 - DNA, 696 bp, Homo sapiens
caattttcagaggtccgtctaagcactctttaaattgagccctgactgcaaacatacgttggtcatacccataagctgggacatcgaggattgcatcatggttccacccaaatagtcatgatggtctgcatggcaaaatgaggtgggggtggggcatatgatctgtctgaagcagcatctcattagcgctcctgagattttccagtcgcaaattcacgagtatacccactttctggagcaagatcatggttgttgtcagcatggaccaggtaagtgaccagttagccctgcccttcccttatggcgctccaggctctgtctgtcatagtaaagtcaaagccgtggccgtgccagttttgccatttcactgttcagccttaacctatgcaaattatagctcttggtggagggtgcgtctactcatcccataaaagtcttcactcgctaggatcgtcaacccagcgaaaaaggaggggaagccccttcccttgcggtttttgtgtggactcaggaataatggtgttcattgccaatgcacggtccttttcccattgcaatgtcatcccactggaaattggcctatatgtaaaaaaaaagaaagtatacttttatatttaaaatgtacgcagactctgtccatatggctgattggaatgtactcctgtaatatactaagtctctgtatatgcaataaat

SEQ ID NO: 609984 - DNA, 163 bp, Homo sapiens
caccaagacccagcccactgactcaaatgttaatctcctttggcagcaccttcacagacacacccaggatcaatactttgcattcttcaatccagtcaagctgacactcagtattaaccatcacaggccaggagttctagatcagcctggacaacacagcgag

SEQ ID NO: 609985 - DNA, 439 bp, Homo sapiens
  misc_feature (131)..(131): n is a, c, g, or t
ataaacgtgccttacttacggcaggccaggacgtatagacgaaactgctgcatgaccgccatgtcgctggaggcgactgcccttggcgagatgatcgcgtgataacgcgagctcgatgccacaaatacggncaccatgcgccctgtcaccacctggaatagcaacgtgccaaggtctgcggtacacagcgttatgttgggatcaagacctgtgatcagcggcatcaacaccaacgcggccaaatgctacgaagagcatttgtgcgccagacaggatctggcgcccaaagcgggtcgttgaattcatcctgcatgttcacgcgtccttctgcttggtgccgaagatcttgtcaccggcatcgcccaggcccgggatgatgtagccgtgttcatttttcaggcgctcatcgatggatgcggtgtaaatctgtacctccgga

SEQ ID NO: 609986 - DNA, 239 bp, Homo sapiens
  misc_feature (161)..(161): n is a, c, g, or t
  misc_feature (168)..(168): n is a, c, g, or t
cccagactagcccgacagagcgagaatggcaggcacagcagaggatgacccaccaatcacatgcctatcatatagtaaacccagcccatgaccctacagggccctctcagcctcctaatgactccgcctagccatgtgattcacttcactccatacgtctnatatagnctactaccaacacactaccatatacaatgatgcgcgatgtacacgagaagcacatacaagcaaacacacac

SEQ ID NO: 609987 - DNA, 1084 bp, Homo sapiens
tataaaggttaaaagcagaggttaactaggccaaagaaaatagcaatagctctcgtggttgcagaagaaggggttccgtggagaaaagtgggttaccccagagtggtcttattataaagtgggttcaccacatcagaatttaaatttaaatacttcttcttgtgaagaagccatgtgggaaaatagagaaagccaccttaaactcactctccaagagaaaacacatgtttaaaaaagggagagccagtgtgacaagaggtctcttatacacataaatgtatatgtgaatgtgcaatctataagacagagataacatagcgcatatattatagagaacactctgtgagagatttataaaacgagtgaaacgagaaattattttatctattatgcgtgtgtatttgtataacatgtgtggtgtgtgttatacaaaaaaaagagagacatcgagggtgaggtcagtgaggcgcgcgtgagagtggagctcttctagacgcgcgcgtgtaataaaactactctataagcaacactcctatgtgagcgaaagtggctcaataatggtagcgatgagttgtgtgaaattcaacccgagaagcgtctatagagacacgtgttataagatagatcagcactaaggacctgtaggtgcacaccagacaacgaggtgggggacgagaaaaagagccccgctgataacgattaaaaaaaggagaaataacccacgacgaaagcacaacacgatacacaagaagcagaacaaataaaaacgcccggagaggcgcaagagtagtagagcggtaggagatgaagaggaagagagtcacacatgtggatataaactcatccgcccacgagggaggagcagcccaagaatgacagacaaagcggggcaccaatcagaacgcggagcacaagctgaggacgaaaacaaacatccgtcactcctaatggaggaaaaacaaacgccaccaagaagagaaggtgtggactaagaagagtcaatgagcacaaagtgagacaaaacaccccgaaacaagaatatgatcacagaggagcacccacaattgcatgagagttcccaaca

SEQ ID NO: 609988 - DNA, 352 bp, Homo sapiens
atttccactggtgatatgatggggtgatccatatatattttactttagtgctcataaagtgaagcagtgggggtggaccaggaataaagaaatctgtaactagttagtcatcaattagttgtatacaccattgcactttgaccagctttgtaatatattttgaagcttaaatttatcatccttagagttaaaacttcagggaagtatattaaaatattaattattggatgacaaaaatgttactttccaactgttaaaaaaatatattcacatttgttttaaaggaatgatggttatagtccgtatcacattactaatggtatttagagtcactgtgtagaatttataaacc

SEQ ID NO: 609989 - DNA, 151 bp, Homo sapiens
tatcaggcagctgtctcacatacctgagttggttaaacttgttttagtagactgtagaatcatattatagttaccacgggtaaggaccagtgtcaatccattagggtatccggcctgtcttgggttccagagcctgactactttagggtag

SEQ ID NO: 609990 - DNA, 395 bp, Homo sapiens
  misc_feature (17)..(17): n is a, c, g, or t
catttccaacaggatcntgagggctcagcagtcagccaatactccataggagtctcgatcaggtgcaaccgtgcatcaccagtctcggtagatggtacgcagcgacctgtcactcttctcagtagactcatccacagcccagggtgctgcaaaagcagttcctacgtacctcgtctggacatgatcgtcaaatgtacggcgctccagacactgagcaaaggcgttcatcccctaggcctaaggtatatcgtctagcccatcttatatccgactgggcaacaacactccagcgtgcctctccgctactctctcccctgcaataagcctcgctatagatagcaaatacggaaatagaggatacccactgcattgtgccgaatgcgagtaaggttgac

SEQ ID NO: 609991 - DNA, 127 bp, Homo sapiens
agtcctgcaatgagttgagcactacatttgattacacgttcagcttgcgcacgtggtgagtttgatgtaatattggtttctcgccaggcgcggtggcttacgcctgtaatctgagcactttgggagg

SEQ ID NO: 609992 - DNA, 98 bp, Homo sapiens
acagaccccaagttacgcagaaagagattccctgagtagcagcttcaggctagtccctatccccaacacctcagagcagattcccagattaacagatt

SEQ ID NO: 609993 - DNA, 235 bp, Homo sapiens
agtctgtaacgatacacccatagatgtgaattatgtatattcgagaaggagatcagatggcatccagaagatagtttagatttcagcacattcatggttcagatgcaaaatcagatcatcaaatagatccagcaattcacaatcatcatagccatatcgcgtcacgtccgccgcacaaagatccgcaccaattatctatctcccaccccccccaggcattcagcacccgcaaaag

SEQ ID NO: 609994 - DNA, 374 bp, Homo sapiens
gtactttgggaggccaagtcgggtggatccgaggttcaggagttcaagaccagcctggccaacgtggtgagacccagtctgtactaaaaatacaaaattagccgggcgtggtggtgggtgcctgtaatcccagctactagggaggctgaggcatgagaattgcttgaacccaggaggcagaggttgtggtgagcggagatcacgtcattgcactccagcctgggggacaagagtgaatctgtgtctcaccaaaaaaaaaaagaaaaagaaagatgcttaacaaaggttaccataagccacaaattcataaccacttatccttccagtttcaagtagaatatattcataacctcaataaagttctccctgctccc

SEQ ID NO: 609995 - DNA, 308 bp, Homo sapiens
ggtcactgttctgacacaaggggagagatagttttatctccatggtagcagctgacatcaatcttccacgtgccagctcttaatttttgtttttatttgtttttttaagggataatccaagtcaggcagccccagggtaagcggccccgcttagaaacaccaggtccaatgcgcatcaaagggggtcaatgattccccagtggtgtgtcccgcttgggggccctttcggggccctttgtctaccgggtctcggatggatacgggccaccaaggggcctccacaatctcagagacagggtaaagccgag

SEQ ID NO: 609996 - DNA, 223 bp, Homo sapiens
  misc_feature (29)..(30): n is a, c, g, or t
  misc_feature (138)..(138): n is a, c, g, or t
aaatctgcatgaaggaatcccggctggcnngccaagatttactcatcgccaagatttactcatcggccaagatttactcatcggccaagatttactcatcggccaagatttactcatcggccaagatttactcatcgnccaagatttactcatcggccaagatttactcatcgccaagatttactcatcgccaagatttactcatcgccaagattcacttctc

SEQ ID NO: 609997 - DNA, 684 bp, Homo sapiens
  misc_feature (412)..(412): n is a, c, g, or t
  misc_feature (496)..(496): n is a, c, g, or t
tgtccaaacagacgggcggtattcgccctccagaaatgggttgtgcaaacgccgccccggtaccccacctgggtggtgtacgcaccccaaatttggggtggccgcgctcccctcctgtgtgggcgccccccaccattttcgggtgggcccacactcgggatgcgttccccccctttatttatttctgggggtcgataataatactcgtctcttatcgttatgacatgcgtctgtgtggactacaaatagtcgctcctctacgcaccaggctagttcttcttgctgacgggccttctcgcgcgcgacgtcgtgcgcccactccctcgtgctgttgcgcgcacgcgaggcttgagaggtgtggtacaaccacccctgcgtgagcgagcgcccccgggcaggcaataaatttagngttcgccctctctccgcccctcctctgtctcctccatgggtgtctcttctgtgtctaccgcccgtcttctcccgactatgctcncgcttgtatttgtacacccgaggacccctctcacctactgggctgttgagctgggaaaaattctggcgccatggtgtttatagagatttttatcttctgcgagcaacgcgatgatgatggggtacggtttcttatggaagaataacaaacccctgctgtggtaacagccacaacaataagacaaagaa

SEQ ID NO: 609998 - DNA, 246 bp, Homo sapiens
cggcgtgtgcctacaggagagggagagggctttctgacatatggcctacccagaggtcatctttttctaattggtcggatgagaaacaaacatggctttttctaatatggtcctcccggaggaaaggctgttttctaatatggtccttttcctctagagcccatgctcagaatcggatctttcttgggccgtgcaggaagggcacccatgtgccaagcagaggccctaggggtctagaggcagggg

SEQ ID NO: 609999 - DNA, 351 bp, Homo sapiens
  misc_feature (10)..(10): n is a, c, g, or t
  misc_feature (325)..(325): n is a, c, g, or t
ctcgtgcgcnttagaagttgacccaaggatttggtgggagaactggataaattagttttaatctaaaagccttgacactaacaggatgtgggggaaaacataaacttctaggacttaggagacctgtgcagccatcttggttgcctcactagctcttcctctgttggaggataggtgaaattattgccataaccacctcagaaggccatttgaaaatcttggccaggcgtggtggctgacgcctttaatcctactagcactttgagaggtctaggcaggcggatcatttgcagtcaggagtttgagaccagtctggccaacatgnttgaaaccccgtctcttactaaaaat

SEQ ID NO: 610000 - DNA, 232 bp, Homo sapiens
cgatcccccatatgtagcatgggataccttatgtcagcctgcaggaagcatcatcatatctatccggagggacagaccagcacgacatcacgccaggagcaaccacacatggtaatctagaattcagtgtgccgacaatacataagaagataacctaccttcagaaagccaagcacattgaaataatgtggtcataactctactcttcagtcactaccaatcaacatagatg

SEQ ID NO: 610001 - DNA, 285 bp, Homo sapiens
gagacggtatctctcacccagtctggagtgcaacagcgtggtctccgctcactgcaacctccacctcccagattcaaatgattcttgtgcctcagcctcctgagtagctgggactacgggcatgtgacactatgcctggctaatttttttgttatttttaagtagagacgggatttcgccatgttggccaaggcaggtggatcacttgaggccagaatttgagaccagcctggccaacatggcgaaaccctgtatcactcttttaggcccttctgtcgtcttctc

SEQ ID NO: 610002 - DNA, 783 bp, Homo sapiens
tgcgcatgccagctatgcccagtaattttgtattttagtagagaaggggtttcaccatgttggccaggctggtcttgatctcctgacctcgtgatccaccggtcctcatgccttccaaagtgttgggacttacaggcatgagccactgcgcccggctgtcttcttcatcttttgaacagggtctttcagagcataaattttacattttgataaattacaaagtcatacaccagtttcatttaatgaattatgcttttgatgtcaagtttcaagaatctttgcctagcccctaggctctgatgcttctaagaggtctcaagttcaggtattattttatgcccatgacccatttgtgagttgtcgtgtagtgtgaggtttacggatgtcggtgctctattgccattgtctgaaaaagctatccttcctccactcagtggcttctgcacctttgtcaagaattaggcgttgttggatctattgctaggttctccagtctgtccattcaactatatgtctgtccttctatatatccaatctcttgatcactgtaggttatagtataccttgacatcgggtacagtgattcctctcactttaattctttttcacaactttagttattaagtcccttttgcctttccatgcaccttttagaataaattttttatctaccaaaattttgtgctgagattttgatagggcatttgggtccaaactaaacctaggaagatcgatttctttaccactgttgtatcttctaatccacaacatgatatgtctctc

SEQ ID NO: 610003 - DNA, 274 bp, Homo sapiens
gatggtgatagtcataacgggactcagagtggggtacccccatgcaatatagggctctagaatcctcagcatgttaatcgaagccgtagtgagctgtcacgaaggttccactgaagattcgacgaaggcgaagaagctgcaacacctttcgaaccttagggctcactccattgatacctctgattctgatgacaaacgccaattggggattctgcaggatacatagaacgtggccagcattttctggaccagtcctcggccagttcgaagtttc

SEQ ID NO: 610004 - DNA, 798 bp, Homo sapiens
  misc_feature (1)..(1): n is a, c, g, or t
  misc_feature (773)..(773): n is a, c, g, or t
ntgctcacatgcatgtctacccccgttacgtaccataatggaggacgccgctcctgtcaattctccgtttggccgtcaatatcaaaaaggacttgttcatatacacccccaataaggtgatactcctcttgtccgaagtatgtgcttaagccatcctcctcacgcccctctgtgtattcaccccgcatgctgttacgcaattaccccctcgagctctttctccctcggcgccatactttctgtccaatttcttcctccccccgtagctaataaccccccttcagacaattgtgccccctacccgaactccctaagttcgctcccctataaagacgtcatcatactacataatcccctctcataaaggtccttcatacgtcatatctccacctaatagcttcattaagtcgatgatttttcccaacgcctactgtgaagacgtcgccgtcagtcaccccccccttattgacaccccaccggggggtacacttttcttctggagttagtacccaccgttgttcgcctgagacgcaaacattactttgtcgcctctcccactaaggtctacactcaaatgtgttccccgcccttaatacccggttacaatcaatcgcccccaaccactaaacgggggtccaaccactcaacccccccgtctgccaacaagataccccctatgtattcacgtgggaccccccgcccatggtataaaccaccggaagcccccctatgttgcggacctaagtactcctctcgaccctcgacaatctatnttcccgggttttccccgccccacaa

SEQ ID NO: 610005 - DNA, 103 bp, Homo sapiens
tgttcattttgaagacagaggagcagctgttaaggctatggatgaaatgaatggcaaagaaatagaaggggaagaaattgaaatagtcttagccaagccacca

SEQ ID NO: 610006 - DNA, 197 bp, Homo sapiens
cctcacgaagcaagtgtctttcattagttatggatgatgaaactagaaagctgaagcaaaaaaaagaatcacttttctccccaaaaaaattggactaaacttttgaagaactggagcgacaaagacaagaaaaccgaaagaaagcagctggagaggaaagcagaaaacgtttagaaaaagagaagggtgcttttgaa

SEQ ID NO: 610007 - DNA, 397 bp, Homo sapiens
acgaccagctagtcatgactacagtgtctattcatgatttcccacggtccacgttcaggtggacgcttggatctcaagcacagacaattcacacgtctaaggtcaagtaatacaaaaccctagaatttctagagttgcaagagttttaatgagctagtgcaggggaatggaagcagaaagcatggatgttgagagcccagaatacagaagctcttatcttctttaagttattaacttattgcttctcagctccaaatctacccttctttgcctgctcagtgatgagagatgggctctgcaaatacttctcctttgccagttatcaagaaggtaaggcttctcagtgaagggcactgcagggtttggttgtgcctctgtcaccagcctgttgcagtgt

SEQ ID NO: 610008 - DNA, 447 bp, Homo sapiens
caggaggcttcggctcccaggatcaagcgatcctcctgcatcagcccccctagtagctgggattacaggcacacctcaccatgcccagctaattttggtatttttagtagagacagggtttcgccatcttggccaggctggtctcaaactactgacctcaggggatccacctgccttggcctcccaaagtgctgggattacaggcatgagccaccatgcccggctgctgttacatttttaaatgtgaggctccaggtgtaccccctgtagctaggcaggcatacacacaagcccctggggtcagcagggaatgaaagatgggtgcccagggagaagggacatcactgttacagcaacagaaaccaccccagatatttcaaccacagggcatttaacacagggaatgggttacaaaggtgatagaagggctgggaacagtgggaaggt

SEQ ID NO: 610009 - DNA, 272 bp, Homo sapiens
acccggtgttatcgatgccgtattcttctgcacgctatgagcagctcatggaggcctgggagaagaagtgtggagctgcatcgagaacaacccccgtgtggtgggccaatggagagcaaggtgctgcgagtactacgagcaagcagttccctagagatcctgcaagcagcgcgagatgcaggatgcggcatgcagagcatggtgggccagcggggcagagggcttgatcatgtcggccgcccgcagggacgcacgaagggtgtcagagatca

SEQ ID NO: 610010 - DNA, 108 bp, Homo sapiens
attacgaggtattacagcaatccaggaagtgatgatagcgccttgaccacagtgggtatcagtggggaatggggaaaagtagttgaattctgggcacacattatggag

SEQ ID NO: 610011 - DNA, 647 bp, Homo sapiens
tccccgcccccaaaattgccctttgggcttggaggccccgttctttaaaagggactctggtccaaatgggaaaacccccaacccttttcggtgaattcttttatttaaagaggattttcgaatttggcccattggtttaaaaattagttttttacacaaatttttacgggaattttaccaaaatttttaggccttcaatttgccattcgccattccaggtgcgcaacttttgggaaagccgatcggttcgggcctttttcctttttccccacctggcaaaaaggggattttcttccaggggaattaattggggtaccccaggggttttcccattcccacgttgttaaaccacggcccatggatttttaatcgccccccctaagggggattgtggggccgggccccccccccagggtgccgggatcattaaactttaaatcggattcggccccaggggtcttttttttttgtcccaagtgttgaatttcattcttttggtgattagtttttttttgtttttcacagctcaacctttctttaatgtcatccagggagggggccaggtatggaggggaggggttgaggagcgagagacagttatttttgggtgggattcacctcgtgccgaattcggcacgaggcacgag

SEQ ID NO: 610012 - DNA, 880 bp, Homo sapiens
ggcggcgggatcccggatgtggatcaagtggtgggaagcgtgcggtgccgagaaatggcggcgctcacaattgccacggtactgcaattgtttcggtttgggctcgggtgactcttctcaaatgccttctcatccccaatagtaggggattcgcaagggcagccattcaacagatttgtgaagtacacgagaaatggttgtgtatcaactcacaggtgtgccaatatcacagtgttatatgaggcaattcagagtgacgtgtggattacccccctttctttgcatgttggggtatatccgtgtcacattgtgggccaaatattgtgatcaagaaattgctgaatgtcaataattggaataactcacaggtcaatggacccttacttttccagagattttcccgtcatcttaagtggatgtactcttttgtgtatgctgtccgtgagtgctgtaaattgcatttgttggaaaaaaacgggggtaaagaactaacagaaaagcaaaatttattcttggcgggaattacttctgtgggaatttcggttataagtgtggtggaccaatattcattttcacgaacaatgcgtttaattgggtaagtggcacctccagttgcgcggtaatttcggaaaggcctatggacggggcactcctttggtggtccatacttcaggatttacttttgttacaggtatggtgttattggtgggcacactgttcgcaataccgcggtcatcggcgagaggtcgcgtggcggtccgcggggggagagcgcatggcccgcgaacaacagcaagtcccctaggcgtgaagtggcccgggagtgcagcggtcgtgtagtttcccgtgctatcatcgtttgtctttttttttctttgta

SEQ ID NO: 610013 - DNA, 963 bp, Homo sapiens
agcgggggacgggcgcggcgcggggcgcggcgcttctcggcggctgcgtgccggcgcggggctgagtgctgtggtcgggagtggcggggtggcgagatgggctgtgcagactgcggcacgtgggtagtctggctgcgggcgtcctcgcgtgctggcttgatcagctgttgcgggtgcgcgtggtgctgggtcggctgcggacccgtcgcgaccgcggaaggtctagggaccggtagtctgggaacccctcaagttgcctccgaccaagtctgcggccgaacgccctcgcacggcatcgaggtagaaattgacaagagagatagcattctagtctcggctcgatgtagaaaggtatcatgaagtccgatgattgacgcattagcggagagaagatcggtcgaataggtcgggattggaaattgttggaacccataatcatcaacgtacaacggttcatatttggagaaggcaatgggtgactcgaggtctcttattgggagttcaaggatggaaggcttgtgcattctgttactagctatccatgagtgcaggtgtcacatgctctcgagcataggagcacataaaggatttggaatgccaggtgaagggaacctgaagtggtcaggactgtatttttctgaagacagcagatgcagggttacagctgtgtggcctgaaatcatccagaggaggggaggctgtggacatggcaaaaacgtgaatcggggccccgctattgagagcgaagaactacaggagctggagcgagtggggtataagggaggccggcagcctgttactatggggggttgtggtaccagtgctactggaaggatgttctgagtgaggaaccatgaaaggatcctaatgtgtactgaatgattaatgggggaagcattggtaatggctggttaagaatgattcaggggggtccctgatttaaagggttgattagaggagaat

SEQ ID NO: 610014 - DNA, 1208 bp, Homo sapiens
ctggcatcactataactacataacagaccgcaaccatcaacaccaccttcattcagaccccgaccggaaggaggagaccccaattctataccaacacctattctgattttatcggatcacccatgaagatttatattctatatcctaccaggcattcggaatacatctcccatatagtacacattactacatccggaacaaaaagaaccatattggatacataggatatggtctgagctctgatatcaatcgggcttcctagggttcatcgagatgagacacaccatataatacacagaaaggcatagacgatagcacaacacgagcatatgtcacctccgcataccataatcatcgactatccccaccggacgtcaacagtataaaagacagacatcgccacaactccacacgagacagcaactcatgacacatgcatcctgccatgcaagaggctcatgaagcccctaaggactcacacattctcaacccccgctacaggctagacctgcaccgggccactcagaaaaacgccacaacactcaatcactagaacaatccgtaactaaaacgaacacggtaacaaacgctagatacacaccccaacatccaactactcgctcctaaccaatcacgagacatgtcataatgcaccaacactaagagagagatacactcaacatgaacgcacaccaactcccaagagaacacaacactaaaacacaaaaacaaaacgcaaagaaaggacaaataaacacgaaaccatatgtcaactcgccggtaacaccgaaagaactgataaccaacaccagcttcgtcgcgactatccaggaaagccccagaacgataaaccagaccaccccgacaggcattaacccaacagacaaaagcgtaaaacaggaagacacaccaaacactcaaacgcactcaggttacaccaagacatgacaatggccaccccatcgccgcccccaacagcgaacgtcccagaccgccccaaaaggacaaacagcagacacaccaataaccaccgaacaccgatcagcccacaccagggtgtacaccccatgtcacccacccacactactaaaacaaacgagtcagccaaactcacgcgacgagacactagccagcaacaagagatggatcagcgcgaacaagccgcgtgacacagcgcactggcagaccgcaacccgaacgacaccagc

SEQ ID NO: 610015 - DNA, 1143 bp, Homo sapiens
  misc_feature (293)..(293): n is a, c, g, or t
agcggaggggggaaagctgaggtgtcgccggggaccgtcgggctggatggtcgagtggatgaggcagcgagggtaggacagtgaccgtctggttgactgcgaaggacgcccgagccaccatctaggtttcatcctcgctccgcgccgttgtttcacgctgatggagaggctcgtgcgcgtgccgcacgtctggagggggaaactgaaggcagggagtcgggccatgatagggagcatgtccaggccatctccaaacatgggagtgatgggctgaccgaccgctgactccacancacggacttcactggaccgtactgacgcccgctcgtggttcactttgagccaaatcagtcgtgcttcttcgcttgggggggcaacaattcgtagatgcgcattgaatttttcgcggtgacttggcttccctcgcgaagaaggctttgaaggtggtattccatgcaccaggaacttctggcagggagatctcaaacgcgtaggatttcaaccagctggggggaacgccgaggcatagaacacaggggcgcccagggagaagtcgcctcacgggcggaccaacgcacccgagcgcaggtgtctcaatgactgcaaggtggaccctaccaaacaggtggcggaagcggatacgcccgcgtgggtaagcaatgagcgcatttccggaatgtggcggccgccacttggacgaaaagggctccattcgactcgcaagggaaaaccaaagctaggctgaagtggacctctgcaggggcaatggttatgcgtaacgattccccatggacattatagaagcagaagtggggtgcctttgacgaacgggagaacggcccccccaaggagatgaggtggcacggcccagtggggtagcattctttgctctctatcccaagggccttgagccacgcctagacttaacaaaaagcttgggaacgaacacgcgtaggaagacctcccatgtcgtggaacgacgtggggggcttatcaatagtggggtccacagccccgggggacgccccggataggccatgggcacaccgaagccatatatcaatgctcgcccgaaagggcgaccacactcgcttggggaccgcccgtgacggggcgtgtggtgatctcgaaacatgagattag

SEQ ID NO: 610016 - DNA, 302 bp, Homo sapiens
  misc_feature (102)..(102): n is a, c, g, or t
  misc_feature (117)..(117): n is a, c, g, or t
  misc_feature (136)..(136): n is a, c, g, or t
  misc_feature (195)..(195): n is a, c, g, or t
  misc_feature (243)..(243): n is a, c, g, or t
gaatttttgggctggcgaatcctgacgacgtgcggaatatctgtgatgccaaaggaaatagttttgtcgatgcgatgaaggtttgcggatttactcttccgnacgccccactaactncgcgtcaggctattatagnctttgttgaactgcatattgaacagggctgtgtgctggaaagtaatgggcaatcaattngcgtggtgaatgcaattgtcgggcagcgtcgttatacggtaacgttgnccggcgaatcaaaccatgcaggcaccacgccgatggggttatccgtcgtgatacagatt

SEQ ID NO: 610017 - DNA, 180 bp, Homo sapiens
ccaccctttcccaaagtttttgaagctttgataggttgatttataggtctgtcctatatgtaatataaacacgtacctcacagacacttttacaagagttaatactcaaaattacaaattgactgacacttatcgagagcaaagcagtggtaactcgatccttcagatgttgcacatcac

SEQ ID NO: 610018 - DNA, 1224 bp, Homo sapiens
agtacctcatggacagcgaacaatgagtggaagctgccctaagactacctacttatgactttgatgcctgtaatgctgctgaccgacaagcaggatggaggtacagtgaaagcggacagcagcagcgtgaccacagtacactcaagtagagtgatcgacactgccactcgcttccactagactatccaagtttcaacgcaaggcagaaacagagtgatggcagtactcatggcaccatgggttgactgctgatttactcccgaccctaagcacgcacaggcgccgcaagcaaccccatccctggagcaggtgagcctgtggacacacggctcccgctgacctcggacactcctagccatgtcatcttgctgcgatttgctgccgagtgcatgcgcaagcggcgcctccgggtacacacatctcgccccctctccacgtccccttgggcgacgtcccagccctccgtgccgtggcgattccaaagcacgcctggacgcgcacacctgtcggcacacgccactgtgcgcgcatgtcgacgcactcttgtctctgccccttccgcctctaccttggtccccacggtttcgccgacctgggcccaatttccccgtttgtgccccaccgcgccgagcccctttcccccagaaaccctccacccacaagggctacgttcgacctccacgcggacctgtggcactccccgaggtcgcgcgggaacccggccagaccacacacttcctccgcaaggggacgccctggcgctccaagtcccacagagcaccgctaagcaccaaaccgcggagaaaaggcccgccatcgctccgtttccatttccccccccgttttaagctttctcccagttccttgggtggccccttgccccgagcggcaaatccgtggccccccggcgccccaggcttgtccctttaacgtcgggccggatcttacccccaggggcccccccggggccgcctaaccaggccccctcaggcgcccctcggcccattacttcgttccgcacccgcgttgggcagcctccccccccgcgaaggcgtcaacttctccccggggatacccccgtcgggtgtccccatggcaactttctttttgcccccaggacgccccggctgtgcaaggtcgggccgccttgggcgtcagcgcctcgcccgctcctcacgcgcgcgcgatctcccgcttctgagccacgcgggatttccccttgtg

SEQ ID NO: 610019 - DNA, 175 bp, Homo sapiens
cagagaagacaaaatgttgaactgggtaccgtgttatgatgctaagaatcaacgaccagtagtccgttccctatttagagcttactgtcttctggagaacgttgcaaaattggattattcatatttcccactgtaggtactttacttctgagccttgagatagatggactgagtc

SEQ ID NO: 610020 - DNA, 1301 bp, Homo sapiens
  misc_feature (109)..(109): n is a, c, g, or t
  misc_feature (697)..(697): n is a, c, g, or t
  misc_feature (780)..(780): n is a, c, g, or t
  misc_feature (870)..(870): n is a, c, g, or t
  misc_feature (884)..(884): n is a, c, g, or t
  misc_feature (923)..(923): n is a, c, g, or t
  misc_feature (961)..(961): n is a, c, g, or t
  misc_feature (965)..(965): n is a, c, g, or t
  misc_feature (975)..(975): n is a, c, g, or t
  misc_feature (1027)..(1027): n is a, c, g, or t
  misc_feature (1067)..(1067): n is a, c, g, or t
  misc_feature (1087)..(1087): n is a, c, g, or t
  misc_feature (1094)..(1095): n is a, c, g, or t
tccagtcaagtttttcactcttccgttttggccatttgaacagatggaggggccaagatccgagtgaatcaatgatgggggacccgaatttttaaggaaattgatggcnttccattaacacgggggaggctcccaacctcgacaacaatggctgattgatttctggcagctgctggacaagtatgccctggaggcgcttttaaggtcatgtgtgaggatgcgcctctgcagtgaacctgtccgctggagaacgctgccagaaattcctcatcctggccgacctccacacgcgcagatccagttgaaacctcaggcaatggatttcatccactatcatgcttcggatgtcttggagacctctgggtggaaatccatggtggtgtcacatccccccttggtggctgaggcataccgctttctggcttcagcaccacgtgccccttttttgggagcccccaccgccaacgcctgatagccatcctatagatcctgcttgttgtaagactccgtttaatttccacgaagcacgcagccacctgttgctgccacctgagccacccacggtagacacgcgccatctgtggagcttttactctcttgtgaggggaagagactgcacttgtggcccccgactttttaaacagcaactaaataacttgggggaaaacggggggagggaaaatgaaatggaaacccngtgctgcgtcactgtgttcccttggcctggctgagtttgatactgtggggattcagtttaggcgctggcccgaggatatcccngcggtggtacttcggagacacctgtctgcatctgactgagcagaacaaatcgtcaggtgcctggagcaaaaaggaaaaaaaaaaaagaanggacttggagtttnaacagaaggggaaagggaaagaagaaaagattttggcanaatttctcaaaaatcagttgggggatcccagtagtatntatntggagagaancaaattttagtccttctaacggtgctaaaactgggatattggtgaaaactcnttaccaccatacaagcttcagaagagctctctggtggtangcacttatggttggcaagancagaatnncattcctttatttccttttattgaacaaattgacaacgtgacggcacacaaggggaacggttattggatctgggaagatgagtgtcctgatgtggtggcctttggcaaaaactcttcatgggcgtcgaaaccctgcaaaacactacctcatccagaattccatatggtctggacaagacctatggtcctctgtttcagatatggtg

SEQ ID NO: 610021 - DNA, 926 bp, Homo sapiens
gagtgacggagtgaggagatgacatggggagcgtggagctcgagaatactgcccagttactctagctgcgccagtgccgaacctgcagcttcttggcttaggtacttctactcacagctggcctgattcctgaggccaactccagcaaattggctttatgcaaatctgcagtgaaatgtgctcatcagatgacatgcctggacccttgctgcacggacacgactctctgcaaagacctgtgacgtggcttgcacggattggttggacaaactgcagacacccttatgcacaatgacggactgcatgactaaggcgtgacgcttgcagggaccttgtgacaatggaccttactagggttcctgctactgaccacccaaacggatgacctgcatgactgtcactcagactgcacgcttgagaaacctccatggttggttgtggcacgtggcttgagcacatggtgatgagacaaatggttggaatcattgtgagtgcccagatacacaactgtgaacgtggcactccttttgaggttccattgacagcaacctccacaaaatgggagaccaacatggcacatcaagattggcctgaacggaaactccaactctggttgtgcaacatggattcgattgtttagccattgggcaccaagggcatgcatttaccacacacagggccagcaactgtgcatttcgcatttggaaactgtgggacggggcaacaaagttggtgtcttagttgggaaaagggaaaggtaacaattgagggaacacaatggtacggcttggaaattgtggaacatatgatcgcgctgggggtgaattatccttttggggcccttgagggcatggggatttgggtcgaagagaaagtagtaagattaacgactatggggattagacgagggccattataggtgaata

SEQ ID NO: 610022 - DNA, 410 bp, Homo sapiens
tactagttttcaattttgatatttaaaaaaaaaatttttttttttgagatgcagtctcacgctgtcacccagactgaatgcaatggcatgatctcggctcactgcaaaccccgccccccgggctcaagcgattctcctgcctcagcctcttgaatagctgggactacaggcacgcaccaccacagtcggccaatccttgcatctttagtagacacagggtttcaccatgttggccaggctggtctcaaactcctgacctcaagtgatccatccgccttggcttcccaaagtgctgggattacaggcatgagccaccgtgcctagcgtgtggaggcttttaaagggcaacagtatttattcctatgatgttaccattttttttttgggagatggaatctcactctgtcacc

SEQ ID NO: 610023 - DNA, 157 bp, Homo sapiens
  misc_feature (45)..(45): n is a, c, g, or t
  misc_feature (50)..(50): n is a, c, g, or t
  misc_feature (82)..(82): n is a, c, g, or t
  misc_feature (107)..(107): n is a, c, g, or t
gctctccagaaggggatgcaagctctccagaaggggtgtgatctntgagnagtggggagtggagtcaccactcgggacatanagggtggacagttcaggcctgtgtntgcctcctcgggactgtggagtgggtgccctcagtaaagcgctttgttgc

SEQ ID NO: 610024 - DNA, 340 bp, Homo sapiens
  misc_feature (281)..(281): n is a, c, g, or t
cgctcaatggaattccaataatattattaaaatcaatatataaaaaaaaagtaaaaatggcacaaagatgattatattcaacaaatgcaaaagatatcgcagtatcatattctaagttagctatttttagcggcatgacaggaacagcaatgtctttaatcatcagattagaattagctgcacctggttcacaatattcacacgggaattaacagttatttaatggcgcgcctctcagtgcgtatatttcattgatgcgtctagtattagtatcatgaatnataaatagatacttaaaacagatgactaactaagtaggggctaactttatgtgaataat

SEQ ID NO: 610025 - DNA, 892 bp, Homo sapiens
  misc_feature (80)..(80): n is a, c, g, or t
cggccgcggagccacacaacagaatcgtctactaagaccgagacacagccctgagtagccacaatgaaagtactttaagnagcacttgcgaagaagagaaagacaaggcattactctgtcagcagcctgctcggtcagcagctcgagatcaccaacagtagcttaccttgcttctggaagctcccctagagaacatcactgcagcaccatggaacaagcagtgagggcatgcctacaactgctgcacttcatactctcctggaaatagaatatctgaccttcaccccctccatgctcccaatacgttagccagaaccctacattactctccacaaatactccttattacttaggagcaattgacaggcacgaccaccaaccctcccccgaccggccaccacccctagcccgccgctccaaacaactattaccccactccccccgacaacccccactccccgaacaaatgagcgaaaatcctcacctctttcctacccccgacaagaacctcttgatcgaacgcgcgagcgcgccccgccgcgccccccctgatccacacacagaagtggaaaacggaataccgcccaacgtcgcgacagcacccgcgcagcgcgagcggggccggcccacgcacctgccctgtccgctcgacccctccgccgaccgtccgcccgaccgagacgagttcccgtcccgcgcccggcgtcctcgcttacgtatcacaccccgctatcaacatcgaagacacacacacgacgctgcagtcgcacacgcaactcgcggcacgtaatgtataatagaaacacacgcaccgctgccgcagctacgaaccgtatcctctcgtctccgaccctctgaggcgtgcattcgcgccacccaaccccctcggacg

SEQ ID NO: 610026 - DNA, 1008 bp, Homo sapiens
  misc_feature (1)..(1): n is a, c, g, or t
  misc_feature (278)..(278): n is a, c, g, or t
ncacacacaacaggaggcgaaagagggtggacatcgacagtgcccaactaaggtacaaactccgtgtggtaacaagttgtgccgctaagcaggtacactcgcgttttgaaacaatgcccgcacacaaagttgtgtgacaccttgccggatgtgtcccgcaattacccaaataaggcttccggaatcccccggacctgccctgaaataggacccaccgcggtccgtgcataggatgcacaaccaaggcgcccatccgggcacaattacgcacctggtgntggcctgcacgaacggggcacacaaggtgcgacagctccagcggtggcaacaacacggggggcaagacacgccctatatgtgctcggtggccccaaagggttgtgttcaatagaagaaggtggctgtgatggagtcgtccctttctggagtgtgctcctcataaacaggggtaatttccgaggttctgccgcccttcttaggccagcgatttgttccatctggcggcacaatggtgggtgaacaaccggcgtacctggagaaacggtttccaaaaacagggccccgtcggtaagatacgaaacaacgcacgctgtttcctactacatggtaggacccccccccacggagggaatttgcctctcgacacgcccccgtttgaacacccttattggagtagataaaacggcgggggcaaaacacattttaatagagaagtttgtatgcgcgcactatgttgagaggatgaagaacaccacccccggttgttgagaccccaatagagcgcgatttgtcttgcattttttaactcacagaacaactgggagagactccagcgccttcctctgagacagaagccaacaataggtgacgccagccttggtcgccgcaattaaccgggtcatgtcgacaacaacatgggctacttcttcagggatgataatcttgtctgcggtttccgcgtgaaaaagcccacaaaaaccgggttttgggtcagtccaaacaaaaaca

SEQ ID NO: 610027 - DNA, 1767 bp, Homo sapiens
agaggatcccctatttattgtttggaccgagtgccgggccgacagcagcccggaggttggctatgtgaccaggcaacatgctgagccggcttcaggaactgcgcaaggaggaggagacgctgctgcggttgaaggcagccctgcacgaccagctgaaccgcctcaaggttgaagaattagccctccaatcaatgatcagttctagaagaggggatgagatgctgtcttctcacactgtacctgaacagtcacatgatgtaagcttaatcaagtgcaggcctaggagagaatgcaaagtctgctctgctcccatgctgcttgggtggtgaagaactgttgtaaatcacattacctagcccaaagggctctgagaagtgctgataacagttttctggtttaataaggtggcaactctccattaaccaccttcctaccagctagttatacactaattaattaagtagttactaatgttttacctccatcctcctcgtcatccattctgtctagttactcagatgaacccgggggagagtggagatttttgtaggacgatgtcaaaactcttgattttttgtgaataagtaaccttgagattcaagagtgtggcttcaagtacaaggcacagtgctaaaagatgagctccagttctcatcatactcatctcttaccaaatgccctcaaatgttggtgcatgtagacaatgaagcatcaatcaaccaaacaaccctggagctgagcacaaagagtcatgtgacggaagaggaggaggaggaagaggaagaagaatcagattcctaaaggagggggaaagccaggctggtcagttatacaaattgcatttctaaggctcaggctacttctcctcaaggaaatcatcttgccctgggccctgtgatctgcttgaaaggaaagcaagaactataaggaggatgtgtagttgcaaaaatggctccatcggtaactcaagcttcagaatgttatgacatacagaaaatcaaagatgctgtgtcttagcattgagtaatatgggtggtgctgtctgtaatctggtcagattcagttaactgttcagaacaaaatttcctctgaaatactgttgagaaagtctgtcatttgcaaaaagagcagagtttaaatacaagccagtctttccagtcaacaatgcctctttgaagaaaaccaattaaagactgtttgcatgccgctgaacccttgtgagcagttaggacacagtctaggacagaaagatgacaaggggaaggactgagggccatctgagagcacaagctgtttctacctctcagaggcattgaaatattgcatgctataaactgctttgtgtatctgttaccacctctcacttgagacatcactcactggtaaaatgttttataaataaattataagtagccatcatggagcctgctggtttctagatagcgacagagagaagcagcagttccttctctgaggaaaagatacaacaggatggtttgaaatccatttctggtccttaagagagatgtgccatgcttggaagactggattttttgttttgttttttgtttgttttgtttgagacggagtttcactcttattgcccaggctggagtgcaatggcgcgattttggctcactgcaacctccccttctcgggttcaagtgattcttctgcctcagcctccagagtagctaggattacaggcatgcaccaccacacccggctaattttgtatttttagtaaagatgggatttttccatgtt

SEQ ID NO: 610028 - DNA, 316 bp, Homo sapiens
  misc_feature (265)..(265): n is a, c, g, or t
tttagataacaaagttgtaagtgcttttatagatttcttaaaaattatatttgtagtcataataattgagggctatgatgcaaagttgtaacaaactgtctctacattgaagataatgccttttacatctataatgaaagctagttttgcacacaaactgtatttcatttaatagtcttagttgagtctaaacagaactgttcaagtaggaagtgattcttagttcaaatgtaaaggtatatgcccaattgaaaggaaacttccnatttaagtactaaacctaaggaaaggtccatgtaaagggagtagggttttc

SEQ ID NO: 610029 - DNA, 151 bp, Homo sapiens
tgtcaatatgaatcttgttgactatagtcttggctggtcataggaaggtgctcttccacttggttccgtgatgattccatgtgttgctgttgtccctggttattatatggttgctggctatatgagctctgcttgtgattctcataaccac

SEQ ID NO: 610030 - DNA, 696 bp, Homo sapiens
agaggatcccctatttattgtttggaccgagtgccgggccgacagcagcccggaggttggctatgtgaccaggcaacatgctgagccggcttcaggaactgcgcaaggaggaggagacgctgctgcggttgaaggcagccctgcacgaccagctgaaccgcctcaaggttgaagaattagccctccaatcaatgatcagttctagaagaggggatgagatgctgtcttctcacactgtacctgaacagtcacatgatatgttggtgcatgtagacaatgaagcatcaatcaaccaaacaaccctggagctgagcacaaagagtcatgtgacggaagaggaggaggaggaagaggaagaagaatcagattcctaaaggagggggaaagccaggctggtcagttatacaaattgcatttctaaggctcaggctacttctcctcaaggaaatcatcttgccctgggccctgtgatctgcttgaaaggaaagcaagaactataaggaggatgtgtagttgcaaaaatggctccatcggtaactcaagcttcagaatgttatgacatacagaaaatcaaagatgctgtgtctcagcattgctgtattttggcgggtgctgtttgctaatctttgtcagattcacgttcactgtttatcacactatttttctttaaatcttgttcaaacagtctttcctata

SEQ ID NO: 610031 - DNA, 108 bp, Homo sapiens
gctgaaggacatcgcaagaatacactgatgtgtccccgacatcattgaacgagcaggctattccttggagaaggtatttgggattcaattgatggaagcgtcgcgcat

SEQ ID NO: 610032 - DNA, 577 bp, Homo sapiens
gcgtcgaaaaagggtttggtggtttgagccccgattttctcggggtttctttccgggggttggtgcccccgcgagtctataacctttgttacatgggtgaccccaagctcgtggttctcgtctccttccgaaggggtaatgttccctcccccacgattttggtgtctcaccttggcctgttagacggtgccccttcccggtctccccccctctgtgtgaagacgtggcccaagacactgagaatggtgccagcatcccctcctcgtttattacttccctcgcctattacatcccccgtgagatcttttttcagaatcctacccctcgtggcgcgctccctaaatgtttttatagaataaagctttttcgatgtcccactcatgctttctataagaataacacccccagatggttctctcttcaaatattttttaaaacaacatctttgatctctccacactcgggggcaaaataacacttcattcatatttattactcctcctcttagatagaataattttaagtgcccccctgcaaaaagaccccttaaatatattttgcttcccacaataatcaa

SEQ ID NO: 610033 - DNA, 690 bp, Homo sapiens
agaggatcccctatttattgtttggaccgagtgccgggccgacagcagcccggaggttggctatgtgaccaggcaacatgctgagccggcttcaggaactgcgcaaggaggaggagacgctgctgcggttgaaggcagccctgcacgaccagctgaaccgcctcaaggttgaagaattagccctccaatcaatgatcagttctagaagaggggatgagatgctgtcttctcacactgtacctgaacagtcacatgatatgttggtgcatgtagacaatgaagcatcaatcaaccaaacaaccctggagctgagcacaaagagtcatgtgacggaagaggaggaggaggaagaggaagaagaatcagattcctaaaggagggggaaagccaggctggtcagttatacaaattgcatttctaaggctcaggctacttctcctcaaggaaatcatcttgccctgggccctgtgatctgcttgaaaggaaagcaagaactataaggaggccgggcagttcctggctccattggctactcaaggctctagaagctatgccccactgcaaaccaaagccgctgcgccttcaccatgagtcactagcgtcgccctgcccgtactctgcccacacttagctacatgctacacccctctcccctgcaccacctgctcgcttgctcgccatttctcctcg

SEQ ID NO: 610034 - DNA, 173 bp, Homo sapiens
tcagctcggaccaaaagaatgaatgtcactattgactttcgcaaattatgtgaaaatgggtggggaggacgggggaataccccgccgcgacagaggcgcacatgatacacaaaaataaattgacgaaaactcttgacagttcccttgtgtgtgctaatctatgtccaacctaa

SEQ ID NO: 610035 - DNA, 326 bp, Homo sapiens
tgagccataggttaaggtctaaattaaatctggggaacaggggccaggtgcgggtggctcatgcctgtaatcccagcactttgggaggctgaggcaggcggatcacctgatgtcaggagttcgagaccagcctgggcaacataatgaaaccctgtctctattaaaaatacaaaaattagccaggtgtggtggcatgcacctgtggttccagctacttcggaggctgaggcaggagaattgcttgaacccgggaggtggaggttgtggtgaaccaagattgtaccactgcactccagtatgggtgacagtgagactcagtctcaaaa

SEQ ID NO: 610036 - DNA, 643 bp, Homo sapiens
agaggatcccctatttattgtttggaccgagtgccgggccgacagcagcccggaggttggctatgtgaccaggcaacatgctgagccggcttcaggaactgcgcaaggaggaggagacgctgctgcggttgaaggcagccctgcacgaccagctgaaccgcctcaagatgttggtgcatgtagacaatgaagcatcaatcaaccaaacaaccctggagctgagcacaaagagtcatgtgacggaagaggaggaggaggaagaggaagaagaatcagattcctaaaggagggggaaagccaggctggtcagttatacaaattgcatttctaaggctcaggctacttctcctcaaggaaatcatcttgccctgggccctgtgatctgcttgaaaggaaagcaagaactataaggaggatgtgtagttgcaaaaatggctccatcggtaactcaagcttcagaatgttatgacatacagaaaatcaaagatgctgtgtcttagcattgagtaatatgggtggtgctgtctgtaatctggtcagattcagttaactgttcagaacaaaatttcctctgaaatactgttgagaaagtctgtcatttgcaaaaagagcagagtttaaatacaagccagtctttccagtc

SEQ ID NO: 610037 - DNA, 992 bp, Homo sapiens
agaggatcccctatttattgtttggaccgagtgccgggccgacagcagcccggaggttggctatgtgaccaggcaacatgctgagccggcttcaggaactgcgcaaggaggaggagacgctgctgcggttgaaggcagccctgcacgaccagctgaaccgcctcaaggttgaagaattagccctccaatcaatgatcagttctagaagaggggatgagatgctgtcttctcacactgtacctgaacagtcacatgatatgttggtgcatgtagacaatgaagcatcaatcaaccaaacaaccctggagctgagcacaaagagtcatgtgacggaagaggaggaggaggaagaggaagaagaatcagattcctaaaggagggggaaagccaggctggtcagttatacaaattgcatttctaaggctcaggctacttctcctcaaggaaatcatcttgccctgggccctgtgatctgcttgaaaggaaagcaagaactataaggaggatgtgtagttgcaaaaatggctccatcggtaactcaagcttcagaatgttatgacatacagaaaatcaaagatgctgtgtcttagcattgagtaatatgggtggtgctgtctgtaatctggtcagattcagttaactgttcagaacaaaatttcctctgaaatactgttgagaaagtctgtcatttgcaaaaagagcagagtttaaatacaagccagtctttccagtcaacaatgcctctttgaagaaaaccaattaaagactgtttgcatgccgctgaacccttgtgagcagttaggacacagtctaggacagaaagatgacaaggggaaggactgagggccatctgagagcacaagctgtttctacctctcagaggcattgaaatattgcatgctataaactgctttgtgtatctgttaccacctctcacttgagacatcactcactggtaaaatgttttataaataaattataagtagccatca

SEQ ID NO: 610038 - DNA, 248 bp, Homo sapiens
cggctccttcttaacgatatacggaggtcagctcggtgctcacgtgtcgacggaacttgtacagagaggcatgcaccgcagtgttgaatacacgtcgaccaggctccatatatccgatattaggtcgtaatcacggttctcacgtatccacggaacatgtctatggaggcatgcatcgcagtggtgaatacacgtcgagctgcgagcatgcatagctgctcgggtactgaaagatactctagagtcga

SEQ ID NO: 610039 - DNA, 1340 bp, Homo sapiens
agaggatcccctatttattgtttggaccgagtgccgggccgacagcagcccggaggttggctatgtgaccaggcaacatgctgagccggcttcaggaactgcgcaaggaggaggagacgctgctgcggttgaaggcagccctgcacgaccagctgaaccgcctcaaggttgaagaattagccctccaatcaatgatcagttctagaagaggggatgagatgctgtcttctcacactgtacctgaacagtcacatgatatgttggtgcatgtagacaatgaagcatcaatcaaccaaacaaccctggagctgagcacaaagagtcatgtgacggaagaggaggaggaggaagaggaagaagaatcagattcctaaaggagggggaaagccaggctggtcagttatacaaattgcatttctaaggctcaggctacttctcctcaaggaaatcatcttgccctgggccctgtgatctgcttgaaaggaaagcaagaactataaggaggatgtgtagttgcaaaaatggctccatcggtaactcaagcttcagaatgttatgacatacagaaaatcaaagatgctgtgtcttagcattgagtaatatgggtggtgctgtctgtaatctggtcagattcagttaactgttcagaacaaaatttcctctgaaatactgttgagaaagtctgtcatttgcaaaaagagcagagtttaaatacaagccagtctttccagtcaacaatgcctctttgaagaaaaccaattaaagactgtttgcatgccgctgaacccttgtgagcagttaggacacagtctaggacagaaagatgacaaggggaaggactgagggccatctgagagcacaagctgtttctacctctcagaggcattgaaatattgcatgctataaactgctttgtgtatctgttaccacctctcacttgagacatcactcactggtaaaatgttttataaataaattataagtagccatcatggagcctgctggtttctagatagcgacagagagaagcagcagttccttctctgaggaaaagatacaacaggatggtttgaaatccatttctggtccttaagagagatgtgccatgcttggaagactggattttttgttttgttttttgtttgttttgtttgagacggagtttcactcttattgcccaggctggagtgcaatggcgcgattttggctcactgcaacctccccttctcgggttcaagtgattcttctgcctcagcctccagagtagctaggattacaggcatgcaccaccacacccggctaattttgtatttttagtaaagatgggatttttccatgtt

SEQ ID NO: 610040 - DNA, 1425 bp, Homo sapiens
  misc_feature (1390)..(1390): n is a, c, g, or t
agaggatcccctatttattgtttggaccgagtgccgggccgacagcagcccggaggttggctatgtgaccaggcaacatgctgagccggcttcaggaactgcgcaaggaggaggagacgctgctgcggttgaaggcagccctgcacgaccagctgaaccgcctcaaggttgaagaattagccctccaatcaatgatcagttctagaagaggggatgagatgctgtcttctcacactgtacctgaacagtcacatgatatgttggtgcatgtagacaatgaagcatcaatcaaccaaacaaccctggagctgagcacaaagagtcatgtgacggaagaggaggaggaggaagaggaagaagaatcagattcctaaaggagggggaaagccaggctggtcagttatacaaattgcatttctaaggctcaggctacttctcctcaaggaaatcatcttgccctgggccctgtgatctgcttgaaaggaaagcaagaactataaggaggatgtgtagttgcaaaaatggctccatcggtaactcaagcttcagaatgttatgacatacagaaaatcaaagatgctgtgtcttagcattgagtaatatgggtggtgctgtctgtaatctggtcagattcagttaactgttcagaacaaaatttcctctgaaatactgttgagaaagtctgtcatttgcaaaaagagcagagtttaaatacaagccagtctttccagtcaacaatgcctctttgaagaaaaccaattaaagactgtttgcatgccgctgaacccttgtgagcagttaggacacagtctaggacagaaagatgacaaggggaaggactgagggccatctgagagcacaagctgtttctacctctcagaggcattgaaatattgcatgctataaactgctttgtgtatctgttaccacctctcacttgagacatcactcactggtaaaatgttttataaataaattataagtagccatcatggagcctgctggtttctagatagcgacagagagaagcagcagttccttctctgaggaaaagatacaacaggatggtttgaaatccatttctggtccttaagagagatgtgccatgcttggaagactggattttttgttttgttttttgtttgttttgtttgagacggagtttcactcttattgcccaggctggagtgcaatggcgcgattttggctcactgcaacctccccttctcgggttcaagtgattcttctgcctcagcctccagagtagctaggattacaggcatgcaccaccacacccggctaattttgtatttttagtaaagatgggatttttccatgttggtcaggctgctctcgaactcccaaactcaggttttcctcccgcctcganctcccaaagtgctgggattacacacgtgagcacta

SEQ ID NO: 610041 - DNA, 938 bp, Homo sapiens
agaggatcccctatttattgtttggaccgagtgccgggccgacagcagcccggaggttggctatgtgaccaggcaacatgctgagccggcttcaggaactgcgcaaggaggaggagacgctgctgcggttgaaggcagccctgcacgaccagctgaaccgcctcaaggttgaagaattagccctccaatcaatgatcagttctagaagaggggatgagatgctgtcttctcacactgtacctgaacagtcacatgatatgttggtgcatgtagacaatgaagcatcaatcaaccaaacaaccctggagctgagcacaaagagtcatgtgacggaagaggaggaggaggaagaggaagaagaatcagattcctaaaggagggggaaagccaggctggtcagttatacaaattgcatttctaaggctcaggctacttctcctcaaggaaatcatcttgccctgggccctgtgatctgcttgaaaggaaagcaagaactataaggaggatgtgtagttgcaaaaatggctccatcggtaactcaagcttcagaatgttatgacatacagaaaatcaaagatgctgtgtcttagcattgagtaatatgggtggtgctgtctgtaatctggtcagattcagttaactgttcagaacaaaatttcctctgaaatactgttgagaaagtctgtcatttgcaaaaagagcagagtttaaatacaagccagtctttccagtcaacaatgcctctttgaagaaaaccaattaaagactgtttgcatgccgctgaacccttgtgagcagttaggacacagtctaggacagaaagatgacaaggggaaggactgagggccatctgagagcacaagctgtttctacctctcagaggcattgaaatattgcatgctataaactgcttataaataaattataagtagccatca

SEQ ID NO: 610042 - DNA, 1000 bp, Homo sapiens
ggtccactgcccatactccgcggccggggcgccggaggacgccaagccgtcatggtctaccacacgcttcctggtgagaggcccatcaggtggcacgcctgtgaacaacggaccgggacccagattgccatctgccccaacaagccatgaggtgtgcatatactatgaaaagaagcggtgccaaatggaccaaggtgctcgagtcgtcaaggagcacagacgggcaggtgacgagtgcatcgactgggcccccgagagtaaccgtattgtgtacctgcggctacagaccggaacgcctacatgtggacgctgaagggcctgaacatgtgaagaccgcacgctggtcatcctgacggatcaaccggggctgcccgcatgctgtgcgctgtgagtcccccaagagagaacaagtttgcttgtgtggcagctggttctcgatgtgatctccatctgttatattcgacgcacggagaagtgcactggtgggctccatgcaaagcacactcagagaaggcccatcctgctcaatccgtcctcagcctggcatctgaaaacctccaagcaatgtcgctggctcggctgcccggctccttgtgcccttccactgtgtccgggatcttgctcagcccttacattcaagtgaacgtgcgaggaacaggcctggttgaacaccgaccgctcgtggggtctcctaacgcattgcctcatcaagagggcaccttgaatgtttcgacatccaggcaagtaacgctgcgggtggggctacattggcagtagtgtaatctcactccagcggaaatgcccggtgttgggcctggggttaatgcgccgggacacgcgccgttttgtccttggtttgatgccctacgaacccaggatgcgccggcggccgcgctctcggggctcttgcacccggttgcccttggctggcgctgcccctcctgccaaacaccttggctggtggccacgggccccacctggcttcccgggccgttcccct

SEQ ID NO: 610043 - DNA, 1145 bp, Homo sapiens
agaggatcccctatttattgtttggaccgagtgccgggccgacagcagcccggaggttggctatgtgaccaggcaacatgctgagccggcttcaggaactgcgcaaggaggaggagacgctgctgcggttgaaggcagccctgcacgaccagctgaaccgcctcaaggtgaccccgcggccctctcctgcccctcctccattcctcccgagcgaccatttccccccaacctgggcctctgtggtgaccacctgctgcggccagcttctccgctactcactagctgtggtggcgccaatttagaggtttacaaacaaacaggttgaagaattagccctccaatcaatgatcagttctagaagaggggatgagatgctgtcttctcacactgtacctgaacagtcacatgatatgttggtgcatgtagacaatgaagcatcaatcaaccaaacaaccctggagctgagcacaaagagtcatgtgacggaagaggaggaggaggaagaggaagaagaatcagattcctaaaggagggggaaagccaggctggtcagttatacaaattgcatttctaaggctcaggctacttctcctcaaggaaatcatcttgccctgggccctgtgatctgcttgaaaggaaagcaagaactataaggaggatgtgtagttgcaaaaatggctccatcggtaactcaagcttcagaatgttatgacatacagaaaatcaaagatgctgtgtcttagcattgagtaatatgggtggtgctgtctgtaatctggtcagattcagttaactgttcagaacaaaatttcctctgaaatactgttgagaaagtctgtcatttgcaaaaagagcagagtttaaatacaagccagtctttccagtcaacaatgcctctttgaagaaaaccaattaaagactgtttgcatgccgctgaacccttgtgagcagttaggacacagtctaggacagaaagatgacaaggggaaggactgagggccatctgagagcacaagctgtttctacctctcagaggcattgaaatattgcatgctataaactgctttgtgtatctgttaccacctctcacttgagacatcactcactggtaaaatgttttataaataaattataagtagccatca

SEQ ID NO: 610044 - DNA, 902 bp, Homo sapiens
agaggatcccctatttattgtttggaccgagtgccgggccgacagcagcccggaggttggctatgtgaccaggcaacatgctgagccggcttcaggaactgcgcaaggaggaggagacgctgctgcggttgaaggcagccctgcacgaccagctgaaccgcctcaagatgttggtgcatgtagacaatgaagcatcaatcaaccaaacaaccctggagctgagcacaaagagtcatgtgacggaagaggaggaggaggaagaggaagaagaatcagattcctaaaggagggggaaagccaggctggtcagttatacaaattgcatttctaaggctcaggctacttctcctcaaggaaatcatcttgccctgggccctgtgatctgcttgaaaggaaagcaagaactataaggaggatgtgtagttgcaaaaatggctccatcggtaactcaagcttcagaatgttatgacatacagaaaatcaaagatgctgtgtcttagcattgagtaatatgggtggtgctgtctgtaatctggtcagattcagttaactgttcagaacaaaatttcctctgaaatactgttgagaaagtctgtcatttgcaaaaagagcagagtttaaatacaagccagtctttccagtcaacaatgcctctttgaagaaaaccaattaaagactgtttgcatgccgctgaacccttgtgagcagttaggacacagtctaggacagaaagatgacaaggggaaggactgagggccatctgagagcacaagctgtttctacctctcagaggcattgaaatattgcatgctataaactgctttgtgtatctgttaccacctctcacttgagacatcactcactggtaaaatgttttataaataaattataagtagccatca

SEQ ID NO: 610045 - DNA, 206 bp, Homo sapiens
cacgaggactacccccaacatcccatgtgcaaacagaataaacccatattcctcttgtctttcttgaacgtctctattcctacatctccaccactactggaccactcatctaatatcgtggtggaattcattcctccactattacaaattttggtaaagaagctgcgttaattgcaaaaggctccttctgctaatcctgggtcttg

SEQ ID NO: 610046 - DNA, 108 bp, Homo sapiens
ctagatataactgggcatctctagatgggcaggacagcaatcagaacattcactctaatggagcacagacagatggctgccaagccagacagagcccagctagaaagg

SEQ ID NO: 610047 - DNA, 238 bp, Homo sapiens
  misc_feature (185)..(185): n is a, c, g, or t
ataaggagttacactagtccgctttacttggactagtgtaactccttcatgcaataaactgacaagagccatgcaagaaaaaaaaaaaaaaaattttggccggatagggtacggtattggaccatcgggattttggagaattattccagctacgggttgaccaaggcaaaaatttttgccatttnctcgttaaagattgggccgggctaaggacatacccagccattgcaagttccgg

SEQ ID NO: 610048 - DNA, 1450 bp, Homo sapiens
  misc_feature (907)..(907): n is a, c, g, or t
  misc_feature (913)..(914): n is a, c, g, or t
  misc_feature (1118)..(1118): n is a, c, g, or t
tcgcggtattttcctcccggggtgttattttcgtgttggaacacacccacggtgctcgtccgctgtgtgggaaatgaagtgccaccccaccgctgaagctcttgttggaggaggagaaggcgttgtctttctcctcgggggcggaccacaaatctgttgtgggggtgctctttcaccaaaatcgatgaccaacagggaaaatatggtggttgtctcttcacacaagaggaatggttttctcgctgtgacgccggggggaccaacaacgttgttgctcttgtgggtgggtggcaccgcgccaccaagagatgtggtgtcgccccccccccccacttggggggagagccacacctgggggttgttttcaaccgtcgtcttcacggggtggaatttaattccctcgtgggccccctctccctcgcgtctctcacatttttatgtcttccccgcggtgtttattgggcccccctcgttgatattggggaagtttggccccaccacccgcggttttcacacacctgttggagcacaaggccacagatgtgtgtgcctcgaaggctctcgtaagaggggagaactagaagtttttgtagtctcgccccccctttgtctcgggggtggtatagaaaaaaactctgggagaaaaatatgggcgccctcacaaatattcttctcggaaaattactctctggtgtgaagatgcctcgccccactcttgtgtgggaagaaataggggtgtctccctcggggcacaaggcgcacactaagtgtgtgtgttttgagagagagactttttctctcccagagactctataccccccacctctttggggggtctcccctctttggctctgtgtgtcgctgcggataatatagagagagaccacagacacacacttttcccgcnctgggnngggtgtgtgtcgatcaccaaaacaccccgctgggggcacacacagagagagagcgctccgctgggggagacctgggccaacagagtgctcacccacagatctttgcccccacgaggagagctctctcagcagagagcgctattaatagggaatatatatgtatctcctctttatatatcctcgcgccccccccacctcttttanatcaccaatgtggtgggtagagaaaccggtgttccagagaactctgtgttgtgttccacatatgcgccccacatttaagattgttagttgagatgtaaaagaactctggtgttaataggaaacaccacaagccatccgtggaaacctctccagaaggaaaggagaatagttttgtggaccccacttggttttctttttttgcgtgtgcgccacgattttaagattattagatttttaaaacaccaggaccttttttaatgggacaccaacacttggccccaaaatttgttccccaggattttgggaccccctttaaaaagatttaatggaga

SEQ ID NO: 610049 - DNA, 373 bp, Homo sapiens
  misc_feature (23)..(23): n is a, c, g, or t
  misc_feature (53)..(53): n is a, c, g, or t
  misc_feature (58)..(58): n is a, c, g, or t
tgcagtggtatgatcaataaaancactgtaagcctcgatctcctgaagctcanacganccttccgccttggcctcccaaaagtgctaaagaattacaggcaatgaaccttcaatgcctaagctgggactgttttcaaaactccaccaaaccccttttcttttgttccaattccaactctgcccaagaaaccttccgtctggcttcccaagagggcccaaagtcctttgtcttcaagaggtcctggctggggaagccttaagaagcatggtcttccctcactccaggcttctcgggtctccctattggggactgaccgtgggaagcagtgagccactgtgcaccagggcagcccggctcctcggggggtggccc

SEQ ID NO: 610050 - DNA, 376 bp, Homo sapiens
  misc_feature (45)..(45): n is a, c, g, or t
  misc_feature (80)..(80): n is a, c, g, or t
  misc_feature (87)..(87): n is a, c, g, or t
  misc_feature (104)..(104): n is a, c, g, or t
  misc_feature (147)..(147): n is a, c, g, or t
  misc_feature (246)..(246): n is a, c, g, or t
  misc_feature (273)..(273): n is a, c, g, or t
  misc_feature (351)..(351): n is a, c, g, or t
  misc_feature (376)..(376): n is a, c, g, or t
ggctggctgtgggaggctcccgaggtggggacccggccgggatgntgcagcggcggcggggcgtgggagcgggccctcgnggccagngagaagcagttcctgcnggcgctgctgagtttcttcatctacaacccgcgcttctggccngcgggataggagagacctcccagtgccaagtgtataagcgtgtccagaattggtgggtctcactgacttcaagaatgaagccgctggaccctcctggcnggaattctccacgatgttttgaagcangcctcggttttcccaccacctccaaatcatgcaagacacagggcagagcccgggagccatggccagcccttccggcanctccaaagccactggcaagccccgn

SEQ ID NO: 610051 - DNA, 350 bp, Homo sapiens
acactacaaaacgtcttagactgtgcctctatctgacgtcagtgtggcgttgtcccgagccatctgtagacagtaaccccgcacagttctcacaacagtacatggtgagagttgtatagcagaacgacaacttagagaagcaggtcatcacatgcaaagtgtatggaccacattctggtaattaacttcctgtcgaataacagcattcttctgacacatgctgcatttggttgaaatactatttgtatttatggtaacaataggtttttttttttcagttcatatgtagacaaacatgactgactgcaaaaatctatactagtggtggtgttttcaaactgggcactgat

SEQ ID NO: 610052 - DNA, 290 bp, Homo sapiens
ccgggaaagtttgggcccctgccatcccccaacctgggggtatttttggtggattgggataaaccggggcttgggccttcccccaaagcctttgggccagttttttccgccagccattttttccggttataagggttccaaaatcctggaagggttttaacctgctggatggaaagattggccccccaggccccggggcttttggaattgccttttggtttaggttaaatgctagccccgcctgggcgggggcttttttggttttttttaaataaaaaggtggcccgcca

SEQ ID NO: 610053 - DNA, 1179 bp, Homo sapiens
gaccccggacagcccatgcttgcgtcgggtcactgaacgggaaccacggccgctgcgcctgccgctgatggagtgcgtgcagagtgactcaggagtgtgcagaaggcgatggacgagaggagatgtcaacgatgcggttcgagtctcgagggaggagcttatgcgggccaatgctgaatgacgctatcaacgcgatcttggcgcatcaagctgccggatgatcagatcccatagatcaattgcaagcggtacctgtcatcaacgtagggggcacccagtcgtcctgcggatgacactgcaggtccgtagcagctcacgtctgtgcgcgtggcgctagttgccgacggccgacaggatgctcgccatctatgatggtcttggtacggcttcgaccaagggccagtatcagaatgcaaagtcggcctggacagagtgtcgggggctggaccggccaaggaggctccattctgtgggacaataacgcagttctcccgggcgaagtacttggaagagatcgtcgacacagatgcgcacgcacaggatcacacgcgctgctgatcatcggtggattcgaggcctacctgggactcctggagctgtcagccgcccgggagaagcacgaggagttcttgtgtccccatggtcatggttccgcgctactgtgtgcaactaatgtgccgggttccgattgcagcatcggggcagaccacgccctgaacagtatactcgaaactgcgacgcatcaagcagtccgcagcggaacaagcggcgcgtgtccatcatccgagacatgggcggtactgtggctacctggccaaccactgggggcgctcgggccggaagatggtgcgcatacctttcgacgagccttcgacctcagggatcctggcgccacacgtggcagaccctgtccgtgggtacacggcaggaggccccataccaaaaggactgtgtcctcgaaggaacctgccgggacataatcgccagcgcgtatataacagtgttctaacacaggcaccagcgtatgcgcatcccgaacagttgtccatagcgaggggggacctcccgtgacacgggcacatctccacaggggcagcaagaggcgcgggagaaactcattgggtcacgcacgggaggcagtctccagatccgccgctgctcacaggagtcacagccccc

SEQ ID NO: 610054 - DNA, 764 bp, Homo sapiens
ccatcacggaagcttgttgtaacggcttttgaaggccagtaaccattgttgtggttgtgttttgtatgcttgataccatgaaagtgtagaagtactgtaagtgccgtaatctatttatcaagaactgactactggaccgcgagcccacgaaaccatgggtcatagttacactgtgaatgtcgtcttctgtcgaagcaagggaatgctggggcaggtaatcacgcagtagccgccacgtggaacggtctgtccgtcggtctgtcccgcttgccgggcttctgttgcaagtcttgtgcttaaggagacttcctgctgggcttgccgatgtcggcacgctccagttagagtcttgagttctgtacacggtgagggtggttgccaaaggtgataagaaatagcagccaacaggctccctctcacttaagagagttctaattactaacactaaagttcttcctgagaaatgactcctcttggtgcggtccgacagcttttctcacgtgaaggacataggcctgagataggaagcagtgccctcgcttcatgaggtggcacatcttcggtggccgtatggcctggtcgagcttggtcagctgcgtgggtgcctgtctcctgtctccagcggcgagggcgatggttcttgtgcagcctggtgtccacacggtgcattcctgtcgccctcggccgcaggctggctcagctctccagtgctgcggcgcttgtctttgcagcattggcatgtcaccgtaggccccttcactctg

SEQ ID NO: 610055 - DNA, 400 bp, Homo sapiens
atttgtaatgttggtcccatataatcagttttgaatggagttttgcagtgggaaggcagaatcaaagcgcctgtcattgaacagttatagtcatgtgtctcgcctgtagatagacagtggctgtcgacaacatgacttgaaactgtggcaagtcaacgagtgtttgtgtagcattgtccccggggcatataggtttattatgttcagcataagcaagaagatggaataaagaacttctttctgatgtttatgatttatatataaaattttcaatgaatccattttatgaaccaattctccattgatcaaggctttgcagaaaagttcagtttcttggaagaaacaccttttagtgaatggaaaaatccacatcattattccccaatggtgaaaaaaaaaa

SEQ ID NO: 610056 - DNA, 241 bp, Homo sapiens
tgttatacactgaatttggcagtgcttgatcatggacttcccagcctctagaaatatgagaaattaattctatgtttataagccactcagtctgttgtatacctcagtttctcattcaggaggcaaagtgtatattagcagaagttgtttcctgaccctcctaaggaaggtaagggtatgagttaaaaccaattaaaaccaggtaatagtctcaggatagagctcgtcggctaatttttcc

SEQ ID NO: 610057 - DNA, 884 bp, Homo sapiens
ggagggttttgctctttgtgtgggtgtgtagagtggctatgatcctagttgtccagctgctgcgtggacaataagtaaagcaggtctgaatgacaccaggtcgctgctgtcttgcggctgacattcaggtagatgacgttcatcttcactgacggtggaagatgagcgcccttggccacggcacacgggcaacgtggtgcatcacaaactgtcctacggcctgcccacagaccgccaggacttgctgtccttgcaaagatggccgtggaagtatgaccgttcatcgagtccggccaaggaaagtggttctgccacgtggacgatgactaactacgtcaatctgcgtggccctgttgcggctgctggacagctagccgcacacgcgggacgtctacgtcggcaagcccagcctggacaaggcgccatccccaggccatggagctgggtcatgctggagaacaacgtgcgtcctgtccacttctgcgatttgtcacgggcgggcgcctggcttctgcaatcaggcgtgggctggctctgaagatgagcccgtggtgccagcgggggtcacttcatgaatacggttgacgcggatccggactgcctgatgactgcgaagcatcgggctatcatcgtggaggcctgctgtggtgtgccccgcatacgcaggcgggctctttccactcccactgggagaacctgcagcaaggtgccacctcggaagctccacgagcaggtgacgcgagctacggatgcctgaaaacagcggaagcgaccagagaaggggcctttcggggaggcgaacaacaggggcgtccagccatgcaactgaccgaaagcggggtcgcgcaggcagtaagggccggggaaccaccggggccggtcca

SEQ ID NO: 610058 - DNA, 673 bp, Homo sapiens
  misc_feature (147)..(147): n is a, c, g, or t
  misc_feature (205)..(205): n is a, c, g, or t
  misc_feature (304)..(305): n is a, c, g, or t
  misc_feature (472)..(472): n is a, c, g, or t
  misc_feature (659)..(659): n is a, c, g, or t
tgtcttcgcgatctgggtcggcgattaccagaagagtcttcatgtgcatcagtctagtgacaccatgtacagaattatatactgcactcataatagagcaggagccagcagcctgtttataaagtagaacaggcacttcctcctatncaaggttcttcaacgtttttttggggggggacacaaaagaggagacgaccccccgcgnccctagcccaaacctcaattttgggggcccactttaaccactatcataaaaacgcccccaatattttttaaatggccttttttttatgaatgaatctanncgccccctccccaccccacccacctaccactgccaactacacttcctcccctacccaaaaaactggaggggaggtggcgccgcgccctctttcttgttcacctccaccccatcaccactaaacataaattttcatatccccccctcccaccccctctcctgtccctntatctttgtcccctcccccctacctcccattctcacttctcgccttccccccacccctccctcccccacttctctcctctcttccctctccctcccaacactttttattatccacacccaacactctcttatattttcatccctctctctcttcttatcatctcacctcttacctacttctctcctnatacacacagagac

SEQ ID NO: 610059 - DNA, 195 bp, Homo sapiens
ctgcaagtcgactctataatatcctctactgtctcacgtggaatgctggacattgtacgtgcggtatgagactatatcatacttagtatgctagggtgagtggtacgaacttttttacatagcgaggtgtatgaattggtcgtaacggaatcagccgtatgctgttcgaattcataagaacaggcaggttagaag

SEQ ID NO: 610060 - DNA, 215 bp, Homo sapiens
ccccccccggggggggggtttttgggtccccctcctcccaaggggtgtgggccccccccaggggggaacgaaagggggtttcccccccccgggccggcccccccggcccggccccctttcccttcccccggggttaatcctgttttttagttttgggagaaccggggcctttttcccaaaaaaaacccaaacccccccaaaattttcggggggga

SEQ ID NO: 610061 - DNA, 407 bp, Homo sapiens
aagacagtgtctcactctgtcactcagactggagtgcagtggtgcgatctcggctcactgcaacctctgccctccgagttcaagtaattctcctgcctcagcctcctgagtagctgggattacaggcacccgccaccacgcccgactaattttgtgtacttccggtagagatggggtttcgccatgttggccagcctggtctcaaactcctgacctcaggtgatctgcccgcctctgcctcccaaagtgctggggttacaggtgcgagccacagcacccagccaggtccacaattctttagcctaactccaaaatccaagagactctaaagtttttttttcccccataagccatttggcagcaaactgacctttttgaactaaattagtggcaaacctggtcgacgc

SEQ ID NO: 610062 - DNA, 100 bp, Homo sapiens
cccggtgtggcaggtactgtaggtcttcagcaacagcatcacaggtggccttgggcagttgcccaggtggcagtgcagccccgggctgaggtgtagcaga

SEQ ID NO: 610063 - DNA, 1116 bp, Homo sapiens
gagatggaggagggaggccgggacaaagggcgccggtgcagacccagcagtctccagcgggcgtgcccccggctggcacggactgagaagccgagcggcaaggagcggcgggatgccggggacaaggacaaagaacaggagctgtctgaagaggataaacatgcttcaagagtgaactggagatgctcgtggaacgactacggggagacaggatacatccctgtatcgacactagcgctggaggaatcgcggaaggcgtgattcgttcttcatacgaacgttccatgacttcaggtgcccaagccgtctcaagattcctgcgtccagcactatggcaaagctgagaggaagatctatggagaacatggccctctgggggagaatcaagcgtttagcttgctgacatcagtctccgttcccggccatgaccatgagtggggagcgtgagtgcctcaagtatcggctagtgggctcccaggaggaatcgggatcatggggtcatgcagtatgtcatggcatctggcaggagacagtgggctactggagctggcaagcgaactgagatgacgcagagacatgtccagcgtgcgacaccttcatagcttcagccctgcgctgacaggaacactcgtacccctactacacctggcccgcacaatgcctgaagcactgagggctctgcgacacttgccctagctggatcaatagtaccacgtggacgctagacggacaaccgacatcgatcaacagtgcatatgctaagggtcagccaagaatctacaacaaacgatgtcaataacctgccatgaagagcagcaaaaacacacaacccgtaacagagatcgatgccccggggatattcataccggagacggaacaacgccgaaaccccctgcacagacatctgtcacttgtggacactaggatgcacgcacgtgaccagggagaatttggaaaaagaaatatcagagccgccaggcaggagcagcgcgcaagacacgaaagccagattgaatacagacacgcacaggaaacagactatacacgagaccgagaggagaacatagaggaaaaagcgacggacaacaacccctcacaaacgacgagaacaacaga

SEQ ID NO: 610064 - DNA, 117 bp, Homo sapiens
tgctgcgtcggctgcggtgcatggaggcaaggggctgcagagccaggtgcactgtgtgatgatgggagggggctccgtcctgcaggctggaggtggcgtcggcactggacagcagga

SEQ ID NO: 610065 - DNA, 428 bp, Homo sapiens
  misc_feature (207)..(207): n is a, c, g, or t
agagtacaggtatatgtgaagatggtggtagagaaaagcaacacaaaatgttaagggtggcaacaaggagtaattatctgcttccatggggtggagaaattagaacaacttgagtctgacgttcattagggtaagaaaaagtttaaaccagggagatttggaggcaaaggaaaaaaccaatttccatcaacagtggctggttatagncacttgtaactactcaaaaagtcctttctggattcattactccacatttgggcttagcccagaggtgattttttaaggaaaaaatgccttttggcatttttgagcagtgacagcgtataaacagacctttaaaaaacacacacccaaaaagcattactattttcaaatgtccagttgaaaagcaaaaaaaatggtgacacctcagaagtaacaaccttggg

SEQ ID NO: 610066 - DNA, 415 bp, Homo sapiens
  misc_feature (69)..(69): n is a, c, g, or t
ccccggccgcgcgacagacgacagaaggttgggaggctgaggccaggagaaccacgtgaacctgggagnaaccccggaggtggaggttgcagtgagcccgagatcgtgccactgcacttagccccaggtgacagtgtgaaactctgtctcaaacaaaataatacctctctagtgaggtgctcacgcctgtaatcccagcacgggaggccaaggcgggctgatcacttgaggacagaagtttgagaccagcctggccaacacggttaaacgccactactggtggcgggcactagtagtcccagctattcaggaggctgaggcaggagaattgcttgaacccaggaggtggaggttgcagtgagccaagatcatgccactgcactccagtctgggtgacagagcgagacttcctctg

SEQ ID NO: 610067 - DNA, 266 bp, Homo sapiens
agaatcgcttgaactgggatgcagaggttgcaaagagctgagattgtgccactgcactccagcctgggtgacggaatgagactctgccaaaaaaaaaaaaaaaaaaaaaaaaaaagaaaggtccgggcactgtggctcttgcctataatcccttcagttggggaggccagggaaggtggatcaggaggtcaaaatgtgcaaacacctcctttgccaaaatattggtaaaaccccggctctcatattcagttaccgggtcaccgagc

SEQ ID NO: 610068 - DNA, 200 bp, Homo sapiens
cactcggaacccctgtcattttatttattttcttctagtccaattatagttaatatacagggttatattggtttcaagtgtacaatatagggattctatgttccatacattgcacaatgtcatcaggacaggcacactccttaaaccccattccctaattccctatttcccacccacccacccaccttccctctggtgat

SEQ ID NO: 610069 - DNA, 136 bp, Homo sapiens
ccgggtagatctcaaggtgagccatgagacacagagaagtaggagaggtggaagaaaggcaccaccgtggtatgggtcttgttggactccaccaggcggaagccatagggtcgaccagtagccacagcatgaaacg

SEQ ID NO: 610070 - DNA, 145 bp, Homo sapiens
gcgaaatcattgtgagttgactagacgtaatactacgcgacatcatgcacagcgtgagctacatactgtcactagagacacctagatcgatatggatctgctatcttctcctcgctctagtatatcttgcatgacgacatacata

SEQ ID NO: 610071 - DNA, 245 bp, Homo sapiens
  misc_feature (159)..(159): n is a, c, g, or t
  misc_feature (211)..(211): n is a, c, g, or t
gaggatgcctcctacgagcgcagcttgcactagcctaggagtttctcgtccatccttacgtgaagcaattcaacagctcaatagtcaaggtgtactgattagtcgccgtggtgatggaacttatattcagcaattacctgaacaatggccacagcaatngattgtgaatccaatcagtaacctgattgaagaagatccgttataccgtttngatgtgcaagaggcgcgttgggcgctcgtaggag

SEQ ID NO: 610072 - DNA, 406 bp, Homo sapiens
agtacgacaggtctctgatcggcatcactgtggccattcatgagaaaagcagacatattagtccaggcacagtcattcatgtttgtaattccagcactttccaggactttgggaatgcaaggtgggaggatcacttgagctcaggagttctagaccagcttgagcaacatagggaggccctgtctcttctgagccttgaatgattagccaagcgtggtgacccatgcctgtagtcgcatctattatacaggctgaggtgggaggatctcgtgagcccagaaggcagaggttgcagtgagccatgagtacaccgctgcactgcagcttgggtgccacagggagcctctgtctcataaataacatcgtcaaatgaacgtaaaagcctggtcccgaatcctgcagcccg

SEQ ID NO: 610073 - DNA, 171 bp, Homo sapiens
cagcaccacattctcacggatggctctccacaccagagtcagacacaggctctcgtgctagaggaagaaagtgagtggctggaccggcaggacaagcccacatccagcagagactggtgtgatcccacagcttcgcctgttcccggggatgcgtgtcgccatccaccacct

SEQ ID NO: 610074 - DNA, 1692 bp, Homo sapiens
  misc_feature (209)..(209): n is a, c, g, or t
  misc_feature (1432)..(1432): n is a, c, g, or t
tactcgagttttttcctcttattttttagagaagtaaagtcgtttatcatcaaagccatgttgctataccacacggatttgggggttggggagtaggagcttggacgggggtagagggggttgagctggtaggtgtccccagctataggtccagggtgccacggcaggtcaaactcattccttcaaaacaagggtgtaatctatccccnaagacaaagcctggagggcacttgtggaagggagtgtgaccagagcgagtggaaagagggtgtagggtcatatggccgggtgtccacagacatctcgcacaggaaaacttatgcgcgaaatgataccgtagggcgaatcgcagcatcccggtgtaccttacaaagaggcctcgtacaaagatggtccccccaactagaaacccagtgtaagggaatataagggccaacatggaagcctatgcggggattacatctatgacagcctcgtgaaatcgcacctatattataccacgtgagcttttgtttggcaagatcgagtcatcccacaatctatggtgacaagggtccagaaaatgaaaagacctagcgatggtggggccactaaatagaggacctctttactataccgcagcctaacagtggctttacgtggagtacttactaataacccgaaagcccctcttggttgacccccaggagatataactcgcccgttttgtatagagcaaaatggctgttctggtgggaagtggaaagagataggaagtggtggatcgaccccgttgtgtgtaggttccacacggattagactatcgccctagttgcacgctggatgtggtggccaacattgccgagtgggtgtatcatgcaccaccagagaaggtgaaaagaaagaactattctacctcagttacagacacaaggtgaccctatccgatcgagatacgctctcccgaagtagtatatctataggtcgtacaatatgacccgtgagaaaatgtgggagctacccccatgaggtggtgagcaaaaaaaaccattgtacgttgtttaagaagaacatataatacggagcagagggtccaatgaatctctccaatagagtggaatgtggacagaacgacagcaggaacacctattgagataccatctgaaggcggaaatatctataagtgttcactgggtgtgttggctggatgacaaacactgaagtggtataatacgtagacactagtgtggcacaatatttgggtactcaataggcgtagttatatctaatccttagtctaaccccaagatagtttagtcgttgagagtctaccaacaagcggtgaggtagaaagacgattatatgaggcagcggagtaatcatcccaccattaataaaatggagagcgagagcgaccgaggaatggtccacgctagctacggtagatataacnggccccgagtggggctaaacaccacgcggccacattacattgacacgaccatgacggtgacaaaaacgaatagatccgataagacagatgaagtcacgagtgcaagagacagacacggcacgatacacacgctgaatagccgaagagtcagacagaccgatagcagcgaagaccagctaccacatcgacagcactgaacgagacacatcgaaggatcaatcgatactaaagcaacaccaagccaaagcagatgacccata

SEQ ID NO: 610075 - DNA, 692 bp, Homo sapiens
gcatagttttccatggtgtatatgtgccacattttcttaatccagtctatcattgttggacatttggattggttccaagtctttgctattgtgaataatgccgcaataaacatacgtgtgcatgtgtctttatagcagcataatttatagtcatttgggtatatacccagtaatgggatggctgggtcaaatggtatctctagttctagatccctgaggaatcgccacactgacttccacaatggttgaactagtttacagtcccaccaacagtgtaaaagtgttcctatttctccacatcctctccagcacctgttgtttcctgactttgtaatgattgccattctaactggtgtgagatggtatctcatagtggttttgatttgcatttaaacacatttaagtacgtagcccacagacatcataaagccactatacaatcatctacaaaacaatcagctaacatgacaggaacaaaatatcatatatcaacactaacttaaatgtcaatggtctaaatgtcccatttaaaaggcatacagtggcaagttggattaaaacacaagattctacattctgcttgcttcaaaaagaccatcttacatgtcatgacacccataggcttcaagtaaaggtttgagaaaagacccgcatgcaaaccggaaacaagcaccaagaattgtgaaggggct

SEQ ID NO: 610076 - DNA, 289 bp, Homo sapiens
gtgtgtacgacgtaagggcatactgggacatgcactccatgtatattatagtaatattaccaaaaatgggaataatatacagtaataaaagcctgctgcacatataagtgtagtctacatacaggaaaaattacagaagaaactgtatatgagcacattttgtaaatttatcttacccaagaaaatgtacagctacttttctatgtcacatgtccaagacaaaaaaactgaattcatgccatatattgaatattatatgcgcaagtaagagagatgctatactcgtaca

SEQ ID NO: 610077 - DNA, 443 bp, Homo sapiens
  misc_feature (108)..(108): n is a, c, g, or t
gaaaccctccgatgtaaactgatccaagctattgatcacaatgaaggcttcagtttaatatgaccttggacttttctgtttagtacaaaaaccactcgtgtttctctngtgaattcagcacagtgagagttacttctgtaattcttacttataaattgttcactactgtactgatgaaagcccaaaattaaaaactgtgcattaatactaaactgtacagaaccatgaattgtccatcctcatacaagtattgtgaatacattaaagttttactcacaggaattttaagagtttgcatatttcggaaattacctgatgtgtgggtgcatggaaatgttgcttactgtttcttcaatcactggggggaaagactacgatggcctgcccacagtcatttgattatttttccattttgtaaataaaaattttgtaataaaatagtg

SEQ ID NO: 610078 - DNA, 1094 bp, Homo sapiens
  misc_feature (443)..(443): n is a, c, g, or t
  misc_feature (446)..(446): n is a, c, g, or t
  misc_feature (467)..(467): n is a, c, g, or t
  misc_feature (495)..(495): n is a, c, g, or t
  misc_feature (503)..(503): n is a, c, g, or t
  misc_feature (505)..(505): n is a, c, g, or t
  misc_feature (569)..(569): n is a, c, g, or t
  misc_feature (580)..(580): n is a, c, g, or t
  misc_feature (604)..(604): n is a, c, g, or t
  misc_feature (606)..(606): n is a, c, g, or t
  misc_feature (739)..(739): n is a, c, g, or t
  misc_feature (747)..(747): n is a, c, g, or t
tcgaagatggcggaggtgcaggtcctggtgcttgatggtcgcaggtcatctcctggtgcacgcctggacggaccatcagtgggctaaaacagtgtacatgctggagccgcgaatgtgtggatgagtacgtacagctgatgaactggcgatcagagcaattattctggcggaatctatctagcatgacaagcacacgtttgatacgttaccttgtgatcttgtcacgtccgctgtaatgacggtatgataccagccatagcgcgcgttactccgatggaccaccgtactcacgtttcctggtgctccacgccagcaccgcgaatcgttactgtgagcgcgatccagatgacagacgtgctattgcttgcctcgctacgaagaaatcgcatagtgctgatgtgcctagggacgccgacatcgtgagaacgcagtacctcgagagngtntgctttatcgagctggggtanttcgccactagctcgaactctgtaacgnaagccaangnacacaacactagtgcggggcacttgaggtgtgctatgcctctggtattgacacgattgctggangtgactccagnttggcgtgtgcataggagacggcncnttaaccagacggacgatgtttttggcacctatatcttgggaggcggaccgtcggtattcgacgggaagggatttggtccttgacaaaggttacgcacgtgcactgtggatctccgcgcacgtccttgcggagngaggacancgaatggaaacaccgaaggaagaggcgcgaatgaggtccaaggtaacgcagagaacagaaagaacggcgtaggtcattgaagcgtctacgtgaacactattgggccacgagcaatgaaacggtgtggagaagcaaagatctggaccaataccacatggagtgtcgctcaagtaacccgatggggactccttggttcgttgaagcccaaataagagaactgtcagattccgtcatggcgattgggctggccttactcgcatttgttgcccctggaaagtggtacggggacccagggggcagcaaggccagtacagggtgccacaaggcaggccttggggacagtagga

SEQ ID NO: 610079 - DNA, 356 bp, Homo sapiens
cagtcagacatctcttcaaagaatcgagaattgcgtacaaaaacacaccttacatcaattgagaatgcatacatttacaggcgtaaatgcaaaccggttcacaactcaaagccagtcacagaccacggtgttctggccaaagcaatcagctcagacaggaaactgggtcctacggcttggaatttccaaccctgacagacccgcaagacaaaacaactggttcttgccagactctagagaaatcccagaacactcagctctgacacgttaataccaaggggaacagtatacttaaatacaaggtcaaaatcagcaacaagttctacaatccagtgctgacatcagatacaagcttc

SEQ ID NO: 610080 - DNA, 477 bp, Homo sapiens
cacgaggacgacgccgaaggggaccgctcaaggcgtggtcatcggccgcacggtctcagcacttccggccagccgtctcgtcaccgtagcggtctgacacccggcggcccgccgctatccggtgtcggcgtatctgccgtgcagcacgctgagcgcaacgtctgccgccgcgcatcggctctcgagcattctgagcatgtcgtagccgccgcgggaaagagacctgacccgctccaagttgaggatcagcagccggcacagtagcgccttgctcgatgcgtattcgagcaactcggcggtggccgcgtcgttcagttggccttcaaccgacagcaccgcgacatcgaaagtaagccaccgggtggacatttcgaaggccggagacccgccggcgggctgcgggcacgctgtgccccgcggggactgcatcatcctggattgaacgtcggtcatgtcaggctccatctgctggtgcgg

SEQ ID NO: 610081 - DNA, 81 bp, Homo sapiens
aggagtacaagaccagccttggcaacatggtaaaaccctgtctttacaagaaaaaataaaagtaaataaaatacctattta

SEQ ID NO: 610082 - DNA, 144 bp, Homo sapiens
tatggttgaagttgtgttattctcttctttgggaattagctaaatgatgcaataaacctgtttgtttcttttttatttttttttaaaaatcatcaaaataatttatggcagccattggccgactcgatttaagccagttggacc

SEQ ID NO: 610083 - DNA, 503 bp, Homo sapiens
  misc_feature (1)..(1): n is a, c, g, or t
  misc_feature (12)..(12): n is a, c, g, or t
  misc_feature (18)..(18): n is a, c, g, or t
  misc_feature (27)..(27): n is a, c, g, or t
  misc_feature (55)..(55): n is a, c, g, or t
  misc_feature (257)..(257): n is a, c, g, or t
  misc_feature (322)..(322): n is a, c, g, or t
  misc_feature (345)..(345): n is a, c, g, or t
  misc_feature (401)..(401): n is a, c, g, or t
  misc_feature (409)..(409): n is a, c, g, or t
  misc_feature (431)..(431): n is a, c, g, or t
  misc_feature (444)..(444): n is a, c, g, or t
  misc_feature (454)..(454): n is a, c, g, or t
  misc_feature (465)..(465): n is a, c, g, or t
nccccaaaattnccaatncccaaatgnattaaaatccgcaaaatataattgttgnacaaaataattttaaaaattctttaaaattctttatttatattttttaaaggagatttgagaaacataaaaacacaacagagtcacttcatagtaccattttagtacaataaaacaggaaataataacatactttttttatttttattttttattgagacagggtctcactttgtcacccgggctggagtgcagtggtacantctcagctcactccaacctccgcctcctggggctcaagtgttaatttttgtatttttactacagncagggtttcctatgttggccggnaggtctccaactcctaacctcaagtgatccgcccacttagcctctcaagtcagggnttcaggtntgagcactgtgcccggcttctnagtccattttaanctgagggttnaattgtttagntgtttggaagtcttatcatttttgcattttgcaatttt

SEQ ID NO: 610084 - DNA, 618 bp, Homo sapiens
  misc_feature (601)..(601): n is a, c, g, or t
aaaaggcattcgatagggataatctatttattacctcagaagttttatcttcgcaggatgtttgtgagcctattaccactccagcttagcccccaccccccaattaggagggcactggcccccaacaggcatcaccccgttaaatcccctagaagtcccactcctaaacacatccgtattactcgcatcaggagtatcaatcacctgagctcaccatagtctaatagaaaacaaccgaaaccaaataattcaagcactgcttattacaattttactgggtctctattttaccctcctacaagcctcagaggtacttcgatgtctccctatcacacattttcagacaggcaatttaacggtctcaaacattttattgatagccacagcgcttaccacaggactttcactgtcacttattaggcctcaatttctccctcacatatcgtgctttcatcccgccaacataagtattttcacttatactatccaaaacaatcaccttgtggtcttctgaacgcccgcccgcctagattacgtggccattcttagtaagatgtgggtattgactactcttcttgatatgtcttcccatttattgatncgagaggtaattaaaat

SEQ ID NO: 610085 - DNA, 330 bp, Homo sapiens
  misc_feature (12)..(12): n is a, c, g, or t
  misc_feature (63)..(63): n is a, c, g, or t
  misc_feature (76)..(76): n is a, c, g, or t
  misc_feature (102)..(102): n is a, c, g, or t
  misc_feature (111)..(112): n is a, c, g, or t
  misc_feature (132)..(132): n is a, c, g, or t
  misc_feature (137)..(137): n is a, c, g, or t
  misc_feature (142)..(142): n is a, c, g, or t
  misc_feature (158)..(158): n is a, c, g, or t
  misc_feature (161)..(163): n is a, c, g, or t
  misc_feature (167)..(167): n is a, c, g, or t
  misc_feature (169)..(169): n is a, c, g, or t
  misc_feature (178)..(180): n is a, c, g, or t
  misc_feature (182)..(183): n is a, c, g, or t
  misc_feature (190)..(190): n is a, c, g, or t
  misc_feature (192)..(192): n is a, c, g, or t
  misc_feature (197)..(197): n is a, c, g, or t
  misc_feature (201)..(201): n is a, c, g, or t
  misc_feature (203)..(203): n is a, c, g, or t
  misc_feature (216)..(216): n is a, c, g, or t
  misc_feature (220)..(220): n is a, c, g, or t
  misc_feature (231)..(231): n is a, c, g, or t
  misc_feature (237)..(237): n is a, c, g, or t
  misc_feature (250)..(251): n is a, c, g, or t
  misc_feature (253)..(253): n is a, c, g, or t
  misc_feature (261)..(261): n is a, c, g, or t
  misc_feature (268)..(268): n is a, c, g, or t
  misc_feature (272)..(272): n is a, c, g, or t
  misc_feature (286)..(286): n is a, c, g, or t
  misc_feature (294)..(294): n is a, c, g, or t
  misc_feature (300)..(301): n is a, c, g, or t
  misc_feature (304)..(304): n is a, c, g, or t
  misc_feature (312)..(312): n is a, c, g, or t
  misc_feature (327)..(327): n is a, c, g, or t
tttctttctgtntattttgttaatattttttttttttgccaaaccttgtatccgaagtcaacnatcactgcgattnggccatgatttgacaaaattagactncgaatgagnntccctgataactgtgcagcnaggcnctggngagtgggtatgggggnggnnngggngnggggggggnnngnngtttacncnagtgngggngncaaaagtgaaacnatgngaatgaatgtnagagcnccttcttaaatgnntngggcggcngtcagcngagncgggtgacagtgtncaactacngggagnntangccctccnttttttggtgctatncac

SEQ ID NO: 610086 - DNA, 142 bp, Homo sapiens
cagcgcggggttgcttatgagtgaaaatggggagcaggatgctgacaatgaggtacacgatagaagaggaagaatgtggggtaggaagagtggaggaggacagaagaaggtaatagttaggaagaggatggcgattaagatc

SEQ ID NO: 610087 - DNA, 860 bp, Homo sapiens
  misc_feature (86)..(86): n is a, c, g, or t
gaagttgaagctcggagctcggtgattaacctatgtagacgacgaccccccatggatcccatagataggcactgtctgctcccgtnccttttcgactctctcggccgagcaatgtggactacccgctgtacgacttcagatacagagcttacctcattatactaggttcgtacctatactcaggacagactttcatggctgtatttggcacacgagatagatcgtcgcatggttattcgactgtataactcgacaaattgagtttagatcatggaaagcaagagtgatccattggaggtacgagtattgcagaggaatgaatgcattttcaggtttgatggaaaaatcaataaaggcacagagtatgggatagcagcatgggaaacgagcgatatcgagctataacatcagcatattatcgtggagctgtaggtgccgttattggtttatgacattgctaaacatctcacatatgaaaatgtatgagcgatggttgaaaagaagtgagagatcatgctgatagtaacattgttatcatgcttgtgggcaataagactgatctacgtcatctcagggcagttcctaccaggatgacgcaagagctttgcagaaaagaatggttggtcattcattgaaacttcggccctagatctacaaatgtagaagctgcttttcagacaattttaacagagattgaccgcatttgtttctcagaagcaaaatgtcagacagatgcgaaaatgaccgtgtctccaagcaacaatgtggttcctattcatgttcccagcaacactggaaaacgacggcaaagtggcagtggttgtcaggaacatctaaggcgttctgcttttcccctagaa

SEQ ID NO: 610088 - DNA, 1569 bp, Homo sapiens
  misc_feature (457)..(457): n is a, c, g, or t
  misc_feature (820)..(820): n is a, c, g, or t
gcgtgagcgggggctgcctgcacgctcatctacccttactctctgtgtatatcgggatggtgggaacactatccacattgcccttgcctcatagtagatgtgcgtatactctccccggatagacccgtatgcaagggtcctcccagtgtgtgagtgagaggactcaaggaagaattcgtagaggactgggggatcgctgcctgacctggtcatgttgaaccagccactgcctgtcgcataccgatgcccgaaatcctacgacatgtgggatgacccgatcattgtgcagcaaaatgactagttctcctacccacgtcagtgcacccccctcacctcgtgtgaccacatgtaaccttgagactctagagtcaccttgcgcatcgatttggcgaatagcaaaaagcatcgcatcttcggcaacgcaggggacgaacacgctgcgcattgaattgtcccntctagcgaatcagtgcttttgatcgctagatgctccttgcgcaagcggaaatcgtcaatcgcgcggacccttgagagggttctctcccgttctcgaaggctacactgtttggactttggactgaacgccgcaagggaagcacttcgagtgagaattacccacattcgatttgtttggtgccccccgacttagaggtgcattcgcaagttcgcgcgcgaatttgctgacattaacccccccgccttaaaatagacacccgcggtagaatcgtcgaaccggtggagtctgaacgctttgaggccttcaaagttggcccatatcgtgtcccccccgaaaggaggcccatcactccgtcatagggtnacagcctacgagaggaatggagtcctcccccgcaattctttgtggaaattcgaaaccgtagttgggaggcccatacattgtcgaattccgtctgatgggcaagatacgtgcccgagaggcttgggtcccagggtcgctccacaattggttatattcgcgcacaaattggcccacgcaaatttgccgaggaacagtaccttttgtggagacagatacgtcccactgagtgctccttctgtgtccctacttcggttagagaggagattggttagcggagaacgcccttatgttgcgaagaccatccacgggaacctcgtaacatccccaactcggtgaattcccatgtcttgaagtgtcgtccggtcctagctccttaagacttgtttcaagcacagctataatcggccgacccgatgacgggccttggatgtgcatgcaccgaagtaagaggcggcgtatgtccccctctcatttgtgtgcggggttcagtagcactctgtacagtgggacgcaagaggcttctgtcccatggcttgtggcgcagtgtgcaccaaattccacggtgagggcggccattacctgacgttcacccaggggtcccatcgaaacctgtgaatggtgtcccgtcgatggagaggtgggctttaacacgcggtgggtggtggtcctggggtcgccgaccttgagggagacgtggtagtacccccggtaaccagagaaagtccagaggcgttgtggtcccctgcgag

SEQ ID NO: 610089 - DNA, 442 bp, Homo sapiens
gatttcggccttttgggccggggcattaaaccattttggcctggaaataaaaaaaaaaaaaaaaaaaaaaaaaaaaaaaaaagagaaaaaaaaaaaaaaaaaacctggggggccccttgggcccagcggattttagatttgggcaggtttttgcttggggccgaatttggggctccttgggccaattccccctttgggggggcgttttccatttcctgggccgcctttttccaaggtggggcttggaaaacccttggggttccccattttaatccctttgcggacattccccttttggccggttggggtaataccaaaagggcccgacccggtggcctttcccaacatttggccaccctgatggggaatgggaatttgtaggggttaatttttgggtaatggggaaattcctttttaattcaaaggatttgcccggggtggg

SEQ ID NO: 610090 - DNA, 473 bp, Homo sapiens
  misc_feature (59)..(59): n is a, c, g, or t
  misc_feature (61)..(61): n is a, c, g, or t
gagtggcggaggcttcaggggtggagcaaatttggacaagagaaggatgctcctcatcnancacttgattttatcgctacctgttctctgccatttcttcagtctccctcaactccagatgaccctggcctgcttctgcacttccctgcatgtgctttctttggacacttcctgcttcctctccctcccagtgtgtaaagtgctggatggcaggaacagagtttttcatcttttatcatcatccaccaacaccttccttcctatgaccacacacacacacacacacacacactcacatacacacagcatctagcaccatgcctcgctcacctaagacagtcaatacttgtgtgttgaacaaatgaagcaaaaggtcctgagttcttatctcagtttaacaatttcacaggttcttttgggtatcatttctcaggtactgtgcacatccaccgccccgaaaagcatcccagacc

SEQ ID NO: 610091 - DNA, 246 bp, Homo sapiens
gtagacccatcatgggaccagcatcttcaccacagtgaaaatgatctcttgataagtcagttaaaggaatctctcaaggtgcgtagaattcgggttcgcaagaaagaccttgtctccttttttagtttcatttttaaaacatgtccatggttcccccaggaagggtctattgactcccgtgttaggggacgtgttagtgattgtctgaacgagtattaccgtgtttttggtccgagcggaccggtt

SEQ ID NO: 610092 - DNA, 555 bp, Homo sapiens
  misc_feature (187)..(187): n is a, c, g, or t
  misc_feature (193)..(193): n is a, c, g, or t
  misc_feature (318)..(318): n is a, c, g, or t
agtcgtgattgtcacttgttcaggaggttgacggaggatctgccaagccaaaggccgcattggacacagagatgggatgtgagtgaggtgggcagtctccctgcctccgtgagctcaccatctgggttggcctgtggtcggggggccctgtggggttgtggggtagggtcagaatgccggcttctgngggtgngggtgcttcttccttctgaggaggctaaagctctctctctgatttcattcacgtgccggtccacaaaggaaagactgtagtttcaaatccaggtgctatggtgtcttgtaccgagcgagggctgncactcagctgcggcagcgtgttgccgagtgacagtgcagccctctcacggcgaacccagggggtaccaagcagtgtcagacactcttggcacatgaaacaaaaccatttttccagctcaggcgtgacccgaggagtgagtatggcttttctttgggtccccgcagtaggggctcgtgtccggcagcgtgtctcattgcctgtgctgtcttacagatcgtgacgtcgctttccaccag

SEQ ID NO: 610093 - DNA, 878 bp, Homo sapiens
taaaacaaggaaaagggttaacttcccccctacgggggataaaaatcaaaactacgggccaggcgcgggggctcgggccggtagtcccagcacttggggaggccgagggggggcggatcgccgtgaggctcaggagttggaaaccagccgggccgacgttggtgaaaccccggtctcgtgctaagaacacaaaggttagccaggcagtgggggccggacaccggtggaccccagctacctcaggagggtgaggcaggagggctcactgggaccccgaaggtggaggtggccaggggagccgagatctgggtcatggcactcacagccggggtgacaagcagcgaaactccatctcgaaaaataaaataaaaatgccacaaaaaaaaactcttgttgcgcgcccctttggaccccacaagaaaaggtctttctaaaacacacctcttgtggggggggcgccgggccaccccaagtgtgggaccggcacacaggtggcgccaccaagcgggtccctaaaaacaacccggggcacacgaacccacggtggggtgcgtgtcccccccataaaaaaaaccgccgcgggtggcacagcgcttgtctcgtcgaaccaaccccgcaagaggctgagggaggcccgaggggtctccacaccaaggggaggacacaggggagtccgtaaaaaataagacccgaggcggggggaaggagacgagtgagaaagacgcaagcaacacagacggcaagagacacgagactgatgcgcagcccaaacagacgaacacgagagaacacgaggacaagacccacacgacgagaaagcaacacacaaacgcagaagagtgagcagacacagacaagaagagagagagacacacgcg

SEQ ID NO: 610094 - DNA, 331 bp, Homo sapiens
tggaggcagggtctctccgtagcccagcctggactacagtggcaagatcacggctcactgcagtctcgaattcttagaatcaggtgatcctcctgcctcagcctcccgagcagctgggactaccagggcataccaccacgcctggctaatttttgtactttttgtagagacggggtttcatcatgttgctcaggctggtctcgaactccttagctcaagcaatctgcccgccttggcctttcaaagtgctgggattacaggtgtgaaccaccgtgcctggctgactacagattttttaatagcacgttggttctttgaactgaccactgtg

SEQ ID NO: 610095 - DNA, 123 bp, Homo sapiens
tttatttgcattctcagccaccccatcaagatttttcacataaagattcacaccctggtatctggtgatcctatcttgtttcatctgttcaaatttgcgcttaagttccgcctgccacaacct

SEQ ID NO: 610096 - DNA, 849 bp, Homo sapiens
  misc_feature (564)..(564): n is a, c, g, or t
gggttccccccccccttttgtcccgccctttccttacgggcttttctctctttgggccccccgcacatgggttgccctcccccgcagccgctccttttatgggcgtgggcgccgaccacgggacaagattacacacaggggcgcgtgtttcctcctcggggcactaatctccggccggcccccacccccccccgttcctcaagagcgccttttttttcgcgggaggatttcttgtttttttccgcccccccgcggggttttttttttcccaacaagaatttgtgggcggtttccaccgcccgccggtctccccctcgccccctcctattgggggggcgctgtcgcccccccacgagtgtctgtcccccccggtattccccccttagggtcgcccccttgtccttgaccacacccgctgtgtttttgcgctcctcagggggggtctcttacctcccccggggctcctccccctgtgttttaaagtagccccccccgccccccctaatgttctacgccgcgctgttgtcacacacttttctgcggtgtttttttgttctcctcctncccagcctccgcgccgagtcttttggtggttctccctccccctctttcgcggcgggggttgttcgtgtcgacccactctctttttgggacgaccagcggtgttccccggcgttttcctacctcactatttgggtgggtcatcgcttccccgcccatgtttcgtttctccgcgccccattttctcccttaacccccaacacacccttgtttaaccccccccctttccgcccttttttaaatggttttttttttttttttttttccccttttttttggggggtttta

SEQ ID NO: 610097 - DNA, 1312 bp, Homo sapiens
ggttgtatgaagtttggtcccccccgtgttggtgtcccccttggggcgcccccttggcgaccgaatttgtcgggggggcgagttccctggtggcccctcgttgtgcgccccgcggtgtgtgcacgggttgcgacctggggaggagttttctgtggtggaacacactcggccgcctgcttcgccccccacagtgagtgggtcgtgcgcgcggaccatcgtatggggggcgctctgtggttagccaactgttgtcgttctgttgtggcctctttgggggccaaggggggcccttcctcggtggtgtccctacgcctttctgaggggcccaccagttttaatgctttggcggctcctcttctgtgaggggggatatttttccctcccccccccgtgattgttttctgcccccctctgttgagacacacgcacttcgtggttggacgcgtcggtgtgtgtgttttggtctcccccactgggggtgagcgcaacacgcccgcgctggagggagttggtgaggttgtgcgcgcccccgggggccatggtcgcccccccgcagcctgctttccaccgctgctggtgtacccacggggcctcgctgtattcccctccaggcggtggagagagacagagggagtgtactcccggtacgtctctctctctcttccacgcggggttaatgaacgcgctctgtatgtacgcgtcggactctcctcacactgcatgggtacagactaggggttttctgcccggcgacggttctctcctgtgggcgccgcctccgcacggttctgttgtctatgtgaacaactcacccccccggttgtgttttcgtcacagtctctctctctctcccgcgacgtaacaaaatatgtagagtgccggcctgcccgcgccccccaccaagttttgttgtctacagggagttaagatatgccgcgtatatatatctcttctctcgcacagatgtctccccctctgtcccatcagtggtcacaggagctaacaagattttgtcttccaacacccgttttgtgcaccagcagatgagagtgttcttccacttctcatcactccttttatctacaaaatcaaagatgtatcttatcgctcgcctccttgtagcaaaaagaatagatgatgtcttctaccccctgctcgccccttcattatagcaccaggatacctttgaatttctttttttccgctcacaacaagaaagagaagtctggtgcctccccccccccccccccgggggaaaagatccccacacctttttttttttcggggaaaaaaacctttttttctcctttta

SEQ ID NO: 610098 - DNA, 199 bp, Homo sapiens
acactaatgtaatgctcgtctacttcttagagcctccattgaatatgatggggtaaggtatgagagaagggaaagcattctataattaggtctcagtcttttagtgagactatgcccctggactgtgaactttgcaagtgtgtctcagttttttttctctcccatttagggtgacacagcatggcatgatgggcgggtc

SEQ ID NO: 610099 - DNA, 249 bp, Homo sapiens
  misc_feature (136)..(136): n is a, c, g, or t
  misc_feature (240)..(240): n is a, c, g, or t
gtctggacagggcacaggtgaccgagacaagtcttatttaactgatttcacaagaagggtccgagttttattagacaacccatgtcaaggtacaaaatgattattgtttttatcagccatattctattagccaagngccacctgtcactatttttctatcctggaggacatccctgggctctcagttgctaggtgggcccctgaagaaatgaatgtcctcaaatcgagaaaaaaacacanagagattcc

SEQ ID NO: 610100 - DNA, 343 bp, Homo sapiens
gcgtacttgcagctctctctgatggtgtccattcttattcaaaagcgaattcattatttttctctcttttgctctacgggattaagtgttgattcatcaacatcgaaccaatagttgatcaaagtatagaatatcatcaggtcttacaaatggaagatttccagatggccggtcattaacacttttcatagttcgatcttcagtttgcatgtggaaacgagtcataccaccacaaaggtgatggagtagctgtcagttttcgagtctgggttcgaataggaacataaacagctggaggaggaagtaccttatatccttctgggaacatagcatctaatccctg

SEQ ID NO: 610101 - DNA, 425 bp, Homo sapiens
  misc_feature (110)..(110): n is a, c, g, or t
taaaaaaaaaggtttttaaattgtaggagcaggatggaaatactttgctgcccctcccattttttaggatgggcccccaggagaatgaggtttttctgggccctcattgntgcttattggaccccccctcccctgcacatggggcagaccggggtggagggtggccttggctgtgttcgtccccacaaaaaagctttgggccgcctctccctgttcccttaagggggatgaagggcgatgcctcgcccgaggctttggggttttgccctgcatgctggggctgctcctactttttgtcccccccctccccccactgtggtccggctttgggaaagtggtgaattgccctgccccaactcggagcggagcagggtaggggccgtgttcagctttataaccctttataaaaagggggtttttcccga

SEQ ID NO: 610102 - DNA, 346 bp, Homo sapiens
ttccagaatagcattccacaatgggtaaaaaaaaaaagggtagaaacatcctcaaatgtgccatcgggtggatgaatagagaaatgtgatatgtcctatacaatgggatattactcagcaataaaaagaaattaaatactgacagatgttacatgtaaatgaaaggaaccttgaaaactttgttgtaagtgaaagaagccagtcacaaaagaccacatagtaggctgggtatgatggctcaggcctgcagtcacagcactttgggagccaaggcaggaggagcccaggtgttcacttgagcccaggaatttgagatcagcctgggcaacataatgaagccctgtca

SEQ ID NO: 610103 - DNA, 356 bp, Homo sapiens
caatgctttgaaggaataaacgaaatgtttaaacagggtccatccctttgaagaaaaagttgggcaaaataatcagccttgctccctcttttatttaatatttggggactgattatatccccatggaagtagaaggtaaggagtttaggaaaatactagaatttactctgcttaccttcttgtttaagggtttaccccgtttggttcaattataaacctttggcctttttctatgttatttttattttgtatgaataccttatcccccctatttatttttgttacctttattacttatgttattttgttatgcctttcccaccccctttttaaataaagtgtttttggaactttta

SEQ ID NO: 610104 - DNA, 128 bp, Homo sapiens
ttattgccaccattgcagcgaatctctctttggcaagaagtacatactgcgggagcgagagcccctactgcgtgtttgtgcttctgagaccctgttcgccaacacctgcgcagtagtgtgggaacgcc

SEQ ID NO: 610105 - DNA, 246 bp, Homo sapiens
ccccccaaaattttttgggatcccgcgggtttccccccggccccccttaggggcccccttccccagaatccccgccccatttttttgaggggtttccggggggccagaaaaaagcggcccccaaaaaacccccaaaggtatggggccccggggggttttggttcctttttcccccaaaagggaggggttttttttttttttttttttggtatcccccgggttttttttaaggttttttttttccca

SEQ ID NO: 610106 - DNA, 296 bp, Homo sapiens
taataatagtaaccctgctctacataggaggactgcctccagatcaggatgatgccaaaggtgagtaataatgcaagaaataacaaaaaatgaaagctcatcatgccaacgctcatagcaataacagcagctgataaagctctatttctacatacgactagcctactcctcctcactgactatgtacccatttcaccaagaacataaaaataaaatgacaatgcgaacacacaaaagcaaataaaattactgcccacaatagttgcctgatcaacattagtcctacctataacacc

SEQ ID NO: 610107 - DNA, 408 bp, Homo sapiens
  misc_feature (12)..(12): n is a, c, g, or t
  misc_feature (127)..(127): n is a, c, g, or t
gcgtctgtctgntgtgggggaggttgtggcttaatgggggagagggaccaagaacaggaaattagccaatgaatgtcctgactctggttctgcccctcctgtcccctctgctttcattcctgctctngctcacaaactcctacacatcctacaagaacccggcaggcccaggtcatctatctgcgggtgggctttgatagaatactgaccttcgcagattaacggagaactggctccccttggggggggcctgggaagctccataggtccccactgagggctttccttcccctgtggaatgcttctccctcttctgtgtctgccattgtcattcaaatcttccagttaaattccaaaggcatcttcaaggtgccggtttgcatcggcagggcttggggttgaggcacc

SEQ ID NO: 610108 - DNA, 537 bp, Homo sapiens
  misc_feature (470)..(470): n is a, c, g, or t
tcacactagaagatgtggtcagagatggaccccaggctgctgaattttgtgactttgggaccataaactcttttgagaatcttatggaagttatggatcctttctttctcaccctcacatacacatgccattcagacttgcatatattttagatggtttctcaaacactagaatttcaaaagtctaaaccatcccaatacctttatatcatcaccagggttttagctctataggacttctctggagagcagtggagtgtgctcagtgacctgcaaaccgaacctgctccccagggagcccaaagttctggagtcagaagatctgggttctactccaggccgtcgcatatcttagctttgtgaccttgagtgagtccttcaatttctctgaccttaattttctttgtctgttaaatggggttggtattctctgtccccaggagctgtgaactaacatttataaagtcattntgcaaattgtgaaattacaaacaaatctaatatattatttctccctgctaggcctggagcaggtgag

SEQ ID NO: 610109 - DNA, 108 bp, Homo sapiens
  misc_feature (35)..(35): n is a, c, g, or t
gcgtggtgaagcgctacggacccatggaggagccnctggtgatagagaaggacctgccccactatttctagctccacaagtgtgtggccccgtcccgaaactgagaca

SEQ ID NO: 610110 - DNA, 150 bp, Homo sapiens
  misc_feature (145)..(145): n is a, c, g, or t
gctcgcgcgcctgcaggtcgagacttccaggttgtgatgaacctatgaatcgcaccactgcactccgccctgggcaacagagtaagaccctgctctcgaaaaaaaaaaccaaaaaacccaacctcctaggtttacaaaaagcgtnaaaat

SEQ ID NO: 610111 - DNA, 200 bp, Homo sapiens
tggtcttgaggacgcagaggttacaaaccacagtgctgggtcaggcccaagtaggacttgatggtcataaccagaggactgaagggacagcttgtcctggcaccatactggagaagtgcttgttgtgtttgggggagaaggggtgcattgcccaagtcaaggctgaaggaggaacgcttgtgccctggagcctgttccca

SEQ ID NO: 610112 - DNA, 162 bp, Homo sapiens
ggtttggtttgtgcagatgctgttagtttcactttgtctacaaatcctaacaacaaatcccatttcaggttcagatgattcgacagataagcagtgaactttcagggcctgagattgttgaagaaatgtttcagtaaaatccacatctgtgacatgcaaata

SEQ ID NO: 610113 - DNA, 801 bp, Homo sapiens
  misc_feature (5)..(5): n is a, c, g, or t
  misc_feature (109)..(109): n is a, c, g, or t
  misc_feature (140)..(140): n is a, c, g, or t
  misc_feature (147)..(147): n is a, c, g, or t
  misc_feature (163)..(163): n is a, c, g, or t
  misc_feature (169)..(169): n is a, c, g, or t
  misc_feature (171)..(171): n is a, c, g, or t
  misc_feature (184)..(184): n is a, c, g, or t
  misc_feature (190)..(190): n is a, c, g, or t
  misc_feature (202)..(202): n is a, c, g, or t
  misc_feature (222)..(223): n is a, c, g, or t
  misc_feature (226)..(226): n is a, c, g, or t
  misc_feature (228)..(228): n is a, c, g, or t
  misc_feature (236)..(236): n is a, c, g, or t
  misc_feature (241)..(241): n is a, c, g, or t
  misc_feature (243)..(244): n is a, c, g, or t
  misc_feature (246)..(246): n is a, c, g, or t
  misc_feature (248)..(248): n is a, c, g, or t
  misc_feature (261)..(261): n is a, c, g, or t
  misc_feature (269)..(269): n is a, c, g, or t
  misc_feature (271)..(271): n is a, c, g, or t
  misc_feature (294)..(294): n is a, c, g, or t
  misc_feature (296)..(298): n is a, c, g, or t
  misc_feature (302)..(302): n is a, c, g, or t
  misc_feature (304)..(304): n is a, c, g, or t
  misc_feature (307)..(307): n is a, c, g, or t
  misc_feature (330)..(330): n is a, c, g, or t
  misc_feature (332)..(332): n is a, c, g, or t
  misc_feature (337)..(338): n is a, c, g, or t
  misc_feature (340)..(341): n is a, c, g, or t
  misc_feature (349)..(349): n is a, c, g, or t
  misc_feature (364)..(364): n is a, c, g, or t
  misc_feature (370)..(370): n is a, c, g, or t
  misc_feature (373)..(373): n is a, c, g, or t
  misc_feature (378)..(378): n is a, c, g, or t
  misc_feature (390)..(390): n is a, c, g, or t
  misc_feature (392)..(393): n is a, c, g, or t
  misc_feature (396)..(397): n is a, c, g, or t
  misc_feature (399)..(399): n is a, c, g, or t
  misc_feature (401)..(402): n is a, c, g, or t
  misc_feature (405)..(405): n is a, c, g, or t
  misc_feature (413)..(413): n is a, c, g, or t
  misc_feature (415)..(415): n is a, c, g, or t
  misc_feature (417)..(417): n is a, c, g, or t
  misc_feature (419)..(422): n is a, c, g, or t
  misc_feature (424)..(426): n is a, c, g, or t
  misc_feature (428)..(428): n is a, c, g, or t
  misc_feature (435)..(435): n is a, c, g, or t
  misc_feature (444)..(444): n is a, c, g, or t
  misc_feature (446)..(446): n is a, c, g, or t
  misc_feature (451)..(451): n is a, c, g, or t
  misc_feature (458)..(459): n is a, c, g, or t
  misc_feature (463)..(465): n is a, c, g, or t
  misc_feature (467)..(467): n is a, c, g, or t
  misc_feature (474)..(477): n is a, c, g, or t
  misc_feature (479)..(480): n is a, c, g, or t
  misc_feature (483)..(483): n is a, c, g, or t
  misc_feature (486)..(486): n is a, c, g, or t
  misc_feature (488)..(488): n is a, c, g, or t
  misc_feature (493)..(495): n is a, c, g, or t
  misc_feature (497)..(497): n is a, c, g, or t
  misc_feature (502)..(502): n is a, c, g, or t
  misc_feature (506)..(506): n is a, c, g, or t
  misc_feature (508)..(508): n is a, c, g, or t
  misc_feature (510)..(510): n is a, c, g, or t
  misc_feature (512)..(513): n is a, c, g, or t
  misc_feature (517)..(517): n is a, c, g, or t
  misc_feature (530)..(530): n is a, c, g, or t
  misc_feature (535)..(535): n is a, c, g, or t
  misc_feature (542)..(542): n is a, c, g, or t
  misc_feature (545)..(545): n is a, c, g, or t
  misc_feature (552)..(552): n is a, c, g, or t
  misc_feature (554)..(554): n is a, c, g, or t
  misc_feature (573)..(575): n is a, c, g, or t
  misc_feature (588)..(588): n is a, c, g, or t
  misc_feature (593)..(594): n is a, c, g, or t
  misc_feature (605)..(605): n is a, c, g, or t
  misc_feature (798)..(798): n is a, c, g, or t
acaanatggccttcatggattaaaaaaaggaatcaaaccacaaggaaaaagaaattgctggttttcactcaagattaatctagaaaagtgtactgactactggaataanagtttacccctgggttgtaccacagaatganaaattcnacaagattatacaacncttttncnacaagattacacnacccanattgtttttatnccattccggaattagaaatnnacntnctaaatancattntnntncnccaaaaaaatccncttaccancnaacctggatatggacaaaaatancnnnattncngtnaaggtctatctccctagtaaaantnaatanntnncccttgantttattcaaggcaancaccancanccgtngaacacccaggnannccnncncnnccnggcccctncncncnnnncnnntntcccccnccgtccccncngggcngccaccnngggnnncncccggcnnnncnnccntcncntcccnnncnccccntttncntntnnggcnaccgtggcccccnggtcnccattcntcnacccagncnacggcagaagccgcaccannncccggcccccccncccannacgccgccccngccaggcgcggcggcccacgcctgccaccccagcacttcgggaggccaaggcggacggatcacaaggtcaggtgtttgagaccagcctggccagcatggtgaaaccccgtctctactaaaaatacaaaaaattagccgggcatggtggcctgcacctgtaatcccagctacttgggaggctgagtcagaattnctt

SEQ ID NO: 610114 - DNA, 409 bp, Homo sapiens
gatgtccagccaccaggtagacaaattatgtgtgtaatttttttttcgtcaactggactgggccgggcagggggctcggggtgcataattctaggtgagtcggtgagggtgcttccggatatgatgaaggtttgaatctatggactcagtagcgtagatggccctcccaaggtggatgggcctcatccaatcccctgagagcctgaagagaacaaaagaaatggatctcttcctggcctggatggcctggaatggtacatccatcttctccagcttagttctcagaccttcagatccagatgggaatctacatcatcggctcggcagtgttctcaggccttcggacggggactacataacaccattgggttgcctggggttcccagctggctcaagaggggtaccgagc

SEQ ID NO: 610115 - DNA, 147 bp, Homo sapiens
cccccccggccggaaaaggggggggaggccccccctcttttaaggggggtccagggcggctttttgcccttgtttgggggccccgcccacccccggggttgggggccctgtcctgggtggggggaagggtttacccttgttttccca

SEQ ID NO: 610116 - DNA, 270 bp, Homo sapiens
  misc_feature (241)..(241): n is a, c, g, or t
  misc_feature (243)..(243): n is a, c, g, or t
  misc_feature (245)..(245): n is a, c, g, or t
aggaaggagggagatgacaggagggttgaggtagatgggtggaggcaggcgtcgacgatgacaggagggttgaaggagatgggtggaggaaggagggagatgacaggagggttgagggagatgggtggagggaatagggcagaggaaggagggagatgggaggaggtaaatgggagatgggtggagggaggagggagatgacaggagggtcgagggggatgggtggtcgacgcggccgcgnantnagtagtagtagtagtacgcggccgc

SEQ ID NO: 610117 - DNA, 370 bp, Homo sapiens
  misc_feature (341)..(341): n is a, c, g, or t
  misc_feature (343)..(343): n is a, c, g, or t
  misc_feature (345)..(345): n is a, c, g, or t
aggaaggagggagatgacaggagggttgaggtagatgggtggaggcaggcgtcgacgatgacaggagggttgaaggagatgggtggaggaaggagggagatgacaggagggttgagggagatgggtggagggaatagggcagaggaaggagggagatgggagatgacaggagggttgaaggagatgggtggaggaaggagggagatgacaggggggttgagggagatgggtggagggaggagggagatgggtggagagttgagaggtaaatgggagatgggtggagggaggagggagatgacaggagggtcgagggggatgggtggtcgacgcggccgcgnantnagtagtagtagtagtacgcggccgc

SEQ ID NO: 610118 - DNA, 319 bp, Homo sapiens
tctcgaggatccccccgtattgcacgcggacatcccagaagtggttgtttcccttgtcattgtgacgaaagcttgggtcctaagcatccaggcgtcaggtaaaaacatgggctgctattgcagaataccagcgtgcattgcaggagaacgtcgctatggaacctgcatctaccagggaagactctgggcattctgctgctgagcttgcagaagaagaaaaatgagctcaaaattggggtagagcagaaggtacaggagtaatagcaattccctgtagctctcaaagcaaattttgagctcctttctctttttctgcaag

SEQ ID NO: 610119 - DNA, 100 bp, Homo sapiens
aaagctccaatgggcgagagaatccaataagaagagaactctgtaaactacaggtgacaaacaatatcctagcaaaaaagcaggggcgggcgaaaccgcg

SEQ ID NO: 610120 - DNA, 197 bp, Homo sapiens
gggaggttctctcaactttattttctaaaacttttaacatatgtacaatttctgctattttaattgaataaaattgagctcttcctgttctttgaatatcctttttccagtctcctgttctttgaatatcctttttccagtctcctgttctgtccattataacaatatctctctcatctctgaggatatctagagag

SEQ ID NO: 610121 - DNA, 342 bp, Homo sapiens
  misc_feature (160)..(160): n is a, c, g, or t
gggattcgttggattgatggtggttttaagcccacagaagttccctttttcaattgtgtgaagaagtgtgttctgatcaggtattttataatgcttgttgatttatgggaaatttaggggaaagtaatggggaagattagaaagaattagccaacagggntacagttgatatttaaaagatccatttaaaacaaggtgatagtgttttgttaagcagtacattttgtgcatgcaaaaatgaattcacccctcccacctcttttttcaattaatggaaaattgttaagggaagttgatacagagagacaacttgctcctttccatcagctttataataaactg

SEQ ID NO: 610122 - DNA, 591 bp, Homo sapiens
aattcgcataaagtttaattcacacagagccagctatacaggagaccaggttttattattactctaatgaatctccccaagaattcggggattggagtttttagggataatttggtgggtagggggccagtgagtaagagtgctgattggtcaggttggagattaaatcacagggagtctaaactgtcctcttgcgctgagtcggttcctcggcaggggccacaaaaccagatgagccaatttatcaatctgggtagtgccagctgatgaagccatcaagtacagggtctgcagaatatctcaagcactgatcttaggttttacaacagtgatgtcatccgatgagcaatctggggaggtttagaatcttgcagcctccagctgcgtgactcctaaaccatgatttgtaatcttgtggctaatttgttagtcctaccaaggcagtctagtcctcaggcaggaagggggtttcttttgggaaagggctgttatcgtctttgtttcaaaactaaactatataactaagcttctcccaaagttaattcaagctataaccagaacaaggacacgttggaggtagaagccagatgg

SEQ ID NO: 610123 - DNA, 132 bp, Homo sapiens
caggctctgctctattgctcaagtcttcatcaagcttcttcttctacaacattcggtgctggagatctgcttcctgatggcctgtgaacgtgatcgggcagcgcatgtactttctggtgaccctgcactggt

SEQ ID NO: 610124 - DNA, 152 bp, Homo sapiens
  misc_feature (45)..(45): n is a, c, g, or t
ccgcaagctggcggtcggcggcgtgaacgacgggggcggcgaagnacgccagcattgcgaagcgcaagattctcattatctcgatcggaatggttgcttcatggatgttcgcaggtgtcgcctaccaatccaccggacgcgtttggacgggt

SEQ ID NO: 610125 - DNA, 849 bp, Homo sapiens
agcgggggctgacgatgacccgagtatcgtcgaggccagttaacccctgtgggccctgagcagaggccgtatcttgcgccgcacccgcgtccaggcggagcctaagatgccggcttctgcatgcgcaggcccggcccgggtcccgggcatgcctacacgactctgctcttccctgctactgaccgtgctgtcgtgtgctgatcgggccggtatccggtccgcgtccctccgctcggtgcccagaacctcgcgttcaatctctgaggctgagttcctgtatcagcccggtttcgcagtcctctcacacatacaattactctgtgctccttgatggatccgtgccgtctgcacacactgtatgtttggcgcccgggacaccatcttcgctttatccctgtgccttctcagggtgaacagacccgcgaggattgcattggcatggtacctgaaggctcacagaacagaactgtacggaagtacacggcacgtaaagaggacgcaactgtcagcagaatgtgtccagattctcgccattgccagtgcctctcacctcctcacttgtggcaccttcgctgtagatccgaagtgcggcgttattgaatgtgtccaggttccacgcaggttgaaagacttgagaagtggccggtgcgacatgtccttgcgagccagctcagcggtcagccagctgtaagtggctgggtaggtcctctatgcttgccactgtgaaataactacctggggacggagccaatatcatcagagcagtgggtctagccgaggactggatacggacagatacttgccttcttggctgaaccgcccaagctttgtaacagcgtgccttgagcc

SEQ ID NO: 610126 - DNA, 133 bp, Homo sapiens
actcattaatccaacatagcagctgtgatgtcataactgtatttcagggggacaggcaggagcatcatggaaaggtctcttacaaggactctagaatacaagctcctgataacttcaagatcataccactgga

SEQ ID NO: 610127 - DNA, 437 bp, Homo sapiens
tcgagccggtacccggtcccatgcacagttaactctgcagaaaagcttttgaacacaagaaagagtccatagtcacagaccccacagttagcaattgcttattatcagccttttatttatgtattcatttattttatttatttatttttttgagatggagttgccctcttgttgcccaggctggagtttccttgaggagaccagcaccattagtttgttctcacattgctataaagaaataactaagactggataatttatagagaaaaaagactccatctcaaagaaaaaaaaatgagaaaaaccccaaagcttcaggagacccagggtatgaaaccacagatccactgggcaaggaagatgatgcctcagtatcccaattcttcagatgttcttcttcttcttcttcttcctttcttcttttttttttttttttt

SEQ ID NO: 610128 - DNA, 433 bp, Homo sapiens
cagcgatgttctcagcttcactgcttcgctcaccagcaccgaggccacctcacacagctctctcagctggacttctgtgattgccagcaccaagatcacttcacagagtactcccatgctttgacttctctgactcacgaccaccgtgaccagctcacacaataccctcggcttaagtacttcagtcgacaccaccaagacaacctcacacagtactggcagcctcacttctttgattgccaccactgagaccacgtcacacaatactcctggcttcaattcttccatcgccaccaccgagatcacctcacacagtactcccagcttcacttcttcaatcaccaccatggagacaacctcacggagttctcccagcttcacttctttgatcaccatcactgggtccacatcccacagtactgccagcttcact

SEQ ID NO: 610129 - DNA, 575 bp, Homo sapiens
ccgttatttccccacccatgtattttccccacccataaaaaaatgctggttggagaccccccaagtaagggagaagattaccccctgaaaatttgtatttttcatgaaataaaaagggcctctttttggggccatttaaaggagaaaaaaacccttttctccccttgcctttagtccaaaaaaaaaatgctttttagccaaattaaaaaggaccttgaatgcttcttttcccgtttattgggtgaaaggggatccatttgagtctggaaaaaaacaaagtgttttaaaaatagtttagtttgtggcttcaaggaaaccccctgttaactaaaagcttcaggggtaaggctatgttccttccaaaaaaaaaattccaaccatccccggattttaaaatttgttattctcccctgaaaaaaaatttttgttgaagccaaccaaaaactttttccccctttaaaaaagaaaaaaaccttttttggccccaaaatcttttgttttttaaggtaggggaaaatttgttgggaatatccttttgtggggggaaaaaatcttttttctttaatggtataaga

SEQ ID NO: 610130 - DNA, 170 bp, Homo sapiens
ctccctaggttatgcactaagtgacatgtgctttacactaataccatgatatgtagtggctccccagccacatggaactgtaagtcccataaacctctttcttttgtaaatctgcgcagtatcaggtatgtctttatcagcagcgttcacacggactaatagcaacatag

SEQ ID NO: 610131 - DNA, 186 bp, Homo sapiens
gggcgattgaggatcctatatgcgtctcatatcctaactcaggaccactgctcaataagacaatccaataaaatggacaaaagattgaaaagatattaaagaagatatacaaatggaaaataagtgcaagaaaaaatgctcagcatcattttagtcattaggaaaatgcacatttaaaaactacag

SEQ ID NO: 610132 - DNA, 128 bp, Homo sapiens
gggtcagtagagaactgggattcctttatctgtctggtctaccatcctcaggaggggactttcattctcagggtcattcatggtgcaactggtcctaaatcttcaccgaagggaccaggggcggaagg

SEQ ID NO: 610133 - DNA, 483 bp, Homo sapiens
cgcttcaacttgatgagatttccatcagtcactcccaatgtgtcacagcttctgcagccctaaaattaaaaggtgagtgagtctctgaggcccctctccacttctcggatgctgagtttagccttcatgtgaatgtggaaagactaggaatacggctgttatcacacaagctggcccaatagtggttcagttgagagagccccatccttcagagtcagctccagctaggagtgactggtggccttgagcatggtgctgggcttagtgttgccatctgtggaatgggtgtgggtctgttgccctgcctcctcccagagctattctgaggctcagaaggggtgatggatgtgatggtgctcccaacactagaaagcatcttaagaatgtaagattttcatgatgactgttgctcagagtggctattatagttttgctttattgttctataacctatgattaaaatttttaccttaaactttgaaa

SEQ ID NO: 610134 - DNA, 116 bp, Homo sapiens
cccagactgaagaaaagccaatcaagagcgagacagcgctcctgtggccatcagcaagccttaacgatcatccgaaaggtgaccacaagattctagaactctccgacataatcacc

SEQ ID NO: 610135 - DNA, 476 bp, Homo sapiens
gcaaggggtgtcccaggaactggacaaagaccaaatatatatttcttactgtatcacagtaggagacttgccaaggtcccacagtgactcagttttatgactcttacatgtcttcctatttagctcacagcctcttgccagtcatttagatatttgtatatgggcagggagggtaagcatggggtagtaagtctgtcattttaatggagtggaaattttcaactcagcctcatgaaggtaaatacattttatggtttgaaagttagtctcctgtttttgactgggcttggttgggggtactatttagctctagatttgatggtttaaatgaaattagctcataaaatcaccaatggtcttctgttttatctactttttctggcactggtccagaccagagaaaccaatcccaggctaggactgggaaagtctgggactgttcactgctctgctgctgattggctgtgagactttgg

SEQ ID NO: 610136 - DNA, 500 bp, Homo sapiens
ggtctgttacccctacgacgcagaaggcgctgcgcaccactgacttctgactcctaaatcacgctggaaacctatgcatagtcttcttcctgggaacggtataaaattcgcgtagcattgcagagaggctggtacgagatactgcgcgagttggcgaacacatttggcggtatagacttggtaccacatatcgaatctaaaccgctgtccatgtctatcgaggagttatgcgcccgctctccaatgccattccaaaaagcagagcataagataaaagttgaattcgcaaagttactcaagcagatcgagtcggtcgaagctcacactagggtcttgtggtcaattcaacgtgatcatgaccacgaactatgactttacgattgaggaggcatatgccgggacacttcactctccaggatcccttgctcgcgaatcgcgatacagcctatatcgtcggcacactgcgggcaagaagggattctggcatgtacatggcgacg

SEQ ID NO: 610137 - DNA, 128 bp, Homo sapiens
agacttgaaacagttatgcagttatccagctgaagacaggtgtgctagaactagatagaactctgggagccactctgtcttctgagggccagtgtgatgccctttcttctggacactttgcatccaga

SEQ ID NO: 610138 - DNA, 280 bp, Homo sapiens
  misc_feature (109)..(109): n is a, c, g, or t
  misc_feature (138)..(138): n is a, c, g, or t
  misc_feature (203)..(203): n is a, c, g, or t
  misc_feature (208)..(208): n is a, c, g, or t
agcatcaagtctccagaaacatggcagagcagacaggccgttaagtttcacagacatcatagatccttttcttaaagaagaaaaacatgtataaatagttttagtagtncaaaatgtcaactatctgtagctgctttngtgtgtgtgtcagtgaacaaataataatgccttgctcaatcaatgcattcagccatctcaagtgnaattngtgaaggagactatggtttccaaaagatacatttttttacaaagttaaacctgtaaaaagtctttttttttt

SEQ ID NO: 610139 - DNA, 794 bp, Homo sapiens
  misc_feature (210)..(210): n is a, c, g, or t
  misc_feature (240)..(240): n is a, c, g, or t
gggccgaaggctttttttctttaaccttaggatccacctcactaaaccctgtatcctccagtctaaaaagttctaaacgtaacggatctccttttttacttttatataaagcactgtcaaaagacgccacactgtcatgatcttacagcatttctttgtctttgaagtctcagcaattccctttacacttttcccacttccttccttgantgcattctgcacttgactaactctgattancagcaaaggagctgaaggctcttattagaatacagtatgccagcacattctgtatttatggtttttttcaggggaaccatttaatgacacatttcttaggtttgtgtagatacaacaggtcacatagagaaatagatgcttctctggttcctttgtaggtagaagcacttggtgactataactgacataattaaaacatttaaaaataggttctgcaggtgcggtggctcgtccctgtagtcccagcactttgggagggctgaggtggaggcatcacttgagcctgggaggcggaggttgcagtgagccgagattgctccattgcactccagcctgggcgatagagtgagactcagcctcaaaaaaaaaaaaaaaaaaattcgccaggtgtggtggtgtgcgcctataatcccagctactcaggaggcagaggcacaagaatggcttgaatcacttgaacctgggaggcagaggttacaatgagccgagatggcaccactgcactccagcctgggcgacagagcgagactccgacttcccatcttaaaaaaaaa

SEQ ID NO: 610140 - DNA, 215 bp, Homo sapiens
aaaatttgggggggtggggtttaaaccccaaatggggggggccccccgccttttccccggggggccccttttggccccaaggggccggttaggggggttttttttaaatttaaaagttttattaaaaatttttttttaaccccggcccttaggggccccccttttggggtttggaggggggggccccctaataaaccaaagggggctttttttta

SEQ ID NO: 610141 - DNA, 87 bp, Homo sapiens
tttttttttttcagtatatgttataggaccacatttattaataatatacgttatgagaacaatcatttgcagtctcactgtgaaggc

SEQ ID NO: 610142 - DNA, 917 bp, Homo sapiens
  misc_feature (19)..(19): n is a, c, g, or t
  misc_feature (68)..(70): n is a, c, g, or t
  misc_feature (117)..(118): n is a, c, g, or t
  misc_feature (156)..(156): n is a, c, g, or t
  misc_feature (182)..(182): n is a, c, g, or t
  misc_feature (185)..(185): n is a, c, g, or t
  misc_feature (202)..(202): n is a, c, g, or t
  misc_feature (290)..(290): n is a, c, g, or t
  misc_feature (295)..(295): n is a, c, g, or t
  misc_feature (311)..(311): n is a, c, g, or t
  misc_feature (315)..(315): n is a, c, g, or t
  misc_feature (465)..(465): n is a, c, g, or t
  misc_feature (469)..(470): n is a, c, g, or t
  misc_feature (472)..(472): n is a, c, g, or t
  misc_feature (474)..(474): n is a, c, g, or t
  misc_feature (484)..(484): n is a, c, g, or t
  misc_feature (490)..(490): n is a, c, g, or t
  misc_feature (497)..(497): n is a, c, g, or t
  misc_feature (499)..(499): n is a, c, g, or t
  misc_feature (556)..(556): n is a, c, g, or t
  misc_feature (562)..(562): n is a, c, g, or t
  misc_feature (577)..(577): n is a, c, g, or t
  misc_feature (595)..(595): n is a, c, g, or t
  misc_feature (611)..(611): n is a, c, g, or t
  misc_feature (624)..(624): n is a, c, g, or t
  misc_feature (640)..(640): n is a, c, g, or t
  misc_feature (648)..(648): n is a, c, g, or t
  misc_feature (652)..(652): n is a, c, g, or t
  misc_feature (681)..(681): n is a, c, g, or t
  misc_feature (693)..(693): n is a, c, g, or t
  misc_feature (706)..(706): n is a, c, g, or t
  misc_feature (714)..(714): n is a, c, g, or t
  misc_feature (719)..(719): n is a, c, g, or t
  misc_feature (730)..(730): n is a, c, g, or t
  misc_feature (736)..(736): n is a, c, g, or t
  misc_feature (741)..(741): n is a, c, g, or t
  misc_feature (751)..(752): n is a, c, g, or t
  misc_feature (761)..(761): n is a, c, g, or t
  misc_feature (775)..(775): n is a, c, g, or t
  misc_feature (822)..(822): n is a, c, g, or t
  misc_feature (904)..(904): n is a, c, g, or t
caagaggaggcgcagggangaggagggggaacagcgggggaagggcaggagcaccacccccaggggannngggggggaggggggggggggcgggggggaggggagggccggcagggnncccacaaaggggacagcccccggcccgagaggccgggngccgccaagcgacaagaccccgcaangcngcagggagcccttgagnccagacgccccagccagggcgccgggggggggaggcccagcccaggggccagggagccagcggagccccccgggcccccaggcccagnccagncgacgccagaacaggnaaanggcaggggcggcgccggccccacggaggccaggcccagcagggggcagcagcggccagggcagggcagcagcgagggggcccccgcaggagggggggcaacaggcacggggcagagaggaggcaggggcacgggagccgggaggagcgcngggnnangnggggccaaangggacnccggggngngcgacggagccgcgggcgaggcacgcacccgctctgagcctcaacgatcacatctgnctccancctccaaggacaacnctgtatccagggccagcncaggggcacctcaggnagctctgtctgcncgagaggctcagtccnctcgcctntgtnccaggacatctctaccaccagggcctccngcagggatgccnctgcctggaagtncactgggntgatncactgccaagnctcctnccctncagggaactnnatggcggantgggcacagggtgngggcagcggcgggcacaggtgccgtgcggccctgtgcaggccaaggnagccaaggacgcccacgagaaggatgctcaggaagcgccccagggacgcgaaaagatgagccatgcagaaactgcacgaggnggaagcgctgggg

SEQ ID NO: 610143 - DNA, 306 bp, Homo sapiens
ccgctttctcccgcctcagctcccgagtagctgggaatacaggtgcccgcaaccatgcctggtacttttgtatttttagcagagatggggtgttagccaggatggtctcgatctcctgatctcgtgatccaccctccttggcctcccaaagtgctgggattacaggtgtgagccaccacacctggactgttcttttctcttacgtttggtcacctggtgcctctgaactccctcttccactctctctacatcctgatgcacaatttatttgaaaaggaggaaacattttccgtcccaagttgcgtg

SEQ ID NO: 610144 - DNA, 885 bp, Homo sapiens
  misc_feature (1)..(1): n is a, c, g, or t
ncgcgtggattcttcttcgcctgtgagtctcccgccgtctgtccgcctcgatttttagtaacccatgatgggtttgctccctcacccctcaggcgctagcatctgttgggggggtgcgccgcatctatttttgtcgacaaatctaataatggtgattctttcgtggctggtggaacatgaatgatgggtgttctctcctcgcctcggtgcgcgaaataatcttgtggggccgccccccacccctcgtgtggttgtgtgtgttgtttgcggacgccaccaatatggtggtggtttctcttcggtgtgcgtcgccccccacccgtggtggggggtgtttagtatggtgttcacttctgactcttcttttatgtcgtgtaggtgctgctctataaataaatttatatcgcgggctggacctcccttcgtgttttgtataaagaggagatgtgtaattatgcatgacctgtctgttcggcccggcggccgctggcgggcggttagttcacgccaccgagaaggaggggggacgaacaaactcccctctttctttctccccccctcctcgcgtagatgaggcaccccacctcacttcttcggtcgccttacttattagattacatacacaaatcgatgcattctgcgaggaggagaggagcaacactactcttttttttcccccccccaccaaattagttttctttttttcttcaaaaaaacctggccgtttggctcacaatgcttcatttccttgctgttatccccctgattcttttgttattatctcgttatttccgccttacgcattgtaaattacttccgttctgttacgatcctcgtctatcactcaactccatctatatgctcgcagcttaacatcaaacaaca

SEQ ID NO: 610145 - DNA, 255 bp, Homo sapiens
  misc_feature (63)..(63): n is a, c, g, or t
  misc_feature (118)..(118): n is a, c, g, or t
  misc_feature (127)..(127): n is a, c, g, or t
  misc_feature (135)..(136): n is a, c, g, or t
  misc_feature (155)..(156): n is a, c, g, or t
  misc_feature (214)..(214): n is a, c, g, or t
gcaagggggctcaggatgggggtcagagaagagggatgggaactgaaggcactgggacttagncaaacaaccaagactggccaaacctggtggtgccaggctcagaggccgaggctgntttttcccntttacaanncggatgaacgggagaaccnngtctcgctcagagagtgacctgtcattggctgaattcacgtgcgccctcaagggaggnggttggcatttctcgctgtcagccacctgtcaaggggggta

SEQ ID NO: 610146 - DNA, 140 bp, Homo sapiens
gagggggcctggggtaatgtgagtggtgcagagggagtcaaggatccctaagagagaggcaggtgtgtatcagctctcccacctctgctggatagaacttgcagagcctccttggtgctctggtctcattgttgcctctg

SEQ ID NO: 610147 - DNA, 1022 bp, Homo sapiens
agcagttgcaggcaagataggacgattagcttctgacatgtgtgcctcaaatctgttccaccccactcacagtggttctgttttgctccagacgtggggctagggcctatgtctttgaagttggttctttggtattgatgtgggtcagaaggagcctcatcctaatctcactcagagccttccatggatccatgggggagtgaaaccgaattctcagtagaacaacccaccagagacttttaatagtagaggccaggcttgggaatgggtagggtaagaggcgatctgttcattggagctatgaagtggagtgccagaactgtaggttataaggcagtcactttttctctctactccccatgcccagatctgcctccctcttacccctgctcccccacactgcaggaggatttgtctctaagaggtgctgacccaaagctcgccaagcattaatactcctagggctcaggacaagtggactcccctggcctggagagccacagccatgatacaagggctcttatggagccctggagtagtcagggcaaggatgctgtcatttttctgaaccataagacaaagcaggtgtatgacggagaaacaagtaatctgaatacccaagtgactacgctgtgtattccccttgtagatcccatttccatgtgactttgtagaccttggcactgaggcgtcccaaaggacacaaccagtgtgggggaaaggcggtggtaaacgaaagaccgtaccaggtgaatgcggctgggtgaccccgatttcgcccaagcggcctgacagccacggagtgcctggcgcctaccaatccatcgcacttaccagcacggctctcggaaggcccaaagacaacaagtgcgaggataacgaacactcagggccgaagaagacgcgcatcagcaaacgtggaccgaacacaacccaaatataaaaatcacacaacagccggatcaagagaacacatcgaaacacacacacacaaagaccacacacccaaatctacagctaaa

SEQ ID NO: 610148 - DNA, 661 bp, Homo sapiens
gggggagcgcctcctgctcctcccgctgttgctgccgctgccgccctgagtcactgtctgcgcagctccggcgcgctggctccccatactactcgccgatgtttggagttgcttactagaaaatggcagtagcattggactaacaaagatgagacaggtctgtaaacttgatcgaaagattgaggattgatgtagaaggaattagaagaagaggagaagtgtgtgaagaatataatgatgtcaagatggttacgtcagcataagcatgtgtcagaatgagtggctcaatagtccatcaggattggtgtagtcactttaaggaaatgactgtgatggtctcggtgagaaacatgaaacggggatgacatagaagagccggcctaaggagtagtgtaagaagacgaggggaatggctgctacaaaagaccgtgaagtgtaagatgtggcacgagatagaaagccaacattctatgacggaggttcatgatgcttgaggaggaagtgatgctgtatctctatacagcctctgattgataagcggattgaaattgattaatgaattgatgaacctagggaagaagaatgtgaatggaaaccagatgagagaagatgagattgcggaggaatggaagaaaaggccaagatgggatgagaaaaaggt

SEQ ID NO: 610149 - DNA, 115 bp, Homo sapiens
ttatacaccctataccaccctataccacaccttaaactcactccccaccttcaccattttacagtataagaaaagcactacctccatgagaattcacgtgtggggtggtatcagt

SEQ ID NO: 610150 - DNA, 138 bp, Homo sapiens
actactcgctcgtcactggccatgactagtcatactcctggaggcaacaacttattatgaatagcttacacaatagcttttatagtaaagatagctctttacggactccacttatgactccctagagcctcatgtgta

SEQ ID NO: 610151 - DNA, 272 bp, Homo sapiens
aacactcctcccaggttcagggtattctcctgcctcagcctcccaagtagctagggattacaggcattcgccaccacacctggctaatttattagtaatatttagtagagacagggtttcaccatgttaggccaggctggtcttgaactcgtaggcccaagcggtcctctggcctctgcctcccaaagtgctagggattaataggtgtgagccaccgcgcccggccacaaacagcattttctacggaggcatactgttgcagagtgcttccg

SEQ ID NO: 610152 - DNA, 236 bp, Homo sapiens
  misc_feature (209)..(209): n is a, c, g, or t
  misc_feature (223)..(223): n is a, c, g, or t
tcatttagcaaatcacgaggtcaggacttcaagacctagcggcaacatagtgaaaccctgtctctactaaaaatacagaaaattagccaggtgtggtggcgggtgcctgtaatcctagctacccgggaggctgaggtaggaaaatcccttgtaacccggagaggcggacggttgcacgtgagcctgagactcattgccagggtaacagngctgtagactccgntcatcaaaaaaaa

SEQ ID NO: 610153 - DNA, 363 bp, Homo sapiens
  misc_feature (23)..(23): n is a, c, g, or t
  misc_feature (41)..(41): n is a, c, g, or t
aagggggggcgggccgttttggncgttttcaaggggtttgngggcttccccccccccttcgccaaaaaaaaagggatgggggttccttctgcccccaaggttgggggtttgaagcctccaaaaaagtttgcctatttggggggcctggctcccgaggttggctggaagttcccggcagtgcccccccccctgggggggaagaggaaagagaaagcccagatcccctcccggaaaaaaaaaccggtcttgggggttcgggaaccggccgagaagaacgtggggaagaaaattgcccaattccccggggtcctccagacccccgggctcttggtttgggccccataaaggctgttttttccccca

SEQ ID NO: 610154 - DNA, 198 bp, Homo sapiens
agaaaatgaggcttagcaagcctgacaagacgtagagctaggccatctgatcccaactctagtgtctgcatttggagacagtggttctccaccccggctgcacactcggatcactgggggagctgaaacacgctgtccgaagtccaactctcgacctattgatcccaaaccctgtcctcaggggggattcccgcttgc

SEQ ID NO: 610155 - DNA, 641 bp, Homo sapiens
  misc_feature (418)..(418): n is a, c, g, or t
  misc_feature (435)..(435): n is a, c, g, or t
tcgggatatacaacatagcaacaggtcacccacgtgttactcaaaactgttggacggcagtgagggcttgctaatcccagaacagaggtgtaacctggctgcatatccagcctcgagaaaatgtctacagcagatctgatggagaacctcagggaggaactcacctgtttcatctgcttagactatttcagcagcccagtgaccaccgagtgtgggcacagcttttgtctggtgtgtctcctcaggagctgggaggaacataacacacctttatcttgtcctgagtgctggaggaccttggagggcccgcatttccagtcaaacgagcgtctggggaggctggccagcatcgccaggcagctccggtcccaggtgctgcagagcgaggatgagcagggcagctacgggaggatgccancatgccaaggcgctctncgatgacgagcagggtggaagcgccttcgtagcccagagccatggtgcaaacagagtgcatctctccagcgaggctgaggacggcatcaacagcagagaaactccagggaaatgctggaatcctctcagccgtgtaaggagaacacggaagctccggctggactaacccatgagaaggagagaggtgaaaatgtgccacgacagaa

SEQ ID NO: 610156 - DNA, 578 bp, Homo sapiens
  misc_feature (330)..(330): n is a, c, g, or t
actcagtagagccacgacagggtggagagaagcagggaccattgtcttcctcaggagcgtgacagctgaccccacagaccatgcttgctggtacacactggtcccagacccaggcctgtcggacatcagcagtgtgctaaaaacgtgtaagatgtggtcactactcaccgtgtgtcctatctagttgacatgggtggagtcagctaaggggtgaatgttcatatgctcccaattcacgttgaagccctaaatccccaaaggaaatggtattgggggtgggggttcttggaaagagtgattaggttaatgagggctggacgccctgatganatgggattatgtgctcttataaggaagagacacacagagaagagtgatttcttctcttccagccaatgtgagagacacaagtgagatagacacgccgtcttgcagggcccgagaagaagagcccctcacccagtgaaaatgaatactgtgtggacacctgtgagatcttccacagctctcccaaggacattgtaagaatagtaagatgtttagattaatttacaaaaaataacaaaagaataaaaaga

SEQ ID NO: 610157 - DNA, 712 bp, Homo sapiens
  misc_feature (9)..(9): n is a, c, g, or t
  misc_feature (114)..(114): n is a, c, g, or t
  misc_feature (155)..(155): n is a, c, g, or t
  misc_feature (220)..(220): n is a, c, g, or t
  misc_feature (241)..(241): n is a, c, g, or t
  misc_feature (262)..(262): n is a, c, g, or t
  misc_feature (280)..(280): n is a, c, g, or t
  misc_feature (290)..(290): n is a, c, g, or t
  misc_feature (481)..(481): n is a, c, g, or t
  misc_feature (534)..(534): n is a, c, g, or t
  misc_feature (541)..(541): n is a, c, g, or t
  misc_feature (574)..(574): n is a, c, g, or t
  misc_feature (581)..(581): n is a, c, g, or t
  misc_feature (617)..(617): n is a, c, g, or t
  misc_feature (638)..(638): n is a, c, g, or t
  misc_feature (703)..(703): n is a, c, g, or t
ctacagttnagcgtgggaagagggttatgtgtggacatgggggtggggtggtctccccacctcctctacattttgcctacacgaacacagacacatgcaggtgcctttgcaganacaaagttagggttcttcaagttacaaagggaagggcaggnacaacttttgcctcttagtcccacacaaggcagctgtttcacactttacaagctgtgagaaaaanatcaaagccctgggcactgtnactgcttgcagcctgagagtngctccctccttttctatnttagctcttnctcctccacatcacagcagcgaccacagctccagttatcacagctccaaagagaaccaggccagcaatgatgcccacgatggggatggtgggctgggaagacggctcccatcttagggtgaggggcttgggcaaaccctcatgctgcacatggcaggtgtatcttttctcctgttcagaaggcaccaccanagcggcccacttctggaaggttccatcccctgcaggcctggtctccacgagcnccgtgtnctgggtctggtcctccccatcccgctgccaggncagtttnatctccgcagggtagaagctcagggcccagcacctnagggtggcttcatggtcaganacagcgtggtgagttatatgcgttttgggggcgtccgttcgctgcagcgtcttcttcccgttctncaggtatct

SEQ ID NO: 610158 - DNA, 207 bp, Homo sapiens
ctagaggatcctataacggagctggaactgaaaaattacaaaatcacacttatgaagaaatctttgccagtgttcttggtatatgaaatgctgacgttaagaaactgggacccttttaagttgcacgctgcggggtcttattatgacgactatatgcaatgtgggccaaagggaaacagcgagggcacgagctgccggttgtatctg

SEQ ID NO: 610159 - DNA, 1356 bp, Homo sapiens
gcttcctccggtcccaggtccccggaccctcgcctcagccccggcaccctggtccccagccctcgtcgcagccccggacgcccgcacgacgcacatgctccaacggaggagcgccccgagtcggagaccgagatccatggacgtgccaggctgactgtgggagacctgacagataacgaagaacacgcatgatggacccgcccttcctgggtcggcatgtggtgcgccagcctgccgtgacctggacagactggacggcgcttatgactgaccaaagactaccaacttggatcacagcctgcagctacatcatacacgaacattcctggcgaccagacgatatctggaaaacatacacagtcgcgaacatcggtcatatcgtaaacgatgatggtactgacctgcacggttgatgcgcacccccactccgcccagcgcgcaactcagacagcactgatccacacccagctcgagcctccaccacgggcccagccccgcctccacgcccacctcccagcacacccccctcccctgacgtgcacaccacaaccaccgacacctcgcacccctcccagactgcgacgcaccaataacaaaccgaaatcagccgacacgagacgcaaacgacgcctacactccgcacagagaacgaatcttacgaataaaccacagggtcgaccccctcgatagcatctagccgtacccacctagactacgaggtaacgatcgcccctcggacactgccaacgcaccgcagcaaagcgcaaacctccatcacacttcacgtcttgacatcgacacacacacccatagcggagcatacgtatgcatcacgcatcgactaggagacagaaaaattgacgccacaatacgactaaagtgcaacaacgacacataaaagaccaacaatacagcccacacgtcaaagcactctaacagctgtctacgcacagacgccccaatcgacctgacgcacgagagatgagtcaagaagcatacttcgcggacagacgcaaagcactgccaaatccagggcaccagcaccagaccacacacacaactgcagctcgtagaagaaacacactcaatagagatagaaacaccgaagctgaaataggcagcatcgtcgaacacaagcttgtgcagccacgctagactgacctacaccctcgtacgcacatactacgacgacaccccacgtgatctgcccccatcactacccgcccacctcacacaaacacgcacaacagacaacgcgatccacgcacagacaagtatactcccgaagcactacacgggcttgagaaagaacacagcagaaaaacaaacatcacgcgacagccaacacgacacaac

SEQ ID NO: 610160 - DNA, 319 bp, Homo sapiens
  misc_feature (32)..(32): n is a, c, g, or t
  misc_feature (275)..(275): n is a, c, g, or t
  misc_feature (287)..(287): n is a, c, g, or t
ccacgtcccaacccctctcctgtgtgtctgtnaccctgtgcgctgtctctgtgtgtaccccccacctgctccccccccctttttttttttgagacggggccttgctgtgtcccccaggcgggaatacagtgccatgatcatagctcactgcagccttgaatccctgggctcaagtggtcctcctgcctcatcctcctgagtagctggggttacaggtgtgtgccgccatgcccagtctcttttttggtaggggcaccactcactgggtttagggntccccaatacantgtgacctcatcttaactaattatatcatcaa

SEQ ID NO: 610161 - DNA, 117 bp, Homo sapiens
ggttagagcggcaggctagtggtgaatgagtaggtgatggttccgataataactagtatggggataaggggtgtaggtgtgccttacgggttgcagcggggccaggtcttggtgagg

SEQ ID NO: 610162 - DNA, 194 bp, Homo sapiens
gggtcctattccctttcctattagtctcttaggtaagatgacatcatgcgacgcattccgcggtggcagtgagtgcaccctctaaatcaccaggatcaataggaacaagcatcacgcaggcagcgagtgctgctcgacatcgcttagcctagccagacccccatcgggagacagcagtgattaacctttggcaa

SEQ ID NO: 610163 - DNA, 978 bp, Homo sapiens
ggtcttgcccttcctcgtcagcgggctgatctgatctcttctgatcacctacctcctacaccgtcaattcctggaagatacttcttaacatacacccatctcttttctcactagtgatgtccttgttccacgattcaatctcgaggacaccgcctcaaaggatacctggtcgtctgttcatcctaaataggatcttccctcgaggtgagactgtagctatctagatctctatgcggatatatagaaccaccatgatgggagggtttgcatgagaccgggacaagaggacttccatttctgaggattatggtccttcgcgtgcctatgtaatcatgacgtaaataagacatcgtggttatcgaggcctgatagctttatgcgatctcattcgccatttatcaggcttcttggaatgtgcagagatctattgccattttatccccaggcccagctctactcaggggtttgtactaaaatccctattattggtagtgaatccgctcccagagttagcggccaagaagagcataatctatcggtatcccttacaattaagcgttcgaattttaacttgctgttaaatcttttctttgccaaacgaaaattgtacctttattgtgtgcctaggcccctcttttgtgacaatggttccctgtctggggtggttggccccgttgtttgaaagcttggacacttttgtggcaatagcgccccccggtgttcaaattgcgcttctcacacattggattatgtgggcgggttcaaccgaacccgcaaacggtaagtaaggttacattcggtcgcgcatttaacgttggcgggtataaacacttctacccggaagttgtaatacggaaacttctagcgctaagttttagctaccgtgtggtttggaccaacaatggttgggaatgttcgccgtctgggttgacgacacccttacaaggccctagggagctacaaatagcctactgaaca

SEQ ID NO: 610164 - DNA, 822 bp, Homo sapiens
gcaggcgcggacttcggagcgagggcaggtgcgcgggccggaagcctcgggcgctcacctggcacctacctggagctcacctggcgcccgggccccggctgcgcccctgccagccgtcggcccgaacctctcggtccttgaggcccagagtgagcacttctccatcagggtcagcgcgtttccattgcgcgatacgcccattgatcagtcagtctgtcctgcctcagttgctggcaggctactgatgcgcttgtcccatcagacttgcatagccaggcaagccgactagacacggaccaggcgcagaatcacttgttcggagggagcagatatgaagaggaagggccctcgagatagcggccagaatgaatcacaaggcacgagaggaatagacgagcatgaggctcaagaagcacgggatcacttgggtttccacagacgctgaatcgtagcccagaagcccgggggacggcagaaggggtcccgccaagcgaaccagagagccagggagtcaacacgtcccgtacatccccacggcaggcagagcacctcccgacagtcccggggactaaacatgatggattaagaagtcgcgtgaaccacccgtgcgagacgagaccgtcgcagaatacgcaagcacgacaagagggccagaggtgtgctaggatccatcgagggagagcacacgagatcaggcggccgcacatgcctaggagacttcgtgcgcacgacggtgatccggcggcgggacaagcgaaaaggcaccgcgccgttccacatgacgtagtaggaccagaaaggaagaccaccagaaaaagcgcc

SEQ ID NO: 610165 - DNA, 308 bp, Homo sapiens
ctgctttaccctctccttttgcatggatacgctgcactgatctcctatataattagcctcagactccagagtctagccatcactccacatcatgccctctggatgctgctactgagttcatttactgcacatggtatcttaatcatactctccacagttcaaactatatcttcactgcccgtcacttccagcataaatccatgtcctctgtgaacacttttttgacaatttccatgccagatccaaatgacacttcccttccttgtgctgtcatggccctccacacagacttctgcccatagacccca

SEQ ID NO: 610166 - DNA, 465 bp, Homo sapiens
cttagtgatgttacctagacatgttaagatccctcttgttaggaattccatgaagcctgaaaatgaagccagcgtagtggagaatgaagagacagagttttgattacaaggtttgaaccgtttaactgagatccgcctctgcaggctatccatggacttttaaattatgtaagccaataattttttttattcgttttggccattttaagttggattgtctgtcttatgcaaatgaaatgatcatgttagagatggtagactcagctcactttcttaaataaattattatagaatccatgatcagtgaatttcttaaaatgttgctggctataaagatggctgtgactaataaggccaatatgcaatcaacatgtataggagaccataaaacctgtgcactggtttgattgaactatttgaatcatagtaatattacatcttttgagaattctaagaaaaacaaag

SEQ ID NO: 610167 - DNA, 815 bp, Homo sapiens
  misc_feature (385)..(385): n is a, c, g, or t
tagctgccccaagggcgtttcctacttttattaaggggcccgccccgcaaattcaataataaaaacacaaaaagctcccatcagtttaataacaataaaaacaccccaaaagtggaaaattgaggggggcagggagaagaagacccctgtgtggccaggggcacagaggagccctgttgcctcatgtggcaccaggcctgtggccgcagggttcccccggtatttgctggtgtgcatacagagtgttttgggggcgcagcagatttgttccgtggtgggagccaccgttcctcctgtgggctcggggaccctctcaactttcttctcgtgagggggtggtgccttcagcttttttgcatgtgccaccggattcctttgttcacangcaggggccacaaaatgtgacagggccctcgtgtgtgggtttgtggtaccacgtctcaaccacaggcgagcctccttttgaccccccgtggacaagccgcggggcattcggttccacctcctccagtgtccagggagcttctctccgagcgttcaatctttccagagttctggggaactctccttctttcctgtggcaggtcgttaaaaggcgcgttgaagcgtgcctccaggactccacgtccctttaggtggaggcgcttccgtagctccttaggggacatacttgacggtgaccttcccgttggggcctccaggggccctattgtccgcccgccgggacctctcgtgcggcccgggggcccttaagtaacgctgtcctggccgatgccgccgggccgggcgaagcggcccgagcgcttttggtcgcg

SEQ ID NO: 610168 - DNA, 1108 bp, Homo sapiens
  misc_feature (1108)..(1108): n is a, c, g, or t
agcggacgtaacctctgggttctcttgtatcgacagatgtggtttgctcttccagtgtagtccccgtggctactagctcatcgtttggcaggaaggcagaggtttcctgccggttacagggtgatgtcctaagctcagcctgctgtcacaagaggatacactgtcgcggtgtcctggtgccgtgatccaagacgtccatgtttgcttctaactgctccccctgcccagtccggtgttgtccgaagtgccctcggtgccaagtcaatcgggaagtgagccaagaacggcgaattgaaggctggtatccatgatcagtccgagtgatccatggactagtcaggccatgctaggcgcctggtgcgctggagcactcgcctatgggaaacgattcattccctgagggtgaggcgtcaacggcgtgattacccgtacattcgaccatttgtcatctgacgccgagtgcgtgctcgagtcgttttacccttccctcatggcttgacgttaccctctgacgagtggaaagcgaatgtggacaaacttccgcgtagaacacacagccagccggacgctaggacaggctagttacgacaatctcacacacagtgtcttacgcttgtaagtccgttcagaactgaagtcctgagttagataagcctcttgcttcgactttgccggcctaatcgagcattgggaaccccttcgcgtaccgttataggatctgggtaaccctttacacgccatttcagactacggacttctcccccacgtcgctcggcgagtaagagacttggcagctcctaggatacaaagccgagacgacacgcgcctccgttgctggaacgtggatcccataagtgcagtgggcagaaacagtctgggcggtgcactgcttatacctcggttctgccacacacacccggagtgtgtgcgcagttccacaacgcgtcattcgcgagtagcggtaaggagctcacgaacaaccaaaccagacggggacccattggttctctagaggagcaccgagctttcgttttccttccggtggaaccatatcatggagagggaaggggcacacttggattccgcttccggacgaggagttccccgn

SEQ ID NO: 610169 - DNA, 117 bp, Homo sapiens
acggtgaggtacagttcataaagtccaatgggcagatgcctcatcgagtgatcaggccccataactgatgtcatcgtcaacgaattaggcacatggttggccgggcgcgggtggctc

SEQ ID NO: 610170 - DNA, 1442 bp, Homo sapiens
  misc_feature (615)..(615): n is a, c, g, or t
cttgtaacatattgttttctctgacacagagacggggaaatattctttttcacagaagtattttgctattcttgatggctgtacaaatgtggggggcgaactaactagtaacggattctccttaaagggggctgtcttacaaccaacgcgtcgttgtttaatctgcaccagttaaggggagatattgagaaccccaagcggttgaagaaaatataaaattttgaggcgggtaccctctgtgtattttaggccccccggaggattttctgtaatatggtgaataagcaccaacgactttttcgcccgcaccgggtggtaattggcttggtctaagaaaaatgtcttttggggctccctttgacaccaaaaagatttctttggggcccacacaggggggaccacaatttcttggggacgctcgtgtggggtgggaacccagtggggtttaaggaagaccaaatggcgtggaaaccaaaaacggtggggtggaaacaagcacacaggagggaaccactaggccacgaatgggggaaacctcgcctggggagagaaacacaagggcccaaatcccaattgagccactcggggggaataaggccgccacatggcttcttntttccaaagtcccacttgagcgcacacaccttgggaggagaaaatgggttgttctataagatgtgtgcaaacccccgttttagccacaccccacttcacgcccaaaatccggtgatacatttttcacgggttcttataaaaaaaagattcacgcgcacatggtgtttacagacttttgtgtgtttttttatactatatcctccacgggcacatcccacatgtgccacacatcacacgaaaatcgtaatggggggtgcttctggcacatacacactgtggtttcacgagcgcctcgtggttaataacacataataagagatcacactcacagggagagccttctggagaaaaattaataagagatttgttcacagccctatatcttcacaaacacttgagaatcacaaaaatttcttgtgggtggtgggcaccacaataaatctgtgtgaatattttctcttgtgttataaactttcgccctcgataggccacactcggtgttccgatagccacactcgggcttggggggcgctcgctcttgagaatagctttgtgtcttgcacagagagtgtcaccacgcacggccactgagataacctctaatgagccgtggcacaaatgaggctctgcttctaaaaattgttgaacacattcacatgttcttctgaggttacacaaaagtgctaaattcacctacacacatgtaaattgtgtaaagtaaaacacttgggcccttaactaacttctttatagtaatagaagttaaattacctaagcttatataataacatggggaggattaaataaaggaataaagatgaatggga

SEQ ID NO: 610171 - DNA, 146 bp, Homo sapiens
cccgcagggagctgctctcaacagtgtcacctactgacatctccactatccatcacccatgcatcacaagggacaactaagctggtatctcagtcaagagtgccacgctgcagactaaacatgacacaggaaaatgttcagagaga

SEQ ID NO: 610172 - DNA, 1047 bp, Homo sapiens
atataaatacctgagccatgtgtcactcgtcactctctaatgaataatgaatgtattctctcacgtctctaagttatcctacgattcctcatatggaataatcttattgcagatccccacttcatactctaattaatctcagaaggcagatctccctctcagtgtatattgcgcttgttgccctatactagcttttcccgctgctttgcttaaacagacagcgtgcgttcactagtctccatatctgtttcgtcgaatgcatacccatgcatttgtagcgtctgatagctgtttaacataacctaagacctctcttccatttcgtaatctcttttcatcccgtgtatgttatcagtaactccctgtacttattgtctaaatgccttataaatctgatatctattcaaagcaaacacgactagaacgccaattaattactggttcattctgcatctaatgtcatgatttgaacacgatgactccaaaaaagaacacatattaagtcaggctaccctcgatacacttggcattgcagctgccttaccagatccactctgcacatcaatgttacagaccatcttgcctgactctttcacatgcgcgtccaagaggccctctactcttatgcgagggtttcccctattatgcaatatagaaacctgcctactcatgtattgctcactctctatatgtcacctgtgcccttatgttgtgcgtgtattctgtgcttttctgtgggacattcccttcacgacacaaatagcaccatggatcccacttctgtgtgtgtgactaccccttcctgagttggtttgtcggctatcgtgggtaccccaataccgctctccctaacaactcatacattgcgccccagtcggtgggaatagaattacccatttcagaatatgggcgtggccaccaaatacacacagccggccttagcccacccggccacaccacacctttcacggccccggggcactaacacgcgctaccgcggacactcttcgccgacccacgtcatccacacaaacggcaatgctaccc

SEQ ID NO: 610173 - DNA, 880 bp, Homo sapiens
  misc_feature (821)..(821): n is a, c, g, or t
gaggtagtggtgtttgcgtgggtagggcgcagatctatacagcgatgtcgattcttggtttcctggtggacttgcggtccactattacttggtgtcaccctaaggctgctagaatgcgcgtcgtgccgagcgagggtcccactaatatactacgcggggctgatgtcggcttgcctccatgagccgcgtgcgggctgtgactgttgagccaggtttctcttgtgaaaagacctgttggcgggctaacttgtgaagtcagctaccgacgctgcgtggcttctagtttcgttcaagacgcgcccctcgcacaatagaacaaatatgctctttcattccgcttggacattgttgagcttacctcccggtatgaagggggttagatcaataagaaagaggatacccatacatgtcctaagcagaagcaaagtcaagcatgctatcatctacgatcaacctcgctttagcgtgctttgcaacactcatgtccatcagtagacaccatacgtccagataaggtccgctagtccctcaataacgacgtccctcgtgccagccttatgtgtccgcgcagaccagcccaaatgacatgcttcaagttgccgcgcacagcgagggccatgcatcatgcgccgtacgattgccttgagtctcatgccatagagcgaagctgaaccccgtaggaaggatgcgatttcggcacgctaaggcctcgagtaatctcttctacatcctctttcgtgactatcaagaggtcctaacgtcccccgagcgtacctcaggtacacccgatagaacgtcgcgtaccctatcgtacgtagccntcatgcgtcgctcagtacaaacccactggtaacaggtcgtgggatgagccacgtgattg

SEQ ID NO: 610174 - DNA, 310 bp, Homo sapiens
  misc_feature (176)..(176): n is a, c, g, or t
  misc_feature (253)..(253): n is a, c, g, or t
catccacgcatagctgggcatggagtggtgtcatggagtggcaggagcccattgcctgagcccaacactctggtccaagagggtggctgccattcctcaccgttctacgttaaccatggtggagatccttactgaccgagtcagtggcctaggtatgctgttcattcagctcatcnccgtcatcagctgctgcacctaccctcagttgccgctgtttccggaactcgcgcctggtctcagttccatttcaccnaaggaccgtgtagacacttgaatcagcctgtgcctgcatctatggacaatcgtgctt

SEQ ID NO: 610175 - DNA, 238 bp, Homo sapiens
gcaatcacctttccaagtcgtaatctaaagcaacagcccatggtatattgtaggtggtgtttacttaccaataataggtaacggtgttgccaactaatacatgagggatgatcaatcagaccaattgagcatatacattaaataaatggctacattaacggtaagtaaacgaatcactatatttagtaaaacaaaaaatgaaaatgagacaccagcctttctcttccagtgtcataat

SEQ ID NO: 610176 - DNA, 110 bp, Homo sapiens
ttaagtggggaaagcctgggcatacctcaaaaacctacgcattgagcagggttccatggagcatgatgaagccgttgccgacctgcaaaactggtgggcaggggacgcag

SEQ ID NO: 610177 - DNA, 202 bp, Homo sapiens
agcttttttgcccatctgtagggtatgtgaagatttcaaaacctgaaagccctttttctttgtttaaaattatgaaaaaggccctaaatgactttaggatttgcatttttccctttattgccccatttcttgtgaccccctgttggggagggaaatctgtttattttttcccacaaataaaaagctaagattttatttccca

SEQ ID NO: 610178 - DNA, 398 bp, Homo sapiens
tcgatgaacctgagtcagcttggtgacacgcgtacaatcagcaatcaaaaaacgaagcaatttgctgaagaatgtctcatttacccaggcagggctgcatatctgagcagcaactgcactacctccatcaataatgaatacacctccagcctggcagatgggcaatgcgggcgctcctgtctttgtccctcaatctttctgggcccttgcctcagccttcaccagcactcttacacggggagaagtgacgctcactacggcagcaaaacgagcccaggagacagcccgagccttcctgtttagctgacagatggctggcttctcagatcggtttaaattaaaaaaaaaaggaaaagaaagaaacaacggggaagatgctgcccttcgatgaccatagt

SEQ ID NO: 610179 - DNA, 197 bp, Homo sapiens
ctgggaggctgcaggcagccttcatttgtggcttaaggtctgagagcccgctggtgtatgttcaagcagtccaaaagctgaatacttggagtctgactgttcgagggcaggtagcatccagtaatggagaaagatggaggccagaacacttagccagtctagcccttccatgttcctctgcttgctttgatcctatc

SEQ ID NO: 610180 - DNA, 570 bp, Homo sapiens
ataataatgctgagtaaaagccacaccaataaaaaattggtttttaaagacggagtctcactccgttacccaggctggaatgcagtggcgtaatctcagctcactcactgcaacctccacctcccaggttcaagcgactctcctgcctcagcttcctgagtagctgtgaccacaggcacacaacaccatgcatggctaatttttggtatttttagtacagatggggtttcaacatgttggccaggctggtctcgaactcctgacctcaggtgaactgcctgccttggcctcccaaagtgctggaattacaggcgtgtgttaccatgctctgccaaaaaaaacattttttttttttggagacggtgtctggtcctggttcgcccaggctggatgtgcatgggtcaatctcagctcatggcaacctccgccgggaaagtctctttttatcttggcccttaagctacagataaggcacccacggggcaagaaccttacggggtttggaagagaaattcccagttccctatccaggctacaggcagggcccattgctatggcctggagccccct

SEQ ID NO: 610181 - DNA, 900 bp, Homo sapiens
ctttgtcgccatccaatgggcatagtgtgggtgcttggaacccgggatgactgagggggacacatggagtgggtgcttgtgtctgctgtctcagaggccttggtcaggatgaagtcggctgacacagcttagctctggtttgcttattcaaaagagaaaataactctcacatggaaatgaaactagctgaagccttactcttgtattagcaactgaaaatagtacatatggtcactttagtgcttgaggaggcccattttctgcctggcagggggcaggtctgtgcccatcccgctgactcctgctgtgtcctgaggtgcattatcctgtcgtacacaccagggccaggctcattctccctcccttatccaccagtgccaagcctcgtctggaacaaggaacaccagggagtcccggaaggaacccaatatgtgctctcgctctggaacaaggcaggacctggacactggcgacgcgtgggggtgagccaccttcacaagaactcggcccctctaacccacaggactggcaaacactgactcgccatatgaccaagagagacgggcacgagacaccggctaactgtcaccttcccctgtggaacatcgccgagaaatctaccaacttgacatgcgagctcaggagaagcggaggagcatctgaaactcacctggccatccagatgcccaccaaggaaggatcatgcgccaggcggaacaagacccaacaacaaccacatacaagcctaacatagagagggagaacgaagcaagcgcacgagcgcagctcccagcacagaatctccccaagcagagcgactgacggagacggacgaacccccaaaaaggcaaggagacaacaccagaacacaggacacacaagcacaggcagcgaaaaaca

SEQ ID NO: 610182 - DNA, 125 bp, Homo sapiens
ttccgaggattcccatgctgaagaatgttgttggagactttcagaacttctgcacaaagcaatgaatccaaactctccatcaagttcttcatgcacagctccgcctgtcaaagcccatcagcacg

SEQ ID NO: 610183 - DNA, 152 bp, Homo sapiens
  misc_feature (97)..(97): n is a, c, g, or t
ctttattgtgccgtgcggtacatcacgtttactgatttttgcgtgttgacccatccttgcatccagggatacatcccaggtaattttggtgtacagnccttttaatatgctgttgaattctgttttctatacatcgctgaggggttttgttt

SEQ ID NO: 610184 - DNA, 463 bp, Homo sapiens
caatggttctagatcggggacgagcaataatagggatgtaaattagataggaaatagtgtagacagcatgacatagactaatccaggacagctaacaaggagcagcatagcaatttaaatcgcgggtaccctgacttcaaagcctatacccctacaacggggccataggtaagaggatgaagaacatatgccagacagtactggattcaaatagtgtttcctgttaaaagttgagagggttgtggtaagttttcaaacctctctgggccccatttaattatctgcatgaaatagtatctatcaaaaagtgcctccaagacttaaaaaaaatatgcaatgtgcctttactggtgggcaagatagaactgttatctcctgctcactcctggccactttctctgcacttgctttgataggctactcgaagtcacagacctatgtatattattagagtgtgagagaa

SEQ ID NO: 610185 - DNA, 157 bp, Homo sapiens
agttcacaaaggtagaaatgtataatctgttcaatgcccagacctctggcatagaggagccttctgagacaaagggttgtcgcaaaaaagcaaattcaaatataagtggcttcctgaatgatgaggaccagaataaaggtttttgatcaacctcaaa

SEQ ID NO: 610186 - DNA, 498 bp, Homo sapiens
  misc_feature (296)..(296): n is a, c, g, or t
  misc_feature (383)..(383): n is a, c, g, or t
  misc_feature (391)..(391): n is a, c, g, or t
  misc_feature (398)..(398): n is a, c, g, or t
  misc_feature (419)..(419): n is a, c, g, or t
  misc_feature (435)..(435): n is a, c, g, or t
  misc_feature (446)..(446): n is a, c, g, or t
  misc_feature (462)..(462): n is a, c, g, or t
  misc_feature (484)..(484): n is a, c, g, or t
  misc_feature (491)..(491): n is a, c, g, or t
cttgcagggtattcggagtacatggatccggtcatcgggtcgggtgcagctgatgaaggccctcctggcgggccccttcgccgcggcgcgtcgctggaggaacccgattccctttcccgagacgtttgacggagtataccgaccgactcccggagttcatcgtgcagtacgtgctccttactatgttcgtggacgagtacacgttctccaacgacgccctgaagacctacgctaccactgccatcgccatccaccgcatctcaccaacagactgtggctcctagtgatgtggactnacctcggaggtatccgagctggacacagcccctgggacagtgatccagacagttggccgttccccaagggagccttgttcaactttnagcgaganccatttncttccccatttcccagagaanttttgtgttttcttgncaaataggttnccaggggtttaaagtntttcttggggaaaccaattggnatttttnatttttt

SEQ ID NO: 610187 - DNA, 1089 bp, Homo sapiens
ggacatcaaatattagccatttcccattttattttatttttctatgctaggttcatgttccatgcttcatttatttaagaaatacatttttattggtaagcttatagagctacacttatggaacttttctaagtacggtaacataaatggttaacgacaaaatagtgcttatagccgtctcattctctgcaataggccactcttatgactcataaaattcacccttactgctttattataactctcagaagtacatcttatagttctgaacctatagtatctttctaccctgttcccgaagctaacagactggctgacttctatctagaaaatgattcctctatccccatgacctcacaaacactgctgcagcgaacaacatcattcacagtggccatgccaagtccctatgaaggcacagggctgcctatcaaacctacctttctttgcagcccacactgcagactaacacttctctccttttcaacaattgctgtcactcttccctactaactccctattactcactaactcctttccccttctcgcccagctatcaaccaccatccactccttcgactactgctgacgcaaccactctcatcacttctaccactccacgacgtatacccttatcagctacctcccacactcgcacctctgcaacatcatactcattctcccaccaagccccttcgcctccttttcaactcacccttcataactctcctcttaccaacacaccctctgccatgtcccctccaacatcaacgcactttccggccacactacattgacctcaccccttaccccacgcacacgactccacccacacacacccgccaccccgccccaaccaccacacccacacacaaccccaacagacgaactccctcagcaagctaccatagacaaacgctaacaacaccccaccaccccaaacacaaagaacccaggaatccaaccggcaaacaaggcacatcccgacacacccccacaacaccgacacacggacaaccacccatgacacacgaatcccccaccagcattgcacaccacaccccgaccagcagccacacaacacttccg

SEQ ID NO: 610188 - DNA, 200 bp, Homo sapiens
  misc_feature (45)..(45): n is a, c, g, or t
tgcaagagactcaggtggacagaatgtttagggttgactttgggnaactacgagctactgcaagtgcaggcaatgaaggcttggtggtatagatttcagtagctcctcagataaaaagagtgataaaacgggaacaagaccagaggatagtaaagctctgaaggatgaaaatctacctcctgtcatctgcaaggaacggg

SEQ ID NO: 610189 - DNA, 123 bp, Homo sapiens
gtcacatgacatctgccagacctctgctggacaagctcgtctccctgtgctgcccggggcctccaggcgaggcctgggcctcacacacaggatctctccgagcagcaattccccattcctgtg

SEQ ID NO: 610190 - DNA, 1147 bp, Homo sapiens
  misc_feature (419)..(419): n is a, c, g, or t
  misc_feature (1147)..(1147): n is a, c, g, or t
tgcagatcatcaggccgcctcttccatctgtcatggggggccaggccccgggggtgccggagccagagctgtcccccatcactgaggtgatctgaatgtgccaggtcagtggcccactgttcctgtcccaccgatgctccctaattccaccctccgtgaccctagtcctgatgtagcccatgcgatgagcatgccgtagatgcttattggtagagtgctgctcttggtgcatgcaggacagtgcagtggcttcccgcgcgcgatggccctgcgaagcgcggcctctaagcacatcgtggtgcttccatcgcgtggtactgcctgtgcggcttgtagccagagtgtgcaagtctggtaccgttggctgtcaggccagagccgtgtcgtagaggcgaagagtgcatagcgagcgccgtagntccgagaccccatggagggacgaggccattacagtgtcgcttgcaaacaaagcgcccaatgtctgcagggcgggctcgagagctttaacttcttatgtacggtggggaagttttcccacggtgccattcaaacgccgcccgagtgtagtacttcgaacactaggtcccacaacgtttcccactccctgatagaaggtcgctacccagggcctttggcgtaggccaattgcctcgttgtgcgccaccgatgacaggccggtgaccgttcagataggccaataccggcaagaagactacgcttcacttctttagccgaatgaggcaggcctcgcgattgtcggagtgcatacgagagttcgaggcgtaggctagattttcgtatccgttgccaaccaccgattggccatttcgtgacagaagcggaagccggtcacgagccaagtcctaatactgtagaacaagttttcccgatattccacttctattcaattcctaggtagccaacgcggggcgttaacaattggcgcgttagaacgcattgggtagcgcccacaccgttgttaaggcccttaagatctagggtgaaaccacgcctacagcaagggcaattccgaaagggtgaataagggtgggtgccataggtaaatagcacaatcatattggagagagatgggcgaacccgctatgtatataaccacagcttaccgttcctctggtcgccggtaacn

SEQ ID NO: 610191 - DNA, 378 bp, Homo sapiens
catataaacccatcaagaatggggcacagtgtctcagttggggaagatgagaaagttcgggagatgaaggggtggggatggtggcaaaaaaaaatagtaaatgtacttaatgtagctgacctgtacacttaaaaagggctaaaatgttaaattttatataatgtgtatttaacaacaataaaaaaacaaaacaaggggctgagcatgggggttcatgcctgtaatcccagcatttggggaggccaaggggggcagatcactttcagctcaagaccagccggggcaacagggtgaaaccccatctgtataaacatacaaaaattagccaggcttggtggtgggtgcctgtagttccagctactcaggaggctgaggggg

SEQ ID NO: 610192 - DNA, 276 bp, Homo sapiens
gcgaccaagcgttcgggccaaaaaccgtcaagtggatggtggcggccggagcccaagggaaccaaatggccggggccggagccgccaaaccagattttccccttacccaatccctgccgttgaacccgatttcctaaaaagtgtgctgcaacagcgtttgattgcattaggaggggttatcgcagctcgaatttcagtttaaacgaacccctttcctttggccctcacttagcttgtgaacaggcctttttaaaatccttttttggggtagcagca

SEQ ID NO: 610193 - DNA, 160 bp, Homo sapiens
gcggtgtctcaggatcccaaacaccgcatctcagatgaacttgttacctgagtatataggacactagaccaatcatatttaacaaggactgtgacatgtaaaacttaattttgccgtgtaaggacttttgaaaagacgactactaatcttccccttacca

SEQ ID NO: 610194 - DNA, 150 bp, Homo sapiens
  misc_feature (46)..(46): n is a, c, g, or t
  misc_feature (53)..(53): n is a, c, g, or t
  misc_feature (135)..(135): n is a, c, g, or t
cagaggtgggagatgactggtgtatcatgaactgggagcctcctgnctctgtnacagtcggtgccactggagaggcacatgcaagcatcaaggttaaagttgtggacttccctgatcctccagtggcaccgactntgacagaggtgggtg

SEQ ID NO: 610195 - DNA, 375 bp, Homo sapiens
caccttgtagtaaaaccgaaaatccttcatctgcaccagctggaagatgggatactccggatggcacacgtctcgatcatgtccttctggtgtttgtactgtatcagacactccatcaggtccccagagtctatctagttatctgccacatcgtgacagaagttctgaattatgggctcacaggctctcattagcaaggcttctattataatatcctctgattctaactcagtgaggttgccaactatatctctacgctccaccaccgagtcatccagactgtcctgaaggcactccagctcctgtccagtctctgtgttctcactgcaccattttcccagatcaatcaggcacttatcctggagggcaggatcc

SEQ ID NO: 610196 - DNA, 920 bp, Homo sapiens
  misc_feature (84)..(84): n is a, c, g, or t
  misc_feature (528)..(528): n is a, c, g, or t
ggcgagacagcacccgtcctcctcctgacaaggggcgctccccgcgacccccgtgggtgccacgcacacacacaacactcgggnggaacacacctgctgggcacaaccaagacactgtgtgggacgacacctcgcgcctcagtgtgcccacctaggccgcacacaggaccgccgctcgccccctcgtagacagaagtgtcagttgacaaatcactggcgcccaccacaattggggggtggtgacacccggtcgcgagagtgcgtccctccacggtacgactgccaccagccgtgggtaacaaacaccactgctcgccgcagcggagagacaccccccgcggtcatacaaattcgcacgcgcgcggatggggccaccctcctctcatacagacaccatcagtgtgccgatacttgctccacacaaacgaagtggtcaactggagcggcccaccacgcttcacccccaggaggtgtggacatagagagggaacccaccctcgcctccaaggggggacatacactgcgcgngggcctccctctcccgtgaataagaacacacaaccaggctgcggtcgcctagggggcgagagcacacctccgacgcactgcgagctcaaccacggcgacgtcttcggagggccacccccctcgagtgctgcacccacgccagaggagatcagctacctgtgatatctcacattggcgcgacaccacaccgatgcgttcagcgcctccatggggccaaacaaccccacgcctgtaaggcccacccgcgagtttctcactctaggtggtctcaccccgtcttacgtacacgctgcggattatgaggaggactcctcctcctagcccctcctgttcgatcccgacgccccaccgacggacgcacgatctgagctgggtcctcccaccaacccgga

SEQ ID NO: 610197 - DNA, 791 bp, Homo sapiens
gagcgtgttgtggcccgggatgcctggcgatgctgctcccgtgttgaactctgccttgctgctgtgcgtgcatgcgacctgtgatgtggccagtgcccatgcacgccggagcgtggcctgcgtgtgggtgatgtggtgcgtggatgtgcgctgctgcgtggagggtcctgccctgtgccatgtggcccctggtgctgctcgcagagtgcctgtgtcctgctgctcccatgccctgctcctggagcccatgcccggcgggctgtgccagtgcttgctgtgcagaaatgtgtgggtgccctggctctgcatatgcccctgggctgctgacatgacttctttgccactcggtgtcaaaagtcggacggactcctgccttctgggcaatgccggctggggggacgggctctgtgtgccatgcccccgagctgccgacaggtgggcactggcaggcactggcattggtggcgctggactgagggacgtgggggccaagcccaagatgttgtctcccgttctgcgttcctgcgcgctttcagccgttgggaggggcgcgtcagttggacacggagtcagctagtgtaatgctcagtggttgccagatgtgtacgatgctgcccattgggcggccccgttccgtagtgggccggttgcaaggtgccgggcagaggttgggcttctgtggcggctaaggccaacttaggaggctgttctcccagccagagggagattcagcagttgcggggaggcccaccagtggaacgtggcggcccgcttcgttttcgcggcggagt

SEQ ID NO: 610198 - DNA, 191 bp, Homo sapiens
ttcagaggcacaaggagggtcgggctggtagcgagggcgcctcttctcgcggacgggtcagccagcagtctcaccaggagctgcttagcccaggttatgccaaggcgtgaggaaacaggttcgtcccagaacctgagaaacaggaacgcaggcagctggcgctcaggcttggtggcccgccaatttcgagc

SEQ ID NO: 610199 - DNA, 151 bp, Homo sapiens
acagctgggttcatgcgccctctgtgactcagaggcacgaactggaatctgggcaaacccgagacttaacagtcaatagcctaggagggtcgcagcgtcctcaggtctgcaccccatgaccaacatcagtgggacgggcgcactctgggag

SEQ ID NO: 610200 - DNA, 287 bp, Homo sapiens
ataacctctgcgattgcaacctccgcagaccatcttgtcaagcatctcctgcttctgggacctgccagcaccgttattgaggctagctccttattgtcaaccaaccatgacctcccagagacggcacaatcatttcatcgacgtagatgcatccgacgacagcctgatcacttcgtccctgcacgccttctacacctacctgtctatgagattctatatgcaccgacatgatctgactctataaggcgtgagccagttcttacacgttgaccgagagccgcgtggct

SEQ ID NO: 610201 - DNA, 614 bp, Homo sapiens
gtggcacagcctacactgccgcagcctgcacaaggacgatggggcagccctgcggggcctgacgcgaagacggcgagggaaggcctagctcttcgctgctactcttctccgtgcttgtctgcaggagcgcaggccacgagcccgtctgcgagccgggccgccgagccatgggcccgtcttccgcacgccagcaaggaatcgcaagcgcattgagtgcagaggcagtcgtctatgcgagcccctgcctcccggctggacatggagccttggctcccctcttcgttccttgccgctggctgccggaggagaccccactaacccagcctgcctgggctgctgaccactaagcactgctaggcaataggacagccagcagcaggaccgcactgcctagctcttaggccactgtgctcccatttgctgtgccctggaccatgggagtagctgagggggcagacaagggagtagggctggcaggggagggggcagacagaactcgcctcgcacccttcatgcctggctgccggtccataccttggagggacctaagctgggggtgggggacatgagtccgccagctgcaccgtgcaacatcccagtgggctctgaccacc

SEQ ID NO: 610202 - DNA, 518 bp, Homo sapiens
  misc_feature (14)..(14): n is a, c, g, or t
tttcggcccgggcntatctttttacatttggcttgtctagactcatcctccatcccctcatgcactggtgtggtgcagaccagaatatcacccacctagactgcagaatggatttgggtggcatcttggctttctgcacaagacttgcctgttccccaccacatccccctggttctcagggtccaggattccaggaggcagggatgttggcaggcagggtaggtggcccacccagttcactcccacgctgggacctgcagagctggctgtccgagacaggttgtttggaccaacatctgggtttctggatttccatttgagcacagctggactacacaggctgaagctctctctgccgagatatagatatttccctggtgatgatctttcaagctgacatgaagacatggccacccactggaacgtcgtgtgtctgccgtggcgctcttgtaatttgtgagggaggctcctgacgaatgcagtgcgtaagtgggaaatggtgggaagttctcgcatcc

SEQ ID NO: 610203 - DNA, 159 bp, Homo sapiens
  misc_feature (10)..(10): n is a, c, g, or t
  misc_feature (28)..(28): n is a, c, g, or t
  misc_feature (55)..(55): n is a, c, g, or t
  misc_feature (110)..(110): n is a, c, g, or t
cgcgctcgangaggggacgccaggaggnagcgatctccgggctggtgcaggcttnctgggggatgtcggctgatgcgagctggagagcgcgtgtggcggccgcggccagntgttttgtgtcgccatcgtcttcaatgcttctctgaacagcctttatga

SEQ ID NO: 610204 - DNA, 192 bp, Homo sapiens
ccctcaaggcaatataccgtccaggagaaaatctgaactctcctgacacgacagcctctaacccacatgtcacagtactcttggttaatcaatgggaagtgccagcaataccacacaagagctctttatccccaacatacactgtgaataatagcggatcatatatgtgccaagcccataactcagccactg

SEQ ID NO: 610205 - DNA, 81 bp, Homo sapiens
ctcttggggaaccttattccctataaaaaaatcaagctgggggatactgctgccccgtacctcgtaccgggcgctaaactc

SEQ ID NO: 610206 - DNA, 220 bp, Homo sapiens
  misc_feature (71)..(71): n is a, c, g, or t
  misc_feature (83)..(83): n is a, c, g, or t
  misc_feature (164)..(164): n is a, c, g, or t
  misc_feature (216)..(216): n is a, c, g, or t
gcgggatcttgggggcctcggcgctgaccagggggactgggcgaccctccgttctgttgctgccggtgagngggagagcgcgnggccgacacgcgccccactgtcagaccacggaatgatgtggccccaagcagctctcagcttttggagagtatgtggctganatcttgcccaagtatgtccaacaagttcaggtgtcctgcttcaatgagttanaggt

SEQ ID NO: 610207 - DNA, 568 bp, Homo sapiens
tcaccccccatccctgcttactttgacctcagccggcgccggacccggtatggggccagtctgggcaaccggaaagaagggcccgcgtcccctccttcagaggagcgctttgggttggggcctgctcccccatcccccccagcccccccagcactctccttgctgctgttgagttcagctgttgtacccggacctcagttgtggaggctccatccccgcatacaggcctggggcttggcacggggccccactgggctgggccctggcgttttgagcactcgctggcaccacccgtgggcccctggacccggccgcggcaagctggtggactgtaggggctcctcactgggcacccggagcttcccgcttttgtccccggcccgcacggatgggctgtctgtgtatatatgcttggggcgagggggcaggcccccacttgtcagaccacaacggggtctgagggcacccggctgtgttcccacctgagggagggctcgggcgggggccgggcttggaacgatgtacgataccctcatagtgaccctttaacctgatcctcccccgcgga

SEQ ID NO: 610208 - DNA, 251 bp, Homo sapiens
ctcagcacatttagtcacagtgagctttgggctaactatatacattctgggtggataaatggtccatcggttttggaagtgtaaccttactatttggtttacagaatagtctatggggtggattcaggatgtaacaaatatattcagtaccattcctggtgtggtatggtgtggtgcggggttaggttttaacatacggtagtggtatggcggtatatgtgtggggtaggatttcaactaaatggtgctga

SEQ ID NO: 610209 - DNA, 203 bp, Homo sapiens
ctaaaatatttccaaattgcatataaatgacaaagcctacaaatcttgacaaacccccaagacacacacatataccctaaagcttatctaattacagacaaccagggataaagagaaacaatcaaaagcaaccgcagaatacatacatgctgactatcatgtatcagtcaagcgatagaaccctttaacacgaagaatgatac

SEQ ID NO: 610210 - DNA, 208 bp, Homo sapiens
ccccaagttactatttcaatacaacagaggtaagaaagttatctaaaatcagagaatcaatggtacagcagcctggttgatgtacttgagtgccataatcacataatcacattcccttaaggctcaaaatattttaaagttccaacagcttaggttttgaattatttattttcacatccccaagtctcacaaacatgagctgttgtaa

SEQ ID NO: 610211 - DNA, 261 bp, Homo sapiens
  misc_feature (230)..(230): n is a, c, g, or t
  misc_feature (249)..(249): n is a, c, g, or t
catcggttcctgtgaacaatcggagggtagatcgaaagatgaagggagggacagagggagggaggaacgaatcctgtcgaaaaggatgggccagactgagggagacagaaaaacatgttcggggcacaagggtaattctcaagtggtggaatgccacagtgaccggggtgcttacatagcgggcacacatattccaatatcagccacagtgggtttgaggtgagtatgangacgccacgttggttgaantgatgggacagt

SEQ ID NO: 610212 - DNA, 834 bp, Homo sapiens
gaagggtcgacgctttagccactgtggggcctcaccccagcctcgttgttgaaagaaggggacccagaagctcttctggggccatcgtgctgttcagtggcctcagccagactgggcaggcacctacaacatctctaaaatgtggacttctcattagaatgaagattgggcccctggtgtggacattcgtgagaatgacactctgttccaagggtcacttagggacccaggctggtggaggcttccagggcacatgggcactgatcctcaaaggcagaagggggtaggaagaggagggccgcacagagggggttacgggtcagtgcccacccgccatctcccagaactcggtcacatggccacaccagggcagctggccacacagggagcctcgcgcccaggaggaggagccagtgggtttggggaagcgcttgctggtcctactggaccacccgacccgcctgtctctgtaggagcctccattcgtggggacgtggcttagttgcctggacaagcggaaatacatcctgcctgccgtggggtcctgtgccttctccttgggcctcagtaggctccaggtgggggtggaaggcccagctccatggccatggcagcaggaagtggctgttcagtggtaaaaagactgtgccgcctgaccccatcaggctctctcacggtgatcagcaaatggagaaacggccagtaccacgccctccccctgtcctacagctggggaggtgcgctgtgcctccaccctcacctcctctcccctgatgacaagcatggggttttgctttttattttggtaaatacacatcagatgaaaaaaaaaaa

SEQ ID NO: 610213 - DNA, 361 bp, Homo sapiens
agttacgttagtgatgctctgacggttagagcatttaatgggattggcagtcagtgcatgtacagaaatgacagatatgctcggacacgttggctcacgcctataatcccagcactttgggaggccgaagtgggtggatcgcctgacatcaggagtttgagagcagcctggacaacatggtgaaaccctgtctctgccaagaatgcaaaaattagccaggcatggtggcgggtgcatatggtcccagctacttgggaggcttaggccgggagaatcgcttgagcccgggaggcagaggttgcggtgagccgaaaatcgcaccattgcactccagcctgggcaacaagagcaaaaccctgtc

SEQ ID NO: 610214 - DNA, 309 bp, Homo sapiens
atggagctccagtgttttcttgcctcccagcgtttgttgctttgacccccgcatagaagattcactgtgcagttcaggataggctctcggctgcggtggtacttcggagttctactacaggctctgcactggccatctctagactgactagtcctccaggctaggatttaggggggctggataccgccctcaggactggtctgagggctatgggctgccatcttgtgcgcacaatacaactgtttggcctcacagcagaaccaacccttgcgttatggcgttattaccagcgccctcaaaattagaagt

SEQ ID NO: 610215 - DNA, 156 bp, Homo sapiens
  misc_feature (43)..(43): n is a, c, g, or t
caggctcggacctgatatggcaagccagtagctgggactacanggtgcccactaattttttgtatttttagttgagacggggtttcactatgttagccaggatggtcttgatctcctgacctcatgatccgcccaccttggccttgccatatgcaa

SEQ ID NO: 610216 - DNA, 717 bp, Homo sapiens
agcgtcagctgactcacttctcaaaaacggagctccccgagtgagcaattcctgtcccttttaagagcttacaactctaagggggtccgcgctgagagggtcgtgattgattgagcaagcagggggtacgtgactgattaccggctgcaccggtaatcagaacggaacagaacaggacagggattttacacaatgcttttccatacaatgtctggaatctatagataatataaccggttagagtcaggaggggtcgatcttcaattaccacgcctggaatgcatcgccgggctgtctgacctactgatttcacttctgtactttctttaaaactcctacattatctatgaggcaagaacattgggcataagaccaatatgaaggggctgcgtctgactccacattcacttacgcggactattcgcagatatagcacaaacacaagattaactatgataagaatcagataattaaagggagagagcacagcgtgagacccttacagaatctacggtccacaaacagaacgtaatcgcaccataattatgtacgatcgtcgatgtaacaaaccacactcctcggcaaggtctttcaccgagtaggcatggtacagaaccaaggggcgaagggatcggacccagggatcaatgcccaggcgcacaagtgcacatagcgaaaattacaagcgcaaccacgcggaccagtgactagccacac

SEQ ID NO: 610217 - DNA, 346 bp, Homo sapiens
ttttttttttattggcccctttcccctttcctggtttttttaaagggggaaccttcccttttttttcgggttccccccgggaaagccctttgggttggggggttgaatttttttaaaggggggcggggagttttcccctttttttttttttgttttaaaaccctcccctttttggatttttgcccgtttccccctccccctttatttttttttggattgggttttcttccccttggggggtaaaaaattttccctttggaaaactttgggtttaaccccccttttatttccctttttttttggggaacccccttggtttttaaaatggttcctttttaaagtttga

SEQ ID NO: 610218 - DNA, 518 bp, Homo sapiens
gcactgcagcctgggtgacagtgaaaccctgtttataaaaatcagggctgggcacggtggctcaagcctgtaatcccaaaatgctacggttgtatgagtgagccaccaggcccagcctttgtagccattctttctaaatatgtctttccactatagcagcaaacgcctccatcatcccttcagtgaacaaatacccactcccatgttcccactataaaggagagacaagtttaatttcaggaggctccggggccacctgaaaacgatgactggaacctttacaggattaatcttccatcaatctttcatttcttggacatcaattgaattgaaggtgggctacaatagggttcctttgaactttataactgccctctcctcctgaatccagaaccttttcatcctgaagagtttttctgactgtggagggaggtcctgtggaatttattccagaggtgaatactcagctcactttctcatccttactctgactgaatgtgaagcctgttagcctggcc

SEQ ID NO: 610219 - DNA, 460 bp, Homo sapiens
ggggggggctccccttgttgtgtgggggggacgggcgcccccctccccctcccccacactttttattcttctctttgttccccccagaggggggggggggggcggggggaggggtgtgtttttcttttttttccccctcccttggggggggggggggggaccccttttttttccccgggggttttttggggggggggggggcccccctttttttgggcccccccccccccccccaaaagggttttttttttcccgggggtttttggggggggggggcccccccccctttttttcccccccccccccaggggggggggggggttttttcgccccggggcctcccctcttaaagggggtccccccttttcccccccccccccgggtttttccccccaggttttgttcctttgggggggggggggcccccccccttttttttttgtgtggggggaagggggga

SEQ ID NO: 610220 - DNA, 468 bp, Homo sapiens
gcactgcagcctgggtgacagtgaaaccctgtttataaaaatcagggctgggcacggtggctcaagcctgtaatcccaaaatgctacggttgtatgagtgagccaccaggcccagcctttgtagccattctttctaaatatgtctttccactatagcagcaaacgcctccatcatcccttcagtgaacaaatacccactcccatgttcccactataaaggagagacaagtttaatttcaggaggctccggggccacctgaaaacgatgactggaacctttacaggattaatcttccatcaatctttcatttcttggacatcaattgaattgaaggtgggctacaatagggttcctttgaactttataactgcccggagggaggtcctgtggaatttattccagaggtgaatactcagctcactttctcatccttactctgactgaatgtgaagcctgttagcctggcc

SEQ ID NO: 610221 - DNA, 752 bp, Homo sapiens
taaaattggcttcaacaagctctccaccagttgactttcttgggctaattttactttgcatgatatgccttaatatgccttcataaataaccatttaagtcataattggtccttaagctgcttttttcttctattaatgggatcatagtaaagagtagtcaatagggtctccagctattaatggtagaggtgattaaaaccaacaaggagtttcatgtgcaaaggagatacggaaatgatttataaagattggctattggggtggctcttattaaacggtgtatttggtacttatcactacacgtttcccccaaatgcttacatgggagttggaggtaagtatttcacttccttggtgtaagtactctattcacattcttatggtaaccttcctcatttcacagatagggacatcttgggggattaaccaacctcctttctgtaagggtaatcattaaaataagtcctatggataaagggtcacaaacaaaacaacgacgacaacagaaaaacaaaaaccttgttgtgcgcagcgctacccaacccccgcaaaaaatggctttgaaacacgccaacttggttggggagccgggggcaccaaaaagggaagagtaaaccgtgtgcaaacagggtacccacaagagaccctggggcacaggaaacacgggcagggagattcaccacaaaaaaacgggcgggtgaacaggagtttgtagaacaaccacagggagttgggaccaaacgggggccaa

SEQ ID NO: 610222 - DNA, 226 bp, Homo sapiens
  misc_feature (115)..(115): n is a, c, g, or t
  misc_feature (153)..(153): n is a, c, g, or t
gagccgggagctgctgaaccctgagcccaggagacttgagcccagagttgaggctactgcctatatgatcactctgggcgacgcgtgcacaacttcgccgacggctggccgtggngccgccttcgcgtcctcctggaagaccgggctggccanctcgctggccgtgttctgccacgagttgccacacgagcttgggggacttcgccgccttgctgcacgcggggct

SEQ ID NO: 610223 - DNA, 380 bp, Homo sapiens
  misc_feature (50)..(51): n is a, c, g, or t
  misc_feature (336)..(336): n is a, c, g, or t
  misc_feature (374)..(374): n is a, c, g, or t
cgaaaaaagaactttgatttggttgcagaacatctcagatctaggcttgnntttgtcaataagtgactatagacaacttagttattcacctgagattttctatttcctcatttgtaaattaaagggattaaactaagtgacttctaatatccaacttagttttaaaatgttattccctgataacttactttatcttctcttgaagcaatattttggtgtttaagcttggaggaacatccttatctctcagcgtcatggaagttaacagtggaatatatcgggttctttcaacaaacactgatgataacatcggtggtgcacatttcacagaaaccnttagcacagtatctagctttctggagttcccaaaagancctttc

SEQ ID NO: 610224 - DNA, 169 bp, Homo sapiens
cggccaggggagttgaggggtgggggtgagtaccaggacgggaccaccagcgagaccccttccagtcctcacattctaggatcccacaaacctgcagaactgatttgattggtggtgttatttttagtcttcagcatgggaaacaattcttatgggcctctgctctcca

SEQ ID NO: 610225 - DNA, 1186 bp, Homo sapiens
  misc_feature (795)..(795): n is a, c, g, or t
tcaaacagtctgatttaattaggaagttaaataagtggaggggggggggagggggatcatcaaaaggctgactggggaccgcgttggagttgggcaactcatagcagtgtggtgaggtgggcaaggggagcaaccccctttcaagaacagggcacaaacatattgggcaaggagagatgagggggtgggacctcacgtgctcaagggacagtgcctcagggaggccagggggtccaccagtggcaacgaggggaggactcatctcaggcaactctcagcctagtgaagggcggggccatcgtggtgaagggcgtgagagggcctcaggcgtggtccctcaagagggctgggtgaatctcaccgtgggaagaagtgcctcacgcccgtggtgaagtctctttctcccaaactatctctcgtgagacgaggcgagagttataaaatgtgctcccaggatacttctcccacagtatccacttgtgggggtgtgcccccccatgggtctccccactgtgccggtgtggagacaccaggggggtgactcatatatagaggggctcgagaccacgtcccaaggggaggacccccccttgaggatatctacccttctgggcgccacctcttgggggcgcaaagtcttttctctctagaagccaagactatttgtgcacagcggcttgtaggagcacggctctctctttgggggtacacccatcgtcttgggagaaagggggctacacactagcgcgccttatatctgtgtgggggcctaaatttctaaggtctcaccgaagncctcttctgccgagatactaccggaggggtcctccgcagggggggccccccctctattattgggtaggccaagaagagcggcgtcttcacagaagatctattccccccccccaacgccgagcaatattcccctggcacaacaaaagaaagccgtgcggggggcacaatatacaggtggcacacctaccccggaccgccaggggaccgatataaaaattcaaacgggtggggggagaccactctcccatcagtggccaccatgcggggaacaacaaaggcgggcgggccaccccaaacagcgctggatgataaggcaggactctcccccggaatttccgcgagggagggagggaacattaccccgggaacaacccccgggggcgggcccacc

SEQ ID NO: 610226 - DNA, 134 bp, Homo sapiens
tggtgctggattttaatgggagtcgtccatcttccggcggggtcaaagaatgtgcgtgttgaggttgcggatctgttagtagtatattgatgccagcagctaggactgggatagataggagaagtaggactgct

SEQ ID NO: 610227 - DNA, 502 bp, Homo sapiens
tataaaattttacacaggtgcacttgttatagaggcatgggaagagagtgcgctaaaaatatttaatataggagtgtggtatacatcctgttattgagttagggaagggggactgacattacattactgagtgtgatgatgttacatgaagctctggatccgtgatggtctgtggctgctccgaggcgattgggcagcgtcagtcttcagccagtaagctaagaagatctgggaaggaatcagagagccttggggcagagttccaggggctctgaaagtggcctaccaggtgagttgaacagtccgagttttcagtggggtccgcacagacgggacccagcttaggaggaatcctggggctggcgggatttcccttggcttgggtgggacagattttttgggcaccttgtatgccagagctcctggggggaggagggttctggaggaacacctgtgaggctgcgggatcaggtggttcggaaagttcttgtgttgctggaga

SEQ ID NO: 610228 - DNA, 149 bp, Homo sapiens
tcgtcacctcgggccggcatactggacttctggcatactggaccttctgcatatgaattaactagtaaataagctgttgcaggggagccagagctaagacccccgaaaccagacgagctacctaaaaaatcccaaacatataactgaac

SEQ ID NO: 610229 - DNA, 273 bp, Homo sapiens
cctggattagatgtgtgagtcgttcatcactgtcaaggcatcacagatttgtgagttgttaaaggttaaaattcatacaaacctgctgtaaataagacaaggtagattaaatgcgtcattgtctgtctctttacataaagtaatgctttccataaaaagcaaaggtgggctttttgccttgtattgccgaacaaacgcttggtctcttagaaatttttgtgccagaaattgccccagaatttctaagaagaacgggtacccgagcctcgaaat

SEQ ID NO: 610230 - DNA, 334 bp, Homo sapiens
  misc_feature (3)..(3): n is a, c, g, or t
  misc_feature (10)..(10): n is a, c, g, or t
  misc_feature (35)..(35): n is a, c, g, or t
  misc_feature (125)..(125): n is a, c, g, or t
gantttggcnttaaaataggcaattacattttttncccctcaaatttgaaaagagaaaaaaaagtcttttttttttttgagacgggagttttgctgttgttgcccagactggagtgtaatggcanaatctcagctcactgcaacctccgccacccaggttcaagcgagtctcctgcctcagcctccctagtagctgggattacagacacacaccaccgtgcctggccaacatagtgaaaccctgtctctacgaaacatacaaaaattagctgggtgtggtggtgggtgcctgtaatctcgattgcacccctgcactttagtctgggtgacaaag

SEQ ID NO: 610231 - DNA, 344 bp, Homo sapiens
cccggaatttggtggccaagggggcccgggggggcccctttacttttaagttccccttcccgttggccggggggttccttgggggaccagttccctcccatttttgggttttttccaggttttctttttgcggttccccttcccgggggtgttttttttttgggtgcaaattccttttccggtttggatcaagttttgcccccccttttcccggggggcctttccggggtttctcccttggggtcttttggtttggcccccccggggcccccgattttcacctttttcctgggaattgggccttttttcccttcccggggaattaacctgtttttggcccccca

SEQ ID NO: 610232 - DNA, 409 bp, Homo sapiens
taggagtatggcctttgccatgtggctacagatgtttgactaagaaaaagatgctagggctgggcacagtgtctcacgcctgtaatcccagcactttgggaggccgaggcgggcagatcatgaggtcaagagttcaagactaggccgggcacggtggctcatgcctgtaatccctgcactttgggaggccaaggcgggaggattcattgagcccaggagtttgagaccaacctgggcaacatagcgaggtccctgtctccacaaaaaatttaaaaattacctgggcatggtggtgctcacctgtagtcccagctactcaggaggctgaaatgggaggatcgcttgaagtccaggagattgaggctgcagtgagctatgatcgcgccactgcactccagcctgggtgaca

SEQ ID NO: 610233 - DNA, 108 bp, Homo sapiens
cggcccgcccgcggccgcgcacccccgtctcgggaccctgctctactcagcgcccttttgttttgccttatatgggcacccccttgcgtgtccaaaccaagcctgtct

SEQ ID NO: 610234 - DNA, 342 bp, Homo sapiens
aaaatttttttttccccccttttttttttaccttttgaaaggattccccttttttttccccccattttgttttttacccccccctttcaagggttctctcaaaaccaacccgttttttgttttggtttaaatttggttttggaaaaaatttttttttttggggcccttctttttgcccttgaaaaacccttttttgggttgcccttacccaccctaactactttttcaatttttcccctttttatttttttttttttcccctttggccctaaacccaagccccttttttttttccaatcccctttttttttaaaggggattaattaatttttttttccttta

SEQ ID NO: 610235 - DNA, 489 bp, Homo sapiens
  misc_feature (11)..(11): n is a, c, g, or t
  misc_feature (23)..(23): n is a, c, g, or t
  misc_feature (55)..(55): n is a, c, g, or t
  misc_feature (75)..(75): n is a, c, g, or t
  misc_feature (153)..(153): n is a, c, g, or t
aaaaagggtgncctcccctttanggaatcaagctggacttgcggagccaaaaaangggagaaaactggccctcanacccttggcctacacagccccttgtacagggctccctaaccctgtgatgagtaaagaatgtcactttcctaaacaggncccaggagcccccaagttatccttgggacctcaagaagagaggaatttacccaactcataggtattggagggtacaaacccattgctgggcttgactttaaaaagtcttttctgatattccttatggaacagaattccatcagagccaattttaaaagcatatgtgaaaaataattattcttgctgtactttatgcaaataatcaggccaagtataagactaaagtttattttgcaaacaatcctattatgatttgtttttaacaaaaatgaagactggagagtttcaaaacttatcacacttgtcattaaattctagttttattaaaaaaaaaaa

SEQ ID NO: 610236 - DNA, 266 bp, Homo sapiens
gaggatcccgtgtgccggtttcgtgcgacggttacgcgagtgttgctagaagtcaatcccacagctattagtgggagtagagttttgacagtccttgcgcgcggcttctgatgcgactgtgacgtgcgttcgtagttagagtttgctaggcagcctagtcatgaggatgtaaagcccgtgggcgataatgagaatgactgcgccggataagcttcagggggtaaggctgagaatggctgttactacgagggctatgtggctcattg

SEQ ID NO: 610237 - DNA, 578 bp, Homo sapiens
ttttctttcttgtagagacagggttttgctctgtcatccatgctggaatgcagtggtggcatcatagctcactgcagccttggactcctgggctcaagtgatcctcccacctcagcctcccaagtagctgggactacaggcatgttacacctggctaattttttaaataatttttttgtagagacggggtcttgctttgctgcccaggctggtctcaaattcctagcttcaagtaatcttcctacctcagcttcccaaagcactgggattacaggcatgagccaccaggaccaggtggcccatttctatattagattatttgtcctttactggtgtgttgtaagggttttttatatattctagatacaagtcccttatcagatacataatttgcaaatattttccctttcttatattaaaccctacattttattagtatttttgtttggttttagtaaaagaaagcatctcaccagctcatcttaccctgctactggatttagaaatctatgtatgtttttacaacttctttttttacttaacaatatatcataaacatctgttcatgacaatccaga

SEQ ID NO: 610238 - DNA, 642 bp, Homo sapiens
  misc_feature (61)..(61): n is a, c, g, or t
  misc_feature (68)..(68): n is a, c, g, or t
  misc_feature (79)..(79): n is a, c, g, or t
  misc_feature (95)..(95): n is a, c, g, or t
  misc_feature (118)..(118): n is a, c, g, or t
  misc_feature (125)..(125): n is a, c, g, or t
  misc_feature (156)..(157): n is a, c, g, or t
  misc_feature (164)..(165): n is a, c, g, or t
  misc_feature (173)..(173): n is a, c, g, or t
  misc_feature (175)..(175): n is a, c, g, or t
  misc_feature (179)..(179): n is a, c, g, or t
  misc_feature (181)..(181): n is a, c, g, or t
  misc_feature (184)..(184): n is a, c, g, or t
  misc_feature (190)..(191): n is a, c, g, or t
  misc_feature (198)..(205): n is a, c, g, or t
  misc_feature (209)..(209): n is a, c, g, or t
  misc_feature (211)..(211): n is a, c, g, or t
  misc_feature (217)..(217): n is a, c, g, or t
  misc_feature (227)..(227): n is a, c, g, or t
  misc_feature (238)..(239): n is a, c, g, or t
  misc_feature (254)..(254): n is a, c, g, or t
  misc_feature (256)..(256): n is a, c, g, or t
  misc_feature (264)..(266): n is a, c, g, or t
  misc_feature (270)..(270): n is a, c, g, or t
  misc_feature (273)..(273): n is a, c, g, or t
  misc_feature (275)..(278): n is a, c, g, or t
  misc_feature (281)..(281): n is a, c, g, or t
  misc_feature (283)..(283): n is a, c, g, or t
  misc_feature (285)..(285): n is a, c, g, or t
  misc_feature (293)..(293): n is a, c, g, or t
  misc_feature (296)..(297): n is a, c, g, or t
  misc_feature (303)..(303): n is a, c, g, or t
  misc_feature (308)..(310): n is a, c, g, or t
  misc_feature (324)..(325): n is a, c, g, or t
  misc_feature (329)..(329): n is a, c, g, or t
  misc_feature (340)..(341): n is a, c, g, or t
  misc_feature (343)..(343): n is a, c, g, or t
  misc_feature (359)..(359): n is a, c, g, or t
  misc_feature (361)..(361): n is a, c, g, or t
  misc_feature (365)..(366): n is a, c, g, or t
  misc_feature (370)..(370): n is a, c, g, or t
  misc_feature (391)..(391): n is a, c, g, or t
  misc_feature (397)..(397): n is a, c, g, or t
  misc_feature (448)..(448): n is a, c, g, or t
  misc_feature (451)..(451): n is a, c, g, or t
  misc_feature (493)..(493): n is a, c, g, or t
  misc_feature (495)..(495): n is a, c, g, or t
  misc_feature (502)..(502): n is a, c, g, or t
  misc_feature (521)..(521): n is a, c, g, or t
  misc_feature (524)..(524): n is a, c, g, or t
  misc_feature (553)..(553): n is a, c, g, or t
  misc_feature (556)..(556): n is a, c, g, or t
  misc_feature (575)..(575): n is a, c, g, or t
  misc_feature (582)..(582): n is a, c, g, or t
  misc_feature (601)..(601): n is a, c, g, or t
atgattttttatcgtattctacatgccaactgctttacatttcccagccgcaagatatacncttcttnccccctgtccngccctgtctgtctgcntccccttcccccccgtcccattngccctcnggtcccatttctacaattggtcttccagccnncattttnnctcatgtncngtantnttncggttnntcgagcnnnnnnnncccnancccccnggcattatanctctttaattnntgacttgggttatcncncctgaatnnnagangangnnnnagntntnatgtggtntgnntgatgntttgnnnaggtgagagagggnntgcntgttgtgtggnntntgtaagaagtcgcccntncgtnntgcntgcggcggaattactaaacgnttctgngtcgacgctgaccatttgcttcaatttcttccttgggtcgcccgaaaaagntantttcgctttcttgggcttggatcgttcatagctataggtcancntcttttnctctctgttattctacctnatngactctggggctcttttagcttttttccnacntcctttttgcgctgtggcntttgctntgtgttgccattctccttntttcctttctggtctcctgtatatattattttcccgtatcc

SEQ ID NO: 610239 - DNA, 928 bp, Homo sapiens
  misc_feature (5)..(5): n is a, c, g, or t
  misc_feature (72)..(72): n is a, c, g, or t
  misc_feature (77)..(77): n is a, c, g, or t
  misc_feature (81)..(81): n is a, c, g, or t
  misc_feature (87)..(87): n is a, c, g, or t
  misc_feature (107)..(107): n is a, c, g, or t
  misc_feature (147)..(147): n is a, c, g, or t
  misc_feature (158)..(158): n is a, c, g, or t
  misc_feature (191)..(191): n is a, c, g, or t
  misc_feature (198)..(198): n is a, c, g, or t
  misc_feature (221)..(221): n is a, c, g, or t
  misc_feature (238)..(238): n is a, c, g, or t
  misc_feature (247)..(247): n is a, c, g, or t
  misc_feature (255)..(255): n is a, c, g, or t
  misc_feature (257)..(257): n is a, c, g, or t
  misc_feature (379)..(379): n is a, c, g, or t
  misc_feature (381)..(381): n is a, c, g, or t
  misc_feature (430)..(430): n is a, c, g, or t
  misc_feature (501)..(501): n is a, c, g, or t
  misc_feature (627)..(627): n is a, c, g, or t
  misc_feature (649)..(649): n is a, c, g, or t
  misc_feature (719)..(719): n is a, c, g, or t
  misc_feature (750)..(750): n is a, c, g, or t
  misc_feature (779)..(779): n is a, c, g, or t
  misc_feature (784)..(784): n is a, c, g, or t
  misc_feature (796)..(796): n is a, c, g, or t
  misc_feature (799)..(799): n is a, c, g, or t
  misc_feature (804)..(805): n is a, c, g, or t
  misc_feature (811)..(811): n is a, c, g, or t
  misc_feature (838)..(838): n is a, c, g, or t
  misc_feature (844)..(844): n is a, c, g, or t
tggtntcccgctactgcccacgttctgcaaatcctgccatgcagcttgaccgcttcatccagtgtgcacccngctgnaggngctaanagaggccttccgggagaagnaaacagctgtacaaggcaacatccggttcagcttcggagnattcgtcaccntaacagcttctcggatgctttgacccacccttntgtgganagtggagtgccccagggaccttncctggcttcttagagtnagagaagtntgtgcacntntcttcttttcctgtccctctagaagaacattctcccttgcttgatgggaaactgttccaaaagagggtgaaaagtcctgcataatagccaccaaatagtgaggaccggggctgaggccaaananaaaggggcctgatggaggagaggatagaagttaaatgtcctaatggccntgagcagttaagtggaacagcctggcaccaggagcaggtccttgtaatggagttagtgtccaatcagctgngctccaccctgatgccagtggtgagtgttcatcggcctgttaccgttagtacctgtgttccctcaccaggccatcctgtcaaacgagcccattttctccaaagtggaatctggccaagcataaganagatctgtctatgggaccagtngcttggaatctgcaacacccataaaaccttgtgtgttaacttctagctgcctggggctggcccagatcanacaaatctgctccctgggcatctttggccangcttctgccctctgcagctgggacccctnacttncctgccatgctntgntcggnntcagtntccaggaaacagtggtcacctctcccngccaanactttttttaatttgcattttttttcatttggggccaaaagtccagtgaaattgtaaaaatcaataaaaggatgaaactttgga

SEQ ID NO: 610240 - DNA, 205 bp, Homo sapiens
gaatagtagggcatctgatttggaaagtcctaaaagaagagaaagtgcaagtataatttcaatgcactcatccacagggcagcatcagggtcaagttcagtcaggcaaaagcatcagcaggtccccaaatctctgccccaggcaaaacaagcgcaaagggccaagcaaatcactgctgcaaaactatcttgcaaacaccagtgca

SEQ ID NO: 610241 - DNA, 892 bp, Homo sapiens
caggaatggaagacgggtcagatgatatggatacctcagtagaagatatggtggtcgttcatgtgatcactcgctttgtgagaaccctgttattaattatggaacatggtgtaaaacctcacagtaaacatcttacagagtattttgccgttcctttacgaagtttgcaagaaatgggtgaagaagagagccaattttgctttcattgcaatgctatatctacaatggtacatgtttacatgggaacaaaaggacctgaagaatcctcaagttgaagtgtcatcagaggaagaaggggacagaagaagaggacggaagaagatatcctctctctggcagaagaaaaactacaggccagctgcccttgaaaacgatgatagctttagttgctcttatgggttgaacagtctcgactcagacaaggcatttgacattatcacagactgacatggcagcattaacaggaggaacaggtagtcacattctctaatattagacaattttgatcatcacaacaaatccctcacggttctctccagtgacacaacttttgctgtttgacaggcatttcccttcttgttcgaacatattcgtgatggcatcaatataagacaaacttggtacatctgatctacagcctgtgtcgatacaataatcgacttgccgaaccatatcgtatctatgcttgccacgtcattagcaaacgttgacctccttgacggccaggccaaattcatatatcttccacagctcggtgggactactgcctactgcgaggatacgcctaggtgctaaccctcccaggcaatctacctccccatctgcaattttaactacgcatgcaagaagggcactatcggacacgtcgctcagcactcaacacacacatagc

SEQ ID NO: 610242 - DNA, 269 bp, Homo sapiens
attcgcggccgcgtcgacaataaaaatcccacccttaggcttgagttctcctgtgctcaagcaattttcttgccttggcttcctgaatagctgggactataggcatgcaccaccacgcctggctagtttttgtatttttagtagagacggggtctcgctattttgcacaggctgaactctaagtcctggcctcaagtgatctttctgtttcaggccccaaggtgttgggattatggtcatgaactgatgcacccaggcctttatacttc

SEQ ID NO: 610243 - DNA, 533 bp, Homo sapiens
gttccgttgcatcacaaatctgtgttacaatatggcttctcaatgaccagacatatactctgaaaagtgacaaggatgtactaagaattatcctcattcatagagtatctgaaaaatccttatcaagtacgatattaactttacctttataacatccttgtgtgcaaatgagagaaaaatcaaggcatacgaagatgcattgtgttctacatgattaaagtaccatccgttagtctccgttaaaagattttcatccatatattcaaaaaccttttaggttcacctgtccagtctaagacagagtgtagacattttggagtatctgaactaagcatcgtcctgacttggacaaacaatagaaactccaatgagaagtccttgtgggcctcccagtcatgcctttccgtagataggtgaacttcatctatgtagtgtcatcacgcctgcaatgtctaaatttgcccacataggatgagttacgaattcttgcaggattgctgcagctatacatgctcctgcggatctgaagagtg

SEQ ID NO: 610244 - DNA, 658 bp, Homo sapiens
tactaaacaggtaaattatgggaatcactgaaatatttggtagatactggtgtacacagtgtgtctttctttgtgtcctttggattacatgatttgggatttttaaaattattagcacacaactattttcagccctttaataatggagcatcaaaaacatcacgcttgtaaccccaagcaaattatagaagacgtgtatttaactagtgatatccattttcccagacatggtgattacaataatgcaaacgacgtcatacaatatgccatttacaatacaggacgcgacggcaacggcaacaattgcccatagaatgtcccaaactatatgtcccaaccagatttggcttccccatcaatcactaccgtgtaccttcccctagaactacttctggggcacttcgcagaagggatcttaacaacctacttcggccctggtattaacataacttcaatttgggcccagaaaaagtgtgtgtcacccattattttccaggaaagttcctggccttctttgaatggcaataaagacttctttcacaaatggcctttgggtcgctaactttccaaaaacgcgcaaaaatttgcacccaaattattcccaagacattgaacgccttatcagttcacacaaaattactggtaagttcacgagact

SEQ ID NO: 610245 - DNA, 325 bp, Homo sapiens
caaatatagaaaatcattttacataagaattttaagtatttgcaataaatatatgtatttagattgtatgtattcctatattcttatttgtcattttattattaagtaaatgatcattaaaagtgtaattaataaccttggagttttttgttgaatcttgaggtttaacatacttctgagagtggcgtgggtaagtgtcttcagttactgccttttattcctatgggatggttccctcatattttatggaagagagtataatgagtaacttggtgataaatcatggttgtgtatttcttttgtaattaatgtaaaactgattaaa

SEQ ID NO: 610246 - DNA, 431 bp, Homo sapiens
tgtacggttgaacgtatgctagaacctcctggcagcggagtgtcatctgcaccaggtgacacagcgctcgcaccaaacctcctccggactgattcacaggccaggaaagaattaaagatgaggctcaccaggcgccgcagacacaggtcgagaatcagtttccagacgaaccagaatgtgctccagtgggacatattttccaaaacttagcagccctcacagctttgatcttcaacagcatgtccacaaaagctaccctcactttctccgaatggtcgtggagacggtatctgagagctggcaggagctgctctaacaatgggtgggctcagttggtggtccaaaatcattggcagaccacttaacgacagaacaacgaccatcagctgagctcgtgtcaaatgccagtacggaaggtggagtaaagtccg

SEQ ID NO: 610247 - DNA, 124 bp, Homo sapiens
gcaccgcttactacagtagtacagaaaaagggcccctctgagtgaggctgcagcctgcctggacaaagcagtggaatatgggcttatccaacccaaccaagatggagagtgagggggttgtccc

SEQ ID NO: 610248 - DNA, 193 bp, Homo sapiens
  misc_feature (127)..(127): n is a, c, g, or t
tcaccatgttggccaggctggtctcaaactcctgacctcaagtgatatgcctgccttgacctcccaaagtgctggggttacaggcatgatgagccaccgcacctggcctgacctgcaacttttatgntctctggtaaaacatgagaaatacttgtaaaaattatgggagtcaaagtaaataatttatttttta

SEQ ID NO: 610249 - DNA, 419 bp, Homo sapiens
  misc_feature (22)..(22): n is a, c, g, or t
  misc_feature (69)..(69): n is a, c, g, or t
  misc_feature (155)..(155): n is a, c, g, or t
  misc_feature (243)..(243): n is a, c, g, or t
  misc_feature (285)..(285): n is a, c, g, or t
cacccttcctggcaaatccatngaatccgaggatggtcttccggagcttgccacactggtaaatccctngatccacattctcttaggctccaagggcatgtgaagaagtgaatatctggcctttgtggcttttgcacttggaactgttaaggtangaatatatatgaccttactaaaatgttaaaaatcgaaatacatcctgggcccaagggttttcagtaaggatctataacgctatataangaactcccctaaagtcagtaagacagacaacccaaatgaaanacaggtaaaatatacaagcatattacaataaatctaatatgttcattaatgtataaaaatgtgttctaccacattgcttatcagaaatataaattaaaaccataaggagataccaataaatacacataagattt

SEQ ID NO: 610250 - DNA, 669 bp, Homo sapiens
agcgggctgtccctgcccgagacaatggccggcgaggctggtacgcggtgctcccatcttctctctcatgaatctcgtgaagccccgctgtgccgcgtaggtgggggccggcaatatcacaattaccatctggcggggacaactgagaaggcaactgaccaggatatcaaggataactggggcgacagtgatgatgtgaaaagaaagaaagagaagtaaaactagaagtaaaggtttcagaaaagatagatcgataaataatcgatcgatagatagataatagatagatgataggcaggtagataaatagataatattatatacatgtatatgtatatgactcgagaaagccaaagagaaattacagcaactggaaaaaaaaaacctttaatttaaaaagatgttagggagaacttaaggtgttaacaccaaagaacaattagcaaattcgaccgggactaaacctaaagaaatttccaggaagagtcagacttcaaaccagccaaaaagacgttggcggtacatacagttaatggagccaaggctctgaacccactttgggacgagatggcttccgtggatttggaaacagttactaaaaacattaacaattacccatttttgaacaagtcactgtattatgcaaagttggggggtatccttaagatg

SEQ ID NO: 610251 - DNA, 807 bp, Homo sapiens
gaaagtgaggtcaggcggctctaacggatgcaagactcaccttatcccagtggattgtgcagaatacactgttctggtcggttgtcattctagttctccagtggggttcttactggattatccaggtagctgagaatctggatgaagcgtgcactctagggcagagcagctatgatcctgattctcagtgcctgcggtcgaaacgaatcgtgttccaggaatttaccaccgattactccggctccatacaggaatgaatcggaatctggttccctgcgacggagaatttcgaaggacatgaacattgatcaacagactgtcatgcaaggagaaggatcggcataggtcaccagtgagaggctgacgggtctggtaaggcaggcttgggctgacgaagtcgacgagcaccgtagaaaacgagaggtgacttcagtataggccacatgaggagatgagcatactaagagatacgttcagttagcatattggccacgtatgatgaccatcttgagccgcatcataaaattgggataggctctatgagacacgagaacccgaagacggcctcggagatggggtgctcgaagaccttgggaacggtttagccgtagcaggaaggtataaggcgatgattcgacggacagtgcggaaatgaagcaagagaattccatcatgaactcccggtctcgaacgaggaactgaaggctgactgagagtgttcgtatgcttgagagagctggagcttctggtgccctctatccaccgattcctaaaatatccaaggagactggtagcttgggcagttgg

SEQ ID NO: 610252 - DNA, 164 bp, Homo sapiens
ggtcgttctagaggatcccagcactgtgagactacttgtcagcatcgctggacatgaatagccaggctgacatcaagcaaccatgaactcagctattatgaacatcacatataccagggcagccgcacggcatcgatggtggcgcttactcctgtgaccacccg

SEQ ID NO: 610253 - DNA, 428 bp, Homo sapiens
tcatcatgcggcattgcatgtctagtatatttttaattatatctactgcatatgtatatgttactatcagactggtctacataattactagacgattatcctatcagacttacagtaaattttgtcaattatagacataaaggaggcagaaggaaatagagctattcaaatgcaaattttttatatacttattgaaattaattttattttaatctgaacaagattgtcacaaattacacacaactgaaaaaagttgtgaactggcatgtctgcaagatagctgtctagactttgtcctggttttcatcttccccagcaaaaagggaccaatatattgaattaactactttttttttcactatgcatgaatgcggaagtacactggagagcaccatgtaaattgctaaatccttgtggaacacagaaac

SEQ ID NO: 610254 - DNA, 268 bp, Homo sapiens
gaaaaaaaaaaaaaagaaaaaaaagaggggggccgggggtttcccgaaagggatttcggttttatcccccgggcccccctcctgcttaagattcaactgggggcaaacccgggatgctctctaacgtaatcaagggaagggtccgtaaaaccaagtgatttttcctctataacttccaccccatttgttttggcccccaccctgttacccctatggcccccttttttaaaggctttgaaaaaccaaaaaaattttttttggtttttta

SEQ ID NO: 610255 - DNA, 241 bp, Homo sapiens
tggtgtgaagtgttgaatgagtggagaagagtgcagtgtgcaatgaggagagcagtgttgggcagtgtggtcggggtttgatcctgaatgcagaggcgacatggaagggctttgtgcagtggtgctgctgtgctactgattcacacatatagaaatgaccattcttggagtgcagccatggagtgctggtcacgttgaatgagtgaggcagatgtccttgtgaccagtgatgtttgttgac

SEQ ID NO: 610256 - DNA, 218 bp, Homo sapiens
ggggttttaaaaaaaaaaaggttcccttgggtgtgttttagggaaggtaaagaaaaatctgctctttctttgaaaactgtttttgcccccggcagggccttgggaaggcccaaacctttaccgtagggcttttgttcccttaaaagttttgtttcctgaaaataaaaagggtttgttgggttttttattgttttttgtgtttatataaataaacctgg

SEQ ID NO: 610257 - DNA, 166 bp, Homo sapiens
  misc_feature (146)..(146): n is a, c, g, or t
agaggatccgtgagtggcatgtgaggtggcattcacgcaggttagaatggttatactaggaagtcacaaacagcagatgcgtggagaggatgtggagaaatgggaatgctcttacactgttggtgggagtgtggattggcttcacnccattgtgcgaggacagctg

SEQ ID NO: 610258 - DNA, 157 bp, Homo sapiens
cgttgacaccatgatcgtggacaagaccggcacgctgacggagggcaaactgacgttcgagcgagccatcgccgtcccaggacggtctgacgacgaaatcctccttctggcggccagcctggaccaaggcagtgagcatccgctggcccatgccgtc

SEQ ID NO: 610259 - DNA, 172 bp, Homo sapiens
cgacagaagggggcatgaggtggtgcttctggggtgttctgtttcttgatctggttgccggttacctgggtgctttccgtttgtgaacattcttggagctgtacacttttgatctgggcacttttctgtgtgtatgttatacttcaataaaaagttgggctttgtgactagc

SEQ ID NO: 610260 - DNA, 302 bp, Homo sapiens
  misc_feature (7)..(8): n is a, c, g, or t
  misc_feature (35)..(35): n is a, c, g, or t
  misc_feature (67)..(67): n is a, c, g, or t
  misc_feature (89)..(89): n is a, c, g, or t
  misc_feature (204)..(204): n is a, c, g, or t
  misc_feature (222)..(222): n is a, c, g, or t
  misc_feature (281)..(281): n is a, c, g, or t
  misc_feature (284)..(284): n is a, c, g, or t
gcccggnncacctctgacatctcattccgggtatncccgaggtcgtccccatgcttcccagcctggncctggagggtctcaaacttggnctggtaccaggcttcagcttcagcccggctgcatttggccatctcctcatactgcgccttgacctcagcgatgatgccgtccaggtccagggagcgacttttgtacatggacagnaccacagatgtgttgganatctgggactgcagctctgtcaactccgtctcattgagggtcctgaggaagttgatctnatnattcaggggattcaactt

SEQ ID NO: 610261 - DNA, 117 bp, Homo sapiens
gaaaagagactgttcaaaccactgaggatcagattttgaagagagatatgccaccagcatttattaaacttttactagaggaaatcctaaagaatgtacttcaaacaagtccgctga

SEQ ID NO: 610262 - DNA, 364 bp, Homo sapiens
  misc_feature (280)..(280): n is a, c, g, or t
tcagtcgctctggggacgctgatgccacaaaggaaataaccaaaacaagataactctattgggcggcgggaacagaaaggaacatgtagcaatcactcctcttcatccatgcaaggaagcgaggcgatgccttgaaaaggacggccttctttgctgcaaatagccagaagtgaactgagcaaaggaagcacgggacgcacaggaagaaaagtgctccaagggacggacaggacggtgccggggttaggaaagcgcaacactgttcagacacagtctccgntatatgaatggcaagcccagttaaaaatatctaaaagggcttttttaggtttttaaggatatttttaaggttagttttattaaa

SEQ ID NO: 610263 - DNA, 738 bp, Homo sapiens
ctcaaatcagtatgaaggccacccattcagggcatatttggaatctgaagttgccatatcagaggaattggtgtcagcaacatatagctacattctgctcttggtcatgtgagacgacgcacaataaaggaattgaggcgtctcttcttagttgatgaatttacttgattccctgaagtttgcagtgttgactgtgggtatttacttacgttggtgccttgttcaatggtttgacactactgattttagctctgatctcactcttcagtattcctgttatatatgaacggcatcaggcgcagatagatcattatctaggacttgcaaacaagagcgttaaggatgccatggccaaaatccaagcaaaaatccctggattgaagcgcaaagcagaatgaaaaggccccaaacagtagacattcatctttaaaggggacactcccttggttacggggtgggcgggtcaggggtgagccctgggtggccgtgcagtttcagttatttttagcagtgcactgttgtgaggaaaaattacctgtcttgacttcctgtgtttatcatcttaagtattgtaagctgctgtgtatggatctcattgtagtcatacttgttttccccagatgagggcacttggtgaataaaggatgctggggaaaactgtgtgttatattctgttggcaggtagtccggtgttttggaaagtgccagcagggaaacttggggggcaggaaaaaactt

SEQ ID NO: 610264 - DNA, 176 bp, Homo sapiens
ttttttttttttccccccccccccgtttggggcgggggcctttccccccccggggggggaaaaagccttttttgggcccccttaaaaaaacccctttttcaaggggggggggggttttttccccggccccctttttccggggggggggggcccctaaaagttttttttccccctga

SEQ ID NO: 610265 - DNA, 129 bp, Homo sapiens
ccacgaggacccggtaacttcaagctcctaagccactgcctgcgtggagaccctggccgcccacgctccccgccgagttcaccgggtgcgttgcacgccgtccctggacaagttcctggcttctgtggc

SEQ ID NO: 610266 - DNA, 336 bp, Homo sapiens
cctagggagtcaggctggtcaccgagtgtcacacaggtagggggcgatcatctggacagagcttgtgggcccagttgtctagtgatatcttgtctgtcacattccccttcctgggtctctggcatgtgtctggcccagatgaagaaattctggtctagagacgcagagcagattatgtagcttagtcctcggaagttggcgagcccaggtctgtctggcttacaaggtcctccctgcgtcgtcctgcgacgtatctttagctgcatgttaaccatgctttgggtgcctccattatcctcatgtctttagggaattccctgtccggttgagcggaga

SEQ ID NO: 610267 - DNA, 151 bp, Homo sapiens
  misc_feature (81)..(81): n is a, c, g, or t
  misc_feature (133)..(133): n is a, c, g, or t
gatgcagatatttgcacaatggttcggcaaaagcagaacaaatatccgatactatttttaactcaacggaaaatctgaganttatcctagaacttccaatgggaccttcaagaattctccgggacaaaccccnccatttggcaatggaagg

SEQ ID NO: 610268 - DNA, 1491 bp, Homo sapiens
  misc_feature (405)..(405): n is a, c, g, or t
  misc_feature (410)..(410): n is a, c, g, or t
  misc_feature (531)..(531): n is a, c, g, or t
  misc_feature (538)..(538): n is a, c, g, or t
  misc_feature (550)..(550): n is a, c, g, or t
  misc_feature (580)..(580): n is a, c, g, or t
  misc_feature (610)..(610): n is a, c, g, or t
  misc_feature (1491)..(1491): n is a, c, g, or t
ccggccggtcgcccatagccagtgcctccgtcacctcttcatcgcaccctcggactgtccgcaaggtgccccgtgcggcggatcctaggcgtccgcagcagtacagccggcgctcgccgccgacgtctccgttagatcgccgacctatgacgaccgagatgcgaccttcgcataggtgcgccaggaacttaccgaccagaggacttcgataagagtccggtacattcaatgctggcacgcatcaatacccttggcatgccttcttatcggcgcttccatagcggatctataacgcttgttcacaaatgctcgtgttacgttagcatttctgcaactcgactgaagtagcattcgctaggaccatatgtagaagatgatagcattatgcctcgatagagtagcttnttgcnttgcgagcgcaaaatcgtgcattgtacggatgatgcgcgaacaaattgcttagaggaatacatgattcgaaagcttggcaagaaaccctagagcagtacgtgtggtgcactgataatcttntaccatntctagggaaatntagtggaaagcaaaacaccaaaggactttntagagatgacataggagcaggagacagcgngagtaggagagtgctcaccatgggcagctgatggagattagacatttctgtggacacaatccaaatggtgcagactctgagatcggacctacacttgggttatacctgtgtcaacataagacaactgggggttccacaacattgtactggaaacaccaaatgggtaatccaccacgaataatgtgggatcggttggaattgttcccattttgagacgggaacgtaccggattttacccgtaggcgactatacggcaggccgagagggggttcgccaatacaaggcgcccgattcccaattcacggcgacacttcgcggggcggtttgaaccgccaacgcgtttgtagcaccaacaaccttttgtcccagccaaaaggacatcgccgggatggcagcccactggcaaaagtcgtgggcgccttagcagggcgggaggacagctcaatcttgccttcttaggaaggaaagccttacacaaccccctttgggaggtaagacaccacgtgttggcattccgctttggacaaccggccttaacgggccctgtccgggggacccttaaactatacccgcgccaaatatcgccccagctggtggtggggtgaacatcacatccacggggggagacgacaccaaaagagggcatagcgggccatagggcagtggaatagggggaggaaatcgcccgagaaaacacggaggtaatcggcacaggaaaaggtctgggagccaccgagggaaacaactttcgcaccatgttaccagtcttctacttagcgaggcgcgtcgagaggccaccgaatcccctcttagagacgctacacacacagaactgtcggcgggcccccagccagagcagagaccaaaacacagtgcagacn

SEQ ID NO: 610269 - DNA, 969 bp, Homo sapiens
cttctgccacacctcgtctctcagttctctcgcacatttccatagagaccgtgttggtttgttgttcacccgggcccccgcgtcttccatcacctgtccccccatttataggcattaaaatccactgtctgccagtcgctcccttccctcccacctgttattgaggtacattgtgagtgtaagaagaattgtaaacacagagaagagacatctgttactgagacctaacgtgtgggtgctagtgcacaaggcagagaaagagaacaacctcgtagacatctgtattcctgatgtgtggtgtatgggagctatagcctgtggcggttggagggctctgtgaggcgacagcggagaaccaagcatcttcgggagcagcagtgtgtgccctcggctgccggtccctagctgccgaagacttgcatacgcgccgatgctcgcatcgtggaggcgcccagtcgcgaggttcgcgtggggacctggaggcgcggagttggccagtccagtagcctggttttctccggcatgcatttaccagggcccaaaggggtggcgtatcttactcgcttccatagtttatgcctatggtgacagtcgacctgacaaagggggacgcgttgtatttttgctccctgaagtatgggggtgatagtctttggcttaaatacgtctttcaacgtatgcaccacaatatccttacgatgcgtataaattacctgtgcaggccttgcccagtactattaaaacacaagacggaaaacacgcaacaaggaaagatccacactgaacagaagggaaatagctcggggggcagcgaccttccctttcaaagatgcctggcacgctggcgggccccaattacattccgttcactccaaccacagatctgggcaggttcttggcttcaaccaaggttgggcaagtataacgtccccacgtgccccccaatcatctcgcctggtgaccccggga

SEQ ID NO: 610270 - DNA, 195 bp, Homo sapiens
  misc_feature (151)..(151): n is a, c, g, or t
  misc_feature (173)..(173): n is a, c, g, or t
cggagtgatggcttgatcccggctcactgcatcctctcgcctcccaggttcaagcgattctcgtacctcagcctcccgagtagctgggactacaggcatgtgccagcatgcctggctaattttgtatttctagtagagatggggtttcacncgtgttgccaagcgctgatccncaaaactccgcgacctcaggta

SEQ ID NO: 610271 - DNA, 867 bp, Homo sapiens
cacacgggcccctgagggtaccaggagctggaggccccctctgaagataattcttggaagaactgccccagcagggacctcagtgcatggcccagccagtgctgcccactgacagcgccagccgaggtgagagtggccgtgggtccccgcatcagtgtgacttgtgtccccagcccctgccacaattggtgggacatgcttggccgggcggcacggcacgtggggttcggtggctttagttttgggccgggtcctagggggggggagctcgtgttgcatgtgtatgcgtctgctgctttgttgaacaccgcgccgtgcttggctggaccgttcttcgcgagcggcctgctgctaagcaaacagcacatatctatcacaagaacagaaagagacagcgatgggaacgacgaggcaagacgaccacgagggaccgagagtagtacagggcaggcggacatctgggcccagacaatcgagaaacaccctgatgtgaaacacggaccttcaatacaaacaacactggtacccgggagtacccagttggattcggacttcaactgaacagggggaccaattcgcaagagacgaaccttcattagtaggtaccggaattgtggtgtccaccccctggctccctaatgcagcaagcctgggaaccccatggtcgcattccttgaaccaggcgtacattaccatgtactgggagacagacactggcctagggacatgggaggtgtgcttggaaacccggcggagaaatgagaagtgacagtatgtcctgccaggtaaacaactgtgtctaacgacccgtgccatgatgggggcatggttgtccatggggtccgaccaactggtaggctgcacacg

SEQ ID NO: 610272 - DNA, 349 bp, Homo sapiens
  misc_feature (140)..(141): n is a, c, g, or t
tttaagataccaattttgataaatttcccacaatggggtctggggaagtaagttataaaataagccatatgatccagcaattctactcctgggtattttcccaggagaaataaaaatgtaagtttacaccaaaaacttcnnaccacttgttaaagcagcattatctgtaatagcaaaaaatggaaacaacccccaaatatccaacaactgactaatgaataaataaaatgtggtttatccatacaatggaatgttattcagcaataaacaggaatgaagtactgatatatgccataacacggatgaaacttgcaaacattgtgctaaataaaagaagtcagtcacaaaa

SEQ ID NO: 610273 - DNA, 159 bp, Homo sapiens
  misc_feature (18)..(18): n is a, c, g, or t
gacacctacgacgatcgngctacagcgctcggcgcggcagagggtcccgcggcagtcaggtggccatggttcccgtaggcagaaggagttgcccacagagcccccttacacagcatacgtaggaaatctcctttgattacggttcagggcgacacggat

SEQ ID NO: 610274 - DNA, 160 bp, Homo sapiens
tgataagtgaggaccagggcgggctgggagatggcagctctagatggggctgtgtgatttggagcaagttccttccttctcagtgccttagtttcgtcatatacatggcaatacgctggcacagcacaatccgaaggttccctccagcatacaaattctc

SEQ ID NO: 610275 - DNA, 233 bp, Homo sapiens
  misc_feature (79)..(79): n is a, c, g, or t
  misc_feature (209)..(209): n is a, c, g, or t
tccttagtcaccgcgtcacaaaccgcactatattggtgcgatagctgcacccttctcaattgcccagcccattttggtncgaaacttcccgttgaggctggcagaacgccacagtttcgcgcctgaaacccttatttcagggcattagcgcttcttttcggagccctggtttggtttttgcattttccttgtatcagcgtgtgcctcangcccgcgccacgcgattaaactat

SEQ ID NO: 610276 - DNA, 185 bp, Homo sapiens
cccccccccgggggggggggggggggggggaatttttttggccccccccccccggggggggggggtttcccccccttttttttttggggcccccccggggggggggtttttttttttttttaaccccccccccccattttccttttgggggggggtttttgggaaaccccccttttttttgggga

SEQ ID NO: 610277 - DNA, 113 bp, Homo sapiens
tgagctgcctacctttagttgtagcaggaatcttcttactcatccgttccaccccctaacagaaaatagcccactaatccaaactctaacactatgcttaagctggatcagct

SEQ ID NO: 610278 - DNA, 410 bp, Homo sapiens
aggaagaagaggtagggttggtaggagaaacgcgatcaaggttgtaataatgtgatggatgaatacaggttagcaagaacagcagaggtcgtgctgtgatctgagtgctaaatggcctggacagaaggacataaggaatctctccccatttctccagtcgtcggaaataattgcttaagtcaggtaaaactgtaaagtcgaatgttccatttgcgggccatttggacccgttatctagttggtactgtggacagactgaattgaataaatagacaaggcgcttagggcgtgatatcttgcctgaggcctgaggtttgcaggtttttatgaggtagcctatcgggctgtcctttggaaaggaagactgagaatttcccataagagggtaggctcaggagaacagggaaaag

SEQ ID NO: 610279 - DNA, 551 bp, Homo sapiens
  misc_feature (138)..(138): n is a, c, g, or t
  misc_feature (143)..(144): n is a, c, g, or t
  misc_feature (148)..(148): n is a, c, g, or t
  misc_feature (155)..(155): n is a, c, g, or t
  misc_feature (161)..(161): n is a, c, g, or t
  misc_feature (163)..(164): n is a, c, g, or t
  misc_feature (173)..(173): n is a, c, g, or t
  misc_feature (176)..(176): n is a, c, g, or t
  misc_feature (180)..(180): n is a, c, g, or t
  misc_feature (188)..(188): n is a, c, g, or t
  misc_feature (198)..(198): n is a, c, g, or t
  misc_feature (200)..(202): n is a, c, g, or t
  misc_feature (206)..(206): n is a, c, g, or t
  misc_feature (209)..(209): n is a, c, g, or t
  misc_feature (212)..(214): n is a, c, g, or t
  misc_feature (219)..(219): n is a, c, g, or t
  misc_feature (221)..(221): n is a, c, g, or t
  misc_feature (240)..(240): n is a, c, g, or t
  misc_feature (244)..(244): n is a, c, g, or t
  misc_feature (249)..(249): n is a, c, g, or t
  misc_feature (415)..(415): n is a, c, g, or t
gaaaattagcaattaatcaagggatggaggtcgatttagtaacagggttagccatagaagaagcttgttatgctcagaccattccaacaaaagacagacttgaaggtcttcttgcttttaaagagaaaaggccccctngctannaagnagaatanaagggncnnaaattcttnagntgcnatgtaatnaatgtattcncnnnagtntcnttnnnatccncnatatgcctcagcacatggnaccntatgnccaatagtaacagcagtatagttcatcgggtgtaataagcatctgtaatggacccatccgtgtacttcattcaaatgtgttaatgtcatattcattcagatttatacagctagtagtgtatagtcagaaacagaatccaagtcagatatacatttttaaatatttnctgcatatgaggctttctgttaattttttaatgtgaataatttatatattgcacattctagggaataatattgattgtatgtctactgtgctgcattaagaaaataaaatttctatataccaaaaatgtgaagtta

SEQ ID NO: 610280 - DNA, 319 bp, Homo sapiens
  misc_feature (138)..(138): n is a, c, g, or t
  misc_feature (143)..(144): n is a, c, g, or t
  misc_feature (148)..(148): n is a, c, g, or t
  misc_feature (155)..(155): n is a, c, g, or t
  misc_feature (161)..(161): n is a, c, g, or t
  misc_feature (163)..(164): n is a, c, g, or t
  misc_feature (173)..(173): n is a, c, g, or t
  misc_feature (176)..(176): n is a, c, g, or t
  misc_feature (180)..(180): n is a, c, g, or t
  misc_feature (188)..(188): n is a, c, g, or t
  misc_feature (198)..(198): n is a, c, g, or t
  misc_feature (200)..(202): n is a, c, g, or t
  misc_feature (206)..(206): n is a, c, g, or t
  misc_feature (209)..(209): n is a, c, g, or t
  misc_feature (212)..(214): n is a, c, g, or t
  misc_feature (219)..(219): n is a, c, g, or t
  misc_feature (221)..(221): n is a, c, g, or t
  misc_feature (240)..(240): n is a, c, g, or t
  misc_feature (244)..(244): n is a, c, g, or t
  misc_feature (249)..(249): n is a, c, g, or t
gaaaattagcaattaatcaagggatggaggtcgatttagtaacagggttagccatagaagaagcttgttatgctcagaccattccaacaaaagacagacttgaaggtcttcttgcttttaaagagaaaaggccccctngctannaagnagaatanaagggncnnaaattcttnagntgcnatgtaatnaatgtattcncnnnagtntcnttnnnatccncnatatgcctcagcacatggnaccntatgnccaagtggagggcggtttttcatacggggtattggctcttgggatgggcccccccgttattcattcaaag

SEQ ID NO: 610281 - DNA, 391 bp, Homo sapiens
  misc_feature (375)..(375): n is a, c, g, or t
tataaatctaatcgttctctgcaaaatacctagaaaagtgatgctgaggtaggatcagcagataatgggccatctttttttaaagaatgttgtattcagttaataaattaattgtaattctacacatatataatgagttcagaatttttaaaaattcgggggaaaggccatttatttagcaggtttttagagctaatagttacctccagtctgagctgtccttaactatatcccggtcttgtaatacacactatttcatcgctctgtagtgagaggagagaggcacacactctcttgctagttcatctgcagcacataattattatgtctgatgttgactcattgcagtttaaacatttctcctcgtttgcaccntcagcagaaaatggaa

SEQ ID NO: 610282 - DNA, 342 bp, Homo sapiens
tgatcattccaaacgggcacgcactgacgcaactctgacagccaatacaacgggcagaattggtctgcaccacctgctcgcccatcgtcagcgcccccacggggcaagcgccaacacaaggggcgttttcacactgatggcacatcaccggcgcactgatgctgtccagtcgctgtaccttcagccggggtaaaaagacatcggcattcaactcctgttctgaagggtgagcgaccacacaggctactttcacaagtacgggcagccaatacagtcagccggattaacgataattaacggtttcatcacgatgccttcgtatcaaacagagtttaacatatc

SEQ ID NO: 610283 - DNA, 86 bp, Homo sapiens
tccttaataaaaaaaaataatttattggtcaaccaaagggtgatttatacaacaggaaaacagatgtaaatgaaaacgggagtaga

SEQ ID NO: 610284 - DNA, 110 bp, Homo sapiens
tacgtatgggtgtgagccaagtacagccactcttcaccgggctccctgctctgggccctgcaccagagctgccaccctcttcccagccctagccctcttccccagcccag

SEQ ID NO: 610285 - DNA, 912 bp, Homo sapiens
ggaaggggacgccgggaacaggaatttcttcacatggctcctggagaagtgatcatcacagttcgcctcatccgttcctttgaacatcgcaatttcaaacctgtagtgtatcacggagggactctggacaagactgtacagggaatttatcgtattctaaagcaagatatccctttaggaccaaacctgccacgcaccattcagaacattataaatatgatgcactacagattattcatcaggcacataattcacagacacgatgcagctttgtgtggagtagcaagatgacgaaagactccggctgaaagcaagacagcactctgaaagggcagctggagtcgccagggaacctgagactgtgccttccttctgtgaggcacgcattataaagacctaacaaaagctaattgcccatttacatccctgttgaaaaacggtctcgagggcttccttttggcatacctgtataacgcttctttatcccaactgggaattttcgactggacacccaacttcttagaaaattaaatcccaggctatactctttgagctaaaattctggttatgacttctcctcagggtcttacctgtctctcttactttcctaggtgtgtacactgagtattactgagacaacccttgtgccttctcaggcactacctgttctacaactaagcacgagacacacaaacaaacatttggggggctcgcgaccggaaagtataaaatgttgggggccgccccaagttaggaatttgcacacggcaaggacaccggacgaaacgtgggtccacaaacaacggggcgggcttaacacaggtctggtcacggctcacggcggctcaccccgccgcaaaaggcagcacaagcagcagggcgacgcagacacgcgcggacagcagctccaac

SEQ ID NO: 610286 - DNA, 833 bp, Homo sapiens
agactggataagtcgtacaggtacttcaataacatcaacaggcttgcgaaggagttccccttggctcaccgtcagttagaggacgataaagtcactgtgtggtgttccaacgattacttggctttgtctaagaaccctcaagtcttggacgctatgcgcaagaccatcgacaagtacggtgctggtgcaggtggtaccagaaacattgccggccacaacattccaaccatgagactggaggctgagctagcggccttgcacaagaaggaaggtgctctagtgttctcctcttgttatgttgccaacgatgccgtcatctctctattgggtcaaaaggtgaaggacttggtgatcttctccgatgaactaaaccacgcctccatgatcgttggtattaagcacgccaacagacctaagcacatcttcagacacaacgacttggctcagctggaggagatgctacagatgtatccaaagtctactccaaagttgatcgctttcgagtctgtctactctatggctggttctgttgcagacatcaacaagatatgtgacttagctgagaaatacggtgcgctaactttcctagatgaagtgcatgccgtcggtctatacggtccacatggtgccggtgtcgctgagcattgcgacttcgaagccaccgtgttgcaggtatcgccaatccaccacaaggtgaccacggtagactcagaaccagtcatggacccgtgttgatatgattacggtacttggggtaagtccttcggtactgtaggtggtaacgtcgctgtttcgaacaactactcgactgggttagaatcttacgccccaag

SEQ ID NO: 610287 - DNA, 964 bp, Homo sapiens
gcaaccatagatcagttatcttatgacaacattaggcatcaggctctcttggaataagatcaaagtgtctcttatcacttgtgattcctactttggttattgtaagccgatctacactttcagtggccgacagaaaacgagggacaatagctgtgcatcacaaggcctaggaggctgtggtccccactggggctgaagagaagcccagtctgcccgacgcggtagccaggggtggcagctgtgggacagccggggagcgaggacagcggtctgtccttcacaggttttactacttgtgtttctcgctggagaaggacaagtgattgcgcatagcgtttctcttacccgagtatgaatgattatagatttcgtgaggcatgttcttgataaacaaaaggctatggttaagtactcggagaggcagggagctaggccacaagcacgggcatcacatgtggtgccgaattcctcgaaagcgtctgggatcaggtattgccagaaggggggctgttggtcctccattcctcgtatgtgccacgaggtagaggaatctcgtcctgcgggggggccgcaggccatctgtattgttatgcaggacatgtatttctcaatatggccctgtaaaagctgtgcccaaggaaagaagcagtctgcctgaaaagagcccggggctggctcaaggacatcgggcccagcgtcccctccgggaggccagctgaggaacaggccaggcgaacggaaggaaggaaagaagggtataaagaacaggagacgcatggcgatcacagctattaaaacggacaaggcaccaaagtcggaggggcaaacctccaaagaccggagaggacgtggagaagaaacacttggacaaaacgctacagacaccgggcgaccggcaaaaggccaagaaaacaaacggagaacacgagaaaccctgaagaaacacataggaaatcaaacacat

SEQ ID NO: 610288 - DNA, 116 bp, Homo sapiens
tcaaatagtcttcaatataagttacaacttgattagagttgatagacattgtatctatttaaagacaaaaaacttcttttatgtacaatatcttgtctagagtctagcaaatatag

SEQ ID NO: 610289 - DNA, 1352 bp, Homo sapiens
  misc_feature (253)..(253): n is a, c, g, or t
ggacagttgagcggggttgcggagctccttgggctgcgagctccgggagtcttccgaggttcggtgcgcgtctgggtggcgagcggcgtgcagtgttctcggtcagggatgcggagcagttatgctcgcagcgcaggccagggaagatcgcaggagcgatggcagcgtagacacgaagtatctggttccgcggatcctgtaaggctggctgcagggcgcgacggaccttgcgggcctggacagcgcctccgancgtcccatgcagacgtgcatctatccgatcagtcaatctcaggccagcgaatgtacaagctcggaaggcatggagaagacagtgcgtaggacctatggtgcaaggcacagaccatctggcctgggccttgcaatgccccaggaagcaagctccgaggtggctgtgtgcggcccgcccatgcctgccggagatgattgtcaccgcacgtgctggcaccagccatacatggctgggccctcgggggacgctagcatcgtcgaggaaatcgagctcgggcaggcggtagtcgctggtggggaactcccggtttctactatgggcccaggggttggaccaagaaaaacgaaggaagcgtgcagtaggccgtgggggccaaggggcgtaggctatcggacgcggcgtgggaggaagcacgcgacaggctcctgaagtgggaccccaagcccctctagaagcgagacatccttgctcctcgatcagtgtgtgccaagggatcaggtgcggtccgtgcagcccccggggggcagtcgctaccagggggaggactcatgggggacatgccctggggacaggagaagcgggagtatgctcgcacgtgagcctaggggctacgcacagtccttccatgcgaggggctcccaagaactccaggtgggcttcattcgtccaaaggccaagggcccgggcaccggggcgcaccgcaaccgaaggttgggcccgggggcgggaagccacacgaagatccggttgcagccggggtggctgctcccacaggggggccacacgcgggttcgcaggaacggaccgctggggggtggaaactggaaggagccgaaataataaaggcgaatgagggggcgttggctggttggacacaagagggcctccgagggggccggggacccctgggggcatcacatgacagggcagcagcagagagtggcacgcatcagtgggggatcacgccggcacactcagcgaggggacgctgggcgccccgcaacaggtataaagggcggaaggaatagaacacatgtaaaagacagaggccgagggggcgagccacaaaagacgggcgaggggagagagcagagcgctg

SEQ ID NO: 610290 - DNA, 167 bp, Homo sapiens
gcagcttcctttactgacgacaaccaatcagcattcatcctcctggggtggcttgagccccacaagtgaggtagattcccaacattacttaccaccaacaacacagcagcacgtatctatcgcaggcgagaataccctttcatcatcaacatctctggtcacctcac

SEQ ID NO: 610291 - DNA, 308 bp, Homo sapiens
ggtttttttaccccccgggtggggcggtttttggggccgggttcccccacctttttttttttgggccccctggtggggcagggatttccgggcctcccccgggggggggccccttttatttttttgggcctcccgattggttccctttggttgcccccctttcgggttttgggtgggggtttttgggctgggggggggggcccccattttgggggcccgttttccccctttttttttttggcccctttacccgggccggtctttttttttttgttttttttaccccccgggtgttcccttttttttta

SEQ ID NO: 610292 - DNA, 258 bp, Homo sapiens
catatgctctggatacagctgtcatcattaaatattcaaataattgaatagactaattagacctttctcatcctttccctttgtcttctctaccttctctctcaggttatctttccccatccctgttcctcccaccgtctatatctgtatctaccacatgcttctctgtctcgtttctgactccttttatcattatctcctgttgaaagtggtgaacaagagtaagaattcgcccttaagtattgcttggtgtggggc

SEQ ID NO: 610293 - DNA, 207 bp, Homo sapiens
gcaaagaggttggagatcaaggggctccaggacatattttggagaagactgtggtaagtgtaaaggatgacttctaattcttagcgtcacagtgggacgggaaaaactgcccaaccttaacttggagacacgggactgtagaatgtgaagagggaagtgaagacgatgaatccctccgagaaatggtggagctggctgcacagagac

SEQ ID NO: 610294 - DNA, 125 bp, Homo sapiens
ggaggagcaggagcctccgcgcaagcagatactgacggaggagaacatggccacccacagcccacaacacagcctgcacaaagaccacccccacagcagcccccccaagacctcaccccactccg

SEQ ID NO: 610295 - DNA, 253 bp, Homo sapiens
tttggttgtaggaaaacttgaaaattccaaaatccttattttcctatttgagaggctggttcagcagggtgtgtgtgtgtgtgtgtgtgtgtgtgtatgaatggtatatgtattccattatcttcgaagagaatgagtgagtttcgtggataattttttatacagtctacgtggatctttctcattggccatgtaggtaagattcttgaaactcaggtctttatcaaattattttaaattcatcaccatttaa

SEQ ID NO: 610296 - DNA, 273 bp, Homo sapiens
caagatccgagagctcgacgaaaggcttgtatggtatgatggttatatgaatgtgtataatgtgcctagaaagagcctgtagtgaggagagagtagctacgagtcaggtgagtagtcctgcaggaggaatgtcactgtctgtcggctcatatagcaatggacagatagagaaggagtagatcaagctattgttatgcggaagcaatcgggccgatatagggactatcagtgcaagctcgatatatggatacatgagagatatacaatgatgtc

SEQ ID NO: 610297 - DNA, 421 bp, Homo sapiens
agggtaagagggcaagctagcgcgtcccacaatgatttcctttatttctcgccatccgaatatatccttcttcaccaaagttgtggccccagctgttaatcacaagccagtattcttatcccattaagatcaccatagccagacgtcatcattcacagttggagcagggagaggcagctgtggctaacgggaggtgacatttccatgtcaacatagtccaggtaaagttagtagagtatcaaatgttaaaaaatgctcatcccagacctttgggcgtgactaaagagttgtttcatatgtcttcggtaccctcagtaacacctcccaacccccaaatatcactttccttcctgcacacatacattaactcttttgtttcttacatatttcatttacataggtagggattattacattctac

SEQ ID NO: 610298 - DNA, 158 bp, Homo sapiens
cccaacgctgcacgcggttcaaatgcagcgattcctgaggacgcatcctgaggagagtggcgatgaggacgaagcacgacctagggggggcgcatctcgatctgctctctgacaaacgaattgctgtgaggaagagttctccgattctgaaaaggagg

SEQ ID NO: 610299 - DNA, 278 bp, Homo sapiens
acaggccagcccagctgcacaaggactgaacaaggagctgtctcattgtctccatgccggaaatcgagagaaacctcaacatcactggctaccaccaactcttgctgaaaagcctgaagctggccaaggccaatcgaatgctgggagcatgagcactaggagcgcgaggctgagaatggtgcgctacctgtctgagagcatccccacgctgcacacccttggcctgtccctgagtgccctgcaggacctgtgccaggagctgcacgccaaggcggtgg

SEQ ID NO: 610300 - DNA, 198 bp, Homo sapiens
ttttacttcctcccaaataaaacctaacttttttaactaactatttaagacttggaatagtccgcttgattaaaaaaaggggaaaaatgtttgtaaattcccctctaatgggactttgattttactataattcagcagaaaattcaaagcgctgtgatttttagatggccctcccataaaacagtcccggcattggca

SEQ ID NO: 610301 - DNA, 320 bp, Homo sapiens
tgttgtttgtcctaagtggtgttcttgcttgcgcgttgggacatcactttttggctattccccgacttgaagccaggtgtattgaaatctgtcactcaccggttgggcgcatcggcccatgctgtactccttgctgtgtgggaggccgaggcgggccgattattgaggttaggagttcgataccagcctggtcaagtatgatgaaacaccgtctctactaggtcctaccaaaattatgctgggcgtggtgacacactatttgtagtcccagctactctgggatgcttgaggccaggagactcgcttaaacccaggaggcg

SEQ ID NO: 610302 - DNA, 377 bp, Homo sapiens
  misc_feature (12)..(12): n is a, c, g, or t
  misc_feature (292)..(292): n is a, c, g, or t
  misc_feature (352)..(352): n is a, c, g, or t
ctgggaggcganggtgggaagatcgtttgagcgcaggagttggagaccagcctgggaaacacagtgagacctcgttccaaaaaatttttttttaaaaaaattagccgaccgtggtgaagcgcgtctgtaatcccagctactcgggaggcttaggtgggaggatcacttgatcctggggagtttgagactgcagtgagccgtgatctccgccactgcactccagggttcggcgacacagcaagaccctggatcccctattcccgttttccccgcaaaaaaaaccaccaaggtnggagttaaggggaagttaagttttgagggattcaaaggccacccgtttcccattgctttnaggaaggcatttttatttcttgcga

SEQ ID NO: 610303 - DNA, 165 bp, Homo sapiens
  misc_feature (102)..(102): n is a, c, g, or t
ttttgactccagcatctgtctcactgctgcctgcatatctgtaagacatgttattatcgctgttgacatcatttacagtttttcctggtgatactggtgggntgggtggatgttcatgtctttgtcttaagatcttctctggctgcttcaaagcgttgggttaac

SEQ ID NO: 610304 - DNA, 452 bp, Homo sapiens
tgtcagctgcctacagtttaatatgcagcgttcacaaaacagctgccagtgctacaattaatgaagcaaaacttaatatgtaatcacaatctaaattagcatcaatactttgacattcattacattggtttgggggaagaaaagtagttctggtatgtttcattgatccccagataccttccaatctggacatgatggggctgattccagatggttcttctcacacttcattcaggtaggtcagggtccctcgtgtatggccaggtaacatatattcaccgtgcccagcagcagaggcatcggttggttcatgtatgcccatgttccgagtgggtggcaatacctcaagcaggtaaagccatgtcagtttttcctaggcagtttggcatttcaaacttcagacagcccagtaatgtaatgatgtttccactgtttgagtttaagatcgtgtt

SEQ ID NO: 610305 - DNA, 439 bp, Homo sapiens
tttttttaaacttgggttccttccccttttcagcccccttgggttcggggggggccccctcctgtgcccttgtttggaaccccttggttttcggtttttggaaattggtttttggaacccttttccttgtttccgggggttgggggttttattttggattttcctttttcccgcccccccccattttttttttagggtttggcccgggggggttttttgaaaaccccgtttttttggacattgggggtcaaacccttttgtttaaattttccctttcccagggccccccgggggttttcgggcctttttttcccttgaattgaaaagggtccgggggcaagttgctttgggttaaccccccccaggttccaaatttcccttttccaaagaaatccttattccttttttttggggaattaacaaattaaaccccccttta

SEQ ID NO: 610306 - DNA, 1605 bp, Homo sapiens
tctctggtgatctagggatcctagtacaccgtcacatcatagtctattatgtccatataagcgtgcatgtgggcactgtacataggtccatgtacatggggaacgaactgtgtggccatcggctgacagatcaggctgcattgcgggatccattgcccagtatggtgatccacctgagcttcgcagaacgatcttttcccagtgggtagaccggtctgataacatcgagtactagatcgcgggtcttcgtccagctttgactgttccatgatcaagttagctcgcgagcgcctacatcgtttccgtgctgatatccttgtattgaggttagaagcgcaacagtgtcaggcgtagatccacaccgctttaatcacgcgcttctagtggagcaattcgcgccggccggaacccgtcgtctggtagtgatgaatactcgggtttggagtccttttgacgttacgatcctgaagcactaatgtacattttagccccgtggtttttgtgacccactggatagtgacctcgatctctacatcgccccttatcatttttgtgcgtcctctctatgagcgcatccatatcgagttcgatagctcgctctattcgcgtatcgatcagttgcagctcgagacgatattactcgatagcgagtcgatcgggagaagtcctatcaccttggacaggccaccaggaagaagccacagactttgcgtttagctggtggaaccaattaggttggatttggaacggtttcacccccattagctttgccggcgagcagggacaccgcgaaaagccaatttggtggtaatttcgccggcgcacattcaaggcgccgttggagtaattttcgcgacacatctccaatttgcttttccccacaaaagtgcccctatttgggcatgtgggagaactcgatcttcgcgttggcgacaaccccccgtgggtgaccttggcgcaatggtaggatacagagccggcgcccatattgcgggggaaagggcttccaactgtgtgggtatcactaaacacaatttcgacacgttcgtcacggcaacacacgggagaagcaagtgaagagagttccacccccacatcgtccaccgggggagagcaaaccattggcagaaagtaggggccccacgataaacattttgtgaaccattaaagccccccttgggttttcccgctcggaatgaaaagtccccccacccagttaaaaatacaggtatgaccattgtaatgtactatcctatcgaaccaaccattacatcaccaagtaaggagcccatggggtacctttgtgcccaacaaaaataggatcagacacttcacaaataccccatctatcacaccatcttcatttgcattgcgcaccactcaagggtgccgagaaggaacgctcattatgcaatgcaggtggatacactgacacagataaccagggaacgaggaggaactctcacacagcaagaaactcaccatagctgagaaagacgatgtgaatacgaacaactacgtatggtatcagacaccacgattagatagtgtgccgaaaaacgcaccaaccaactatgatatggcactagagacgcgcgatcacca

SEQ ID NO: 610307 - DNA, 217 bp, Homo sapiens
tagtttacatttaacttagtatatagaaacaactgttccttttttgcactcgtagtcattagacatgaataatgtttaagatatgtaagaactataacaagtaaactggcataaacaggtttgggaacaaccaactgacttgttaagcatgtaacccaactagtgagaacagaagtacctgataatacaaaaaatagcatactggttaagaatggtc

SEQ ID NO: 610308 - DNA, 484 bp, Homo sapiens
gaattccgttcctctccagcaccatccagtgaaactgatgaggccccattgatttttactgccagaggagaaactgaggagagagccagaggagcacccaagcaggcttggaacagttcatttttggaacaactggttaaaaagcctaactgggcacactcagtaaatcctgttcacctggaggctcagggcatacacatcagtagacacacaagacctaagggccagcccttgagcagtcccaagaaaaattctggttctgccgccagaccttccactgccatcggctctgcaggaggagccagacgcccggcgctctgcagacaccggcccgagtaacacagagctcgagccggagagaggatggcagtcccagcaggcgctcaggcacaccccgacgacatccaaagcagactcctgggcgcgtccggaaatcccgtcggaaaaggcgcggttgccatggcgccggagatgctccccaagc

SEQ ID NO: 610309 - DNA, 165 bp, Homo sapiens
ctgtaaaatggagctactaatagtccccttctcttagggttcccttaaggagtaaaggagattatgcatgtcagacacagtgtgagtttagaacatagtgttcaatgactgttagctgtgattgattgttactatgtagagtaagtcattcttaaacttttactg

SEQ ID NO: 610310 - DNA, 553 bp, Homo sapiens
  misc_feature (193)..(193): n is a, c, g, or t
  misc_feature (228)..(228): n is a, c, g, or t
gaggtttctgggtgccagtgttttccaatctccccgggccctggggtggcgcacccccttattttgttttgtggcacttcttttcctcctgggtgaacatcacccgggtgaagcaaaggggcctcagtccccaaaggggttttttggacccgcttcctttcccaagggggtcttccttttttaaggaagggtnccccccctcctcccttttggtgtaagattttttantcaagggggggccctgggggctgggttagcctttttttaaaccctgggggccttggatttccgccccttttttcagggtccccaaaaatttgggttttgccccgggggtttttttgggccccctgggccatttggggggggcccttttttttctcccagggccggggtcagttgggggtttcccacccccaggggcccttttgattccccccttaaaaaaaaggggtttcccttttaaaaatggctgggggtagcccccccccccccttttttccccgggaccccggttttaaatttccctgggggccattaatttcccttttga

SEQ ID NO: 610311 - DNA, 103 bp, Homo sapiens
actctgctgtgtcgattccaagccagaaacggcccgcgagagagcatcatgatcatgacctgtcctatcactctcgatagtctgcccgttggggtatttctta

SEQ ID NO: 610312 - DNA, 190 bp, Homo sapiens
  misc_feature (8)..(8): n is a, c, g, or t
  misc_feature (69)..(69): n is a, c, g, or t
tgctgctncaatgttgcacttcgattcatcgcgcgcacgccgctcttcagaaagagatcggtgccttcncgacgagcgagtttgcattttggaccaatgtaacgagccattctttacaatctcctggattacacgcggcgcttcttcggcggacggcacccgttgtgcgggattggctggtggaagggag

SEQ ID NO: 610313 - DNA, 146 bp, Homo sapiens
ggccttcccctcccccctttccttttgggggttttccttttccttcccctttttttccccttggggggtgggtccctttgggccctttccctccctttattttggggggccttttttttccggggaaacccaacccaggggtttta

SEQ ID NO: 610314 - DNA, 224 bp, Homo sapiens
ataaagccaacattggataacatagcactgaaaaaatgaggaaattattaggtaaccaatattattttaacaagcccatcaatttactttctggctggtagcagaagttagacagcgtaaagcttgagaagatgaagggtgtctacgtaggaccacgaaccaatttacgaagaatacttgacagctagaaggggaagttggttcaaaatcacatcaaaaagcta

SEQ ID NO: 610315 - DNA, 98 bp, Homo sapiens
gagattcaaagcttctatacgatagtaccgggacatgagtttaaatcgacgtgttctttaaaatgacacttataaatcctaataaactgttaaactca

SEQ ID NO: 610316 - DNA, 787 bp, Homo sapiens
tcgcctttgccgatccgccgccgtccacacccgccgtcagctcaccatggatgatgatatcgccgcgctcgtcgtcgacaagcgggtccggcatgtgcgggccggcttcgcgggcgatgatgccccccggggcgtcttcccctccatcgtggaggctgccccaaggcgaccaggcggtgatggtgggcatgggtcagaaggattccgtatgtgtggccgacgaggcccagagccaagagaggcatcctcaccctgaagtaccccatcgagcacggcatcgtcaccaactgtgacgacatggagaaaatctggcaccaaaccttctacaattgagctgcgtgtggctcccgaggcagcaaccccgtgctgctgaccgaggcccccctgaaccccaaggcaaccgcgagatgatgaccccagatcagtgttgagaccttcaacaccccgagccatgtacgttgctatccaggctgtgctatccctgtacgcctctggcggacactggcatcgtgatggactccggttgaccggggcacccacacttgtgccactctaccgagggggtattgcccctcccccgagtgcaatccgtgcgttctggaccctcggttggggccgggaacctggaccttgactaccttcattgaaggattcctcaagcgagccgcggctaacagctttgagcaaccacgggccgacgcgggaacatcgtgcgtgccattagggggaccttgtgctaagttgccccggacttcgagccagagatgccacggtggtacagccctcc

SEQ ID NO: 610317 - DNA, 106 bp, Homo sapiens
cagaaccagcacatgttatacaggcttgggtcaatgtggcgggtcagaccgccagtcaccatcgctcactgtccacagcaaaccccccacagtgagtcatctgcca

SEQ ID NO: 610318 - DNA, 158 bp, Homo sapiens
tggtataattatgtatggtcgacgtgtgtcttgtaggatgtccggtccgtgatgtatagagcttgccatgatagggtagtcctttgataaggaggggtggggggcagggagttgaagaaattcccttgcgagtgctgggggatctgtaaacatttcgt

SEQ ID NO: 610319 - DNA, 141 bp, Homo sapiens
gaggtgataagtgcagctctcagatgcgtggagactcagtgtgtggactcggctgcttgagtggcgctgtggcgatggagattacctccaccttaattaatgcgagtaaaatgggtataaaattatatccatacttaacca

SEQ ID NO: 610320 - DNA, 216 bp, Homo sapiens
ggcggagacagatgagcaataactatgaatcgactcttagttacaaattgtgactgtcgcgatggagaagtactatcatatctatgaaagagtgctatagtgtagcatttaacggtcatgagaacgtctccggcattacacgtggtgacttctaaatagctaagtcccatcaggtcgtgagaacgctatctcgcaagtgaggaaggcctgtgctag

SEQ ID NO: 610321 - DNA, 487 bp, Homo sapiens
  misc_feature (325)..(325): n is a, c, g, or t
  misc_feature (338)..(338): n is a, c, g, or t
  misc_feature (354)..(354): n is a, c, g, or t
  misc_feature (360)..(360): n is a, c, g, or t
  misc_feature (372)..(372): n is a, c, g, or t
tggtagtaggaggtatctgcggccaggggcgaggcgtccaggcccgttttgttcgtgaccgggcccatggccaagctgccaggcatgggggaaccgtagccggggtagtgcatcacctgttcgtaggccttgaggtccattttgtggggctggtggtggtggtggctgtggtggtgctgctgctccgaggacatgaggttgttgatggagaacgggtggttgaaggcgtagtggtgttccggcttcaggtgggcctcaggcggcaggcccgggtggtggggcgggcccagcaggtgggccgcggcctgctgttgctgcccggganagggcgccggctntggggggctcagcgcngcagcnggcgtccccttnagctctcctaggaagaaaaataaagcgaaattggtaatgggacgcgctcgagtgaggcgactcggtgcccgccggagtctcggaggccggcccggcggcctccccgagttgagcc

SEQ ID NO: 610322 - DNA, 271 bp, Homo sapiens
  misc_feature (257)..(257): n is a, c, g, or t
cgcatgcacgctgaatgcctgctagctcgactcttagaggttatcccccgccgaaaccagattcactggtgccacctctacagccagtaacagatataggaacatgttaaggaagtcagcacttacattatgaacaattggctacaacccctacacagtatcatttgtgccaatttctggttgcaatggtgatcacatgctgtagccaagtgctaacatgcctcggttcacgggatggacagtcacccgtaccgatngcaatggggtatct

SEQ ID NO: 610323 - DNA, 1110 bp, Homo sapiens
  misc_feature (1110)..(1110): n is a, c, g, or t
cggtaaatgaagtggcgagaaggacgtaaacgtcgggacaagttaagtgggaatatagcatctatttcttgatcagcacgcattgccggttcacatgtgacggatagttgcgtctcaggatatcaattaccgaccacatcggcgtagaacgttagcccgccccggacacaggcagtgcaatacgtagcatcatttcgaaatgcatctcacatgactccgctttgtggcgcagcgagccgtgcatctcgaggacaggcatactttgtatccaaactatacgtatctcgcaataatatgatctaaggatcaagtaagaatctaaactccaggtcatattctgatcccctcataagatcctaccatcatagattcaggtatgcccgttgtatcgctaagacccggactgcccggtgcaaggccgctggacccatgcatctgtgtaattttccaaacagttagtgagcgtttgcctatgaggagtgctcggcggacactcggatcctaccgtaccactccatttacctaacgctctagggtgcagacgctagagcaagcataagtcatggtggatgtatgatatagccactagataacgtgcctagtagcaatcggctcatagcagtgatgattcaacgatcacgtggcaaacttaagggctcaattcatgaatataataacacgataagatgtgtcgacacggtgtgcagcacagagcacgtgcctgtggatctatcggtcgagtctgtctcacccagttttagtgtttctgccccacactgccccacccccattgttccgccgaccatgtacactttaatgtcgtcccgatttacgctaccctaggaggcctggacgcttcccggacggatgacgacgccgggcaaggtcagaggtggataacggtagtattgttctatacttccgggtgtgtcctggcgagttccgtgcggtgtattgcagtaccatatcaccattacgtaggcgcggcgtagtgcctccacgtgcaatttttagcccgcttttcactcctccgttccacgcaccccttatcatctccagctctatacccctacccccctggttcttctgctcatcgtggcatggcaggtn

SEQ ID NO: 610324 - DNA, 883 bp, Homo sapiens
ttttgcccgccggtcgtcagagcgtcctcgttttcgcaggggtctgccggggggctgaatcgctttcttgggggaatccccgtggtgttttcatgccgttgataggtcccgcgccgtgttgcgaagtgtccccccgttgggtggagagtattgtcccccgttcccggatggttgctcacagaagggcctgtttcctctttctgcgtgggaggcctcgggcgctccctaccgcgcggttttgtctagaggaggcttctgggccacaccccggggggaccggttgtccagcaatgcggcgcgcttgtgtaggcgtgtcgcgaggagggcccccgctggtttgttgaccagggggggtttgcggtacgccgtggggggtggagcacccgcctgcctggggtcacctgggcccctgatcgcgtcctgccatgggctgctgagtaagtggtcccagattccccgccccgaagctgtgccgctctgggaccccccgactggcgtactttcgtcaaggagaatgtgtttctgcggacagcccccttggttgtcacccggttgtaggcacagtgtcgccccgcgggcaagaattttcagacgcacccagtgggaccaaagtcagatggtgtgtagatacacacgcagctgtggagagggcggggcgtttcgtaggtcgatagtcacgctggtgtgcgcgagatcagaagaattggctgtagctgtgagccccggcgcgcccctgttgcccccccagttactgggtgttgtaatacaacgagtccacataaatttttcttcgcgaagagaaataattcgccgcccacgtttgttgttgtgaaccaaagtggaccgttggagaaaaaaccctactttttttaaacaaaaacga

SEQ ID NO: 610325 - DNA, 148 bp, Homo sapiens
ctgatgacacccgatatctccggcgcgagcgtgttcgaggcggccgctacggatgtcgcatcgacacccgtgatcgtgatcgacgggttgttccaaatccgactgaggatcgtgcccgtaccgaccggctgcacccccgccgggagac

SEQ ID NO: 610326 - DNA, 214 bp, Homo sapiens
  misc_feature (1)..(1): n is a, c, g, or t
nagtggtgcagaactagctgtatagccagacgtatttgaggtagcagggaacagagtatgggttaaaatttatttcataccaccattaaagaatccaccaagaagtttcctccactgcagcatgtacacttggtccggtgtagaactagtcattcattatccaggggtggtataaaagtggctgtcatcatctaacagcttatcaggggaccgg

SEQ ID NO: 610327 - DNA, 121 bp, Homo sapiens
caacgcatgtgccgctcccgcaaaaatgggtaacagtcgtgccaccaagaaaatgcccgcttttaccatggttgctgagtgcaaataagcagacacgggggtcggagcggcacatccgttg

SEQ ID NO: 610328 - DNA, 889 bp, Homo sapiens
tttttggggcgcccacccatgttgactacaaacccacgaggtgggggccccccgcccgtgatttccaacacacgagacccttttttcttgcgggggtgtgtatccacacatgattttttctcctctgccctcctgaggtgtgttaactctcttgggggaatatttctctctccgcgtggggcgctatcggacatgtttttgttaatccctctttaaccacacacagatatctctctctcaactttttttgttgacgcacacaagcgatctcttttgtttacccaacgctcgtgtgtgtgtgtgcaccacacacagcccccctcgtgtgaagaaaaaattatgctctctccgttgttctctctcttcagcacgccgcccccctcgctccgccccgctctgtgtggcggagagtttcccctctattgtgtcctccgccccctgcgggcgccccacacaaagaggagcgccccacccttcgctctctctctgtgggagaagaaaagagagtgttgtgttcgccccacaaacactctgttttataaaaatatattctatagagagagaataatatatatttaaaagagagagaaaaagaaatctcccacgacattccccccgtctctctctctctcgagagagagacccctcttcctccccgcggcgcacaattcttttgtgtgcgggggcctcctccgctctctcacagaggccgcgggcccctgtgggccggcgacccgagagggttatatggtggagaggggccacaaagattgtggtgttttttttttggggaaatcacagagagcccccccacggcgcccataaaatacccctctttttttttctcccccccgcggaaaaaaagggttttttttttttttcccccaca

SEQ ID NO: 610329 - DNA, 456 bp, Homo sapiens
ccagcttatggcgggggatactaagtgatacaggaaaccaagtagtgctgagcttgaagagatgcctacattaatgtgcaattgtaccgtgatatcctctagcggcaaccatgtagggcagtaagcatgagccaagctcggcgtcctcagttgataaagttggagcttgactggtgtacattcgtaaaacttggctggcacgtgtctgggtttcatgcatgattctacagccggtatatgtgcacgggggagtggggctatgctgagtttcggcatttgacggtaagccctgggaggcaaggcatgtgtttattcttggctcctttatacacatgccatagtgtgcaaagtgatactcctcctcaagaggcggtttaaccacatgttgggagtttcggagactttcgggaggagggtcagacctctttggctttgctccccagggcataagggggg

SEQ ID NO: 610330 - DNA, 174 bp, Homo sapiens
tcacctgcgcccaggctttacctctcgctcccactctccctctcctcccatctcctcggtctcctcccacctcagtcctctcctcccaccttttcctctcctcccacctcttcctctcctcccacctcttcctctcctcccacctcttcctctcctcccacctcttcctctcct

SEQ ID NO: 610331 - DNA, 391 bp, Homo sapiens
gcgcatagcagtcagaagccaagacatgttacagcttatctggctgaaatcgggtagtggacttaaatgggagctaaggattaaaaagaagagttaattacaagtacttggccaacttatggcatagacgacaagacgccaggcttaccaacaggcgctatagctggactcctattatagaatgtacttaggtacatacttcgtcgaattgtctcagaattcacagcatcaattcttgcttcaagctcagggatgggaatccttctattatagcataacatttgcctaccaatatcttcacaaattggagttgaaccatcaagctgcaacaacatgatatgttttcagaagatttctggctcgtgcaacctcactttctgtgacacttgta

SEQ ID NO: 610332 - DNA, 875 bp, Homo sapiens
  misc_feature (21)..(21): n is a, c, g, or t
  misc_feature (300)..(300): n is a, c, g, or t
  misc_feature (304)..(304): n is a, c, g, or t
  misc_feature (307)..(307): n is a, c, g, or t
  misc_feature (313)..(313): n is a, c, g, or t
  misc_feature (318)..(318): n is a, c, g, or t
  misc_feature (339)..(339): n is a, c, g, or t
  misc_feature (360)..(360): n is a, c, g, or t
  misc_feature (388)..(388): n is a, c, g, or t
  misc_feature (394)..(394): n is a, c, g, or t
  misc_feature (590)..(590): n is a, c, g, or t
  misc_feature (614)..(614): n is a, c, g, or t
  misc_feature (660)..(660): n is a, c, g, or t
  misc_feature (665)..(665): n is a, c, g, or t
  misc_feature (667)..(667): n is a, c, g, or t
  misc_feature (670)..(670): n is a, c, g, or t
  misc_feature (674)..(684): n is a, c, g, or t
  misc_feature (691)..(691): n is a, c, g, or t
  misc_feature (699)..(699): n is a, c, g, or t
  misc_feature (707)..(707): n is a, c, g, or t
  misc_feature (718)..(718): n is a, c, g, or t
  misc_feature (737)..(738): n is a, c, g, or t
  misc_feature (741)..(741): n is a, c, g, or t
  misc_feature (745)..(745): n is a, c, g, or t
  misc_feature (747)..(747): n is a, c, g, or t
  misc_feature (749)..(749): n is a, c, g, or t
  misc_feature (772)..(772): n is a, c, g, or t
  misc_feature (785)..(785): n is a, c, g, or t
  misc_feature (808)..(808): n is a, c, g, or t
  misc_feature (865)..(865): n is a, c, g, or t
ggggagccaatcccccaaacncactaggagggctcccacccctgccctcccaccccatttcagggccccagggcttagggtggaggaaggggaggtaaccacccatccagggactgaccctggagactgtccctgccctgcctcaccctccccaggagatagggggcaacacctgggcacaacccctcacacccccctcccccaaccctgcttgtgcacatatgcacattatggctcctcgctgagctggtcagttcctggcagggcccctacccaacagcaccgagtgggatgggagcnaggngtnttgggnggggngagcctgagaaggaaggaggncccagctacgggactgcaggngagaaagagtggggccccccaccttgtncatttnccagagtctctggtagtccccagatccccctgcaactggggatggcgggcgggggtaggaaggcgagtggctgtggcatgctttcccatagccaatcccagggtctggtgatgatcagggttccaaataggggctgtgtccctgtctctgaaaggctgggagcagggctttattgcacaaaatactgtgggagggncacacgcagggggtggggcccagncagtctgtatacagagatattgcatttaaaaaaaacaaaaatctcntttanantanttannnnnnnnnnncactgantgaaacanacaaaaanaggcccacacnatatgaggcaggtggggcnngcngganancnggcagaggatgcctcagactcanggcattgtcaccntcttgtttgagtcgagatcccancctgggctagctctggaccccggctgggcgtggggtagtggtctgggggctggtatnatggggggta

SEQ ID NO: 610333 - DNA, 1088 bp, Homo sapiens
  misc_feature (830)..(830): n is a, c, g, or t
cgacgccggacgccccgttgacggcaacgcggtctccgctttggggtccgggccggctcgtggcgcgcgcaccctctgcagcgacaagagctccgaaacccagagctgcgcaccgccgcgacctctggctccaaccattgcgggtaaacccgcgacagaccccacaaaccaaaagtgcccgccgagcgcgccacgcacattgcgtcccctatcgctacccgcccccttttcctttaccggctttgccaattaccccttttggcccgcgcgtgcccaactgcacgccccatcatccatcgcacactgcaccacactcactccccgcggggacgcctccgttctccccccgtttcccaaacacgtcctctcccccgctctgggcgaatactttgtccctctcacccccaaaggtcgaaaccagcggtctatcgtctaaccccgggtgcgatcctcacctgcacctttggcgccgaccactatgaaacccccccaacgttgcgcgcgatccgatggtggcgcccacccgcactaccggtcgccgccctcctcccaacagcccgccctctccccggacaaaaccagcgcgtctctttcatgctgcgcgcacatcaccgccggaagcctccttcacactcttgtgcgcgcgccctccacagcagtcgccacccacccccgacccgctgcttggtgcccacacgcggataatcgatccaatcggacctcgacccattcactccccgtcccctcattcatacaccgctgtgctccaccacaccccacgaacagtcggatgctcgctcccaacacctcgcccgccgcaatccccttgngtgcgacaccacagctcaccatgcgcacgccaactcggtcatccatcaaccggcatgcggctgctatgatcctcccgcccctgtttatatccactcctgcactcggtaatcgatactcacacagcgcgccgccttcttgttgcgcgccacctcatttctcccagacctgccgtgccaccacacaggcgcgcgtgcgcccggccttcatacactcccacgtccggtaaatccagacgcacgtatcagctagaccgcggg

SEQ ID NO: 610334 - DNA, 658 bp, Homo sapiens
agcgccgcctgcctgggccggacccggtcaggttctcaagctgtcgtccctatggggctgtgtgttccttgtcccgggatgtcctgcgcctcccatgcgggacgctggaagagaaaagagcaaagtttgcagagtgttgcatgagagaaagacaaaaagaggttgcatctcggggaatttagatgtcaatctgtgcaagaaaaagagaaacgacacatggaaaaattagaaaaaacaaattgtgctacatctgggcccccaccagagggtggacttaggtggacagtttcataaaggcataacatgagtagaaagactctacgtggcaataagtgtttattatctgcaatcaaggtgggcttcatcaatttaatttctttctcttgtgagtaactgaagattcagacttgtgtaatatttattgggcccttaagtgcaatgttaaaaaaactgtgtgatttcaagcttagagaagtggctagacttttcacttaaaatactgattttcctacattttgctcttcgtgcagtaggtggagtgatttgcttatttctaagtagttaacaaactggaactaattagtgaatttcattacattggttgtaacattctggatatacctttaagattaaaatccgcaggtgtcttttaatccta

SEQ ID NO: 610335 - DNA, 1182 bp, Homo sapiens
  misc_feature (1)..(1): n is a, c, g, or t
nctagaatccacgaggataaaagactttgatgccaactctaaaataaaggacttccctgaaaaagctaaggatttctttattgaagctacacctttgtctaaataactcagaccatgaccgacttcataccttggtaactgaacactgttttccagacatgacttgggacatcaaatataagaccgtccgctggagctttgtggaatctttagagccctctcatgttgttcaagttcgctgttcaagtatgatgaaccaggcaacgtgtacggccagatcaccgtacgcatgcacacccggcagactctggccatctatgaccggtttggccggttgatgtatggacaggaagatgtacccaaggatgtcctggagtatgttgtattcgaaaagcagttgacaaacccctatggaagctggagaatgcataccaagatcgttcccccatgggcaccccctaagcagcccatccttaagacggtgatgatccctggccctcagctgaaaccagaagaagaatatgaagaggcacaaggagaggcccagaagcctcagctagcctgatgacaaaaatgacttctagggtgaagcctgggtgatgaggctgctggaagctttgaagtctcccattcccctcatgctataaaaagaactacctttgttctctcccatcctgctcaggtcttttcagcagtctcatcatcagcaaccatgactgatgactgggccctagcaggtggcaggtataacatggccatggacactcttcttttttaaattttatgtctagcttctgagtctagatgaaagacagtatgtttcagagaacattggatatcagtttttcccacagcagggactgtgagagacaaccagcagcatcctctttgtaatcacagggcagggatcagagtttgaaatgaaatgttgtcagggtgttggaaaaattttggtgagttctgcacatttcccctggttcaggctgggcatggaccagccttcagatggcagaagtggaagatgagcctacttgtgagcgatgtgactttaaggaaatgaagactggggaagaataattagtgtttataagacatttaagaggccctttttcatatactgactcactgatgaatcagcatttgcattttatggaaaaatataaatccaaagaaataatttat

SEQ ID NO: 610336 - DNA, 1224 bp, Homo sapiens
  misc_feature (1)..(1): n is a, c, g, or t
  misc_feature (1188)..(1188): n is a, c, g, or t
  misc_feature (1190)..(1191): n is a, c, g, or t
nctagaatccacgaggataaaagactttgatgccaactctaaaataaaggacttccctgaaaaagctaaggatttctttattgaagctacacctttgtctaaataactcagaccatgaccgacttcataccttggtaactgaacactgttttccagacatgacttgggacatcaaatataagaccgtccgctggagctttgtggaatctttagagccctctcatgttgttcaagttcgctgttcaagtatgatgaaccaggcaacgtgtacggccagatcaccgtacgcatgcacacccggcagactctggccatctatgaccggtttggccggttgatgtatggacaggaagatgtacccaaggatgtcctggagtatgttgtattcgaaaagcagttgacaaacccctatggaagctggagaatgcataccaagatcgttcccccatgggcaccccctaagcagcccatccttaagacggtgatgatccctggccctcagctgaaaccagaagaagaatatgaagaggcacaaggagaggcccagaagcctcagctagcctgatgacaaaaatgacttctagggtgaagcctgggtgatgaggctgctggaagctttgaagtctcccattcccctcatgctataaaaagaactacctttgttctctcccatcctgctcaggtcttttcagcagtctcatcatcagcaaccatgactgatgactgggccctagcaggtggcaggtataacatggccatggacactcttcttttttaaattttatgtctagcttctgagtctagatgaaagacagtatgtttcagagaacattggatatcagtttttcccacagcagggactgtgagagacaaccagcagcatcctctttgtaatcacagggcagggatcagagtttgaaatgaaatgttgtcagggtgttggaaaaattttggtgagttctgcacatttcccctggttcaggctgggcatggaccagccttcagatggcagaagtggaagatgagcctacttgtgagcgatgtgactttaaggaaatgaagactggggaagaataattagtgtttataagacatttaagaggccctttttcatatactgactcactgatgaatcagcatttgcattttatggaaaaatataaatccaaagaaataatttataaaaanannaatcctgccgcgttttaccacgttgtgttggcc

SEQ ID NO: 610337 - DNA, 222 bp, Homo sapiens
acacatatttctgaaaatatctgatccacaccaaaagacacagaatatacattaaaaccttaagtatgtttctcacagcagtttctgggttaaggtgacagatttcatttggttccctcctgaaaccttcttaaaagcatgctaaagaaatattgttagccgggcacgggggctcacgcctgtaatcccagcactttggaaggctgaggtgggcgcatcaga

SEQ ID NO: 610338 - DNA, 177 bp, Homo sapiens
aggctccagctaaacgatatttggaggtcagcacggtgctcacgtgtcgacggaactatgtacagtggaggcatgcacctgcattgttgaatacacgttgaccaggctccatctaaacgatatttggaggtcagcatggtgctcacggtatcgacggaaccttgtactagggaggta

SEQ ID NO: 610339 - DNA, 130 bp, Homo sapiens
acataagcatataataaccccaggattggatccactttcagtgccagccaccgaggatcacacagattcacccaagtcaatagaagccggcgtaaagggtgtttcagatcacacccctccccaatgagag

SEQ ID NO: 610340 - DNA, 118 bp, Homo sapiens
gaccgaggaagtactcgggtctttgcactccaactcggcgcgccccgagcccgaggggccccagccaacccgacgcccgtgtgttgtgtgtgcctaacacccggtacgtgtccggcca

SEQ ID NO: 610341 - DNA, 340 bp, Homo sapiens
agaggcaggcttcgctgtcagtacgttctttgatttgtaaaggggcagcacagtcttttccttcatccaacctctttgcatcttacaacgtcttgcctctaaaagaccctagcgtaagaaggcaatgcttgtggaatgtacagtgcatattggcggcgcacgcctcattacgattcgcctgcttgcttctcctgttcaatcgtttctttggaaggcagtggatttttctcttgcgtctctgtcttcttcagtttcgacttatcgaatttctcgatctcagccatatcgggtttgtcagacatggttgcggaggaaaagcgaagcgaggcgcacgagtacg

SEQ ID NO: 610342 - DNA, 486 bp, Homo sapiens
  misc_feature (93)..(93): n is a, c, g, or t
  misc_feature (105)..(105): n is a, c, g, or t
  misc_feature (110)..(110): n is a, c, g, or t
  misc_feature (115)..(115): n is a, c, g, or t
  misc_feature (137)..(137): n is a, c, g, or t
  misc_feature (139)..(139): n is a, c, g, or t
  misc_feature (144)..(145): n is a, c, g, or t
  misc_feature (185)..(185): n is a, c, g, or t
  misc_feature (191)..(191): n is a, c, g, or t
  misc_feature (375)..(375): n is a, c, g, or t
  misc_feature (443)..(443): n is a, c, g, or t
  misc_feature (451)..(451): n is a, c, g, or t
tcagctgctgtggtggctccagcgcgcctggttctcagtggccacacgcacaggcctgcgaggtgcaccacgggggccgagtcccgagctcangtcccatctttnaattngaagnaccagaaacaaccccagttttnancatgnnaacgtgaaagtttatttttgtctgaaagctttcataagtntttaantcaacacagtaatcaactattttaattgctgcaatcgggtcaaaattttacaaaagccacacacaaatttctctccttctacacgtagctccatacactgccccttgccaaacaccctttccggggaaccaatcagcatgacattcctgggcagttaaatgtgagaagcgaagggcagggcacngtccaggtggactttatccttcaaggaggggccgtatcctctctcttacactctggtgtgtggttaantttctaanggaaacaaccatttaattccattaggctatactca

SEQ ID NO: 610343 - DNA, 122 bp, Homo sapiens
tagaggagccgatggatgttctccaccaccacgatggcatcatccaccacgaagcccaccgagatgacgatggccaccagggtgaggttgttcaggctgaaacccagtacgtacatcagcgc

SEQ ID NO: 610344 - DNA, 215 bp, Homo sapiens
gactacaggatcctcattgtgatccacgtgccattgctgatccagtatgcattgtgatccacgtgccattgtgatccacgtgccattgtgatccacgtgccattgtgatccacgtgccattgtgatccacgtgccattgtgatccacgtgccattgtgatccacgtgccattgtgatccacgtgccattgtgatccacgtgcgcattgtgatcca

SEQ ID NO: 610345 - DNA, 327 bp, Homo sapiens
aagatgaggtctcacgctgttgccctagctagagtgcagtggtgcgatgtcgactcactgaaacctccgtcctctgcccccgggttcaagtgattctcctgcctcagcctccctagtagctgggattacaggtgtgcaacacattacccggctaatttttgtatttttagtggagacggggttttgccatgttggccaggctggtctggaactcctgacctcaagtgatccgcccactttggcttcccaaagtactggggattacaggtgtggagccactgtgcccagcctgggtccctttcttccttccttccttccttttctttt

SEQ ID NO: 610346 - DNA, 1124 bp, Homo sapiens
gggggggaggactggtggcccgcgaggctcggtcgcagacaatgcggccggcgatgtccgcgatgcctaggcgagtgccgcggtgtgacgcggggggccttgtgcgcgtgagggctggcctgggcttcggcctccctccggttccctggaagcgggccctggtaccatgcgcgtggatgcagcagcagaggcggaggctccagcgcgtctctctcctcccgcctcagccttgagcccgggggaagccaggcggaccgggtgtctggagggggggggtccggtgcccgagaactgggaatttctcttcacgtagacatattggaccacgtgtgcagttccccaggaggcacaaagttataccattggtgggcgcttggaatacttgcccgggaaacacttacccattctttaccaaatttgtctatgacaattgaagtgtgtaccatttgcatttcgtccttaccaaactagggcaagttacagtgtcagacaagcagcataggtgacttacagtacattacaccgtttgtccataaatgggtgggcaatattgtggtggcccacgcaaattcgtcctcacggatctttccgtgggacacaccgtttacccgaagttattaaacccaccaggcagttttctgggacactccggatgtggatagttgcagcccacgtgttatacatgcaacaggatggagcacgggatttctcgtggatcacatttacataagacacgacaacttcgtattaaagaacggtttacagccgcattttgaggggcccctttatgaacacaccgcttgggcagttggcatccgaaatacttgggggccacacattataccccctccgaagtgtgttcaacacagcaacgggtactttggacttgggtatgcgcgagaacagagttgtgcccccaggatattttagaaaaagcagtaaggcttacgaatatttacaagcgaacatccaccccaggtgtgcgcattttcttccaagagggaaatggctaggttgcctccaaaaccgtgtgcacgcacaggacatttggggtgaccacaaggaagcctggtgaactgtgggacaatcacacgagtacacgacacctatacgagcattcaaga

SEQ ID NO: 610347 - DNA, 487 bp, Homo sapiens
ggtactctagaggatctgaacgggaatcggtgcggagtggggaatattccttgtctaaatgcagagcagctgagagaagttagcggggctcttcctctgttctctcccaccatccaatgtggacgtggactcagtttccctctgttctctcccaccatccagtgtggacgtgggctcagtttccctctgttctctcccaccatccaatgtggacgtggattcagtttccctctgttctctcccaccatccaatgtcgacgtggactcagtttccctctgttctctcccagcgtcaaatgtggacgtggactcagtttccctctgttctctcccaccatccaatgtggacgtggactcagttaccctgttctcgcccaccgtccaatgtggacgtggactcagtttccttctgttctcgcccaccatccaatgtggatgtggactcaatttcgctctgctctctcccaccacacaatggcacgtggat

SEQ ID NO: 610348 - DNA, 496 bp, Homo sapiens
  misc_feature (23)..(23): n is a, c, g, or t
  misc_feature (53)..(53): n is a, c, g, or t
  misc_feature (427)..(427): n is a, c, g, or t
  misc_feature (496)..(496): n is a, c, g, or t
gaagtgccgccgagacgcccgcngcgggcccgacgagcgggactcgccctgcnccgacttcgacgcaggggccgcagggcgggcccgcgcagtcggagtagcgacaggggcctggggggcagcccggagggcagcccggacggcctggctttcggcgcgggcgcggggggggacagcggcacggaggaggagggggcagaggcggaggaggccagcggggaggcagacggggacacggaggccgaggccgggggccgggcggacgggcgcgagcggcacccggggcgcggggcgcaccgcgcaggcgggcccgcgaccgtccggcgcgggcggcggcgcgggcccacggggccgagggcaacggggcggacgcggaggaggagggcaagacgccgcgggggcaggccgggcaagggggcaccgtgancggcggggaggaccggcggcaaaacggagcggacgcgaaccaaagagacagccggggccgggcgccccn

SEQ ID NO: 610349 - DNA, 176 bp, Homo sapiens
gtgctgattctttaactgtggataacttcctgtaatggttgctgtccatactgactccagccagaactgttcatccttaaaccacttgtgtgggcatgagcacccgcggcccctgttgaaccgctcagactgtgagcatgagcccccgtgttattcgtcgatttggtgccgtaatc

SEQ ID NO: 610350 - DNA, 345 bp, Homo sapiens
gtatacagtgtggttaaagaagctggcacctttcgcctctctcttgctcccctctccccatgtgatctctgcacacacaagctccccttcaccttccgacttgagtgggagcagcctgaggctttcaccagatgcagatcgcggcaccatgcttcttgcacaactgctgaatcatgcaccaaataaacctctttcctttataaattacctagtcttgggtatttcttaatagcagtgtgcaaacggactaatacaccccatacgtttgatatgagcttaatatccagaatatattaggaactcaaaactattaaagagcaggaaaataccaggttaaaaaacagg

SEQ ID NO: 610351 - DNA, 235 bp, Homo sapiens
catacctggaccttctcccaggagaaggcagcgcgttgtacccgagattcagggtctggctctgcttcccaggctagagtgcatttggcgcgatcacagctcactgcagcctcgacctcctgagctcaagcgaacttcctgcctcagcctcctgagcttcctgagtagctgcgactacaggcacgtgccaccatgtccggttatttttgtattttttgtagaaggtccaggtatg

SEQ ID NO: 610352 - DNA, 408 bp, Homo sapiens
cgtctcttgactgtacaaaccctgggtgttcacggcacagagctcccagagagaggcgcatgtcacaccctttgctgtttgtgtgagtagcctgtctctggtttgcgagtgctttggccagcccactgtgacaaggtggtggctgaggaacctcagcgcgaattacggccactactaccaagaaacgtggccagactcttgtataagtcagtccccgaccacatttctaatcagcaagtgaaggctatcaaccagggtctccgagctgacctcctcccacgtatgatagttcttcttgtcctcacctcaggccgcaatagcaccgccttcttgtgcttcttcacctcctctggcgtagaggacttacgcaccttcatgtcgtcgaaccccttgattaccccatcacag

SEQ ID NO: 610353 - DNA, 172 bp, Homo sapiens
  misc_feature (95)..(95): n is a, c, g, or t
  misc_feature (146)..(146): n is a, c, g, or t
  misc_feature (154)..(154): n is a, c, g, or t
agcatcaaggctccgggcaaatccagtcattcccctgtttcagccatatcagtcaggggttgtccgttgcagcaatggtgcaaaatgtcaggcancagttcattgcatggaggtcagcaggcgtcagttgttcagcaggggtcacngcagctcngcaattctgtcaatccat

SEQ ID NO: 610354 - DNA, 446 bp, Homo sapiens
  misc_feature (6)..(6): n is a, c, g, or t
  misc_feature (438)..(438): n is a, c, g, or t
ttggtnagactgactcagctgctgttcaactcccccctggctgaactgcttttgctaatactgttaagctgtggcccaggagacaaaacgtcctgaggtactagatatatctgacgcatgcaaaaggcaaaacctccctatttctcatatttagaagatactggtatatagtcttcccaaatcaaaaaatagaaggcaaaatggagataagaaaaaccgtgccaaacctcagctatacatagagtgctttggaaattgttagtagactgaaataatttctatctagctaaagtagataggcgtaatctaatcaaaagagtttaattcagatcagttgagagtatctgactttagatctgctgctgttcggaaattgctgaagtctaaacaaattaaccccactctgaaccaacatacatcttcttgattgattcaggnccacagag

SEQ ID NO: 610355 - DNA, 830 bp, Homo sapiens
tgagcgaggctgtgtcgcgtggccagcgtcggcgtgacggttggacgcgggcgcggacactgcgggtcccgactgctgcagccgcttgtcagtgtgatgaagatcggcatgccagacaccattcgcttttcgacccaagatgatttgatgtcttataaaactctgatgaaccatgatggctacgacagacattatgtatagacagcgtatcaagatgggcaacgagatgcaaagtagtaacgagagtcaaaggagagaacaagatccaaactgctcatgaacctcgatgcacgaaggagtgagcccgtccgccgctgtggagtctcgagagcccgaatggatgtggacaagcaggccattcataggcaatccactatttccatgtattagcgttcgtagtattgaagaaatggtgaacaagtctagcacaggtgctctgaacggcacagactgtctgccaggtgtagactgtaggacagtcgagacaatttcggtcaagaaaaggcagagagaacggaagggcaaacccttatcgtttatggtgaatgatccgagagaaccggatcaagtttcaatggtagaacagcagatcccagagttttggccgctattcgatcgttccttggagcctggtgacagaaggtttaacggaacgtcctgcaaacgattatctagcacgtcggactacattagcgtctgtctggacacaacaacacaatggaagcacgtgacaacttcctgtccgacgtgcgacgagccctgtgaaggccgcagtacgtcaaccgagtggcaagtccccaagcacgatatccaaaagtggccgaatcacc

SEQ ID NO: 610356 - DNA, 1024 bp, Homo sapiens
gatgaggactccacagtattcgacatcgaaatacaggtaaagagcctgtttcccagaccatggtggcgatcctgtggagaagttggtcagcatgcaagcctggggatgtgaacggagctggagcatggaaggcccgtcttgacgtcgagaggatgcttgaacaccaaaacgaacgtgatgtatacaaaaccccatgctccactcgatgcgtgtcaggcatctgctcagactgtcactggcaagctcgtttccacgtcaccacaatggagttgcttctgccaacctttgggcatccctttaaagtgccccctacttctactccccatgtaagaggcttggtgccttgctaaggagcaaagggtagaaacagtgttgacttttaaagaagttccgtgtaagacaattgttgacaatagtaaaagagatcaggaggatcaagcaatcgtaaaacaagcctgaaggatgtccaactgtgtctttagaatttccgagattcttctctagctggcatctacacatgggaccccatctgatcctttgctgctttacaggcttggtcaggtcctggcctcattatggccgttacctgtgtcagagttcaaggtggatgtgctacagagctggaacagcccttacagaagctgcacacgtctgtggctaccttatctgactaccgtaaccacagagcaacaaacgcaagaaagggcacacagagacacaagccgggcgaagacacaaagaccaaaccgaggacacgggcacaaccgcgactaaggaaagacggaagagcgcaaccaggacaagtacaacacagtgcacacataataacagatccaacccgggaaaggaaaagcaaagcgcaagacacccaggcggcagcacacaccgcgcccaaaagaggcccaccgacacgaccaacaacacccgtgccaacccagggtggacaccccacaaccaaccgctcgcacgacaccaccaagcacatacaacaacaaggcgctcacacgcacccccaaccccccga

SEQ ID NO: 610357 - DNA, 268 bp, Homo sapiens
tctagaggctcccggtaaaatcacgacatcctggctaacatggtgaaaccccatctctactaaaaataccaaaatcagctgggcgtggtggcggatgcctgtagtcccagctactcgggaggctgaggcaggagaatcgcttaaatccgggaggcagaggttgggcaacagagtgagactctgtctaaaaaaaaaaagaaatgaaacatgtaagaggctccagaagaagggctaaatgggcagatgggagttctgatacgggtttgga

SEQ ID NO: 610358 - DNA, 974 bp, Homo sapiens
  misc_feature (354)..(354): n is a, c, g, or t
  misc_feature (356)..(356): n is a, c, g, or t
ggacggcgccgagttggtgcactctggccacatgcctgccccgctggctttgccctcaagatggacacgggccgagggtctccggacaccggctggtgcgaggctggcggcgtgtcgaggctggggcagggcggccgagtgtgctcacgttcgagctggtctttgggggcgaagggtcagggggcgaagctaccggccactaactgtaaggcggacgctggctctcttcgaccaccaggggcatcgtgcggacgtagatgctatccagtcgtgcagacatatcccatgcgcctaactggcagcatggatcttcgccttcctcgtggtaccatccaactggggctagccatcgcntntcggctccgcctagagcaccacagctgccgcgtcacatacgcccaacatcgtattggcacctagcgcttgtaggcctgctgtcagtacactggttaaacgtgggatacggatgcgcgactatggggagtcggaggctgcaaacgaagcgcctaccgtggcacatagtgagagcgccgaggtgaggtaaagcagtggctttacgatacagaacttagaacatgatgtgaactgagcatggtttcccatgaaccaataggaccgtactaatgcgcttgtagactgactttgagcgggcgtacgtgcaaccacacggagttgagtcgtaatttctgaagtcctcttccttgattcattctgggagaaacgtaggtatgcaggagcacgaatttcaaggagcgcagccgaggtggccgagagccaccggccaggaagcggctttgattcagattaggtcgcgggtcccggggggggaacggcgtgatgggttcggatctgcgtccggacgtacgctttcgggattcgcctggaactcggtccgggaggcggctctgctggcagggtcgtacctgggacggttagggttccgcgtagacgacggtgctcttggtggaacgggg

SEQ ID NO: 610359 - DNA, 447 bp, Homo sapiens
acactcattcgcaacgtgaagccagaagatatcaagagggttgcttccaagatgctccgtggcaagcctgctgtggctgccctgggtgatttgactgacctacccacctatgagcacatccaggcagcgctgtccagcagaaatggacacctgcccagatcataccggctgttccggtagagtcccttagagctggctgtagagtgcttgtgtgcatgttactgttggtgtagacactgcataaggctagctagctgtgtgaacagtgccaacagtgaaactctggaaacttgaatgaaagttactgttgccactgcacttttgtgtctttcaaaacacaagtggcttatttttcatctaacaagtattttttctgagtatctgccaaagcaggtgctgtcttggccactagatgtttctggagcaaggaaaggcttggaaagattt

SEQ ID NO: 610360 - DNA, 915 bp, Homo sapiens
gatcgctccagtgagcacgttgtgacagatgctgcgggctttcctgcctggcatgcggctctgccggacatcgggaataacatttacatcgattccgtgcaggtggtcactaagagaattcgggcacacaatgggctcatgactgcaccgcggactcgctgtctcctgtccctatcggaggccttccggttcgtggacgcccttcacccggtagattaatgttgctgcgctggtagacaagaggttgtctcaagaggaaaagccacgggagtacgttaccccgagacctcatcttgcctactggacatagtccaatgtgcttgcgatcacgatatccacgtttggcatacgtcgggagattctgtaggggtgtctcactctataaaagaaagagacccacaaaatgtctagggtgagcatcactcgatctatcagccaccccagaagatagcctcttggcagcagtctcgtgggttcccgatctgcgcctacaaggacctatatacccgcaacaatgaagacagagatacagacttggagctacctcgagtcgttggtgatgccgtgagaagccatgggacatttgatgttccatttcattgtttcgtaggaagaaagcgacttttggtccgcaaatgattcgtagtcattgaacatcttgcacgggaagctggtcgttgagttggagccaggagggttgacgggaccgtttcccaagaggtagaagcggacgggatggcagtggacgcgaaaagacacacacggcagggtttggcaacagcacattgaaacaatagaattgaccagggccgttgcgaccggaccttgcaaggttgagcttgggatcacaccgcctaaaagaaaacagtccgaaggcacgattacgagaacgggaggcgggaacacaaatgggac

SEQ ID NO: 610361 - DNA, 129 bp, Homo sapiens
taccttaatggctgttttacaaaaatgtagaagtgtattttttgtatcattaaaaaataactcaatggatgatgaaaacacattcacacaaaaacatatatacgaacattcatagcagcattattcata

SEQ ID NO: 610362 - DNA, 716 bp, Homo sapiens
ccggtgcgccgcagactagggcgcctcgggccagtgagcgcggaggagccatggcaccggtaacggggccgtggaaaacgggcagccggacaggaagccgccggccctgccgcgccccatccgcaacctggaggtcaagttcaccaaggtgaggcgggctgcccctcccaccctgacggcctggtggcccctgcgctggtgcatgccatgactctggtggctgtgcgtggggctgagggatgcatgctgtgtgcctgtgggtgtcctgcctggtgctgcctgcctgatgaccctgatgccttccctgccctgggctgcggctctccatgaaaccgcacctttcgctgggacgtctctgggcggggatcgctagtgctgtgctggggcttctgtgctgcttgtgatgcctctgaaggcgcgggaaacctgaggcctgtccaggctgccctgctgcgggggccggtggcctgcccggcattccctagctgagggcccctgacggtgtccccttgcgcttgcccgcttttgatcggcgagtggaggtgcgcgccgccgtttgactcggagcgcgctggttttggggagctccctccccagaaaacccctgcgatgatttccagggttggacgagtctggctttgagagggtcggagggtccgaggagcgccaagagagagtccgggaggcaggatggcggagctgcagttggaagactg

SEQ ID NO: 610363 - DNA, 657 bp, Homo sapiens
  misc_feature (128)..(128): n is a, c, g, or t
ggtctcgtttgcacgctacgctacgttcattgctccgtcctcgcgccccttttcctacactttcctcttctccccgacctggcatggagcctgctctttccgcgcggtgcattctggggcccgaggtncgagccccgccgcgtgccgccgtcgcctgatgggaagcgagaacgaggccgtgaccggagagacaaatagcggagtcgccaccggagagaagtcgactccctagcagcagccgtcgccagagaggccctgccaccagttcgcccgtccccctgccccgttcacaatgcagcctgcttctgcaaagtgggtacgatcgaagggactatgtcttcattgacattcagtgttgaagacagtaacggctgtcaactgttacaactctcgacaaaatccaaacttacatttcagttgtctcggacgcgaacgtgataactctcacagcattctacacatgacattgatcttctttcactgtattcgatcccacactgattccaagcccataaagaaccggacagcatcaacttttatcgtccgtctaccgacaacggacgaaatctggagccagtccatgggccaaaggttaaacaaaaacgaaaggcgccaaagcttaaatttggcgcttagtgtcgacttccaataaattgg

SEQ ID NO: 610364 - DNA, 304 bp, Homo sapiens
cccgactagcccgacgtccccgactagcccgacaggttgggtggaaaggcgaatgggtggacgtctagttggatggaaggatagttggtgaggatcttatggataggcggatagttgggtggactggcgattgggtggcagtatagttggatggaaggacagttggttaggattgttgggtaggagtacttgttgggtggaatggagacttgggtggacgtctacactggatgggcggactggttggttacggatctttgggtacggagtactgtcgggctacgtcgggggggtaccgagctcg

SEQ ID NO: 610365 - DNA, 141 bp, Homo sapiens
gcttaaccaacatgaagcactatggttggctcagtcaggtcagctgagaagtaggagctgttatccatcactggtggggaggctgcagagaagccttgttttcgggtggttgatgggacactattcatgatagagaaattg

SEQ ID NO: 610366 - DNA, 215 bp, Homo sapiens
caggggtattaacttacccagaagtctgcagctcggttagatggctgatatttcaatcttttggattctattggatggcaaggtccaacatcgtgagttggttatggttctccaggccctcgatgacctcgatgccatggtggctaaggtacagctcccgcaggttcaccaggttcggcagaccctcgatctgggtcagccggtgggcttcaggt

SEQ ID NO: 610367 - DNA, 962 bp, Homo sapiens
  misc_feature (29)..(29): n is a, c, g, or t
  misc_feature (66)..(66): n is a, c, g, or t
  misc_feature (327)..(327): n is a, c, g, or t
  misc_feature (393)..(393): n is a, c, g, or t
  misc_feature (395)..(395): n is a, c, g, or t
  misc_feature (400)..(401): n is a, c, g, or t
  misc_feature (404)..(404): n is a, c, g, or t
  misc_feature (408)..(408): n is a, c, g, or t
  misc_feature (410)..(414): n is a, c, g, or t
  misc_feature (416)..(416): n is a, c, g, or t
  misc_feature (418)..(418): n is a, c, g, or t
  misc_feature (420)..(421): n is a, c, g, or t
  misc_feature (426)..(426): n is a, c, g, or t
  misc_feature (428)..(428): n is a, c, g, or t
  misc_feature (432)..(432): n is a, c, g, or t
  misc_feature (434)..(434): n is a, c, g, or t
  misc_feature (437)..(437): n is a, c, g, or t
  misc_feature (442)..(442): n is a, c, g, or t
  misc_feature (446)..(446): n is a, c, g, or t
  misc_feature (448)..(449): n is a, c, g, or t
  misc_feature (452)..(454): n is a, c, g, or t
  misc_feature (456)..(456): n is a, c, g, or t
  misc_feature (459)..(459): n is a, c, g, or t
  misc_feature (466)..(466): n is a, c, g, or t
  misc_feature (470)..(470): n is a, c, g, or t
  misc_feature (472)..(472): n is a, c, g, or t
  misc_feature (476)..(476): n is a, c, g, or t
  misc_feature (478)..(478): n is a, c, g, or t
  misc_feature (481)..(481): n is a, c, g, or t
  misc_feature (483)..(483): n is a, c, g, or t
  misc_feature (485)..(486): n is a, c, g, or t
  misc_feature (488)..(488): n is a, c, g, or t
  misc_feature (492)..(492): n is a, c, g, or t
  misc_feature (494)..(494): n is a, c, g, or t
  misc_feature (497)..(497): n is a, c, g, or t
  misc_feature (499)..(502): n is a, c, g, or t
  misc_feature (508)..(508): n is a, c, g, or t
  misc_feature (510)..(511): n is a, c, g, or t
  misc_feature (513)..(515): n is a, c, g, or t
  misc_feature (548)..(548): n is a, c, g, or t
  misc_feature (554)..(554): n is a, c, g, or t
  misc_feature (556)..(556): n is a, c, g, or t
  misc_feature (558)..(558): n is a, c, g, or t
  misc_feature (561)..(562): n is a, c, g, or t
  misc_feature (564)..(566): n is a, c, g, or t
  misc_feature (568)..(569): n is a, c, g, or t
  misc_feature (571)..(573): n is a, c, g, or t
  misc_feature (577)..(578): n is a, c, g, or t
  misc_feature (582)..(582): n is a, c, g, or t
  misc_feature (584)..(584): n is a, c, g, or t
  misc_feature (586)..(586): n is a, c, g, or t
  misc_feature (588)..(588): n is a, c, g, or t
  misc_feature (592)..(593): n is a, c, g, or t
  misc_feature (596)..(596): n is a, c, g, or t
  misc_feature (599)..(599): n is a, c, g, or t
  misc_feature (602)..(602): n is a, c, g, or t
  misc_feature (610)..(611): n is a, c, g, or t
  misc_feature (615)..(615): n is a, c, g, or t
  misc_feature (618)..(618): n is a, c, g, or t
  misc_feature (631)..(631): n is a, c, g, or t
  misc_feature (637)..(637): n is a, c, g, or t
  misc_feature (646)..(646): n is a, c, g, or t
  misc_feature (683)..(683): n is a, c, g, or t
  misc_feature (703)..(703): n is a, c, g, or t
  misc_feature (705)..(705): n is a, c, g, or t
  misc_feature (711)..(711): n is a, c, g, or t
  misc_feature (713)..(714): n is a, c, g, or t
  misc_feature (722)..(722): n is a, c, g, or t
  misc_feature (726)..(727): n is a, c, g, or t
  misc_feature (739)..(739): n is a, c, g, or t
  misc_feature (825)..(826): n is a, c, g, or t
  misc_feature (831)..(831): n is a, c, g, or t
  misc_feature (836)..(836): n is a, c, g, or t
  misc_feature (899)..(899): n is a, c, g, or t
  misc_feature (941)..(941): n is a, c, g, or t
tattcagggacttggatttggtggcaggngatcaacataaaccaagacaaggaagaagtcaaaganatgaatcaagtagattctctgggatataagaggcagccgaagagttcacaagtgtgaagcctggaagccggcgcggtgccgctgtgtaggaaagaagctaaagcacttccagagcctgtccggagctcagaggttcggaagacttatcgaccatggagcgcgcgtcctgcttgttgctgctgctgctgccgctggtgcacgtctctgcgaccacgccagaaccttgtgagctggacgatgaagatttccgctgcgtctgcnacttctccgaacctcagcccgactggtccgaagccttcccgtgtgtgtctgccgtagaggtggggntncatgnnggnggtntnnnnntngngnngtttntnccgngngtngctgnggcngnngcnnngnggncgtctgntgcncnggtncnggntntnngngtgngnggntnnnngtgggngnngnnnaggttaatgataagataatggtaggagaaatgngtgtgntngngtnntnnngnntnnngggnntggngntngngggnnttncgntcnccggcccnntgcntcngctgcctctgggngccccngggcttgcnctttcccgcttgcgcctccgccccgtgtcgtgggcgnccgggcgttcttggctcgcngngctgcngnngtggctcncgcnnggcctcccggtnctgcgccttgcccccgccccctcgcctgccttttcctgcgcgccggttcgcgccttcccggccctttcccgcctcgccctgtctgnntctcntgggntgggcgggcgcggggctggtggcggctctctgtccccccccgttcccggccctcccgcctctngcgctgcgcccccccggggtgggggcgccccccgggtgtgcncgccctgggcggggcgggtgt

SEQ ID NO: 610368 - DNA, 120 bp, Homo sapiens
gcatttttggctcatctccagttgcctctcttcttaactatcagcacagcttgctcatctatcacctagcttgctggcctcttttgcttgcctccgcctgctttttgacggcattgcctt

SEQ ID NO: 610369 - DNA, 275 bp, Homo sapiens
actacaagtgctcaagaaggacaagaaactatgaactactgcaggctctctccatcttattgagtcacctgatgcatctgacctttgtatgttactaacaattctccgtctacagctggatgggataattcaggctagactgcttacaaacactaacggttaaaccgtcaggctggcgttgaaattgccaccttggctggcttagaatctgtctatagtcataccagtactgttgacggaggccattggcctattctacaggacagctttctcgt

SEQ ID NO: 610370 - DNA, 680 bp, Homo sapiens
  misc_feature (546)..(546): n is a, c, g, or t
  misc_feature (621)..(621): n is a, c, g, or t
gcagttatgaattaataatataggaagcacagttggattccactagcaaaatctataactctcatggttttggaagtcatcttcatgggtgattttcctttgttttttaaagaaaatatttcaaacaaggaattcataggatactgaaatttgatatcatccagaaaaacagatcccattacattgtaattgttgttactaggcatatttattaagtagagaaatagagggtaaaaagttagtgaactgtcttgtttgcgtgaaccagtatttgtggatatgtctagaactgtaaaatcttgcttaactagaaccttagtctgcaccctccttttaggagaatgaggtaaaaggaagacaataagcttatgatatcagggattcatgtaaaacaggaaatagtagttggctccagtcttctcctctaacaaaagtatgcatattctgagagataccccaaggcatcacaagatcctgaatcatcaaaacaccattgaattgtgttgggcattttgtagccaggaaagtgaagtggttcaatttagnaaagggtttcaggccagggcacggtgacttcaggcctgtaatcccagcactttggggaggccgaggacaggcagnttcactttgaggaccagttagttttgaggattcagcctgggcccaacgtgggtggaaac

SEQ ID NO: 610371 - DNA, 541 bp, Homo sapiens
ggggtcccccccggggggggcccctttaaaaaaaatgggtccccccgggggccggaatttgggcccaaaaaatcccgggattttttttttttaaacaaatagggggttttccctcttcccccaaaccccacaaaaattaaaccctaaggggggtttttttgtttgcctttaagttaaaacaaaaggtttttgggccaaaaaattcaaagggcccaaaaaccaaaaggcccttttttttttttttaaaaaacaatttttgttttaggggaaggaagtgggcccctttttttttccccagggaaaggcttaaaaaataaaaaaaatttttttggccccaaaaggggtttgttttccttttggccaaaaaatttcccgggggaaaattcaaaacccagactgggggattttggaaaaaaatttttttttttttttaaagttaaataaaaaaaaggtttttaattttaaaattgggggggcaggggtttttttaaccccttaaaggggttccccttttttgggggtaaaaaaaattaagccccga

SEQ ID NO: 610372 - DNA, 177 bp, Homo sapiens
tccaggatccccgctatgacgtgtggaagcctactacacactggtctaatgcgagcactttcaaaggtctaatcatgagagtgatgaacctcacctattctcagcaatgaatatggccagcacggccaccaccaccgctcatggaaataagagaagacacaaacaattagaaaaaca

SEQ ID NO: 610373 - DNA, 998 bp, Homo sapiens
gagcgggctgcccggatgcgctgatgccgcgggagcggagccggggttagctggcgctgctggaagatggcgagcggccgggacgagcggccgccttgtgctggctagggctggctcctgttgctcatgtgcctgctgctgctggggagctcggccgggctggctcacatcaagaaggcggaggcgactaccataaactacgagcgccggagcgccgaggcggccgagggccagattcgaccgctacgtaccacgaacaggagtgggagtcggcgctgagggaggcggcggccggggcctccccggccttggaccggcctcttaagcatcggcgctcggtggacggccggccgctgtgggtgcttcgcctcaaccgcctggcctggggctcgctaatccctgaggtcgacccggggcctgaccgctgccgggcccgacgcttcgggccccgctgcatgcccgggcccggcccccagacgatcaacacctgctgacgccaccactgccatggcgaccgaagaccccgccgtacgcaggccagcgctgcacaacctaccttgcgcccgagaacctgagacggccggacctagccgcaccagggaaccccagccccctgggaccgcgggcctggtcacaacaacacaccggacaggtggatacccttgactaggccacaggcgatccaaagcccgcggaagtggctctcaaacaacggtggccacgcgaaggagacgaccctgcgggaaaacccgaccagccacggacaggcccgaccccagacggccacggacggagacagcacaggaacaaaacagagacagggagggacgcgcgcacactgcccagcggcaaactgcgtcacacgagcaccgattcacacacacgaagccggaaaacccccccgagccacgacaccacagcgttagaccgcgaagcgacgccccgcggcacaccaccaacaacgagaggaacacgccaaaagcaaacacgctaaacaa

SEQ ID NO: 610374 - DNA, 506 bp, Homo sapiens
  misc_feature (347)..(347): n is a, c, g, or t
tcctgtctcccagatcctgagaccctggctgagaacttggcccagcctgctgcttaaaggcaccatggggacctgggttgccctgagacccaagccattgttagcagctagccagccacaccaaccacgccagggggaggaaagggaaggactgggagagacacaaagaccagagccagcctcagggacaagagattccagttttaggcctttctccttctaagtgccccccacccccatagcctgcatgtccactcccagacgatggccaagagcagaaaccccccaaaaaaaaaccccccccccccaaaaaaaaaaaaaggggccccttttggtgggggaaggcncccccccaaaagggtgtcctggtttgacagcatgttcaatgaggaaccccaagacggacccacacaggtccacccacgctgggggctgtaatcacggagggaagtggctgcccccttaacacacctttaataaacagtctacagacccaaaaaaaaaaa

SEQ ID NO: 610375 - DNA, 372 bp, Homo sapiens
gggggtacaaaaaaaaaaaaaaaaaaaaaaaaaaaaaaaaaaaaaaaaaaaaaaaaaaaaaaacaaaaaaaaaaaaaaaaaaaaaaaaaaaaaagcggccgttcaaatgcctataacataaactacatatgatataaatgatgccccttaaagctgggcaaaatttgaaaaactaaatggggaaaccttaaaaaggaaccgagctaaacagacaaaggactggtcaaaaaggcaaagtccttggcataaaaggtcgaataatgcattcaaattcaaaaaatttctttaaaaaatggttatcaaaaagaaatactaaagacaggtaaaataaactaggttaaaagaaagacaaataaaaactttgtaaaatcc

SEQ ID NO: 610376 - DNA, 1014 bp, Homo sapiens
aggaattttttcctgccttcctttttaaagccagggtgatgaatgtgcacccattgtactgggaataatgaaagaggtgatgagcttgtactagatccttcagacacatctatgagaagatttgttcatttaagaagtctgcccactgagcgtatagggaaaggattgaaaggattttaccagctcctcttagtaactccgtgcaattgaccacacgatcagactctctgttctctccgttgcctgaaggaactttgggggaatcatcttcatccgtagttacgctttcctgtaaccttctcagtgtgtttaacatgcctctgaaactatgtgcaatatttttggttgacacttgtatccatccttaaagagattagtgcagattgcagatgttctgtcttccatcccaaacaagcgtgccatgaggtaggatcctagcgggtttggctgtgcttactccactgctcagaaagcttccattctgctgtcctcagtcctcgattcctcttctgtgctggacttccaggccacccacccttttcacagtttagatagtgttgtcagctgctgtccctaggtagcaacacacaatacctactgtgaagtaggacgtcaatctgtgtgcgggttcgtcggttatgtggaaatcacaatctccatgaggagcaaaggggttttgcagtgtctttttgctttcagaaccagagaatctatattctcactaagctgattgtatttggttgctcataaaataggttgatagctaatttgacaagaatgcgttactggttgttcgggtaaagtactagaagtttgggaagacactatttggtgtgggctttatgtgtttaacattagactgttgggccagataaatttgggtattttgaggagttgagaagtagggtggaggagattggagatatgtgaaattaaaaaagggggtataacgggagaagcacttagagcatagtataaaagggagaaatgatagtggaaacaatttgttattga

SEQ ID NO: 610377 - DNA, 514 bp, Homo sapiens
gtgtctagaggatctactcctacccacgcaacaaaatcaacaccaccacccttctcgaggaggaagccgagacctgccaggtggtaagggacaaacccagcagagaactccatccttcccttaactccacagggaatcccaagaaagggaatctcaagtccttctgggtaggtgagttaggagctttccatcaacagggagcagtggttaaggacacgtggagaatcccagctccttggacagggtgttccccctcgacattcttgtctgtaacatggggtgatggccaggcgcggtggctcacgcctgtaatcccagcacttggggaggctgaggtgggaggactgcttaagctcaggagtttgagaccagcctgggcaacatagcaagacccccaccatctctgaaaaaaaaaaattagccaggcatggtggtgtgcacctgagaatcccagctactcagaaggttgagacaaaggggatcgctcgagccgtggggtaggaggtgggtaccg

SEQ ID NO: 610378 - DNA, 324 bp, Homo sapiens
  misc_feature (219)..(219): n is a, c, g, or t
gggcttcctaagatagactttatggttaatgggatttattttagctggttaagtccaggacccctaccaggaagaactgaggtccatatttgaggttggtctcacccttttgcatgtggtcctactaataataattttgctgtaaagaagcctcaataaggagatggactgtgtgaaaagagatgagaaagcaggcctgtttgcaaggctggcccttgntgggcatctgaaagcttggatttcaggagggttctcattactccctaaatgataagagtggctcactgtgccctaaactgttccgtacaaacaatgtggggttaa

SEQ ID NO: 610379 - DNA, 449 bp, Homo sapiens
attcgcggccgcgtcgacgaccagcctggccagcatggtgaaaccccttctctactaaaaatacaaaaattagtcaggcatggtgtcacttgggaggctgagagaggagaatctcttgaacccaggaggcggaggttgcagtgagccaagatcgtgccggtgtactccagcctggacgacaagagtgaagacttcgtctcaaaaaaggaaaaagaaaaaaataaatctttaaaaataactagttgctgggtgtggtggctcacgcctataatcccagcactttgggagtccaaggtggaaagatttcttgagctcaggaatttgagaccagcctgggcaacaaagcaagacctcatctctgctaagaataagagaaaattagctaggcatggtggcagatgcctgtagtcccagttagtcaggaggcagaagtgggaggattgatgagc

SEQ ID NO: 610380 - DNA, 459 bp, Homo sapiens
attatagtgaggagtttgtgtgtttccaggaatgtatccatgtcctctagattttctagatttgtgtgcttagaggtgttcataataacttcggaggatcttatgtacttccgtgggatcagttatcatccttgtcatttctgattgtgcttatttggatcttctctttttccccctttggtagtgtagctagtgctgtcaatcttgtctattcttttgacaaactatctctttatttcattgatcatttgtatcgattcattgtgtctcaattttgttcaattcttctctgattatatttatttatttccttttgctagctttgggattagtttgtcctctttatttttctattctatgcaagatattagattgttaatttaagatctttctgacttcttgataaaggcctttagtgctacaaactttcctcttaacattgctttaactgcatcccaa

SEQ ID NO: 610381 - DNA, 662 bp, Homo sapiens
cgcggtggctcaggcctgtaatcctacgttttgggaggctgaggtgggtggatgacctgaggtcaggagtttgagaccagcctggccaagataaacacaaacacaaaattagccaggcgtgatggtgcatgcctgtaatcccagctactcaggaggctgaggcaggagaatcacttgaaccagggaggcgatgatgctggagagctgagatcgtaccattgcgctctagacgctgcaacacgagcgaagctctgacccaaacaacagcggagaagcagggcgtcactttcatccaggccatagtgcagaggtgcaatttcaggtaactacaaccttagtcagctggctcaagcaatactgccaccttaggctcacaaatagctgctctgatactacactgagtggatgtcacagagcctacagagcctacaggcctttagttactatgtagagtatttactatgtgaccctataataatgaatgcattgattatttagaactgggggtagcccgtgacacagcttaggcttgtgtctaccctatggagctgagctgcaagatgagctgaggcagtagttagaactagatgccccttattacgccgctacacagtagaacggcttgaacccgcaggctgagatcccattactaggctgctgct

SEQ ID NO: 610382 - DNA, 405 bp, Homo sapiens
ctagagtatacaaggctgattagagatcctcaatgtatgccataaagcagttcttaaacaacacatttgaacaattcttgaggattagaggggtgaggggtgttaaccagttcagaattttaagaaaacaaaccggttgtacttagagaacttgaataatgagagaagactcttagtttaaaaactgatctttgacatgatgtaggaaggttctttgattaagaagttaaatgaccctgtttgaagggaaaaagaaaggtagtagtcgtatttagtcgtatttagtcctctgagatgtttcgagattgcaggatttctgtctttcctcttttggaaacatcctgggaggtgagattaacatgatgaactcacagcctgtccgcctcttatgcatcctgctgccca

SEQ ID NO: 610383 - DNA, 189 bp, Homo sapiens
gaacaatccaagctaaatggcccactaacaatacttaataagaaacagaaataaccgttacatgctacaaatatttcattcatagatatcacatataactttgacaactatacaactaaactgctctgtggaattgaacatggcatcatttttataattatgttatctcacctatactgtccaaatgtg

SEQ ID NO: 610384 - DNA, 277 bp, Homo sapiens
ttgggagggacacagatggagcaggtcacacgcgagcagtggtgaggtctgctctttcaaagccttggattctctggtgaaaaccgaagtaaagactgtacactaagccgggcacagtggctcatgttcttgtaatcccagcgctttgggaagctgaggcagagggatcacctgaggtcaggagttcaagaacagcctgggctacatagcaaaagcccgtatctactaaaaatacaaaaattagccaggcatgatggcgcatgcctgtagctcccgc

SEQ ID NO: 610385 - DNA, 285 bp, Homo sapiens
ggtcgacgagaggcggactcagggtggtaatatgagtgatggggagtggctcacattaccacccttcacagggccttctctcgtcagatgagcaggagcaatagagtttcacaagagcatgaaccctattatgaactgtgcatgcgagggatctaggctgtgtgctccttatgagaatctaatgcctgatgatctgtcactgtctcctatcacccccagatgggaccatctagttgcaggaaaataagttcagggttcccactgattctacatcatgggtcgacg

SEQ ID NO: 610386 - DNA, 966 bp, Homo sapiens
gacataatgatgagcaatatagagtgcgtactctgccaacaaatgagatactaactggttgtgtgcacttggaatcatacattgtaacgatggggatatgctcattccgggaaatgatcttactcctgacttaactgtgatcgcatcagtacatcacggactcatgatggcgagaactgggatgtcctctaatgtgcagcgagagtattatcagtctcctattaagtgtgtaagaaggatgttggctcgacaccccacccatggagtccctctggcagaccatcgtttgcgtagtacaagtgcatgcggtgtgcaggcatgtacgtctccatgatgtgtgtgttgaacgcatctaagttatgtgctcttcgtgaagaggttttaggctggtgagacttggggtcccttctgtcctgtcagaatctagagagttcccgccttacctggggtacactacgtgttcacagagtgggtactaccatcttaattgagatcgtagcgtatcctcaagaatcaaacatagtctggtagcataactcaccttgaactgagtgaccctgaactcgcactctggatcaacgtcgaaagatttgagtcacgtcatgaccactagttgtgacattgactgtcagggtactgactgtgatactgttggtgctgtacagtatgccagccgtcaggatgatgtacggttgacctgatgcccatcagctcacgtgtgtaacaacgaacagtgtcctaaatggtgccaaccaacgaattggatcactgtcctctgatgtgcctaggggtcgtgcccttattttggacttgttcattcaccagttgagaatcacacgcgtgttgcaccccagattggaatggcctcatgcggcttctgcaatttcagcctcagatcagaaggaacacaagaggaggcgatgggagtcgaccaacacggtggtaggacaaatacaacactctcgc

SEQ ID NO: 610387 - DNA, 287 bp, Homo sapiens
acaggacttcgacggacggcagtcatgggaaaagacttcttctgctttatctaaatttgactacttctggacaagaaaatttacgtttggttaataccaagctgaacatcatataaagaaaaaaaagaacagcccttaaaggttaaggggtacgggactgtaaccagggtgaagggcagccggaacaaagttaaaagggaattgatctccaccaaagaagtcgggggcatgacagctttctctacttgctcccggactgggcctataccaaagtaaagtgttggtag

SEQ ID NO: 610388 - DNA, 1265 bp, Homo sapiens
gccctggctcgcagcggggtgcccctggaccctgcctcgctgcgggcatcgctgcggctgagcatgagccctcctgtgcctggatgtgcctggtgtgtcctgtggccctgatgccctctgctggctctgcagtgcccctgctgcctggtgctgctcgtgggtgtggttgccttgaacatctgtgcttcctctggtgtggaatgtgatgtgccctgcccttcctgccgcctgctgctaccttgcccgtggtgccacacatgctgcctgacccactccctgtgccccacagtgcattagatggacgcttgtgccatgaatgctgggacgtgatgcttggtgcctggcatgatccatggacggacggacggaccgagacagccagctggcctgcacgacatgacggtcgatgcgcagcatgaccagcagacagcctggccccgctgtcaaacgaagaaaccctggacactgccaaggatgtgccctcttcggcaactgaggttccgacccgtgaccgatcggcgtgagcacgtgagtgcacgacttaccctcgaatgataccgtgcgagcagcatccacagcactattgcttcaggcgtatctacacagagcggacagcctggcgaactctagaccgaagggactagcagcccgcaagacccagcaaaacgtcagctggctgtgcagggaccagcttgaccaagggaccaccgggcaagtggcctggccttccgtgttgcccactcaagctcaagaccccaggcaacgtgtgttgctcaagacgcatccttttgtgctttcaacggcagtcagcttacctctcccatcacttgttctcagggttgccgagagggggcaagtgtgcacaggccttccaactggcgcatccaagtgacaaggcccaggacacaggccaaccggaggggtcctcgcttccatggtcaaagcggggtactggcgcatgtggtgcaccaagggtcaagtcttgaacgggcatggcatacatggagggcacacccaagacacacagcacacatgccaagacgaacgcatctgggatagcgtagaagaccattggggcgacccccaacttgcgcaccacacaagacgagagcggccccagccaacagaacagaaagaccaggagatcccataaaagagaacacaacacgccagataccccacgagcgcagcgcagcaagcacacaacccgccacacgacacaacaaaaaaaccgcgacaaccgccgcgaaacaccgcaacaccgg

SEQ ID NO: 610389 - DNA, 537 bp, Homo sapiens
  misc_feature (351)..(351): n is a, c, g, or t
  misc_feature (360)..(360): n is a, c, g, or t
  misc_feature (395)..(395): n is a, c, g, or t
  misc_feature (422)..(422): n is a, c, g, or t
  misc_feature (439)..(439): n is a, c, g, or t
  misc_feature (478)..(478): n is a, c, g, or t
  misc_feature (505)..(505): n is a, c, g, or t
aatttttggaacaaattttaaatataggcattactagaggaaaattatctatggactgtcctattaatgaagaatgtctgtcttacctccgtttgttttgggaggaggagaaaatatagaagaatctaataaggaacaagtgattttacttttttagctcccagctactgttgtgctcgttttaattgctgttttgaagatctgctgcttaattatccccatcccttagccggagatgtgggagtgtttccctttcagttttttgggtgatgttgaaattccttttgtaattcccctcccgggggcccaggggtcaagaatttcccaagccattgaacccaccagccttcntttttaaancattaaaggcttccccagtggggaagggaaaactnccagcttcgaacaggttaaagggggantggggtgggggtttgcntgccctgcaatttgctctaaaaaaccgctttagtggccnttcgttacatacaacccaggacatccngtaggcaaggggggacgcacatgtgtgtgtgt

SEQ ID NO: 610390 - DNA, 449 bp, Homo sapiens
aaccagctacatcccagatatcttatattcagttgcactttgaattagtttttaagggctgtttcatttaggtcactcttactaaaattctaggttataccaattacattcctaatcagatttatatttcttagattaatattaaagtttattatccttgaggtggttgtgtagtgcagtagataagtaactgcttgggacacttgcatactatattggagtgcctggttggaatctccactgtgcttcagatctagcttcctaatttgaaccccaggacgcatcaggtaatggcccaagtatttgggtccctgctacccacatgggagacttggatggagttcttggacgctggcttcagtctggcccagccttggctgttgttgacatctggggagtgaaccagtgggtggaagatctctgtctgccttccaaaatacaacaaattt

SEQ ID NO: 610391 - DNA, 529 bp, Homo sapiens
ccccggcctcttggttgctgccgtgtgctgtgtgctgcacatagccattgtgcatggctggtctggtctctgtccgatcagcttggtgagccagtggtgatggggtcagggtgatgacagctgttcctggtgccaatgtgtgtagttcatgccccacgggccttgccagcagctctggccagatggaggctgctaaggtgcccctaggctgtccctcaagttcgaggtctggtgtcgacacgctggtgtcacgcccggagctctgaagacgcctgagggccgcctgcacgccctgagtgaaactcgtctgtgcttcatctccagggcgtctctggccgagcctctttttgtggaaaacgacagcagcagcagtggcctggaagacgccaccgctaacgtgagtcccatggcctgcagccccaggaagcaggcagctgggccaggcagggactttgcacatgcagggactgaggggagctggggatgggcaagtggtgactgctgctagctgccaggctgggcctccaaa

SEQ ID NO: 610392 - DNA, 148 bp, Homo sapiens
agagtcaaaaaaaaaaaacgctttggtccacatactaaccacacacactggctccatatttgtatagaaatatctccggaaagggccggggttagggggggggccctcttaggttttttttaaaatttttcaacccataccaatggtt

SEQ ID NO: 610393 - DNA, 262 bp, Homo sapiens
acctatttcgccgggagaggactgtaactactatttaggtggcacagattgaaatttagtggttccatgggctgactgaggaggggtggacttttatatatagatctacataaaacctgctacatgacaaaacccacacctaaggaaatttaaagaatttgccccagttactcactttgagtaacctgaaatctagctgttgaatacgctgaagtaaatccttgttcactgaagtctttcaattgagctgaatgaatacatt

SEQ ID NO: 610394 - DNA, 807 bp, Homo sapiens
agcgggtgcatcctgggcttggcgtacccatggcgtctcgtgtcctttcagcctatgtcacgcgcctgcccgcggactttgctgccgctgccccgggctccggatgcctggccgtggcccggcctctcagcaccgctactctgctccgtcggggagcccagaccgaggctcgggactattgcagccggccttagtgctcgcgcatcgttcctggtacagttacacagctcgtgccgtcagtatacgtgacagtgctcgtccgttggacgtctatgcacgggcatccaaggacccgtgtgcatcttagcggtattcgaaacgtcgtatcgacgaagagaatttgagcgccatgaagaagtgcgtcttgcatgtagaagtactcagttattgaatggaacagacctggagcttagacagctttggaccaaggtaggagagttagtcatggccatggacagacgacatctaagggtttgaaattccatgagtatagcatgctgaaaagtgaattgtgtccatcgaagaaatcgtagatcacattgctagataagcaacggcatgtattatcgaataagacgtatcagacccttaggctttgctgagcagaggactcgagagtgatcagtgacggaatgtctggcgagtgcaggacaccatcttcggccattcgtgactgaactctgactaagagtgactctctgactggacattgtaattttaacactcggtagtggtgttgaaaactctgatggaagactacaattctagtacaaaaccaaaaacaatagacaagcaaagccttttcag

SEQ ID NO: 610395 - DNA, 119 bp, Homo sapiens
ggggaggaccgagacaaacgcacaacaaaagaacagaaaaaacccacacaaaagaaaagccaccaacaacacaaacacaaacaaccaaacaaaaaacacaaaaaagaaaacacaaaatc

SEQ ID NO: 610396 - DNA, 729 bp, Homo sapiens
  misc_feature (512)..(512): n is a, c, g, or t
ttcagtttaaagtatttccatcacttttcctccataatccaaatatttaaaaatgcaaagaaaattaacttccaatgatatgtccagggactggcactaaaaaaaattttcagactgcaaatgagtaatccaaatgaaaatatcaaagggagacccagttatcaaaatgaaagccactcaactatattaaaagtccacaagttattctgttattcgagcactattcacaacagagtccagcttgctaacctggtggtagatttgaagagacacttattcgccagagagctctgaaggaaaactagatttatctagttcaacttcataaagagagattcaacacgaggcgtgacaacagagttattaaaaagaaaattgggtgccttttatctagcaagtgttaggccttaaaattatgccaagtttggatacaactttatggtgggttgctttagggtcttatctatcaaaaaagtgcacgactagcagaacgtgcacatacgtggtccaancactctggtctcttcacctctgcttctaaagccaagaaaccagatatgcgcagtaactcagaaagcatctagccaggcatcagttaatccaagatactagctcttagttccaaaagcccttgcaagagaaaccctttgggggggaaggggtgccacgggatggaagccctccataataactggaatccatgagtgtgtatgccaagtctcatcgagg

SEQ ID NO: 610397 - DNA, 479 bp, Homo sapiens
cgcttactacattgttattaagccaaaagtgatacaaaacattcagagaaaaagcactgtacctgtcttacctaaagacctggatgagttaagaagcagacccaggacttaaagacagtatctttgtgaattcatgagctctttctccagagaaaacgagaacgctacaacgtatattattaagaaacactctttgagaaataatagctctttgagaaataataaaaaaggggagggaggcaagtatacttgagtcagtttgtgtactaatgttcaaaaagataaactggcatgtgatgaaattaagcgactgaaactgggaacgttgatgtcgaatccttctaaaattcaaaaagcacgggtaaatacttgctcggagggcattagaaaagaacattgcaagcgtaattacctaatgctggtgtaacataagtatcctatcacttataataacaacataaatgggctcgttggcctca

SEQ ID NO: 610398 - DNA, 372 bp, Homo sapiens
ttcacacccttcaagcaggcggtgaaggagacctgtgcttggttcactgacaactacgagcaggcccggaagtgaagctgaaagacaggatcagttgcctgcggaccattcggctgcaagagcccagcggccaccacccgtcaaaccttgcaaggagctgagggacccaccagcaaactggggcctgcattccattcgctctgcaccccaaagcttttttccatggggccccccattcacgttggtcttcagggaaaccagggtttccgcaggcccggcgttttgctccccacaccagccccctgcgcgtgtccactctgatcctgcatcccactccctgggagccaataaagtgcattttcacaggcaaaa

SEQ ID NO: 610399 - DNA, 471 bp, Homo sapiens
agactcctgccacatggaccaggatgaagagggatcaaagagataattagccaaaaacccagtagcctagaagatacaaaactccactggcctctaaaattatattagccaagagtggtttcatttgagtgccttcgtgtgtatgtccatcaaactggaaccaaactgttttgtaagtaaacaggcagcctaagcccaaccctaccttcttaattcgggttattctctttttcatctggggatttacctgttcatttaatctgcctgttttgatctgttttgaaaaagataaagagcctcaaatcagaccagcactgattaattaaccctgctcctaccaatcttttttaaagcagttgaagcagaatgtataggtgtcagagaagaaacctagtcagccagacgtgctctgtattcagcaatagtttgtgaatgaataaattactaatcctccttgtcgcttgaaaaaaa

SEQ ID NO: 610400 - DNA, 415 bp, Homo sapiens
cccacaaggtccagttctacacagctcctctccaactcaatatagattcctcacagtctctctgtgaggaaggtaaatgtcactgctccccgttggtggggaaaacaaaggccagagtggttaaagtttttgcctgaggttaaaccaaaaattaaaatgtcccttggcccacaggaaagaatccttccaatccaagcgcatttaaaaaaaaaaaaagaaaaaagttgagccaccctgtcactcttctctcagatgccatgaaagacttcctcccacacgagtccccacactcttgccacttgacagcacaggctcacatcacagagtatttctctctctgtgaaaatatagagcctctctcttttcacatggacagagagatatataaagtcacatgagctcgtgccgtactcct

SEQ ID NO: 610401 - DNA, 104 bp, Homo sapiens
tcaaaaagctccagcccagaaagcacctgctccaaaggcctccaccccagcccccacccccaccctctccttgagtttctgtgaattaaaatatttgcaaatct

SEQ ID NO: 610402 - DNA, 141 bp, Homo sapiens
ggcgtcgtaattgcgtcctcccccgcagagctttggcgtctacaccgggtgtgtgtaaatctggtgtcatcgcttgtgtcttgctgggctgcgctggttgctgtccccctcctccgtctgggaccgaggagctgcctgttg

SEQ ID NO: 610403 - DNA, 396 bp, Homo sapiens
ccccagcaaggtgggcggaattgtcgggaatgaagacaccgtgagcaggctagaggtctttgcaagggaaggaaatgtgcccaacatcatcattgcgggccctccaggaaccggtaagaccacaagcattctgtgcttggcccggcccctgctgggcccagcactcaaagatgcccatgttggaactcaatgcttcatatgacagggggcattgacgttgtgaaggaataaaaataaaactgtctgcttaacaaaaagtcactctttccaaacgccgaccttagatcatcattctggatgaagcaaaccacatgaccgacggagctcaacaagccttggggagaaccatggaaaactactttaaaccactcgcttcggccttgcttggaatggctc

SEQ ID NO: 610404 - DNA, 138 bp, Homo sapiens
ctgtagaaggctcagcaagcattagccccttatccaaaatacttcctcacctgaaagatcatcattaattacttggggccaatactctaattttcaagctgggcttcagggactcttggcgtgacctgatagtggcag

SEQ ID NO: 610405 - DNA, 774 bp, Homo sapiens
gaatgagattctggaggcaagtaaaagataggacatgtctgagagcttggagaaaatcaagattcagttagacaaaggaaataacgaattggtgaccaagctgaagcagcacaggatgccaccttgactacaactactttccaaaatgaagatgaaagggaataaagaagtatatatgactccactcaggggtgtaaaagcaaaccaagcatcaaagtctactcagctaaagacataaacagaggacagagaaaagtgacagaaacagctaggacgaacaggagggtcagactgctgaagccgaactcttagaaagtgatcatgaagtccagaaacagaatcagaaaatgaagataggagactaccaagacgagccaaaaccgcagcacctagacaaaaacgtacaacttaacctatgcacaatattctcactgaagatctaagtttaggaaagacgatggaggtggaatcctttaagattatgtaccagttatatgctttcaataaagaagaagttacccttgtcacaaacaaacagacaacacacggggccggaaccgcccaaagaggaactcccctcgtagggggcccccaaggcatacacgcagtaccccagagcaaatcaggaacccacacgtgggcgccacataatgacgagatcgtgataaagaaagacaagccacaaggaacgcacgtcataaaaaaggacgaagcacgggcaacacaagcggcaagcgtgggaccaccaggtggaagacggacaccctagaatgc

SEQ ID NO: 610406 - DNA, 264 bp, Homo sapiens
ttacagtcttaggaacattggaagaatctccagctgggagtgttcttatgcttccgacaacaatgggtcgctattggttcatacttcgcgtatcttatgtttggcctatcttgatctttggtgccacttaccttctagattttcccaccagttgggtcattgcttttggaaattggggcctgcagatcgtggatatatgatcattattggttgcctggaatggattcaggccgagctgtagtctgaggctccgtgtgagaaagc

SEQ ID NO: 610407 - DNA, 1610 bp, Homo sapiens
ggacgcgtgggataactaccactgacatgactttccaaaaaacacataattatgaatcaagcacaaccacccacagcctaattattagcatcagtcccgtctacgtattgttttgtaaccaaactcaacaagcaagcctatttagactgttccccgaaccgttttccgtccgagcccgcgtaacagacccgccgtcgctagatactagacataccatggacataccgtagcgcgaccgtcaagcagagtccagtggacgaagtcacaagcgccccagtttgatccgcgagagaaaccgcagaatatacgacgcagaagaagcacctccgtagcccatcgtgactactcactaaggagttcctgccgcatacacacaagtcgagcccctgtaccatcgacgtccaaacaataccgaaccaagaagagagacagacaaagcgtaaggatacaagaacacacaaccactaactaccctagcgataacggcaacacagcagaaaagcagagagtaccacgcaagcaatagagaacccaacccaaaccagcaccgacaagcacgcgacaaaacgcaggcaccagaagcacgacccgagacaagcggccaagagaccaacgaagatacagaatacccataaccaacgcaccaaagcccacaacaaagcgggacacccacgagaagccacacacgacacagcaaggagcgaagaagataaagagacaaaaccaagacagcacaacgcacaaccagcccaccagaaggcacacaaacacaaaacgacaaaatcccaacaaaaaacaaaccagaactacacacaaacacaaggcagcacaaaaaaagacaccagtagcaccacgacagcaaccctagggaagacacacaaccacacagcaacacacaaacccagacacgaaggacacgaggcacacacacacagaagtacaaagaaaaatggacaaaagggaaggacccccacactagacacaagaagaaccagcacaagcacaacagagagcacaacaccccaaacaaagaaccacacaaagaacgaaaaagacaccggcagaggacatggaggaaccaagaacaaaacaagagcacggacgaacaacgatcaaacaagacgacgacgaacgagaaaggtgaaaaaagcaacgacaacaagcacgcagaccaccaccgacccccagcaacacacaaaacgaggaagacaacgaccaagaaggtgaacaaaagcaccaaagagagcacaagaccagcgcaacgccacgccgcccggcctaagcagtagaacgacgacaaaaagagaaacataagcagcagacaagagaaagcaaacgacaaacgcgcaggagaagaacaaggcgagaagaagcaacgagacacggaacgagatgaacgggcgggtaagagaagaagatggacgaaggagagaatgcctaagcaagtaggagcgacacacagagagacgcagcgacagacaagaactagaagaccagaaacgcagaggaaggagaacaaacaggagaagcagacacaagaggagagagcaaggagacgacaacagtcaggcccacgaaccacaacacgcagccacgagcgcaagcacgag

SEQ ID NO: 610408 - DNA, 175 bp, Homo sapiens
  misc_feature (74)..(74): n is a, c, g, or t
  misc_feature (76)..(76): n is a, c, g, or t
ctcagaaacctacaggcaactggctttctttaattttctcaggtcctcatccctgtttacctcttctgtctctntntgcctcaagcccagaaacaacccttctccttttccctttctcccaatgctgcctcttccctctccccgctcctcttcaataaaaccctcactaaactcc

SEQ ID NO: 610409 - DNA, 106 bp, Homo sapiens
tttatgccatttaaaaattattttaataggatttttgtaaagagtgaggtggcggtggtttatatctacctctggatttaagcaaataaaagggagagaaaaaatt

SEQ ID NO: 610410 - DNA, 518 bp, Homo sapiens
gagatagagtctcgctctgcactccagcgtgggtgacagagcaagactcaatctcaaaaagacaaaataaaacaaaacaaaaacagagtctatgctcttaatcactccactatattgtggctattattattattgctatcattattagaatatgtaaatactttattatccctatgaatatcattggcaaaatacattcaaatatgtaaagctttgcaaaagtttcagtaatttttatctttattttaaaactatatcagaaaatgttttatagatatgaaaacagggcagagagtcttggaacttattcaagtttctttatatggtagaagacaggattataagataaaggaaatatgcatggctaatttaataaaaatatatttggcataatatttcttgtgtcaggaagatgacagcctggtctggagttagaaaatatgcaaacacagagattctaattccatttctgccattaccttatttgttaatcacagtaggtcatttaatctcttaaa

SEQ ID NO: 610411 - DNA, 777 bp, Homo sapiens
  misc_feature (87)..(87): n is a, c, g, or t
  misc_feature (112)..(112): n is a, c, g, or t
  misc_feature (137)..(137): n is a, c, g, or t
  misc_feature (172)..(172): n is a, c, g, or t
  misc_feature (186)..(186): n is a, c, g, or t
  misc_feature (196)..(196): n is a, c, g, or t
  misc_feature (199)..(199): n is a, c, g, or t
  misc_feature (208)..(208): n is a, c, g, or t
  misc_feature (222)..(222): n is a, c, g, or t
  misc_feature (256)..(256): n is a, c, g, or t
  misc_feature (260)..(261): n is a, c, g, or t
  misc_feature (263)..(264): n is a, c, g, or t
  misc_feature (266)..(266): n is a, c, g, or t
  misc_feature (281)..(282): n is a, c, g, or t
  misc_feature (289)..(289): n is a, c, g, or t
  misc_feature (292)..(292): n is a, c, g, or t
  misc_feature (321)..(321): n is a, c, g, or t
  misc_feature (331)..(332): n is a, c, g, or t
  misc_feature (334)..(334): n is a, c, g, or t
  misc_feature (352)..(352): n is a, c, g, or t
  misc_feature (357)..(357): n is a, c, g, or t
  misc_feature (360)..(360): n is a, c, g, or t
  misc_feature (366)..(367): n is a, c, g, or t
  misc_feature (369)..(370): n is a, c, g, or t
  misc_feature (400)..(400): n is a, c, g, or t
  misc_feature (496)..(496): n is a, c, g, or t
  misc_feature (526)..(526): n is a, c, g, or t
  misc_feature (538)..(538): n is a, c, g, or t
  misc_feature (551)..(552): n is a, c, g, or t
  misc_feature (555)..(555): n is a, c, g, or t
  misc_feature (767)..(767): n is a, c, g, or t
gggtcctgcgcgctccggactgaggtggcgtccctgggccggacggcggtgttccggcgtggcgggaagccggcactggagcgggancgcactgggcgcgggaccgggaggngcagggaccggacggctcccgagtngcccacctgacggtaccgagagggcggcgcccctncgagcagagccgtnccggccactnccntgggatctnacttggctcttgtngttgcgggcaccgtgaagccctggggtgtgcgtngttnntnntngtaggcgcccttttnnggcgttnggnttggggtggtggtggcgttgatttcagcnccgctttttnntngagaggagggctccactngttcnttnggcttnntnncctggggctgcagcgaattgggctggcttnttgtttttttgcttgctggcggttttgttggttagaagaagtttttatttttcaggagagccaaagagtgtttggccctaggtgggaaaagaactngttgttatctttgctctgatctggaagggnccagctttgggntgaatggtagaanncangcccgcccgtccggtgctgacccacctgctggtggctctcttcggcatgggctcctgggctgcggtcaatgggatctgggtggagctacctgtggtggtcaaagagcttccagagggttggagcctcccctcttacgtctctgtgcttgtggctctggggaactgggtctgctggtggtgacctctggaggagctggcccaggaaggacganaggtcccatc

SEQ ID NO: 610412 - DNA, 228 bp, Homo sapiens
  misc_feature (13)..(13): n is a, c, g, or t
  misc_feature (87)..(87): n is a, c, g, or t
tccacccaggtcncgagccctcacaccctggacgggaagggacagctgcattccagagcaggaggcagggctctggggccagaatgntggtccttgtcgtagagccctccacattttctttttcttttttgagacagggtcttgctctgtcacccagactggagtgcagtggtgtgatcatagctcactgcacccctcaacctccttgggttcaagcaatcctccttg

SEQ ID NO: 610413 - DNA, 132 bp, Homo sapiens
cccagaaggtgccttcaggacaacaactgggactacaccaggatctggccagggcttcactcatctcaagggcacgggcgggatccagaggtggcattcatgagggatcgtaggtcatgcctcagaggcagt

SEQ ID NO: 610414 - DNA, 301 bp, Homo sapiens
  misc_feature (283)..(283): n is a, c, g, or t
ttccctaactacaccaaaaaacagacgaaaattcaaatgctcctcggtctcactcaaaagctattcatttttcctagctatttacaaaaacacaaattttcaacctcaacaaaggaaatgaggttttaaatttttctatttaaaaaaataatccttttcctttactaaaacattatttacttaactatttttcattcaatactactactcctatcaccatttataattctaaattttaaacttcaaaacttctaactatcaaacctcttagtaggtgatactnctccaatctattcctaat

SEQ ID NO: 610415 - DNA, 228 bp, Homo sapiens
caccactcctatagatcagtctcctccaacttcaatgctgtactcctctccctggctgtcaacagtgctgcctgttttgttctcagatccaaagtttcctacaattttcttataacttaaagcaaaatcaacactttctctgtttcagagtaccaaatgtctcagtcatcactgtttcctactcatgttttgatttctctcccaccatctcactgatctataggagtg

SEQ ID NO: 610416 - DNA, 133 bp, Homo sapiens
tgacctgggtgcatgcatgtggagcgaaacacgtggcttggactcaggcctgaggtacctggcctcattaccttactcacgtgttgcacaactgaccatgtcacggaggtttctcagcacttccatctccccc

SEQ ID NO: 610417 - DNA, 165 bp, Homo sapiens
ggctgtttcatttttatttattttattttcatttttgagacggagtttcactcttgttgcccaggctggagtgcagtggcgcaatctcggctcattgcaaccttcgcctcccaggttcaagcgattttcctgtcgaaacgcaaccctcccttctgtcgtcttctc

SEQ ID NO: 610418 - DNA, 354 bp, Homo sapiens
agtgtggatatccaggaaaacatagttcagcattttgataggcatcttcacgttgcataacctccaccgcgtttgccttgtaggcaacatgcatttaacacttggccgggcatcaaatataaagatgttgtgagactgggcattggaatccatgatagcttgaaggtatttttcatcttcttagcttcgctttccactcactccaaccatgggcgggctacaccgagtgatagtggcttgactttcgacgatgaatccatgataaaactgggatacggcctcttgatctgaaggatgccacgtctctttaaattcttcatcaggaatattggctggcacaaccaagagtgtcgg

SEQ ID NO: 610419 - DNA, 162 bp, Homo sapiens
atgtttgtagctacaccacaattcagatatagaacattttgtcatccaaatattatgcagagaggccaggtgcagtggatcatgcctataatcccagtgctttgggattctggggatagaaggatcactggaagccaggagtctgagaccagcctgggcaat

SEQ ID NO: 610420 - DNA, 427 bp, Homo sapiens
aaaagtcttgatcattttatttgagctttctgagggagtaataggcacttggggaatgtagtctcatttggctttcaaagaagctttgacaaggttctacggaaagaggaatacacatggagaaaaagaaaggaagatgatggccgggcacggtggctcatgcctgtaatcccagcacttcgggaggccaaggtggaaggatcacctgaagtcaggagttcgagaccagcctgaccaacatggcaaaaccccatctctactaaaaatacaaaaaattagccaggcagggaggtgcgctcctataatcccagctactcgggaggctgaagcatgagaatctcttgaactcaggaggcggaggttgcagtgagtcgagatcacgccattgcactccagcgtgggtgacagagcaagactccgtctccaa

SEQ ID NO: 610421 - DNA, 604 bp, Homo sapiens
  misc_feature (206)..(206): n is a, c, g, or t
acggaagaggtggtgtctccctgggagtggtgagctgcagaaataaactgctcctttccttaaaacaatcagccggtgactcagcctgtaatcccagcactttgagaggctgaggcaggaggattgcttgagcccaggagtctgagactagcctgggcaacacagggacaccacatctctataaaacattaaaaaattagcttggnctggtggcataagcctgtgttcccaactacttgggaggctgaggtgggagggtcatctgagctggggagatcaagtctgtagtgaaccatgatcatgccactgcactccagcctgggtgacagagtgagaccctgtctttaaaaaaaaaaagctaatagtgaaaaatataatacttgcctgcacagtttctgtagatcagaagtttggtgaagcttagctggtggaggatgggcaaggatctgggggtttaacctctctgtatacagactttcaattactagatctgtgttaagctccacattatacccctagcttactgcaataacttgagtctccaagacgtgagacttactgctaatccagttcaatgcttatcagatcctacagaatctttctg

SEQ ID NO: 610422 - DNA, 139 bp, Homo sapiens
ctgactcggtaccctcttactggggcttcttgcagtggtttgcaatgtcccagagaggctgactgctgatcaaggctgcaggagcagccttgccattgtgcttgggcgttgcctgcatactcatactccattgtgctga

SEQ ID NO: 610423 - DNA, 492 bp, Homo sapiens
ggaacagcggcctggtgcgctcgcttagcgggcgacggaatctgacggacgtggacgcccccggagtggaagccgaaacatgagttgtgtagctgaggggctgtcgtatccgcgtgagcctccggacagacgccagagcgaggagggtgctactgcgacttggcaagatgacctcaattcctgcgcagccatagcttctggtccttcttttgccctcctcgtggacgcatattccgattaccgtgtctcacgcccgtggaggaaacttgcccatcagtgaaacaactagccaacaactctagaccgttaagttgtggctattgctgcctgctacagttctgagtaggttctgaaggagccgtcgcatggatgctcccgtccgtccgaactctggtgactgcaacatcccgatgaggtaggcgcgatggcagatggatagagaagaccgtggaaataagattctgaatggcggacagccatgcacgtggaaga

SEQ ID NO: 610424 - DNA, 693 bp, Homo sapiens
agctttttgtccttccaggtttgtgccaacaataccgacaggattattggtgctctgaagtcagaggaggacgctgggaatatcgccacctacattgtggcgtttaccctagatgaccgaattctgctacatgaaactaagatcgaggatgtgaagtatgagggacttgagttcatttagtgtctggatgtattttcatgccaagaattggtaaatgccttcttctaggtgatgtacatctagatttgggcattgtaaggttaagaataatgccaagtgtctgatggcagccaaaatgtggttgtaaatatcgactcttaaaattaaagttgactctttaattattttaaatcacctgtcggagccttcatcagaagtttttattattgttttcttctctctgtcttttccgaggtttagcgtttttaagcccagcactgtacttacagtgtaatgaatgtaacagaatggatgaagtaacagactcgaatagtttaccctacaaacatcactgcagttgccatgtggttttgacgaatgtctttttttttaaattgtgcatttttttttgttttttactttattgacgagtgtcttaaacagatcagttactttaaaaaaatctttaaatctgaactgtcacaaaatgaacatcatgtttcatcgattcaccagagctatttatttgttgta

SEQ ID NO: 610425 - DNA, 571 bp, Homo sapiens
gacccccgcctaagtttcacacgccagtcctttgtggaccgctccctcctcactctgctggggcacctgaagcctggatgctttgagagaattcttcagcacaattgtggtggatgccattgatgtgttgaagtccaggtttacaaagctaaatgaatctacctttgatactcaaatcaccaagaagatgggctactataagattctagacgtgatgtattctcgccttcccaaagatgatgttcatgctaaggaatcaaaaattaatcaagttttccatggctcgtgtattacagaaggaaatgaacttacaaagacattgattaaattgtgctacgatgcatttacagagaacatggcaggagagaatcagctgctggagaggagaagactttaccattgtgcagcatacaactgcgccatatctgtcatctgctgtgtcttcaatgagttaaaattttaccaaggttttctgtttagtgaaaaaccagaaaagaacttgcttatttttgaaaatctgatcgacctgaagcgccgctataattttcctgtagaagtgaggttcctatgg

SEQ ID NO: 610426 - DNA, 101 bp, Homo sapiens
atatctacgatgaagctaataactcttttagcgcaagcaaatagcagctggtgtgctcaaagataaagaaatgaaaatatgaatgacaatcaacatatact

SEQ ID NO: 610427 - DNA, 551 bp, Homo sapiens
  misc_feature (109)..(109): n is a, c, g, or t
  misc_feature (522)..(522): n is a, c, g, or t
catttttgactgttaaaattctgtctgtctaaaggatattaagtattaaatttgatatattctataagatatatttcatgtttaataagaccaaagataattatttttnacctttttgaagctaaatgaatctacctttgatactcaaatcaccaagaagatgggctactataagattctagacgtgatgtattctcgccttcccaaagatgatgttcatgctaaggaatcaaaaattaatcaagttttccatggctcgtgtattacagaaggaaatgaacttacaaagacattgattaaattgtgctacgatgcatttacagagaacatggcaggagagaatcagctgctggagaggagaagactttaccattgtgcagcatacaactgcgccatatctgtcatctgctgtgtcttcaatgagttaaaattttaccaaggttttctgtttagtgaaaaaccagaaaagaacttgcttatttttgaaaatctatccaaccccgatgcggcaggttggtgatnaatcgcgctacatttgtggaaggtaataa

SEQ ID NO: 610428 - DNA, 135 bp, Homo sapiens
ccggtggacctggcagcggctgcagccgacttggaatgacctgggggacaggttcgacagcgtgggagctccacagtgtgtgtggctcagaggtctgcttctcctgcgtctccccgaggcaccgcggggcaatcc

SEQ ID NO: 610429 - DNA, 498 bp, Homo sapiens
  misc_feature (344)..(344): n is a, c, g, or t
  misc_feature (352)..(352): n is a, c, g, or t
  misc_feature (471)..(471): n is a, c, g, or t
taaagtatatattgaattacattgagtgtctttatagtatctattgagattattattttttactttaactgattaatatatcgttacttacattaattgactttcttttttaaaattatttatttatttatttttgagatggagtctcactctatcacccagtctggagtgcagtggcttgatcttggttcactataacctccgccttccaggctcaagcgattctcccacctcagcctctcgagtagctgggattacaggtgctcatcaccatgcccagctaatttttgtattttttagtaggacatgggggtttcaccatggttgggccagggtgggtcttngaactccnggacatcaagtgatccacccaccttgggcctttccaaagtggctgagatttacagggcatggaggcacccacggcccaggcctttttaaaaaaatattaaggttttttaaaaaattttnatttaattttttggaggatggggtttg

SEQ ID NO: 610430 - DNA, 411 bp, Homo sapiens
  misc_feature (177)..(177): n is a, c, g, or t
tggggatccctccctattggaaagaactgaatatagggaagtgcccagaagtcctttgggacccctcataaacctaatgactcctttgagctagtctttatttataactaatgattctgctaattggaccgttggcaagagggaagaagcctccacttggaagtacccctttaggtnttagactttcgcccgaattgaatgtgttttcagctctccagactatttgtagtctgacagtgatatgccttttgtaataaacaccactcaacaatgggctgatagccaagaaattcagtgggaaccggtgctgtggcataggcctgtaatactagctacttagagggctaaggtaggattgtttgagctcaggagtttaagatcaacctgggcaacctaatgagactgcatctc

SEQ ID NO: 610431 - DNA, 846 bp, Homo sapiens
tccttattgacggttgacaattgtggttcttttgaaaagcggaaattccccgagtgtccgccgcgtttccaaggatggggcttttgcgccgggttttgtgcgcaccccgtccccccagtgggcccgatggtccctcgccccagagtggtggtccggatgttccccaaatgggggggattatttccgggccgccccgtttatgcagcctccaagatgtttgggccaagttcgctagtcgccgagcataggtgcccaccatgtagctgcctccccagtatcacttcgttcttgggtaattgttttctccgccgagaaatttgttctggaagcataatggtccctggttttgaacaagttgctgccccccaccagaggtgccttcctatggaatcgtaggtaacagcagggagaccaagatggggctttccttcgcaccagtcagttcatacctgatatggatgctcccgtcttactaccaaagtttgtgtagaagtccagcatgacgcggtattagtggtaccaacaaacgcggcgggggtgagaactttcactgggcccccccaaacattgatagatttggcacttctttcgcccccacagttttcacattacacgcagtcttttacaatcccctctctgttctcgtctcatatccatgattgattctgatactctctgcccacaatcactccctcatatttatggccgccactaattagcaccacacatcatttggatacttgtgtgacaagtggagagacgacccatcccatcttctgtccacccacttcttatacaccccttctaatagagtccccaaacggacatcctacaaacaaacatgcg

SEQ ID NO: 610432 - DNA, 1272 bp, Homo sapiens
tgttattgttgcgggggttggtgtgttgttgctcgcggctggtgtccgtgtgcggttcttctccgccctccttcgtttttgtttctcctttctctctttgtttgcgcttacgcggggcgtggtccgatccgtctcgtgctctgcttcgtcgtttgttcttgctgtgcatgtgtccgcccgccgcgggggtggcggcgtgcctgcgcggttgttttttgcgccgcgctcgggcgccgtcgtctgtggtcggtcctcctctgtcttgttctgtgtttttttggttggtggtggttcgcttcttgtgtgcctctcgacgcgtttttgtttttctttttgtgttgctgtccggtcgctgtcgctgcctcgtgccccccctggtgagtgtcgctcctgctgtgtggtctcttgtgtggtctcgccccgccgtccgttgcttgctctcgtcggtttgttttttgttgttggtgtggttcgggcctgctgccggcctggcgttggtttctgttgttgtctcgtccgtccgtccagtctcttcgctttatggctagtctccgcgtctgtctttctttgtctctctcggtctcgctgtttgttttcttctttttttcttctctctcgctctctctccgctctctcattcgtctgtctctctctgtatctgcgccccccccgtcttggtggggtgggggacctctctcgcggggggttctctctcccgctgccccccttcgtgcgcgtgtatgttttgtgtcttgccccgccccgctcacagctgtttctccccgctccccttttttttctctttgctcaccgcccgggtcgcgcggcgggggccgctctctcctctctcgcgcgtgtagccctctcgcgcttgtttttgcttcctcctctgggttagccacgcacctctcctctcgcttatatagtaatatcacccgcctctccacgacgctgcttctttttctcctcctctcgcgggtggttcccccccctctcggtgcgttttctcacactcctcccctttctcccgcgcgctgcgcttttcactcccccccctctctttctccccctccccccccgcgcggcggtgttatttcccgcgcccctctctttctttttaattcttttggagcccccccccctttttttcccccctctctcttcttctgatttatatctctccctcttttattcttttctatatatacgagcgcccctttttctctcctctttacccccccctcctctcccccctctctttagcgcccccca

SEQ ID NO: 610433 - DNA, 454 bp, Homo sapiens
ggagtcttaccggatgtgagtaggaatgcaggaatgtgatagaattggtgggaagagggagttgaggtggtgggtccaagaagtctctccaggagatgacatttgagcagtgatctggactagtgaaaaagcgctgactgacctcgcgaggtgagacgaacttactgggctgaggagaaggcaagccatcaaaaaccccaaggagggagtttggtgtgttcagagaactggaaggagggaacgccatgaaagagaggccagtagcatgtgcggggccgagagggacccggcttcttagcccgtggagagagaaagcaggaacttaaagccagcaccaacgggaacgggcctgcatctggagagcgagggagagcagctgcaggttggtcaagctgctgtaaggccctgcccagggcatacgaaacaccagggagctacttaccctgtcctcggg

SEQ ID NO: 610434 - DNA, 445 bp, Homo sapiens
tgcttgatgactgcataggttgcaggtgagccgagatcacaccactgcactccaggctgggcaacaagagcaaaactctacctcaaaaaaaaaaaaaaaaaattctcccatggcctctgtaatagcgcagaaaaacatataatggtatacccccattctgggaaagaatcagcatcacctctaaagagctcttggcaaagggaagccaggaggcaggccctgtgtccacagttgctgtccagcactccagtttgcttcttgccatttggcatgggctgggcgggcccatgtagggcaagtggtgtcccaggggctggcccggggtggtcatgcctaatgccaggtgagaccataggtgtctgataaaggccaatgccatagggcgggggtgccaagctcagggcgtgattcccggaagaagacctatactgaggaagccattgaa

SEQ ID NO: 610435 - DNA, 306 bp, Homo sapiens
cctcggcttcccgagtggctgggaatacaggcatgtgccactgctcctggataattttttgaatttttttttgaagacgggtttcaccagcttggccagcatggtgaaaccccatctctattaaaaataaaagaataaattaaaaaaatacccaggcgtgctggcaggtgcctgtagttccagctactcgggaggctgaggcgggaggactgcttgagccttgaggcggaggttgcagtcagccgagattcgtgccactgcactccagcctgggtgacagagagagctccgtctcaaaaaaaaaaa

SEQ ID NO: 610436 - DNA, 260 bp, Homo sapiens
tgacagcacctacggctggacagccactatggagcggatcatgaaatgcctcaggcacttcgggagcaagtccaccatgggctatatgagtggacatacagagcacctggagatcatgcctgatcaccctattgtggaaacgctgcggcagaaggctgatggccgacatataatgataaggcaggttatggagtcaggcgagtgctgtctgttcgaacatacagtcctgctaatcttctggacattttcctcttgacgtg

SEQ ID NO: 610437 - DNA, 169 bp, Homo sapiens
cgacaccgtactgccacgcagccgcggcgcatcacgcaagcagaccggatgcacgagatgattcgtgaacgctggggtcgcgcgactccctgctcctgctgagaaacgcgcgtgagatggctcttggagcactatttgcgacgctcagctccagctaccatctactact

SEQ ID NO: 610438 - DNA, 329 bp, Homo sapiens
  misc_feature (69)..(69): n is a, c, g, or t
ccatacactactctttttttgataataaaaaatgtatttactgagccagttgtggtggctcacgctatnaatcccagcaccttgggaaggccaatgagagtggatcagttgaggccaggagtttgagaccagcctggccaacatggtgaaatgccgtctctactaagaatacaaaaatgagccgggcacggtggcacgcacctgtaatcccaggtactccgaaggatgaggcaggataattgtttgaactcaggaggtggaggttgcagtgagccaaaatcatgccactgcactccagcctgggtgacagagtgagtctctgtctcaaa

SEQ ID NO: 610439 - DNA, 453 bp, Homo sapiens
  misc_feature (95)..(95): n is a, c, g, or t
  misc_feature (196)..(196): n is a, c, g, or t
  misc_feature (203)..(204): n is a, c, g, or t
  misc_feature (224)..(224): n is a, c, g, or t
  misc_feature (239)..(239): n is a, c, g, or t
  misc_feature (245)..(245): n is a, c, g, or t
  misc_feature (322)..(322): n is a, c, g, or t
  misc_feature (327)..(327): n is a, c, g, or t
  misc_feature (353)..(353): n is a, c, g, or t
  misc_feature (365)..(365): n is a, c, g, or t
  misc_feature (373)..(373): n is a, c, g, or t
tccaaccgtaggtatgaatggtgaaggccatattatggaacgcacacacagaaagctctgggctccatttcccttccacagtgcacttgacagantcagcgccattcagataaaacccagtgtcacaagaaaacctgatcgtgttggaatatctcaaaattcgtatagcgtacggctccattttctaagattccancaaaagnncatcctctgggtgtacattncaaagtgttaatggnccacantccgtgtaagaggccagataacctttctcatccctcctcggcacacatagcccggctcgcaggaatacgtaatctcntctcntggctcatagaatgtttttaacgggnccactgtggaanatggtatntcatctggcttggcacaggtccgtcccgctatagccacatgacagagaactctcgagcacaatatgagctctggagatct

SEQ ID NO: 610440 - DNA, 120 bp, Homo sapiens
accggacgaggctgtgtcctgggccctcgagacgtgggacgggacacaccatgcctcctcagataccacttgtgtccactcccgctgaggccactcccactgcgtggttgaagcctcgag

SEQ ID NO: 610441 - DNA, 216 bp, Homo sapiens
ggggggggggccccatttttttttccccccgggggggcctttttgaaaaaaagggggttttaaaaaaggtttttttcctggttttttttttgttgggggggcccccttttttcccccccccattttttttgttaagaaggggcccccccgggggggggtagggggggtcccaatttgggtttttttcctttttattttttgggggggtttttttta

SEQ ID NO: 610442 - DNA, 399 bp, Homo sapiens
  misc_feature (95)..(95): n is a, c, g, or t
  misc_feature (142)..(142): n is a, c, g, or t
  misc_feature (149)..(150): n is a, c, g, or t
  misc_feature (170)..(170): n is a, c, g, or t
  misc_feature (185)..(185): n is a, c, g, or t
  misc_feature (191)..(191): n is a, c, g, or t
  misc_feature (268)..(268): n is a, c, g, or t
  misc_feature (273)..(273): n is a, c, g, or t
  misc_feature (299)..(299): n is a, c, g, or t
  misc_feature (311)..(311): n is a, c, g, or t
  misc_feature (319)..(319): n is a, c, g, or t
tccaaccgtaggtatgaatggtgaaggccatattatggaacgcacacacagaaagctctgggctccatttcccttccacagtgcacttgacagantcagcgccattcagataaaacccagtgtcacaagactaagattccancaaaagnncatcctctgggtgtacattncaaagtgttaatggnccacantccgtgtaagaggccagataacctttctcatccctcctcggcacacatagcccggctcgcaggaatacgtaatctcntctcntggctcatagaatgtttttaacgggnccactgtggaanatggtatntcatctggcttggcacaggtccgtcccgctatagccacatgacagagaactctcgagcacaatatgagctctggagatct

SEQ ID NO: 610443 - DNA, 421 bp, Homo sapiens
ttttttgtttgtgacgttggggttctcaccgttttgcgcagcgtggtctcaagcttgtgagctctattgctctgcctccctcggcatcccatcgtgtgcctattcttctcaattcctccgtgtagctctttctctgtgtgcttgtctccataatgtgtgtctcagttcttaccctcacgttctcaggcgtaatgtaagctacgttctcgtattgtcctaatgtatagtcttctgatctagcgtctcgttcctttctgtcggttgtagcttaggcctggcttttgcttctgtgttttagatagatattttcatagtatgttctttgtactgttctatatctgtaggagtgagagagagagagtgtgagagacagagagagagagagagagagagagagagagagagagagagagagagagcg

SEQ ID NO: 610444 - DNA, 1509 bp, Homo sapiens
ggagggtttgaaacatggcggacgacgtagaccagcaacaaactaccaacactgtagaggagcccctggatcttactcaggctcagcctagatgagcgaatttatgtgaacaactgacgaacactgacccgcagacgcttcgacggcacgacttacaatgcttatgaatcaaaccatttcaaatactgacctctcggcgacgactgtggcaagaaacctgctgacctacctatacgaacacttgacctgaccgaaaaacactactgacacgacggactactactacacacctcaacaccgaacacaccggcaactactctcccacacctgcctccttatgctccgcgcggcagactggccgattagctccctggatttgcccccttcacacatggagcaagctcgggcctgaacaccacacgcacactttcctccctcgctacatcgagacacaaacaggggcacgaacctttggtacacgattgggccctccctcttacaacagttacaaaacacaatctccctaaacagacgaaacaccccttgcactaacacttccgtcgactactatcaacgaaaactacactatcccgcgacgcaactccctattcccacacttcccttgaaaacactgcacgtctagccctattctcgcccagcaattcacaccctccaaaaaaaactatccctttcacaggcccttcaaacacttgaggctcactttctcccaactctcttcctccttccgataggaccttctacacgaacttaacacttcttgcaacccccacgccaaaacgaagttggcccagcaaaccttcttcccaccacacacggacacacacaccccacccacaccccgccccaccacaccacacagcaccctccaccaccgcaccacccaacagacggtaccctacctgcagagacaagactggtcggtgataggaacaagacacaccagtcggtacaagtcgtgacgccgcccagtgggcgcgccccaaccatcacgaggtcaaacaagcgcccacccagtgaggcgaccacaaacaaacacggcagccacacagcaggacagggaaaataccggggcgggcgcaagtagcagcacacaacgcggcgagagagaggccacttacagccacaccagatagatgacaaacacgccaccgccaggaggcggaagaacacagacgcagggactcatcgcgccagcaaccaccaacaagtagcatgaagcccgacattcacggagacaggacacacacatacgagggaccgcacacacaacaacaggagcgagagccacacagcggcgcgagaagcgacccaaccacattcaaacattaacgccagcacacggtgctgctgacaacacacaaccacagcggaccagcagacgcaactgtgtggagccaccaacaagcacgtagcaagccgacacacagacacacgaagcagaacaccagagcaagagaagtgaccggcaggtagcactatcctacgaac

SEQ ID NO: 610445 - DNA, 494 bp, Homo sapiens
  misc_feature (228)..(228): n is a, c, g, or t
acagttgcggtgggtgtcatcagaatgcagtggacaagaaggctgctggagtctggcaaggtcatccaaggtctgctcggcagaaacgctcaaaaggctagatgaatattatccctagatacctgccaccccactcgttgaatcaggtggtggaagaacggatctcagaagcgtggttggtgtcaagtatggccattataagtgtctagataggtacagagagactgngttacatgatacacaagtgccatcgtaacaatccttcaggaaggaaaggagtaatgtgtagtggagccacttatggtttgcattttatgcgtgtggcagttttaatgttattaagtttgttaataagtcagatgactatattataattggagaagcgaacctttgtagcgcgaaacaattgtggtcagcagcaaattgtatgaggaccgccaattagatgagaagcttaaagtgatgacataaaagaaaataactacaacacaggg

SEQ ID NO: 610446 - DNA, 362 bp, Homo sapiens
  misc_feature (74)..(74): n is a, c, g, or t
  misc_feature (185)..(185): n is a, c, g, or t
taattggaacctctggcctgtatccacacagttggcccacactgggctcccaagacatttttccttgtgattcntgtcagtttcaatttaacgtaggctgagcatggtgactcacgccctgtaatccccaagcgatttgggaggcccaagacgggaagattgcttcagccccaggagtttgaganccagcctaggcaacaaagcgagacgccgtctctacaaaaatcttaaaaattagctgggcatggtggcatgtgcctgtaatcccagttacttgggaggctgagatgggaggattgcttgagcccaggaattcgagactgcagtaagctatgattgtgctactgtacttcagcctgagt

SEQ ID NO: 610447 - DNA, 216 bp, Homo sapiens
tttaaagaccataccatacaggcactctcctgacatctgcccggactgactgcttcggtacagaactattcttatatcacatgtttggaggtagctgttagggggctttaaaaaatattacttgcttgtgtggaaatgcaaatacatgttattttctttatctaaatataagaaatctcttgttatcagtgctattgaaacttctaaaactaggga

SEQ ID NO: 610448 - DNA, 265 bp, Homo sapiens
tgcgggcgtgctgcgcggacctggatgcagagggtgctgtaggctgccgtcccctgtgcggctgggctgacaatgagtgttcttgtcgcgggtgcgttctcttgtcaccgtggtgctgcccatcttccctctccccagcctttacctggcccagcgtgctcctgctgaacactgtacggtctcatggaccactaaacgggagccgtctccaagagagaacctcgtgcctagttcgaccgtcgaccatccctatactgcgttcctc

SEQ ID NO: 610449 - DNA, 1272 bp, Homo sapiens
gtggaaaggaatagacgatgtcatagtcaaacatggtcgttgcatttggacacgctagattcgggcaagtacaccactacttggccatctgatcatataaatgctgcgtggcagcgcacaagagagaaccgattgacagaaacttagagacaggaggctgctcgagcatgcggacagagggctccttcaagtatgcctgggtcttggatgaaactcgaaatgcgtgagctgtgaacgtaggtatcacccattgatatctccgttggtggaaattctgagaccaagcaacagtactatgtgactatctattgagtgcccccaggaccacagagtactttatctaaaaacatgattacagggacatctacaggctgactgtagctgtccctgatcagttagctgctaggtagtgaggatgaattctgaacgctaggatctctccaaggaatgggacagaccacagaaaggcagtgcccattctggcttacacgactagtggtgtagaaaacaaacttaattagtcggtggtaaacgaaaagtggatatcgcacatgagccatcgctacagacagaagaagatatgaggaaatagttaacggaagtcaagtagctatacattcaagaacaataggatacataacccgagaacaagtagtagatatagtgccaaagttacactggtcggaatgtgtagaccaagctagtgactgggagccaaagtagctaagattgaccttggtgacaagggatggcaagttagacgcagtaggcatggcaatgcacagcgggaaccatcgctgctaagaggccacatggacgtaggatcactagcaccaacacggccaacacgacaagccatagagcccagcaccctccaggatgtataaccaaaaatgatcaggaagaggaacaggcacaagaagggcaagacagacaaactggagaaacaaagccggaaggagggcacacaagaggcaccaggaaagagaacaacacaggcaacaaaaagactgacgggagacacacaagaaaaataaaaagaaggcaacacggggcaccacggggggacaaccacaaaaagtgaagacagatgctcagagccacgtagggcccaaaagtgcacagggagacgaagcaacaagagaggaaaagaaacaaaagaagcaaaacaacaataaatgacgcacaacgcaaagaaggacatagcgacgaaggaggacgaagagacacaaaccacagccgccaacgtcacatactgacgcaaccaaacca

SEQ ID NO: 610450 - DNA, 402 bp, Homo sapiens
  misc_feature (67)..(67): n is a, c, g, or t
  misc_feature (308)..(308): n is a, c, g, or t
ctttctctctgcaaagcaggaatacactggcctacagtggagactggaagtgtctggaggccttgtntggggacaagggccttgcaggcatcatggatgaagccaccctctcaggccctgcccccagatgttctacttttctatcccgatctctctcttcaatccctagtccctgtgatttcagcaggaaaatatctagaattgtgttcaaaccacagggtcaggcagagtgaacttgtttttgaaacaaaaacctgaagctctgctctttgggctctgagtgaatgtggctctgcagtggccggcancccggtgtgctacctctgcgagagattggcagtcccagttcaaccccatcggggtcttaggttgaaccagtcaccagttaagttttttggctca

SEQ ID NO: 610451 - DNA, 299 bp, Homo sapiens
cgtgtatcacgcatgcgggagagggggcaggcgctggagtcacagcaagcattgcctggcacagtccccagcaacaggatgcccaggcaggatgggcagcagcgaggacaggctcgggtcccctcctagtgcagatgccctctctccccagggtcgggcagggcctgaggtgggagaggcctggaggtgggcagggccccaaggagattgtgctatcagggtgtgtccctgagaaagggccgcagaggcctgcccagcctaactctctccggcaccttcagaacccagaagctactgcc

SEQ ID NO: 610452 - DNA, 203 bp, Homo sapiens
  misc_feature (136)..(136): n is a, c, g, or t
  misc_feature (141)..(141): n is a, c, g, or t
  misc_feature (203)..(203): n is a, c, g, or t
tactcccaaaggctgggattacagatgtgagcacgtgcgtggccactccacacatttgatacattatgttccgtttttattcactttggagtgccttctaattttcttgggactttctctttgatccatggaaccngtggnctttagatgtgtgttgtttgagttgcagttgttgggagatgctcctattacctttggtggtn

SEQ ID NO: 610453 - DNA, 186 bp, Homo sapiens
atctattttcccccatttcccatccttttattatccccccgccaagcccctggaattaaaccaaccggagtctgtctttgctatggaatgccccctggggcctttcttgtggacttattgtttaagggttcccccaaccgtgattttttttaaccccataaaccatttttatgatcttggggggga

SEQ ID NO: 610454 - DNA, 177 bp, Homo sapiens
cttttggggtctttgctgtagtctacggaatggacgtgccgacacaagcagatggacaggaccatccccaggagctcgatgatggccacacccacgcccacgcagaggatgatgcccatgttctcctgcagccacgcatgcaccttgtacatgcagccctcctggtacacaggccag

SEQ ID NO: 610455 - DNA, 208 bp, Homo sapiens
tccccaaaacccggcacccgaaagggcccccccccttgaaaagccgccgggttttaaattaacccccccattcccactccccttgatttccctaagagttttggccatttaattccccatttggaaaggaaaccattggggaaatttgggaaaagaatttgtggtaggcaaggtttcattaaaattttcagtttttcaaggcttttta

SEQ ID NO: 610456 - DNA, 454 bp, Homo sapiens
  misc_feature (316)..(316): n is a, c, g, or t
  misc_feature (365)..(365): n is a, c, g, or t
  misc_feature (444)..(444): n is a, c, g, or t
tgacacagtttcactcttgttgcccaggctggagtgcaatggcgcaatctcggctcaccgcaacctccgcctcccgggttcaagcgattcttctgcctcagcctccccggcagctggattacaggcatgcaccaacacacccggctaattttgtatttttagtagagacggggtttctccatgttggtcaggctggtctcgaactcccgatctcaggtgatcccgcccgcctcggcctcccaaagtgcaggggattacaggcgtgcaacttgcgcccggccgagtccctgctttcagttctcttaggtatatgggntagggagtggaatttgcttgggttgtatttggtaaattcttattgtttnaactttattaggggaccatcaaactgttattccacagtgggctgcaaggttttttttaaaaatacattttatttttaancttttgtgag

SEQ ID NO: 610457 - DNA, 636 bp, Homo sapiens
aacccaaaaaaaaaaaaaaaaaattttaaaaaaaaaaaaaaaattaaaaaaaaaaaaaggaaaaaaaaaaaaaaaaagaaaaaaaaaaaaaaaaaaaaaaaaaaaaaaaaaaaaaaaaaaaaaaaaaaaaaaaaaaaaaataaaaaaaaaaaaaaaaaaaaaactgtgggcccctttgtgcccaattttttttaacctttgaacttttttattttggggccgaattttgggtttttttggccaatttccttttttggggggctttttaaaattaatgggggcttttttaaaaatccttggtggggaaaaccctgggggttccccaataataattttttggaaaaaatcccttttttcacggggggggaaaatttaaaagggcccctcctatggcctttttccaaaattggatcttctttaagggcaatgggaaattgaaagggtaaaattttgtataaaaccgggctaattttttgtaaaaaacggtctatttttttaaacaaagggcgccatttgggaaaaatcctttttatttaaaaaaaatacccctaaatatgttttggggttttttccattttttacaaagggccttttttttcagggggctcctttgggcgttttttggggggggggggc

SEQ ID NO: 610458 - DNA, 387 bp, Homo sapiens
tccaatgatgcactgatcttttactgtctccataattttgccacataatttttcttctttttgggattccgaacctttttggactcatatctatagttttcacgagggcaaatttttagccattatttcatcaaatattttttcttctgtcatcccactcctttttcttcctaaaacttaattacatataaatgagatcttttggtattatttcatggctgactcaggctttttgttttcttttaaatctttttcctttcatggataatttctgttgatctatcttcaaggccccagactctttgtcatctcaaatctactgttaaatccatcaagtagtgtttttttgtttgtttgtttttctttttttgtaatttcagtggccat

SEQ ID NO: 610459 - DNA, 866 bp, Homo sapiens
  misc_feature (774)..(774): n is a, c, g, or t
ttggtttaaaaacggctttttctttatttggcttacttaattttcaaaacaaattgaaaaaaataaaataaaccacaatacacaacatccaatcctggctgtcaaaattaaaaagggaagggggtctgtgacccctttaagttttacttgccttctcaacacaagggacagggaagaggagaaaaaaaacacttagaccaccagcggggggacgccaggtgtgggacagggggcacctcgaaggctgcagtgtggagacgcccatgtggggagacactatatttacagggcgccccaagttttctcacaactatatgtagaacttcctatacacctatagatctcagactttcttctccatgtggcgaagaagcggcattctcttcacacccagcggcgtctccgcgggaaccggcggtgcgggctataagttctcaatagaaaatccggcggggagccggacccgctcttcatagagaggttactccccctgcgagaggggggggcccccaaaggtttaatagcgcgcgttatacccccaaggttttctcctcgtgtgctgctccacacaagaggtggggtcccccccatattatatgaggtgctaaagaagtccttccgcataatttttttatattaaagaggcccattaagggggccacagctgtggggccgccggcttccggttcttttttttacacccacaacgccgttttttcggttggtgaacactcggtgggggggacacaaccacagcggtggcgctattaaacncggtggggggggacaaactacctcttgtggtgcgcttcacaacgacgggggacaaaccccccgctttaaaaaactctcttcggtcgggagga

SEQ ID NO: 610460 - DNA, 114 bp, Homo sapiens
ccacatctccttccctggcagatttctgagcacccatagtgaaggcagcccctccctggcttaggagcactcgggggctttgcgtactccaggctcagtaatgaccaatcctac

SEQ ID NO: 610461 - DNA, 386 bp, Homo sapiens
tcttcatagaattgatcaccttcatatatatatgaaatacatatatataaataaatatatatacatatatatatatgaaatagttattttgcttgttttctgttctcccgagacaatagaagttccacaaaagtagggattttgtctttcttgtccactgtttatccagtgcataatatagggcccagaacctagtaagcactcaataaatccttatcaaatgattgcattcactgtatttcacaacacctggtcacatcaattagttgtgaagattaaatgagataacatagatgacacttagcacaagagaggaggcagaggcttaaaagagttgaagctgctgttacttctatttagactttttgtgcctctaccagagcact

SEQ ID NO: 610462 - DNA, 291 bp, Homo sapiens
  misc_feature (168)..(168): n is a, c, g, or t
aatatacggcggttaacttgtatttaccgctctcatgggcggcctcgacgaactggcgagtgatccagttcgtaccaatcacagcgaaacgtatcataacgcgtggatactccataaagggattctgtcgtcaatgtagcacgcctttttcatcttcgacgtgcgcanatacgcattatttctgcgccggacagccatgctcactaaacgggccaatcatgaccgaaggccgagatatttcggctggcgatggaggattttcgcgtcaatcacggcgctgacacgagcgag

SEQ ID NO: 610463 - DNA, 673 bp, Homo sapiens
  misc_feature (150)..(150): n is a, c, g, or t
aacctacaaatgccaatccaaggttcccaaatcagcccgcacatcctaaggcgtaccggcgggttagtttgtaattaccggcttaaacctattccgatctcggggtggtagggaggaaatatgggacttattcaggtatctacggaccgnattgagggaccctctatcctcgaattgttggtactacgctaactttgacgacggggccgcgagatgggctaacccggagaggcgtaagtctttttgggaggcggtaaagggggcggatccatattctcgcgagtactatcagtagcgttgcttccgttagtagcttcttaactatctcgagaggtcgcgttttaaggagtataggcgggtatatcgttactctccggagaggaagtataagtaacctaagccacgcgactaatacggttcagaaccaaacgacccaaatcgttcgcatgatcgcctcgagagtaagcggctgtagaccgaagatctgcgcgagaggaattctaaggaccgctggactactctccggcgcgatcgtaccgcattttgctagacggatgaggacgaccataaggaccctcgactcaagccctacccgacccgtaagtagaggtagatttgtcagtacttccacctaatgtgtagtaacgtccaaagcgtcgaagggacgatacta

SEQ ID NO: 610464 - DNA, 195 bp, Homo sapiens
gactctgaggatctttggatgatggaacgtcactggagagagtaaaaaaatttaacacccatatgtaggcctaaaagcagccaccaattaagaaagcgttcaagcttcaacaacccacatacctataaaaatcccaacacatataactagaactccgtcacacccaacttggagggtaccgacgctcgacattcg

SEQ ID NO: 610465 - DNA, 257 bp, Homo sapiens
  misc_feature (192)..(192): n is a, c, g, or t
actcgatccgctgatccagcatagtcttctttatttggcttctaataaagcttcctaccaaggatggcaccttagaaaacaactctaagatcatcttctggcaaggctttctcataggggtcatccgggcaacagcttcttccctcggttatgcttcatccatggtactcacacggtgatgggcagactcgntagcatcagctggacccttagactggttttccagaaactgggcaccatgaccaagagggattttt

SEQ ID NO: 610466 - DNA, 457 bp, Homo sapiens
gaattcggcacgagctatgcccggctaatttttgtatttttagtagagacggggtttcaccatattggtcaggctgggtctcgaactcctgacctcgtgatacggctgtaatcccagaacattgggaggttgaggcgggcagatcacaatgtcaagagattgagaccatcctggctaacagggtgaaccccactaaagataaaatttaacttatttgatataaaatcatacaaaaaaattgacaaatatacaatggtatttagctttcttaaggccctaagatggccaggtaagtcacaaggccctcatcctgaagccacagtgagcaagggtggtgaaggccacaagaaggccaagacattagaagggcagggctcagcctcccctgggtggcgctgaacaagattggggcagggggtgcaccattgcgcttaggcccagatatcacgaaaatctt

SEQ ID NO: 610467 - DNA, 212 bp, Homo sapiens
ggctgctcactggaatgacttgggagattggagaacagcaggcagtgatatcagtgggcccacccgcaccaggaggatggaagcaggtgaggagctagaccacactgaggcggatggtcgggactcggggttagctcagatgagccgttcacatatagtgcatggggcacgttcccctgtctgacatttaaggtgacgacactcagtgtcca

SEQ ID NO: 610468 - DNA, 817 bp, Homo sapiens
ggactagtactcccgtgaggcactttccttggcgcctcctgcgtattacatgtatccgatgactggctgtgttagcctcgtaccatctgtaaatgaagactgggtgccttccccgaacacaccccaattgccttcccagcttggaagccaaggcagctgatgaataggagctcacggagagccgtcttcaggctgggctggggttggggctgctgtgaggaaaacctgccattgtggccctggagagtcaccagcggctcgttggtaaggacttgctgggagcgctgagagacggctttgggtcaccgcctgctgtcttgttccagtttcctagggtttccttcattgtcttgaggtctctccaggatttctggttgtcttgctcatttggccaataaggtaggacaccagggcaggctggctgggcgtggcttggacagggcatgtgcggcgggtccccgagcccgtcgttcagggtaccgtggctcgtgcgcgcacgtacctccgggtgcctgtcgcaagcctcgttcaggctccaatgcgttgagggcatggcagatgtgtgctcaggtgagcgttgcttacgttgaccagggtgcacccggtggtcgttagcccgtgagcgcgtggggcctgctgcgtgaccgggtctgggggtgtatcgctttcttgcaggaaagcgttgggggaacgcccctcgcagtggcacggggtgcccttagcttgtctaggcgtagggttccttagggagcggttgggttcccccttgccggaccttccccactaggatcttgaccccttgtgtagttgaggtaga

SEQ ID NO: 610469 - DNA, 380 bp, Homo sapiens
  misc_feature (1)..(1): n is a, c, g, or t
ntgatactacaagttgagcatctctaattcaaaaatctgaaatccagaagcttcaaaatctgaatctttttgagcactgacttgaccccacaagtggaaaattccccacccgacacctttgctttctgatggttcagtttaaacagattttgtttcttgcacaaaatttttgtataaattactttcaggctatatgtataaggtggatgtgaaacatgaattatgtaattagagtcgggtcccgttgtgtatatgcagatattccaaacctgaaatccaaaacacttctgggtccctagcattttggataagggatactcagcttgtacctatatattcatatatattcactggttggttaagaaatggtttaagttgct

SEQ ID NO: 610470 - DNA, 89 bp, Homo sapiens
gtaagggtcctttgtataactttaaacgccccttataggagtttcaaactggaaaaagggaaataaaataactcggtttgcggccccca

SEQ ID NO: 610471 - DNA, 311 bp, Homo sapiens
taactcctgcactcaagggcttttcctgccctggcctcccaaatgtattaggtattacaggcatgagccattgtgcccaccgtctctgacagggtctcactctgtcgtccaggctggagtgcagtggcacaatcttggctcactgtagtgtaggcttcccaggctcaagggattctcccaccccagacccccaagtagctggaactacgggtgtgcaccaccaccacacctggctaaaatggtgaaaccctgtctctactaaaaatacaaaaacttagccgggcgtggtggtgggcgcctgcagtcccaga

SEQ ID NO: 610472 - DNA, 161 bp, Homo sapiens
actagggcttggacatgatgtgagtctgagctgcgtccggagtcgcacggatggtcttgtgtgtggcacggcacacgtggtttgcagacagtgcccaggtactcctcagcagagctggaggacagcaaggccaggaccagccccagcatgcagagcgctct

SEQ ID NO: 610473 - DNA, 147 bp, Homo sapiens
  misc_feature (97)..(97): n is a, c, g, or t
cggatgcttgtcgaggtaccaacatcgacttatacattgacggcaacactccctccctgccatcccagtagggatgggattgtactgtattccctanctggtttacccttcccccctgtaaagggtaacattttcccatgggtgcag

SEQ ID NO: 610474 - DNA, 694 bp, Homo sapiens
tggtaggaaaaaagggtttggtacttgggatgaaacaatataatttcaaaacttacagataagggtaagctctatcactcaactctttaaaaagtttatatgaatatccagtcaaaaccaacagggttattgccctgtaaaatgttaactagagggatttccaagggagaccacaggactgtatacggtctgtggaatgtcctcagaaggctctgtcattgatcaggtaacagtaaaaaccccagagtcctttctttcaaagtggaaagagggaaagcagagggacagaagctattcaaacttgcgtcttctttccttgtggctttgtggtcaccttccttccttcctcgtgcctcctcggaagccttcctcgccctccaaagcctccccggcctctgtgccaccaaattccgtccgtcggccctcctcttaccaccaccttcgtcctccaaagccgcctcgtgcctccaccaggacccccgaagccaccttcacccttaggtttgggcccagtccaagggtaactttatttccatcaatttcaccggtctttccagggcctcctttggcagctttgggaatcctcctcactgttgaagtctacaaaaccaaaccctttgggaggacccagtttcccgggtcagtaactatcctttgcccagaaacggagccgtcaaatgactccttaaaggca

SEQ ID NO: 610475 - DNA, 786 bp, Homo sapiens
ggaagaaacctgggctctggtcttcaatggcaattacgactgagatgccttaaaacagaacagaagtaatacgatcctgcctagattaggaatgtaacaagctgttgccttaggttaaaatgtctgttcctgtggatgagctgattactgaaatggagagtggttatgtgatatgggacatcagtattataccattcagcgaacagttccttgttgggtaaatcgataaaatgatctttgatctgaatccataataactttttttcaaatcacaaaatcaagggtgtacgttataccatatggaaaatccgtaaactgctgtgcatgccatgatgactgactgtgacttgttgagcatgcttgtgtgtggtgatgccacgagagatcaattgacatcagggtaagggagggaccatgatatggacgagggcacatggcatcacaggagccctcacgagacaggacggaatagacaacgcaaagccgagacaccgagtataaaagagcaagaaaaagaggcgaaacagaaaggaggaagaaaaaacggaaaacaaaaagacaagggaaatagaaaaaaaagaaaaaagaaagaaaaaagactacaagagaaaaaaaaaaacaaacgagacaacagaaaagagcagaaccgcgagagacagagaaaagaaaaaaacgaaacaacacgcagcaagcacagccaaggagacaaacgagagccgaagcaaaaacaaagaaacaaggacaaacaaaagacaggacagagtaaacacaaaacgacgacaacac

SEQ ID NO: 610476 - DNA, 135 bp, Homo sapiens
tatacgaatcgagcctgtacccttgtcgttatgagagtcgtgatggtgggtcattatgtgttgtcgtgcaggtagaggcttactagaattgtgaaaactgtagcttggattaaggcaacagcgattctaggatag

SEQ ID NO: 610477 - DNA, 389 bp, Homo sapiens
  misc_feature (18)..(18): n is a, c, g, or t
  misc_feature (35)..(35): n is a, c, g, or t
  misc_feature (116)..(116): n is a, c, g, or t
  misc_feature (151)..(151): n is a, c, g, or t
  misc_feature (174)..(174): n is a, c, g, or t
  misc_feature (232)..(232): n is a, c, g, or t
  misc_feature (273)..(273): n is a, c, g, or t
  misc_feature (278)..(278): n is a, c, g, or t
  misc_feature (286)..(286): n is a, c, g, or t
  misc_feature (330)..(330): n is a, c, g, or t
caaatactagatgtcatnaggatcacttagttganggagaagggtaaaaattaagcacctacatttagaagggatgggcacaatacagggattcctacctcttcaactggcttcanccccatccgaacacaagcaagggagaaatcagggnttgcagatagtcagcttactttnaattcagggcatgtgagggtttaagtctatcagtaacaatgatcagtattctcatgtnccagtcccttagccacacaatacacagtacatgctctaaancatgncaagatancatacagactcttgcacaagattttaaacccaggacctgagagngcaccatgcaccactgtccacacggaaacttggctcaaagcaaacaatgagcatgtata

SEQ ID NO: 610478 - DNA, 109 bp, Homo sapiens
gtctagaggacccagtgctcacgctcatctttaacttaaacaagtcgtcacaaagtttcccttcctcaaattttcctctaatgctatcaagcaaggataggttggagtt

SEQ ID NO: 610479 - DNA, 383 bp, Homo sapiens
actatagttttttattttaatatcatcggcagaaagagtacccagtttcgaagctctctggtgtgttgtaagaaatgaagcaaggatacgaaccccttctcccacaacaggccttaaatctatcttcaaaggtgacccagcaatcagtgtcaatgcctttactgtaattaacctggttatctcattctttagtctctccaagaaaatctgaagtgtattaggcaagtcacaacccaaattgtctccaaggttggaaataagttgtcccatacaggaaatagccctttccttgacttcctgatcaatgtcagcagcatttaatctcttaatggcacaggtaaatagatctttgattaaggagatgcttcaaacgaggaaggctg

SEQ ID NO: 610480 - DNA, 776 bp, Homo sapiens
  misc_feature (183)..(183): n is a, c, g, or t
  misc_feature (580)..(580): n is a, c, g, or t
  misc_feature (616)..(616): n is a, c, g, or t
aactgggagtataggtgtacaccaccatgcccagctaattatttagtagtagtaggaggagtattatgtttgagatggagtctcgctctgtcgcccaggctggagtgcagtggcgcagtctcagctcactgcaacctctgcctcccgggttcaagcaattcttgtgcctcagcctcctgagtngctgggattacaggcgcccgcaccgcgcctggctaactttgtatttttagcagagatggggtttcaccatgttgcccaggctggtcttgaactcccgacctcaggtgatccatccgcattggcctcccaaagtgctgggatcacaggcgtgagccaccgcacctggcctcaagccagtatttccctggccctaaatcattcctggctgggtcccagcccagtagagccagccccccagcccggagtgctgctgaagtgttcaaaagttgtcaatcctcagccgttccctagtcctgttgcccggttctgccgaagccccttgaaggctgtggcctgggctgttccctcattcattcctgcctcccgagccaaacccaggtatccgcttgtgccctgncgtggtgtggcagcgtcttctctcgggaagggtcanggagtaatttcttctttcagtggcctctctgtgctagtcccggtcacctccgtgaattaaagtcctacaggtacaagggagacccccccccccaaggaaggcgcccccagtccgtgtgggaaattcccccacggtttctgccaggttctgcggctctgag

SEQ ID NO: 610481 - DNA, 300 bp, Homo sapiens
tactactactaaattcgcggccgcgtcgacgttatgtactgcataatgacatatacaatagtggtcccataaaattataatggagcagaaaatctattgcctcatgatgttttagccgttttaatgtcatagcctagtgcattactcacgtgtctgtggagatgctggtgtaaacaaacctactacactgccagttgtataaaagtacagcacattcagttatgtacagtatgtaatactgataatgacaataaatgacaccggtttgtgtaaaaaaaaaagtcgacgcggccgcgaatt

SEQ ID NO: 610482 - DNA, 118 bp, Homo sapiens
cgtgaaaaggcggggctgagcctggaggggcggggcgcggttggtaggggcgcggcctgatctggcacggtgcggggccgcagtcgtgcaaggtgcggggcgaggtaggtaggagcag

SEQ ID NO: 610483 - DNA, 1069 bp, Homo sapiens
  misc_feature (183)..(183): n is a, c, g, or t
  misc_feature (629)..(630): n is a, c, g, or t
  misc_feature (634)..(634): n is a, c, g, or t
aactgggagtataggtgtacaccaccatgcccagctaattatttagtagtagtaggaggagtattatgtttgagatggagtctcgctctgtcgcccaggctggagtgcagtggcgcagtctcagctcactgcaacctctgcctcccgggttcaagcaattcttgtgcctcagcctcctgagtngctgggattacaggcgcccgcaccgcgcctggctaactttgtatttttagcagagatggggtttcaccatgttgcccaggctggtcttgaactcccgacctcaggtgatccatccgcattggcctcccaaagtgctgggatcacaggcgtgagccaccgcacctggcctcaagccagtatttccctggccctaaatcattcctggctgggtcccagcccagtagagccagccccccagcccggagtgctgctgaagtgttcaaaagttgtcaatcctcagccgttccctagtcctgttgcccggttctgccgaagccccttgaaggctgtggcctgggctgttccctcattcattcctgcctcccgagccaaacccaggaggcagaggttgcagtgagccaagattgcaccactgcactctagcctgggcaacagagcaagactgnntcanaaaaaaaaaaaaaaatttaaaataaaaaaatgcttttagaataatgatttaaaaaatattttggtacacctgtacacaggtgtgtttaaaccctaagtgttattacaaaaagagtcccaacactttcacataattggtccgggccatggagggctaatgccctgtaaatagccagccgtctttaggatgccaaggccagggcggacatcgattgaggtcagggaattccaagaacagccgggacaccaatggtggaaacccgtgtacactaatcaaatatgcacactgtgaccagaacatatgtggctccaggggtcgtagacccaggcaaactcagaaggatggcggtgtgcaacatcactgacgccgggaagcggagagctacataggtagcgatacccacatgacatccaggcgggcaacaaagatacctac

SEQ ID NO: 610484 - DNA, 146 bp, Homo sapiens
gtactacgtgtcctgcgtaaggtgtgttgattaatacttagcagttagcgagtcagttggtttagtagtaaacctagtgttaagaaagtagtctaatagttgcgctcggcacagtagtagttaccctgcagttagagagcaggcaa

SEQ ID NO: 610485 - DNA, 658 bp, Homo sapiens
tgcggggggtggtatttgtttggggcacatcgggcacgcccgtgtcacaccttgtctgtcgtgccgctgcggcctgcggtgttttgtcccccgcacaaggtggcgagaaagcgagagggccctcttgcgcaatccccgaggttgtgttgcacactgccctctctctgagacactcccacgagccccgagtggcggcactgaggccacgcccacggctcacgtccacggctcccctcgtgtcctgtggaaggaaagtggtccccactcccccacatgccccttattggggaagggaagggcgtctgaatgctctctctcttgcctcccccccactcctgtcacggcacacacaggtgacgggggcacacccacatgcgagcccttctcctgctgccatgtcgcgaagggccacagttccaccacatgaagaccacgacctgcatcccactgcgaccataagtgactcggccttgggacgtatttgaagcccttacttctgagatcctgtacccctttaagtccccctcccggcctcgaggctcacgggtaggaaaagaccccgaggttctcccgttacgtccttttacccttcccttccctgtccacccacatgacctttcataaatacataccataatacttacccagccggaaaaaa

SEQ ID NO: 610486 - DNA, 652 bp, Homo sapiens
  misc_feature (183)..(183): n is a, c, g, or t
aactgggagtataggtgtacaccaccatgcccagctaattatttagtagtagtaggaggagtattatgtttgagatggagtctcgctctgtcgcccaggctggagtgcagtggcgcagtctcagctcactgcaacctctgcctcccgggttcaagcaattcttgtgcctcagcctcctgagtngctgggattacaggcgcccgcaccgcgcctggctaactttgtatttttagcagagatggggtttcaccatgttgcccaggctggtcttgaactcccgacctcaggtgatccatccgcattggcctcccaaagtgctgggatcacaggcgtgagccaccgcacctggcctcaagccagtatttccctggccctaaatcattcctggctgggtcccagcccagtagagccagccccccagcccggagtgctgctgaagtgttcaaaagttgtcaatcctcagcctcccaccacgcccagctaatttttatttttagtagagatggggtttctccatgttgatcaggctggtctcgaactcccgaggcgggcggatcatgaggtcaggagatcgagaccatcccggctaacatggagaacccgtctctactaaaaatacaaaaaattagctgggcgtgctcgcgccgaaggc

SEQ ID NO: 610487 - DNA, 616 bp, Homo sapiens
gactgactagaggaccccaagcagttatacagactcatatttgcatatcattcacattacattcttaaagtctacacgttttgtttattagttcactaagaattacaactgggtagatatgtttgtggctactaatgtgcccaatttaccactggcaaagtcaaatttagctaaacacccattcaataactacaacaaatgaagtttgttttagctttaaggtagacatttgtggcctaggtgcggtgcctcacgtctgtaatcccagcactttgggaggccgaggtgagtggatcacctgaggtcaggagttcaagaccagcctaaccaacatggtgaaaccctttctctaataaaaatacaaagttagccaggcgtggtggcacatgcctgtaatcccagctacttgggaggctgagcgcaggagaatcgcttgaatccgggagggcagagatggcagtgagccgagatcgcgccattgcactccagcctggatgacagagcgagactccatctgaaaacaaacaaacaaacaaccaaaaaaacagatgactagccctgaggaaggaactccaagtgctggccttgacgatatttggtaggctccccactcctg

SEQ ID NO: 610488 - DNA, 284 bp, Homo sapiens
agctctgcatctgtgtttaggtgatcatgactcataatcattggtacgtagcatcttgcttaattccttgaatagtattagtgcgctgggcgcagcggctcacgcccgtaatcccagcactttggaaggccaaggcaggcagatcacctgaggtcaggagttcgagaccagcctggcaagcatggcgaaaccccatctccactaaaaatacaaaaaatcagctaagcgtggtggcagacgcctgtaatcccagctactcagggaggccgaggtgggcggatcac

SEQ ID NO: 610489 - DNA, 732 bp, Homo sapiens
tgccttactcgaattcctgaccattgtgacctctggagaaggtttcgattcctttagcagtttgtaaagagtggtacttacaaagagacagagtttatggtgaaggaaggagagagaacaacagaatttgataagaaaagaaaagcaaaaactaataagaagatggatcacattacaagaaagagaaaaacaagagaagtgctattaataaagcaatcataaatgggggaagcttaaatgttcacggttcccaaatcctaagcagtatttaaacaattcagatgtgtcacaaataaaattctcagagttcacagaaaaccagacaagaaaagagaaattgagattgggaatattatacccatgaagaagcaagagaaaagggatctttggaatttcaaatgtgcaggttatgaacaaagtcaattcttcaataaaaaattataccgaaggataatttcccaagtggacaaacaggggagttaagaaagaaaaacatgcgagatggtaataataggaagacttaaagcaggtgtggagagaagaaaagaaagcagtcttgaaagaaatgcgtaagaaagatggtaggcaaataagtaaaatctcgtgttacagacttccagtgaaaattagctgttgttaaaaatattattttcagcttaataagtaattgtagagggtgtactgaaagtgtgttggattatagacaggttgtgttgcatacactacgatgta

SEQ ID NO: 610490 - DNA, 560 bp, Homo sapiens
  misc_feature (56)..(56): n is a, c, g, or t
gggcttggcggattggtcgtggacgtggtcagccacctcagtaaaattggagaggnattctttgcatgaaataaacttacagccaaaaaaaaaaaaaaaaaaggccaaaaaaaaaaaaaaaaaaaaaaaaaaaaacgtgtgtgtggggcgccgcgccgcgcgcccccccggagaaagagttttttagaacccttgcggggtggggcgcgcgcggggcgcccacgagggaggtatagtggagacaaccgtgggcccaagagagggtgtctccccagagaggggagacacgcggggggcacagagcagccaggtaggggggcggtgggaggtctctttcccccccaagaataaaaaaaaaacaacgccgcggggggggggagacacccccgagggagcgtgtttccgtgcaaacaaaactctcccagagagcggaggagcgatctgcccgaggaggggcgctaaaatatgaacggggggggctctccatcatacaagacagagggggagctctcaacaaggagagagcccgcgtggaatatctaccaatatttagccgcccg

SEQ ID NO: 610491 - DNA, 188 bp, Homo sapiens
gaaaagagtaaactttcccccctgtctccatggtacaaaaattaatctgagaatgaaatggtattttgtgccaggcatggtggttcacaccctgtaatcctaacactttgggacgttgaggctggagaatcacttgggcccagaagttcaagaccaccctgggcaacatggtgagactcctatctcta

SEQ ID NO: 610492 - DNA, 701 bp, Homo sapiens
cggcacgagctcaaaccattacatgcatacacacaaccatatctccgtgtatacaaccacattatatataatcacatatactttatgcatgtgtaaccacaatactgttttcacatctaagaaaattaaagtaattccataatataatatcaagcatcaattaaatctaaattttcctaattgtctcaagaatgtctttgataccactctcacttctttaaaacaaacaaaccgacaaaacaggatccaaacaaagtacatcctttgtatttggttatgtttcttgtactcttttttaagaacagttcctttacccttttccttcctttgcctgcattaacttgtttgaagagaccagctctggttgtcttgtaggatgtgtaaccttgtgcattcattatttcctcgtggtgtcatttaactggtttctctagctcctctacttcctgtaaactggaagttaattgagatgcatccaggttaaacattttgacgagaatgcttcatcataggtgaagtgcagttcacattgagtcatatcaggaggcacttaatgacgggttatcccgttatgagcaatgctaactttgattccttggcgcaaccagatctcttcataatgaaggtaaaattttctcttctgcttttagaagaggaatctattggacaatattttggcacctctgtaaataccctgtttc

SEQ ID NO: 610493 - DNA, 116 bp, Homo sapiens
tgtagttttaagcttctagttagggggttcacttgttacacaagcataagaaaactaatacaggtggtgtgtgactggatgggatcactgagacagtggccatgtagataaagcag

SEQ ID NO: 610494 - DNA, 1943 bp, Homo sapiens
  misc_feature (217)..(217): n is a, c, g, or t
  misc_feature (501)..(501): n is a, c, g, or t
  misc_feature (556)..(556): n is a, c, g, or t
ctttacacctatacaggctagtataaccgggaagccaggtcatcacatgtacatccgcattcacgctatctgtccattggagtcgataattcaccattcaccaaaaaatcctagattgcgtgtgcgaatcgactggcagcatagagtagcctgtcagctagcatggtccatctatagagtagtcatctacagacactcattggtagcacagtgcctnggagagctcaatattgacagctggggagagagcacacgaactgagtcattctaatatactgcacacactcatctgcctgtctgactcaccacaaagtgattcagtctcatgtggcgtccgtatgtatacctaatctgtcgtgaatggtgatgcatcaaatttggacacattcaataggtaatctacttctaagtctaataggcactacccgtgcctacctgattcaaaacatgcagtatcacagagcctctctttgcggttgcgatcggtctaagaaatccatnagttacaatggaactttattgggtctcacttctgtgtggagaaatgcgtcgaccntcacatagatgcaaactatgtggacacctaatgacactaattacgatcatagacacaatcggcaacgggaaatgcacattgatagggtatagcgaccctctttactcaggggtgaaaagaacatagatcgagacttgattgacatttgtgtcgcggcccaagtgcgtataccatacactagaagacacaatttcaatttacacttcttagtcactttgcataactctttagtgaccagtctttgaccacaaccattggtctttgatagtggtggctaagatgtggttacaatttgctcgcgttaataaattccttgggaaatccgttgttgcccacgccattctatcgctaaggggcccaatttggtgactttttcttcccagattttgttacacccgttaaccattagccaccaaactataaggtttgaatccaaaggttggcggtttgggaaacccccttatagacacctctttgccgttacggatacctttatagaacagcaaacattattccttcgaggtcatatatattactgaggataataggaatctaaatccacataaaacaaacggctggttgggcatcgccccaaaggcagaagaatggtctagctttctaattacacttaagaggacttcggtctccgttaattaatagcagcgggccacgttcacctttggtggggagcaaaacagcagcttgtggaaacagaagtttcaggccccgtttgtgggggaggtaacttccctccaaaccttagggatactgttgtcgcgtgtaacgaaaggcgtgaaggagacacgccaaaacatcacattgtcccacacgcgccatctttggcgaccagccactctgcgtaggggctttggggacacattatagacagccggtgcgacaaggagagacacaccaacgttattagaggatgagaagggaccgcacatatggacgccgggggtactaacaaacacaacggcgaacatattcgagagaccgaccacggcgataacacagcgggtaagagcataggtgagcgccccaattatgagagccccccacacatgagtccccggcgtacacaggaggaacgtataagaaacgatcgcgggtgacaaccacacgcaggggccccaagccgaagatgggcaacaaaaacacgagatggccaaacagaaaaaaccgccctcaaggtaggatacgagagatcaacgtcgaccacacacacaacgtaacgacacgaccaaccagttgaaactcgtcagctcaacttccagaagagtaccaaagataaacactcgtacaaaagaacaagtagtaataaagacagagaaacaacagtagagagacacaacaccagagcaggaccaccacacacgagcagcag

SEQ ID NO: 610495 - DNA, 408 bp, Homo sapiens
atggaggagcagaggcccagaggttgaggtctgcagtgagctgtgatcacactactgcactccgtgcctgggtgacagagtaagatcctaatctgaaaaagtactgtaacaaagccaggcatgtgactcatgccttaatctcagtactttgagaggccaaggtggtaagattgcttgaagtcagcagtttgagaccagtcctgggcaacatagcgagacccctgtctctaccaaacataccaatcaaacaattagctgggtgtggtggcatttgcttgttgtctcagctacttgggaggctacatgtgggaggactcacttgcggccaggcgttcaagaccagcctgagcgacatagcatgattctttctccacgaatatttttaacatctagttcggcctccgctgt

SEQ ID NO: 610496 - DNA, 486 bp, Homo sapiens
ggagattgaccagacaactccagagcctgtcatctccagaggcctgttttgatgaaataaattaaccctgccaggcatggtggctcatgcctgtaatcccagcactctgggaggccgaggtgggcagatcatgaggtcaggagttcgagaccagcctgaccaacatggtgaaaccccgtctccaccaaaaaattacaaaaattagcccagcatggtggggtttacctattatcccagctactcgggaggctgaggcaggagaatcgcttgggcccggagggcggaggttgcggtgacccggggtcgtgccactgcactccagcctggacaaggagtgggactccgtctcaaaaagcaacaacaaaaaaacatcgactagagcagtggctgtggttttggacccagtgtgtcttcagaagcacccagggtatcattataggctgccactatttcctggtaccacaggatatttccatatcactacca

SEQ ID NO: 610497 - DNA, 467 bp, Homo sapiens
  misc_feature (35)..(35): n is a, c, g, or t
  misc_feature (216)..(216): n is a, c, g, or t
  misc_feature (252)..(252): n is a, c, g, or t
gggccccttcaccaaaaaaaaaagaaaaaggaaanaattttctgaccttaccaattcccaatgtatttgttttcttatccgtcccttcccttctcctccccctttataccaaacgccatcatattttctgttcaccattgaaaatgcagacatatgtcttctctctctctctttttttagacagctgtcaccctgtcgccaggtggagtgcacagnccccatctcagctcactcagcctcgcctccggggtntaagtgatttcgccccacagcctcctgagtagctgggactgcaggtgtgcgccaccacaccctgtatttttttagtagggtcagcctggccagcatagcgaaaacttgtctctactaaaaatacaaaaattagtcaggcatggtggtgcacgtctgtaataccagcttctcaggaggctgaggcacgaggatcacttgaacccaggaggaggagg

SEQ ID NO: 610498 - DNA, 1073 bp, Homo sapiens
  misc_feature (66)..(66): n is a, c, g, or t
  misc_feature (321)..(321): n is a, c, g, or t
  misc_feature (366)..(366): n is a, c, g, or t
  misc_feature (470)..(470): n is a, c, g, or t
gccgcctctttccctcctcaccccctcacttcctcctctcactttcccattttatctctccctttnatatcctcaggtatatagggtccccacaaacattatcaaatacttctcaatcgtactacacttaaatatatctactatatctatcacaattactaattctcctctcatcaaacccttctctccactttattatttaattctatctcactcagcaaatctttcttctatctccactcctctttccttctacggcgttccactacatgccttacctctactcacctctataaaattacataataacttgtaaaattntatatcttgatattaactcctctaatttaaacttgttttcattcntcactctcatacaccctcacccaaaacaactacacacgaatcgtcaccacacccacccacctcccccaccctcctacatccatcctctgtccacatcatcccgnaacgacaaattacttccaaaccctaatcctccgtacttcatcacattttcgtccttcaataatcattaactaatataatattactttatgtttattatatttcattttgccccacgctcccactcttccactataacataccgtatttatttcttatcataataatattattgaatcttatatgaataatatatatattatatatgttattattatatatttatctattaattttcataatatctctcaccttacatttaaataattcgtatctgtttatatctctcactacctcttgtccatctattctacttcacgtcacttctgctcacccaccacccccccccaccgccaacacttccacaatacttgcctcatcatcatctctctattctctcttaacttctctaacactctctcgtctatactctttcctcatattcttcctcttcatccatcctactctcccattacatatcactcctctcatctccttctctacccatctttctcactatcgctccacttaccaccgccatcacactattatactattatactcatatattcatctttatctaccaataccactaataaatctag

SEQ ID NO: 610499 - DNA, 127 bp, Homo sapiens
ggagattgaatgcaaactggaggtgaaagtgatatatcaaggaggaaatacccctggacaaccagtcttcctggaggggcagcaacagtcattgcacaataaggatttttgaatgtataatatcatc

SEQ ID NO: 610500 - DNA, 406 bp, Homo sapiens
cccactctcctctttccgctagtcgaggggtgtagctctggggagggaagagtggggtccgccattcctagggtgcttcttgagcaagcaccccacagttcgccaatgtggaacaggtttttgttgttgttgcttcgttggtatgtttccagagactgggagttaaacacctaacatcatgccaagcgcagtgactcatgcctcttatcccagacatttagggaggcctgaggtagcgttgcattattccagaggttcaagaccggcctgggcaacatagtgagaccccattctccacaaaaagggtgaaacaatacgaaaacacgagatctgtgaatacccccgaagcctggactccttcctccctgctgagcatgtcaggcagtgccggacagaggagagtggg

SEQ ID NO: 610501 - DNA, 384 bp, Homo sapiens
gcacggggggatgagtcacagctaggcaggaggcatgaggcagggagaatggcgtgaggggtgaacccgggaggcggagcatgcagtgagcagagatgatgccactgcactccagcctgggcgacagagcaggactccatctcaaaaaaaaaaaaaaaaccggcggaaatcgggcagcgccttaaaaatcccgggcccgggtgattcagtaactccgggggaacccggggttacgggcgctttcctagggccctggctattaacccttcgttccttccgagttatagcactggggcccagtgtctcataacattctcctttaccacagttttaacaggggccgtgtgtaaagagccttcacccattggaacatgtccaaccttg

SEQ ID NO: 610502 - DNA, 1316 bp, Homo sapiens
ggtcgtgaaaagaaacacggaggaaagcagcagcgacatagatggtagcttgtcagccttagtgattttaatatacgttcgtgtgcttcccgtccacctacttgtgtgtgtgcttctcactttgtctccccctgttaggtagtttctgtctctccttctgttggccatatttccttttccttctagttgtgcttccttagtggcactccactgtgctcttaacttttgggccctatctatgaacgccctgttcgagtttgtgccttcttgactgaaaggcgtctccgtgttgggcgctggtgttctcctcctgtggcctctctccttgccttggtcgtgtctcccgtgtctacccaggattgcctcacgggtcatttgtagagtactcgttctagtgttattgttcccagccctgttcctggagattggccatctattctcggacacccttccggctgactttcctccgtgtccctattggttttccctggtcccttctgctgtatgttagtggtcccgaggattgtctctgttcacgattatgtaactggattgtcccagtatgcttctgggattctctatgacgctcgcaactgaagaggatataggacctcgaatgttttcccaaagtgactcagcatcaattgaccgacgccggacgccgtgccccacctgccagatagtactttgataggtatcatgagtttacatgcccgttatgatcacgcttggaatacgcactcacggaaagatggttaaaggacgacctggtttcatgctcttcctgaacctggttcagtgcattcagtacatagcccctgtacttttgccctgtattcgtgtctgtactgactccactgaagggcacagggtatcgcgagataaggtcctgatcagaatcatggtctcccgcagtgaagtggtacatgttgtcaaattaggtctgaattcaagcagacaagtacggcaagtccctgtactattatatccagcatagacgactaagggcgactaccagcaaagcgtctgctgtagcctgtagtggtaggagatgacctgaagccacgacacaggcctgagcgtcctagaaatggtgctgcaccatcgcctgtaccagctagacaggtctagaaaaccaggctttgcgaatcacagtccccgtggccatccctgtgagggtgacgctagcattacccccaacctcactttagttgcctaagcattgcctggccttcctgtctagtctctgcctgtaagcccaatgaaatgtacattccaaggagttggaagtgaagtctacatgatgtgaaacactg

SEQ ID NO: 610503 - DNA, 196 bp, Homo sapiens
accttgtggacactagtgcccaggagttacacagcaaaacctttaaaaaaaactttaaaacctttaaaaaaaccttaaaaaaaaaacaacaacaacaacaacaacaacaacaaatagcccctagtccgtgtttcgcctgccaaggccctgttactttagtaagcctcctcttctctagattcctcacatttggtcc

SEQ ID NO: 610504 - DNA, 772 bp, Homo sapiens
  misc_feature (88)..(88): n is a, c, g, or t
  misc_feature (671)..(671): n is a, c, g, or t
gaaggagcttggcagaaccaggtaggtgcgacgggcccgcgtgaggctaaatgtggactgtgggtccatagagtgctgtagagtcagnggaggactccttgaggtgcatgcaggtggctggcttgagagttcgtcagcgacatgaaacggacgttgcggggttcatgcggagccgttcgtggatgcgactgttctcgactcggcatattccgtggggtgtctctgaccagcgattcgtgatcgtatccgtggggaggtcatggtcggcgtagatgtccgtagtgatcgggacatgggacggcaggctcgtcgcatgcattgtgccgtgcggggggctgccacaagtgttggcccagggtgcaccagcacttgtcccgttgggacccgaaaaacggatcagttgtagcagggcaagcaagaacacgacctcttgtgagagggggggcgtcgttggggagttgttcaggtgccgttgggcttggcaagaggcgatccgggtggcaacgaagtggcgacggtgtggcaaatcacgttggttaccgtggagcactcagcgatggtcttcgtgccctgctagtagggcaaccccgaatggtgggcaagtggcttgtgcagcccgggggcggcttctacccggttgagtgccggctcagtgcgttgctttggccgtnccggttgtgcggccttgcttactgttggcactaccacttggtggccagtgcgccggcctggccagtggtggcaacccagccctaggagtagggcgcccctg

SEQ ID NO: 610505 - DNA, 357 bp, Homo sapiens
gggggaacaaatataacctaataagggatttgtcagcctggttgcctcattttgaccttagcaaatttgaccaaatctacagtacaggctctacttatcctctagtatgtgacctctaccatccaaggagctttagaaatggactttgaccttgctcacatcattgtgcccttcactgtactatttctatccgagacgtctaagtaattgtaaaaattctggaaatcggcgagatgcggtggctcacacctgtaatcccagcactttgggaggctgaggcgggcggatcacctgaggtcgggagttcaagaccagcctgaccaacatggagaaaccctgtctctactaaaaaatacc

SEQ ID NO: 610506 - DNA, 259 bp, Homo sapiens
gattagcaaactcatcactagacatcgtactaccgacacgtactacgttgtagctcacttcactatgtctatcaataggagctgtattgccatcataggaggcttcattcactgatttggcctatgctcaggctaccccctagaccaaacctacgccaaaatcatttcactatcatatcatcggcgtaaatctaactttcttgccacacacttctcggctacgatgccgcgtgctgataggccgtgatccatgaactct

SEQ ID NO: 610507 - DNA, 140 bp, Homo sapiens
cgccacccctgtgcgcccctcgtgcgccggggtacctttccagctctgtggatcggtgcgtgggccaggccgatcctgttgggggttggtggtgatgacctagctgcgtcgtgcagatgctcaaagactaatgaagtcct

SEQ ID NO: 610508 - DNA, 192 bp, Homo sapiens
acagcttggtcaggcatcaagcttggtcaggcatcaagcttggtcaggcatgcagcttggtcaggcatgctagcttggtatgcaagcttgcgaggcatgcaacttgtccaactgattttttttaatttttaatttttatttatttatttttttgagacgcagtctcactctgtcatccaagcttgcaggatc

SEQ ID NO: 610509 - DNA, 382 bp, Homo sapiens
cgttctcctgcctctcgttcgttcatgaatacgtctgctgatcatgctatcctccgtcatgtatggcgcagctaagaatgtttcaatagccatatcgtatacctttgtctctatacgcgtgcttcggtgttcgcgagcgtgttgtactagtgatcggttaaacagtgctgaggctgctgcatcttccatgagcagcgtcaggtgctactgtctaagcccctggatgcaggctgcatgatgtgaacagctcgcatgtatggttcctagtacggctagaccagatataatctaaggccatcaatggaatgatacaagcccacgcgggaaagctgggcgtcgcctcaggcagctcaggatacacagctcctacagtgtcgtccag

SEQ ID NO: 610510 - DNA, 227 bp, Homo sapiens
  misc_feature (5)..(5): n is a, c, g, or t
gtccntactcgacggacgcatcactttaaatttatctgtatatagaaaggaaactagcctgggaacatgacgaaaccccatctccactgcaaaaaaaaaaaaaaaaataaaaaaaaacaaccacaccccccacaaaaatacgcgggttatgatggcaggtgcttgtagccccagtaccccaggataatggattgacccttggaggtgagggcaccagtgacctgaaa

SEQ ID NO: 610511 - DNA, 338 bp, Homo sapiens
gcacaaaattgttgttttggatcaaagttttcccattggctgttacaagtgcaagaagtgtgggctgttgttttcctttaagggcaagtgtcagggttgttacccgttgaatgggcacattttgtgaaaggcctgaagcgcctggggcatccagaagttttcagcccccgtcaccattgattgttgagttttcctaaaagtacctgttgggttttcagttccagttcccatcctttgattgatcactttccctgacatccacctgtatgactttgtcaccaaatgctgttttttttttttccaatcaaaaaataataatccctcgagtttccaaacca

SEQ ID NO: 610512 - DNA, 768 bp, Homo sapiens
gagtcagcgtagtatgaactgtttcagcttagtggtctccagaaattacagaaaacccccaacaattagttccattcacttttatgtacactggcactcttcaggaaaacactgggctatttcccagggccccagaacatactcgaacatttgtttgagtgggaggtggggagagagtttttttgagtcaatgaacatctgttcagaactgctgtgctgggtcccaagaaaacagagcttataatctgtctcttccctgccagaggtaccagcagagatttactatactaggtatatgtgcttgtggtggcattgtactgtgtcagtttagctaagctggattcccagtatccttcctatctgcttccaggtgagggttgtccacaagaaaatttcgtgagagatttggaaagctgaattgaagtagcagccagtacactgtgaaggacagagcagggtctgtacgctgtgaaggacagagcagggtaccaggcatagtggcagtacctgtactttctctctgatctggctcaccttgtcggtgaaggtcatcacacagcccccagcacccctagctcctactgaatttcctccttcagctcctctgagtcctgggccatgtgtgcagtcagctctgtagcagagggctccggcttctccagatcacctgagtcactgagcttgggaccagtgaaaggaagttgtgggtttcagtttgtcctcatgagttccagttgtccttgtagatcccagtcctagttgccgtgt

SEQ ID NO: 610513 - DNA, 129 bp, Homo sapiens
acaactggtgacttatcgtctttagacatctgcaagtgtcgatgcatcgatttgatcccgcacaaccgaactgttgacactgtctggatggctgtagatgaatcttgcgacaaacctgcagagaaccct

SEQ ID NO: 610514 - DNA, 426 bp, Homo sapiens
gctccgactccctccccccctcacgcccgccctctcgccttcgccgaaccaaagtggattaattacacgctttctgtttctctccgtgctgttctctcccgctgtgcgcctgcccgcctctcgctgtcctctctccccctctgccctctcttccggtcccgccccttttcagtgttgcacatctgtctctccacagcgtatcatctggcccccttctactccttgatacaagaagtgacctcagtttcccagagtacccgttatgcgcccaccacgatagaaggtacaaacgatctggtccagccgcaaagacacggagaggacaagcgggtcataccgtggtagaagggcacgaggatggatcgtctgaaagatagaaagcacgagagatacacacacaagaaggaaaatgggaggggtgtccac

SEQ ID NO: 610515 - DNA, 113 bp, Homo sapiens
gccccagcggggaattaacccccccaaaaggggaaaaaaagggggggtccccccggggggggggccttttaaaaaaagggggtcccccgggggggggggatttggggggggga

SEQ ID NO: 610516 - DNA, 126 bp, Homo sapiens
tagcgggtcatgaggcatcagaacgcagtttcatttggcattagccagcacagagccaccggaacattcaagatcctagaggacgaaacccacagtaaggatatagaaccccacttatactcgggt

SEQ ID NO: 610517 - DNA, 390 bp, Homo sapiens
ctggtgttcctggacttggagttggtgctggtgttcctggcttccgggcagtacctggagccctggctgccgttaaagcatccaaatatggagcagcagtgcctggggtccttggagggctcggggctcttggtggagtaggcatcccatgcggtgtggtgggagccggaccccccgccgccgctgccgaagccaaagctgttgtcaaagccgcccaatttggcctattgggagccgctgggctctgaggacttgcagtcagagggcttggagttccacgtgtagggggccttggagggatgcatgcaactgtagcccctaaagcacctagaaacagagctgctggcctaggacgtgtcctaagggagtcctagccaattccactaccca

SEQ ID NO: 610518 - DNA, 120 bp, Homo sapiens
ctcttgagtatccccggtcaacttgctacacaagctgacggattggtctggcctactgggctgacattaactacaattatgggaaatgcaaaagttgtagtggatatggtagtgtagtgg

SEQ ID NO: 610519 - DNA, 338 bp, Homo sapiens
cagagtatgagtctgtttatgaacacctttaagcagctcccaaactgcttgaaccgagactccatctctactaaaaatacaaaaattatctgggcatggtggcaggtgcctataatcccagctacttgggaggctgaggcaggaaaatcgcttgaacctgggagacggaggttgcagtcagccaagatcgtgccactgcaccccagcctgggtgacaagagcaaaactccatctcaaaaaaataaaatttaatttaaaaaaaactgtgctgggtgtgcctgtctatcagacacccaatcttgcaagactgtcattaaaagtctcacttttgctgttca

SEQ ID NO: 610520 - DNA, 276 bp, Homo sapiens
ttatatcgactacgtagccagatatggaagtggattcacatgaggtgttatggaatagcagtatggttaccatctccccagtgaagcgtgctatgtgtcctgatagcggagatgggggtaggcgatgaactcgggtctctcgtgatctccgtggtgcgacttcagtgtacacattcagcatgctgactgccaccccgtgtgagcgcgacgaagaaggtgagagtctataccacatgcgagctgagccctcttcgccatgggcgccactgacaatgg

SEQ ID NO: 610521 - DNA, 1023 bp, Homo sapiens
  misc_feature (238)..(238): n is a, c, g, or t
  misc_feature (264)..(264): n is a, c, g, or t
  misc_feature (607)..(607): n is a, c, g, or t
gctaagaggactccctcaatgtggctgacttgtattccctccgggcccaactggacatccccatcccagaccctccacccaaggatgatgagatgggaacagataagcaggagaagaaagaagtccctaagtgtggatttctccctggggcaaggagaagtgatgtaaatgggggagtaacatgatgagattaatggattagagacatggctcaggctgctgtagagaaggcaccagngagagcagatggctcaatgggtgtgnaggagacctctcactgagtttagggagaggtttttaaaacagaagaagtttgagtaatttaaatgatgatgggaaggagctaaaagtaggggataggttaaagatacaggaaagtgggaggaagaactgacaagtgaggttccagagagggcaggagaagaggagattcccatagggggattaacattttcttttcttttttctttctgagacagggtctcactctgtcgtccaggctggagtgcagtggcacaatcttggctcactgtagtgtaggcttcccaggctcaagggattctcccaccccagactcccaagtagctggaactacgggtgtgcaccnacaccacacctggctaatgtttcttttttcggtagacacagagtctcactattctgcgctgattggtctccaactcctggcctcaagcgatcctcctgcctaggcttcccaaattgctgggattacaggcatgagccataatgcctggcctctgctagttctgtattctctagagttgtctttactttgtgctagcgtgtccctcattgtgctaatcctctgtaaaaattaataccttttttctcttttcgagatggagtttcactcttgttgcccaggctgggagtgcaatggcgctatctcggctcagcgcaactccactgccgggttcaagcgattctcctgcctcaagctccgagtagttgggattacaggcatgtgccacatgcccaagtattggatgcaagtaaagatgg

SEQ ID NO: 610522 - DNA, 613 bp, Homo sapiens
  misc_feature (39)..(39): n is a, c, g, or t
  misc_feature (81)..(81): n is a, c, g, or t
  misc_feature (96)..(96): n is a, c, g, or t
  misc_feature (115)..(115): n is a, c, g, or t
  misc_feature (133)..(133): n is a, c, g, or t
  misc_feature (135)..(135): n is a, c, g, or t
  misc_feature (146)..(146): n is a, c, g, or t
  misc_feature (158)..(158): n is a, c, g, or t
  misc_feature (161)..(161): n is a, c, g, or t
  misc_feature (165)..(165): n is a, c, g, or t
  misc_feature (180)..(180): n is a, c, g, or t
  misc_feature (188)..(188): n is a, c, g, or t
  misc_feature (190)..(190): n is a, c, g, or t
  misc_feature (192)..(192): n is a, c, g, or t
  misc_feature (222)..(222): n is a, c, g, or t
  misc_feature (226)..(226): n is a, c, g, or t
  misc_feature (243)..(243): n is a, c, g, or t
  misc_feature (252)..(252): n is a, c, g, or t
  misc_feature (258)..(258): n is a, c, g, or t
  misc_feature (262)..(262): n is a, c, g, or t
  misc_feature (264)..(264): n is a, c, g, or t
  misc_feature (271)..(271): n is a, c, g, or t
  misc_feature (273)..(274): n is a, c, g, or t
  misc_feature (296)..(296): n is a, c, g, or t
  misc_feature (324)..(324): n is a, c, g, or t
  misc_feature (348)..(348): n is a, c, g, or t
  misc_feature (357)..(357): n is a, c, g, or t
  misc_feature (362)..(362): n is a, c, g, or t
  misc_feature (370)..(370): n is a, c, g, or t
  misc_feature (372)..(373): n is a, c, g, or t
  misc_feature (385)..(385): n is a, c, g, or t
  misc_feature (387)..(387): n is a, c, g, or t
  misc_feature (397)..(397): n is a, c, g, or t
  misc_feature (405)..(405): n is a, c, g, or t
  misc_feature (407)..(408): n is a, c, g, or t
  misc_feature (412)..(412): n is a, c, g, or t
  misc_feature (415)..(415): n is a, c, g, or t
  misc_feature (422)..(422): n is a, c, g, or t
  misc_feature (425)..(425): n is a, c, g, or t
  misc_feature (459)..(459): n is a, c, g, or t
  misc_feature (465)..(465): n is a, c, g, or t
  misc_feature (472)..(472): n is a, c, g, or t
  misc_feature (488)..(488): n is a, c, g, or t
  misc_feature (497)..(497): n is a, c, g, or t
  misc_feature (509)..(509): n is a, c, g, or t
  misc_feature (516)..(516): n is a, c, g, or t
  misc_feature (519)..(519): n is a, c, g, or t
  misc_feature (530)..(530): n is a, c, g, or t
  misc_feature (546)..(546): n is a, c, g, or t
aaactcattcaaaggatgttattttatcattccattttngaaggtgtgattggttgagcaacgtgtcgagagagcccagcntccagtgtccctcanttgaccctccgcaggtggngaaagctctgcacggtcntntccatagcatnatccatggtcantantggntggtagcccatggcntttttggntntntcgcagctgtagtagtggaatgtgccagcnagtncgacccgcatgggtgtnaaggtgggntgcagntggntnacaggantnntcaccatcaccagcagggatanttggagggccaggtagtaggccacccantaggggatgtggtatttggtggcntcataattnaggcntgttaggntnngagataggaatntncagaaagggntgggttcntnntttnttnttttaanttntttctcacccagtgtcgagtcttgggagatctgntcttcngccaggntgtgtccatggaccangttttccanaaaggtgaagtncaccaanttnttcccatttcnaattacgaatttcatnttgccgttcctggctgcctcgatgaggatgggtaccaactgcgggtcccttgggccgaaaatgccat

SEQ ID NO: 610523 - DNA, 265 bp, Homo sapiens
caagtgatcctcctgccatggctcccaaactgctgggataacaggcatgagccaccatgcctggccaagaaaaaaaaaatattgaaagcagtaagagagagacaatggaaatgacagtagatttcatatcagaaaccatggaagccagaaagaagtggcagaacatcatcctttttttttttctgagacagtctcacggtcacccaggtgggagtgcaggggcacaatcacagctcacggcagctctgaggatcacttgagccca

SEQ ID NO: 610524 - DNA, 316 bp, Homo sapiens
tttggctatggcaattaattatttagggaagggttctagatagcttcgcacctccctattagtggaaaatgacctttaatcactcaacctaggattggccaaccaaatttgtaaccagaaccaacataagatacggaatgtgggggattctctacataaaggctttatgaattcaagaaatgcattgttttaatattggaaacttcttgaggggaataaccctgacaattgccactttattaatataataactaatattccttacttactctggtgatttaacgaaaagaatcgcactgtttaaaatttcgattat

SEQ ID NO: 610525 - DNA, 959 bp, Homo sapiens
attaatcccctggccaacccgtcatctactctaccatctttgcaggcacactcatcacagcgctaagctcgcactgattccttacctgagtagggctagaaataaacatgctagctttgattccagttctaaccaaaaaaataaaccctcgtgccacagaagctgcatcaagtatttcctcacgcacagcaaccgcatccatagatccttgctaggatagctatcctcgttcaactaatatactctccggacacgtgagaccataggccaatactaccaatcaatactcagtcataaaataatcataatggctatggcgataaacactaggaatagcgcccctttcacttcggagtcccagaggttacccgaaggcacccctcttgacaatccgggccgtgcttcttctcaacagtgacagaaaaactaggccccatctcaatcgatataccaaatctctccctcactgaaaggtaagccttctcctcaatctctcgagatccttattccatcatagcaggcacgcgcacgtggattaaaaccaaacccagctacgcaacaaacttagcatactcgctcgaattacccgactaggatgattcctcagcagctctcccgtaaaacgctaacataggcatcctcatccactatccataattcctaactactacgcgtacgtactatccactacgtcgcgacaggacctatatttctgcactgggacagctgccgatacgcctatctcactcttcttgggcggccccaacggcttgcccagggcctcccgccaccctccccatccctcccccacgccccccccacctccgccgtcccccccccctctcgacagcgtgcccccccccccctctcttctcaaaccccccggcgcgtctgcgtctcccccctctccccccccccccccccccccccgcccccccccccccccccccccccccccc

SEQ ID NO: 610526 - DNA, 231 bp, Homo sapiens
ggagcagaatgaacaaagccctggtagaaggagggctgtccagaagagaggtgaggctgaagtgcagggagcgggaggtagtggagatgtggagagaggccacattacagagggctctactgtaggccaaataaaggaatttttttttttttttttttttttgggaaagggagtctctcactcgtgtcccgggcgggagtgcgggggggatgactgggggctcagggaacc

SEQ ID NO: 610527 - DNA, 312 bp, Homo sapiens
  misc_feature (18)..(18): n is a, c, g, or t
  misc_feature (175)..(175): n is a, c, g, or t
  misc_feature (278)..(278): n is a, c, g, or t
tgaattaagcgatgaccnaaacgaagtggctcaccgtgaaacactagatattttgaataaagcatctggttttttacgtcaggagttgagtcgtcggattaaaacgcgcatcacgcctcgcttgcgtttccattacgataaaactaatgcatatggtaactatatgtttggtctnatcgaaaaagcggtacaagatttaccgaaacgtgagtcagatgacgaagagtaatgaaaactcaaaataaaaaagccaccttggggtggcttttttatgtgtncaagtttttattcttgaggaggttccatgggtgg

SEQ ID NO: 610528 - DNA, 550 bp, Homo sapiens
ccagttccccgctgcccgctccctgctgagcatcacggaggaccatcagcgcttcaaggtggcggggtcccctgccctgcagcccgtgaagagcttccctaccccggcgctcagcatccccgcgatgggccgtcgtgtactgggcacagctgctcactggccacgtgcttcctcttgggcccggcttctgggctgcccactggagagagagccacctgacccacaactggagccacgcacttggtgcccctcgttctcttcgctcggggttgtcacactctgtgtttcttttttcttgatgattatctgaagggaaaagggaggccaagagtgaggaagggcctggcctgagggctcctacagtgagcacgggtgccccgattgtgccccccatcggcctctccccaggtccgagccctttccacccacctggaactacaagctggcgccttccttggcatgcacctggcccggactggcaggtgagggtcgaggagacaggcctgtgtgccctaaccttgatcacaccagttccctttcaaaagctcga

SEQ ID NO: 610529 - DNA, 354 bp, Homo sapiens
cctcaaactgcgcccggatctcctcctctatcacgctcaagtcgaacaggattcttcttctcagatcaatgtctgtggaagactagtcagatcccccagaggggtctagacggaagccgcacgatgccccggatgcatacaccaaaataccatgatttaccgtcctgcccagaaggactagtcgctcaggatcaagatgccgctccagcacctcagcctcagcgctttgtgagcgtgttacgagcttgcctagcccatgagattgcacggaccctcataagatcccatagacaccgtaaccttccatgggcatgttacaggctgaacgcccagccgcacgcccggactactgta

SEQ ID NO: 610530 - DNA, 172 bp, Homo sapiens
  misc_feature (79)..(79): n is a, c, g, or t
ggtgcgcggtaaggtgcgagctgtgctgaagctcttgccgcagtcgaggcagtggtaggcttctcgcctgtgtgtgtcnggttgtgcgcgatgaggttggaacgctgcttgaagcacttccgcactcgggcacggataggcttgaccccagtgtgggtcgctggtgggtact

SEQ ID NO: 610531 - DNA, 330 bp, Homo sapiens
  misc_feature (6)..(7): n is a, c, g, or t
accccnngggggtgtggggaggggggggtttttccttggcccccagggggattcaccctttttttccttttgcaaaggttggggggggccccccttttaaaaaggggggtcccccgggggggggggcccgtctttttttcccccttttgttttttcccccccaaaaaaaaaaaagggggttggggggggttttttccggggggggccgggggttttttcccccccccccgggttgggggaaggggggaattattctctttttttgttttttttcccccccccttaaattcccttttttttaaaaggggggtaagcccccttttttttcca

SEQ ID NO: 610532 - DNA, 112 bp, Homo sapiens
cctgtaatctcccccgttctccggggggctgagatcgccgcgaggatacttgggcccccgggtttgagacccgcccgggccaaaatgcgggacccccttttcccccaaaaaa

SEQ ID NO: 610533 - DNA, 479 bp, Homo sapiens
actcatcctgctacgtgtaaaagactttccttgcccgcaccgaagctgtctggtgcctctgtgaaacatcaaatgactatatgtcacatcacataagccccttaattttgttctctttcaatgtttactttggatgttctaggtcctttgcatttccatatacgtttaatttatttatttatttgaggcaaagtctcactctgttgcccaggcaggcttgcagtgccatgatctatggctcactgcaacctccacctccgggttcaagtgattctcatgcctcagcctcccaagtagctgggattacaggtgtgtgccaccatgtctagctaatttttgtatttttagtagagacagggtttcaccatgttggccaggatggtctcgatctcttgaccttgtgatctgcccgcctcgggctcccaaaatgctgggattacaggcatgagccactgtgccttggtgagtacagtatatct

SEQ ID NO: 610534 - DNA, 283 bp, Homo sapiens
gggaaaaaggtaacattaaaaaacaatcaggattgagaaaggatatgggtacatatgaagattgttttgttttgtttttgagactgagtctcgctatatcacccaagctggagtgcagtggcacaatctcggctcaatgcaacctctgcctcctgggttcaagcgattcttgtgcttcagcctcctgagttagctgggattataggtgcccgccaccacgcccagctcatttttctatttttactagagacggtgtttcaccatgttggccaggctggtctgg

SEQ ID NO: 610535 - DNA, 139 bp, Homo sapiens
tcgactacactaccagtggtgccagcgccctttgaatagcacgacgcgggttgatagtgaactgcacaccactctctttaagttctcgcgacgcccaatggaagttgcgaggggtcaaatgcgcctcattgacccatat

SEQ ID NO: 610536 - DNA, 168 bp, Homo sapiens
ggagttcgagaccagccttcgccaacatggcgaaatcccgtctctactaaaataagaacattagccaggtgtggtggcacatacctgtagtctcagcctcccaacgtgctaagcatctcaggcgtgagcacctgccacctggcccgaaaccagctttctcatccaagc

SEQ ID NO: 610537 - DNA, 1528 bp, Homo sapiens
  misc_feature (446)..(446): n is a, c, g, or t
  misc_feature (450)..(450): n is a, c, g, or t
  misc_feature (1268)..(1268): n is a, c, g, or t
  misc_feature (1528)..(1528): n is a, c, g, or t
ggaggccatgggtggttggctggacatatgcaggcttagtggagcgccagtagagtccagtggtggatcatgaaggtcgaacagattgagtaccatcgctggtctcaacgatgggtggaacacccgcgatcatcgtagcgtagaacaaattaaaaaacaaagggggcaggctctgccatctctcacaggtattccactctcgtaggtgtgcccaaagacagtatacgagtaatcactcactagagttctatctctgagttcaacaaagggtggatccgcataatagcgtgagagatggaagtatatatatatatggcgttatggtacacacgtgcggcacggtgcgcaatttgtactgatagcgacttggcgtgaccctgggtcgataaagacgtgggttgaaggcgatgaggagaacactgtcatggggatgagaggtgatagcntatntacacgtatgcgtgtgtggcgtgcgtgcacacgataaagtgtgggattcggaaaactaactgttaaagagggagtaaccttttagaaggagactccataaaggggtgtaaacatcatatttaaacacgcgttgttacaaggcatgggtactaaatgtgcgctggtttgaatgaaacgtacctttctgtggacagattatttgcactggtgtgcgtgcgctgcgggggacgacgttttaataggggtctatgggcgtgtgacgctcattcgaacttgtacacatgagagcaccaaattaatcttttgaaatttagcaacgcagggaaggacgactataggcggttctgggtaattacaaccccacgttccttcccttggggttggggggccaacgggtgggcgccattcttcccaagggaaaacccgaaggttcgaagcccccttccgcttggaagcgggacaagttccaagcgcctttaaaagcaagccaagcaagccaaacaagggggttaaccttccgggttccccctacaaaccacaggttggcgcccaaagaaaccttgtgcggaaacacttgtgcgcctattgtggtagaaacaccacgggtgggcacggaacacttctgtgttccagagcccattcggtccgagttaaccaaaaaccagagcaacccccaaaccggaaggaaaagagcccacatttcccaaactggtggtgtttccccagtggtttggccggaatattaaccaggcccaaggttgtgtacaggacacacggttccacagggccaaacaagtattaaagacaaccagtgttangaaatttgcaggattcttccaattaacttgggaaagaagacaggtccccggtatcaacgttggaagaagttaggtagtgaagagtaaattgcgcaaagagaagggagcgacgacttatcaacggcttctggaaacagggggaccgtattagaaaaaccaaatatagcagagggggaacaacacgcgcttacttgaaacagggaggtaaacatcatggggaaaggagacagagagagaaaacccaatcaggtggggtaccn

SEQ ID NO: 610538 - DNA, 1152 bp, Homo sapiens
cgtgacgcgtgggggagttccgcacgtcacagtgccgagggcgcggccggggctgcgtgtggcactgagaaggtgcagctgcttgcacaatggagcagacggtcagcgagactgttggtgtgccctggctggagtaggccgtgctgcttcctgcgggcttccacctaaggtggctggagctgctggagaagtacaatgggccctagcccgtgttatccctggctggtggctgctgggcgcctatcacctgttgccagtcactagcaatggccgtcgtgtcccaggctgtggcagggaagaggtggatggccccagtgttgccgtgggtgggcagagcggccggaagcctcgagagctgcctgctggacctgcgctgactccttttgcaacagtcaagctgcaacccaagcgaaggccgtgacacggtgcctatccggtggaaagcacgcacgtcagcatcaacccgtgtgcctgccagcgtgcactcgaacaacaactttgtggcccgggaagcccgggaatcctgaacctgtccttgacctttcccgaatttcacttcttcttgccccgagaaggcccactacaacaggtcccccccgtaaagggggctgggaacaagcaccactcactgcaccggctgggaaaggggaccctggacggcggacacccaaggtgccttccaataaatggcagttccacaatgcggaagcgccgcaccctcgagatttaacccttgaagcgggcatctgcgtgaagacccccacgacccgtgggtttataccaaatttcgaaaagtacggaatgttccaaaattacacgacacttttacttcgagggcagaacagggtgaagcccccaactttaatgccaataccccagagtcgaaggcgcgtagtaccgggtgaccccccgatgtcggaatcatgcaaggaagctgtttccggggtgccacccgttgccagtgatctgtaggtgggaagtccttaaaccttaaccagttccggggggacgttcccgaatggtctgtgcccgtgtaagatggggcaaaccgctccagtggatcttgtcgaaaggcccggtgggtaagggagctttagtccacgttcaacctcccttacgactcgagtgtacactcgacaagaacggacactt

SEQ ID NO: 610539 - DNA, 434 bp, Homo sapiens
atgcatagaaccttactagtcagcgaatatgcattcagtgagctacacacgtgcagtgtctcagacagcagtggcctcgcgattagcacagaatgaacatctgagtacgggaatggtgttgagtgagttcacatggcagtcatgcgaatatcaggctctcagcactttgctgtgaaatgcgaatcaagacagcagtcgtgattggtgagaaacccttggcgtctagcttttccctctagagggcgctctgaccccgcaagataaaagcctagagttgcagcttgcagggggctccaaagaagataccagaaggtaccagtgtaaacattcagaacatgcccagagaagggcagcagccgtctgctacccaggaagatagactgcgaagtgccaatcaggtaaaggacaaaaggtcactccgtttctctatgagg

SEQ ID NO: 610540 - DNA, 235 bp, Homo sapiens
cctgatgcgcgcgcggctgtgtgcaggttgtcggctcttccaccagcactgtgtgttgtggtgctgcgcagggcaccactgtggtttcatgttgagcctgggcttgctgctgtcgcctgtgtggtcgcttcctcactgcgtgcctggctgtgtgtggtgcttggcatgtgtgccacttgttgacgtgcgtcgcacctgtgttggctaccgggcgtgtgtgtggcttcattccccg

SEQ ID NO: 610541 - DNA, 199 bp, Homo sapiens
gttaccgtggtacttacatttcacagtgccctggggagggacatttgctgctgcagtgggtggctctatatcttcaagagaaccgtattccaagcactacggacatgatacatcagcagaaaatgatggcattatgtgtacaacctgaattggagctgtaggaagagaagcgtgcgatagcagtatggaaggatgggga

SEQ ID NO: 610542 - DNA, 849 bp, Homo sapiens
ggcactgcactgtgccccgtgtgccagccgtcacccctccccagagtcactgatcactggctcccgtggacctcgggaggatggaagagaagctgaagaaaaccaagatcatctttgtggtgggtgggcctggctcatgggaatggcagccagttgtgagaagatcgtgcaggaagtatggctacacccacctctccaccgagtggacctcctgcgtgtcctgagtgtcaagctcacggctcgtgccacgggcgcaagaatgctgtcggaaatcactggagaacgtgggcatgctggttccactggatgacagtgtttggacatgctccgagtgatgccatggctggccaaatgtcaagtacttccacaagtgcttcctgatatgatggctacccgcgggcaggtgcatgcgaaggatgaacggagtttgacgcgacggattgtacagccacactgctgctgtatgtggacgcacgtgtcctgttagaccagtgacccagtggctcgttgaaacgttggagagaccagcgggcgtgtggactgacaatgaggagaccatcaaaaagcgggtggagaactattacaaggccacagaacccgttcatcgccttcgtatgagaaactgtggcacttgttgcgccatagtcaacgactggagggctccgtggacaggtgtcttctcccaggtctgcacccagcttggacgccctaaagtagcaacgctggagccgatttccgcaggtcaagccgggatcctaccccggtctgattcgaggtcctcctggcttgaggcgcaagcgcggtacgaccactgacctgctgagcacggacgaaggaagccgtatatcc

SEQ ID NO: 610543 - DNA, 468 bp, Homo sapiens
ggatcttctcgagagtgtgcaatactaagagcatgcgcactgtgacccttaacctaacctatgctttatgataaaatagatacatatttatatttgtactattcagaaaacagcatatgtatccattccttgggggttttcttgtaaacaacataatacaatatccagttagtactgaggtgtttttgagacaaggtcttgctccatcactcaggctggagtgcagtagagtgatcacagctcactctagccttgacctctgggactcaagtgatcctcctacctctgcctcccaagtagctgggatcacaggtgcatgccaccaagcctagctaactttttttaacatggggtctcactatattgcccaggccagagtgcagtggtgaacatagctcactgcagcctcaaattcctgagctcaagtgaccctctcacctcagcctcctaagtagctaagactacatg

SEQ ID NO: 610544 - DNA, 238 bp, Homo sapiens
cgtagacgtggcaaatgctagcgagaatagggtagggcgagttggctcacgtgtggctcttccccagagggctgggtagacccggtccaaaccatcgggagtgtgtagaattcccgaattcggtttctcttcactgtctggcaagccaggcaccagcttatacacgaggtcctgcatgagccggtccagtttgaggttgagcagtggctgtgtctcgtgtagacaatggagagccgag

SEQ ID NO: 610545 - DNA, 433 bp, Homo sapiens
taaagtgccatcccacagggtctggcaaagacagaataaagtggggctttcaggccctacactgggagctccccatagcatatcagccctttttgcctatcacattaatactggggttttattctccttaccataaaatgaagctcctctattttttatactgatggaaagcaatatatttatggtttctttttttcattgctatagctctgttttgtggcattttttttttaccttaagaaaatagtttttacactttttccttttaaatgttttttgggtcagatttcacctatcattcaaatatttcacaatctgttgtctgatcctttcattcaacctattatccatacctccctgttttgcaggacctgaagaatttctcaggtgcattaaagcaatacaaacaaaataaactaatgttaactgcaaa

SEQ ID NO: 610546 - DNA, 144 bp, Homo sapiens
cagcaacagaaatagtcatctaatcccatgaattaccaaataagaaaatactgaggccaaagtgataaaatgacacggtccgacaacgagatatacaggaagagctcggactagaagaacccctatttcctgacgtcaagcata

SEQ ID NO: 610547 - DNA, 572 bp, Homo sapiens
tagaatgagcatgccagtgttgcttggacagtgacggttagagtgacttgctgatccagtgcacatattgggctgttgaaggtcagtttgtgtgactaaaccagcccttgcccatagccgaggttaatgtgtccatgttcctgacacattcttggatctataaaatgaactgcccctcagggtcaatagcgtgtgaggagtttacatccaatccttaagatttggtacacaacagatggtgagctactagcgcttattattttgtgagctgatcttttggttctatgggcgattaacagtttaatctgcgatacaaagatattttctagtgtccaaagagctgatggtggttggactagcctctaaaatataaaggcgatatagaggcgatttgggggaaatttctcggccaactattaccggtgggggacaagcaggtataacaccgcaaaagaacgttgtttttatctacatttatgtgtttgcactaatgcgtttcagaggcgggggtgcaagcttaaccgcattctcggtttcttggttggttccgggggcttaataagaagatttaa

SEQ ID NO: 610548 - DNA, 494 bp, Homo sapiens
agtagcggaccccttcccaagtgagatgaacaggtactcagttggaaatacagactcacccgcccttctgcattgagtcttgcttgcaagtgtgtaaacctggagctgtacctatattggtcatcttgcctcttttgttacttttaatcagagcctctcctagatgctgccatggtagtttggagcctccactgagtccctactttgctgtctgtatccttttgtactcagagtggtctaggacttatgactcttaggatatttagctcagaggtgtcaaatattcttaaaaggagccagagcttttagctatactatttaagattctgtgggtaaacaacagcataataagagggttcttaagattgagaatgactagtaataggcttctaatgaacacatgaaagacctgtagcctttgtaagtagggaaatccctatagcaatctctagtaatgcttctcttttattcctgatattagtaatttatgacct

SEQ ID NO: 610549 - DNA, 907 bp, Homo sapiens
ccccaccccgcccaccacggctatgtactacagcctacgtgtttaactgctggaacaggctgttcggctgacccgccctggtgcattcgggtgactacgaacaccaactgaagctctaggactagtctggccgttctgcgctcacgccgaagtgcacagggtggtcgcggaccaccctggttccgaagagtacgaggtaggtggtagcccattcatcttggttattagatactggccgtcgtcaacaagtgtggcaggtgcatgaaacaagtggagtgtgcaattgcaatgactgtcaacagacaagcgggatgtactactaccgcctggccaaggagaatggctggctgtgctcgcagcgccttcaaactgctacaactggataaggaattccaactcttccaaggcgtgacacgggcagttgacctgtgtgcagccccaggcagctggagccaggtgctgagccagaagatcgggggccaacgggtccggccacgtggtggcatgtggacctgcaggcatatggctccacataccaggtgtggtacagatccagggggacatcaccacagatgtccacatgccaagggagatcatccagcactttaagggctgccctgcggaccatagtggtagtgtgacggggctcctgatgtaacccggtctccatgatcgttgatgagtataatgcaggcccagatacctccctagcttgctctgaacatttgctagcacaattttccttgaaagccagggggcttgcttggttggccccaagaatattccgaaggccgggattgtgacggctccttctaaagggcagctgcagggtcatctctcccaacgtggtatgttgccaagcccaggagcagccggaaatcctgcatcgaggcctcggtggctggag

SEQ ID NO: 610550 - DNA, 982 bp, Homo sapiens
  misc_feature (353)..(353): n is a, c, g, or t
aaagccactccagcttactaccagacaagcttaggcaaagcatttagccaaataaagtataggcgactgagagggttgagacctggcgcaatacgatatagtaccgcacagggcaaagatgagaaaatgataaccaagcataatatagcaagggactaaccccctagtaccttctgcatcctgaatgtaactagaaatcaacttgcgtcaaggaggagccaaacacgctaacgaccccccgaataccagacccgagctaactaataacacgcttagaaagagcacacccgtctatgtaggcaaaatagtgggacagatatctaggtatgaggcgacaagacctaacgcgagcnctggtgatagcgtggttgtcgcaaacgatagaatcttctagttcacactctccaaatttgcccaccagtaaacccgtcgtaaagtccaccctctggtgaacgtttaaactgttctaggtccgagaggcagtgaaacaggctctttctgtgtacagcatagtgataaatacaacgcatttgctagtaagaagaaggttaagagaaagaattataagccatcgcacattcagtaggagtccatagattagtcccgtcacccgaccgtctcatggaaaagcgttcgaagggctcaacaaccagatacctaaggagaatcccaaatcatataatcttgaactcctcacacaccaagtgggaccaatctatcagtccttatgagaagaactaatgtccagtatagaggtaacatgaaaggcattctcctcccgaataaagcctgcgtccagattgaagagattgatctgacaattcaaaacgccaatatctaagaatcaaccaacaagtcattgcttacccctcacggtgaagcccagcccaagattgctcattaaggccaggttggcaaaagtaaaacgggaccggggaaactttcccggcgggtcccaaaaaaaccccctgatcccgggtaa

SEQ ID NO: 610551 - DNA, 530 bp, Homo sapiens
ctatctgtgtcggggtttgcacttgaccttctgggctcatatgatccttccaccccggcctcccacagtggttggcgttacaggcatgagccactgcagctgtcccatgagtgggttttgatctgggacgggatgtttctggttggtagtccctgataggattcttgtccacgtgattttcttacaaacgtgctctcagaactagattatgggaagtatgaagggcgaagggtaggaacccaatcatggatgtgacctcatgcaatagccctagaactagtcaattatgcctcatggttgaaggttagagagcttaacctcagagttactgattaatttctccacttggcagtcactggttaaagtcagttgggaaagtgaacagctctattaacctaaggatggttttttaagaagagcctcaggtgctggtgtgggtctttgaaagcacatcacaggtaatctgagcacacagaaacagcaagaactcccagaggatctgggtggagcacctacattgtatttatgta

SEQ ID NO: 610552 - DNA, 180 bp, Homo sapiens
gaaagtacaaaaatttgctgggtatatggcatgcacgtgtagtccccgctatccaggaggctaaggtgggaggaaaacctagggcctggggaggtcgaggctacagcgagccattatcatgccactgcactccagcctggataacagaataaataaaaaagaaaagattaaaaaaaaaaa

SEQ ID NO: 610553 - DNA, 655 bp, Homo sapiens
ggggacggatcggccggagccggggctgaggagccgacgccccacgaggggcagggaggagccaccgggccgccctcgccactacatcccggtggctgatgccgacccactccccgctccacccgcgccagaagcgcctcgcgcgccgcgaggccccatcgttgtccccggacccgcgactccggagagctagggctgcatggagctcgggagtccatcaactgcctccgcccgggagagccgatcagctccctcccctccagtgccggcggtccgggccagactgcagggccaagagccggggccgacacggcctcgggcgcagggcctgggcggcctggcgctaggctgttcgggtggctgaaagagcgcagcctgggccgcgggctgttcgtggacccggcgcgggacaatttgcgcacacatgactagcctctacggttaccatcacaacccgcggaactcggtggtacctcagcaccgtcaccacgggcgccgtcattcaaggctcgagtactcgacccgacgggtcaagtgctgacagattgcgttggtgaacaaagctgagagttcttgcatttagttgaacgctatatctatcaagagcacataaaaaacacatttctgaagctcatgaaggactgtgtaaattaat

SEQ ID NO: 610554 - DNA, 190 bp, Homo sapiens
gcatcccagtcattgccaaggacccagagttatcctggaggggatagtgtcaacctgctcaggatccctacagctggggataggcccttccctgaaaggggataattgtcacaggcagggttttgttcataaggaggaaagagggaatggacagggaactattaaagcaagaaagtgtactagaaagtta

SEQ ID NO: 610555 - DNA, 195 bp, Homo sapiens
  misc_feature (15)..(15): n is a, c, g, or t
cctcgccaggtgttntagtagatgatatactcaaagccacctcttattcctttctcaccccattttttttccttcgaaacaccccaagacttcatcctattggtcatctcagccaggcacagtggctcacgcctgtaatcccagcactggcgaggctaggacactggcgaggctaggacactggcgaggctagga

SEQ ID NO: 610556 - DNA, 846 bp, Homo sapiens
gtctgtactataatgagtccggaggaaaacaactgcaacatactctgtggataaagctgtcttatatgaacatatgtcaactatccatgcgctgatgagccacagtaccatcacttgtgcaagtttcctaaaactacggagccccagttattactctagtggtcattagtaagagcctcaggcgcagattctactagcatcttctgtcttttcctatatccctgccatcactctgcatacttgtctgtgcagcatttcgtcattacgtactccttgatctgcgaaggccaagctagaactcactgtcatatggcacgaagggacgatccgaagagcccagtatctaggaggttagggtggatttcgcttctgccagatgctttgtgtcctgtcttccttcctcctcatatttctgtttctcatttgtgttcagttttgtgcagcattgctagcactgcttttgtgaccagaaaaggccataacatggtccaggatcatcattcttctgactctagatgggacacttgacagtgacttgaaacatttgcatattcaggaatgcatgagatttcaagagagcctacagtatgaaatcattttcacaaaataagcagcttgcttctgaaatgctgtctttcccagtagctactcacctgcctctggtggctgggattcagatgccacaaaaactgtcagtatctatagaccaggtctgtgaccactcctctctcctctgtgctcagatgaggaggcagtaaatgaagtttacaggctaagccacaatacctaattcatagtcacccaagtacacctgtaagatattacttgatactaaaatagttctca

SEQ ID NO: 610557 - DNA, 624 bp, Homo sapiens
atggcagaggtggggggcgtcttcgcctccttggactgggatctacacggcttctcctcgtctctggggaacgtgcccttagctgactccccaggtttcctgaacgagcgcctgggccaaatcgaggggaagctgcagcgtggctcacccacagacttcgcccacctgaaggggatcctgcggcgccgccagctctactgccgcaccggcttccacctggagatcttccccaacggcacggtgcacgggacccgccacgaccacagccgcttcggaatcctggagtttatcagcctggctgtggggctgatcagcatccggggagtggactctggcctgtacctaggaatgaatgagcgaggagaactctatgggtcgaagaaactcacacgtgaatgtgttttccgggaacagtttgaagaaaactggtacaacacctatgcctcaaccttgtacaaacattcggactcagagagacagtattacgtggccctgaacaaagatggctcaccccgggagggatacaggactaaacgacaccagaaattcactcactttttacccaggcctgtagatccttctaagttgccctccatgtccagagacctctttcactataggtaa

SEQ ID NO: 610558 - DNA, 117 bp, Homo sapiens
gactttgctcggtgacccttctggtgccacatccctcatgcctgcagcagaaggtggggggctcaggccctgacaggtaattcgtattttagagaagagtcttcttcccccaggacg

SEQ ID NO: 610559 - DNA, 162 bp, Homo sapiens
gaagctacaggagatccttcaagatagatcctggataatgtggccattgtagagaggttcgagatgtggcccttgatgtgagctgagaatgaggtccacttctatcttcagaatagtcttgaccatggatgcccgtcaggcaagtgagtgtacctcagacat

SEQ ID NO: 610560 - DNA, 96 bp, Homo sapiens
  misc_feature (13)..(14): n is a, c, g, or t
  misc_feature (37)..(37): n is a, c, g, or t
gggaagcactagnnaagggagcaacagatgcctgcanctgagggggtgacaagataaagccaggctctagagctgctttggatcatgaaccatttt

SEQ ID NO: 610561 - DNA, 163 bp, Homo sapiens
atacccgttgcggcacgtactggaatcaggggatactgtcgaagtcatcagaacagggggtttgaagtaggggcgctgtggtgacaaaatatgttgtgtagagttcatgtgagagtgcgtcatatgttattcctaggaagatatgtagtggggtaccgagctc

SEQ ID NO: 610562 - DNA, 437 bp, Homo sapiens
tcggtcgagggtgtgtattggcgctcctcctggtgtatctctattatagctctttttagtatcttgctcttgcccgtttcccttcctgttgttgtggtattatttgcttctccaattgactctctttcgtcatttgttttttatttctgggtatactagtctgtgtgcctatgtccttgtgtctgtctgtctctatgtgtatttattcattgatatatacttctatatatctgtatgtctgtatatattgttactcatatatctataaatattgtttgttttgatttgtttctcataatatcgtgcgttcttaatcgatctttttgtttgtgtattcatatatatattgtatgagatagatagtgagtgatagagatagagagagagatagagagagagagagagagagagagagagagagagagagagagagagag

SEQ ID NO: 610563 - DNA, 412 bp, Homo sapiens
  misc_feature (75)..(75): n is a, c, g, or t
ctcctcctcttcggcaaatactactcctcctctccgccagatcctactcctcctctccgccagatactactccanctctccaccagatctactcctcctctccgccagatcctactcctctccaccagatcctactcctcctctccgccagatcctactcctcctctccgccagatcctactcctcgtctccgccagatgctcctcctcgtctccgccagatcctcctcgtctccgcgagatgctcctcctctctgcgagatgctcctcctctccaccggatgctcctcctctcctcgagatgctcctcctctcctcgagatgctcctcgtctccaccggctgctcctcgtctccgccggctgctcctcgtctccgccggatgctcctcctctctgccagacactactcctc

SEQ ID NO: 610564 - DNA, 135 bp, Homo sapiens
aggaatcaaatgctgtcagggtgaacacacagataaaagactcttattgaaacaacgaagagcgcaagacactgctcagcaacctgagtaagcccggagacctgagcaagccaggagacctgagcaagccacggc

SEQ ID NO: 610565 - DNA, 123 bp, Homo sapiens
cattcctcactgttgcatcccacagcagtggctccccaggcttaaggcattttccttgccctcctcccgcacatcccacatgctggtagcatgcatcactagactttcccaggtctactgtcc

SEQ ID NO: 610566 - DNA, 337 bp, Homo sapiens
  misc_feature (42)..(43): n is a, c, g, or t
cagcgccagctgcagcccctggcggcgcactctgcctcaccnntgagcctgggcgatggcaacaattcttccaaggatgatctcccactccacgaagctgcagggaacagccttttttcctacttccatgccagatggctagtgatgttttgatgttgacagcacggtcatcagtgaagaaggcaatcgcgatgcctttttcactcgggggaactttaggggcaagcgacacactggctgaattccagcgccaaccacaagttcaacgcgactaactgcctaaatgggtattatcactggaatttaggtaagaggctgctgggagagcaacccggca

SEQ ID NO: 610567 - DNA, 713 bp, Homo sapiens
gttatcgtcagttactgggcgtcgtgtttagtttacattaactggccgtcgtttcacagaagacagcagccctgatgatcagttcttcctaacagccatccggctcctgtgggagaggcagtgacagccccccagaggcagcggagagcactcggaggggccagcagtgatggcgtcctggctcaaggtcttcaactgccaccttttatgatgaaagtgtccttgaatgcagagcagtggtgggcagtgactgcacggcttcgtgaatatgcctgtcaaggcaccgagctgcaaactttaacatggagaattttacggccatgtgaattacttctccacttaaaaaaccttttatatatttgtgtggagaaaacaccacccttgtaaagagtggagtggagaagcattatccgcgggcgatacaagagatatcccccgcattattgtgggccgcgaaaccacctgtgcgaacgttaccccgtgtgcccgatcttctctgcgcgcaagacaaatataaactaatgtaccaccctataccagagggcgcaatacatcaaagtgagagaacgagaaagccaaaacatataaagagagggacattactctcctctctaaaaagacagtagaaaaaactcatccccaacataaagcgagcgacaagagacacaataggaaccaattagaaatgcggccccaccagtgcgaagacaaag

SEQ ID NO: 610568 - DNA, 856 bp, Homo sapiens
  misc_feature (453)..(454): n is a, c, g, or t
  misc_feature (456)..(456): n is a, c, g, or t
  misc_feature (462)..(463): n is a, c, g, or t
  misc_feature (467)..(468): n is a, c, g, or t
  misc_feature (470)..(471): n is a, c, g, or t
  misc_feature (473)..(473): n is a, c, g, or t
agaattccatgtccaaaaaaaaaaaagccttttaactttcgaatttttgtaaacattgaccaaggtggggccagattcagcgctgtgtggcacacctctacccttccctctagtttggttatcagttgacaaacattcaaccagtgatcctgtaatcttactgtccttcgtgacatctctatgtctcctcgccccatgagtaacaagtgaaaacagtggagtaaaagacttggaaaaaaattggagaggtggagcaaagaaatctttccttggagcaaggaaaagcaagaattgaagaaaagttgctctactggtcagtagggttaagagattcaaaggtagtgtggaaataacctacaaagaaaccactggatccttaacacacattaaaaatgaggtgaataatggtagggaggattagttactttggtttgaaccattctgttgaactcnncnagttanngatnncnnanaaataatcatcagcttcttactctgtgccaggccttttacatgtgttcctcatgttaattccatgaaggcaaggtgccgcttgccaccatcttaatgatgcggggctaagtaaattgaagctaaataacttactcaggcaagtagtagagccagcaattcgaatccacaacaatttacttgggaacacaaactggtcaactactgtgctataactgtactttagcctgcataatatctgacagatctatacgcaacttgcgtggtcctgtcttctcgagggtgaaggagatactgcctgtgtactggatccccactcaattccgcagtgatatatgtaggtaatagctagtggaaaacggatagccatctgcagggccttcca

SEQ ID NO: 610569 - DNA, 400 bp, Homo sapiens
  misc_feature (29)..(29): n is a, c, g, or t
  misc_feature (62)..(62): n is a, c, g, or t
  misc_feature (78)..(78): n is a, c, g, or t
  misc_feature (116)..(116): n is a, c, g, or t
  misc_feature (141)..(141): n is a, c, g, or t
  misc_feature (159)..(159): n is a, c, g, or t
  misc_feature (162)..(162): n is a, c, g, or t
  misc_feature (178)..(178): n is a, c, g, or t
  misc_feature (264)..(264): n is a, c, g, or t
  misc_feature (384)..(384): n is a, c, g, or t
cccgcgtccgccccgcgtccgcttttttnggtttgtgctcatttcttccccggtctgttccnttctgtttttttgttnttgcttttgagtttttttatttttctcttgtgttgctnttttctttttttgtgtgtctgcttntgtttttttgccctcttnagncttttgacatcgattnttttttttggctgggttcctatgagcaatttcgctttctgttcccccttgtttttgtctctgtttccgccttttgcgcttttctgnggttgttgcgcctttgtgacatttgtgtagtgtctattttctctcagctttgcttgtcttgtgttgtttttttttctttcttgggatttttaacgcttcttttttctccgtttgttcttntgtttttcccctgggt

SEQ ID NO: 610570 - DNA, 218 bp, Homo sapiens
acttggaggcgtagtcattggtgtcagcacggtgacacgcagaagggcacagctggcgcgtggaggggctgactgacatcctgcaccttgatggtaaggtcatagagagtcccagcgctcacggtccaggttgcccatcacaatgagctgtggttgcttctcctcctggtcctctgccaactgaagcccaaatagatcctggacctcaggttcagcct

SEQ ID NO: 610571 - DNA, 410 bp, Homo sapiens
ggtactactatgcagtcggtggcacacgtattagccacttcacggcagttcagcattcattaactagcttcacttagagtatggtgatcccttcatgaacattaacctgtagtagctctctattctgacctgtacggacacctcataagctgcctcttgtatacttacttcatgtgccgaccattggtttgcccacgatttgggtcttacacccataggattatcgggaattgatgctgcaataactgttgctgctatcaagatgtggttattaatgccgtaatactctactcaggctttgatatcacctgaacacattgacccaacagcacactttagcgactttacggatagagctggatgccgaccggtgagtcgagtacacctcacaatgctttcggcggtccctg

SEQ ID NO: 610572 - DNA, 116 bp, Homo sapiens
gaaaacattactgaaattgtaaagtacttatggcatggaagctacggttaaatgcctgcgtatatggcttcaaaagtttaccagggaagtaatactgaatatgagaagtctaaagg

SEQ ID NO: 610573 - DNA, 219 bp, Homo sapiens
cccggggtccgatttttatgatttgaaaagccttcgttttgaagggaaaagtcttaatagtagaagacccccccataaacctgggggggataaagggaggccccccccccccccccccatttgaagaaccgggaaaaataaaatttagacaaaaaagggagggatggacccccccaaagggggtttcaagccacccccagggcccccatgattttttta

SEQ ID NO: 610574 - DNA, 134 bp, Homo sapiens
ggtcactcagcccatggggacagctgggaaatcgggactttgcgcatttggcccgggaggttttccccaaattgatagactgcctgccctgtaaagctggggagaccagtacagacagggcgacaaggggccgc

SEQ ID NO: 610575 - DNA, 348 bp, Homo sapiens
caattctgtcagcttccctgcagcttcccaagtccactgcttcaaccagttaggaaaaacaatttttaaaaaacatcttggcatccatcaaccagcattttcaagggcaagaaaacagcagcgcccaaggagctgtctgaggtgcttaaggttaatggctgtatttacatagccatcaattcactttacaaagaactgccccagtaggactgtgcagctccagcaggcagcccccgtcaggacagagcagacaggagtctctaaacaaggaggaaaatgcctgataaatcttaatgacatcgtcttgttttcattcacttacttatcaccttattttcagctcaagag

SEQ ID NO: 610576 - DNA, 329 bp, Homo sapiens
taaagaatgactacctagaggaatacgccacactgtatagcaactttatgtgatttgtgaggcctccccagccacctgtgatctgtgaactggccttttgttcttacatctcttaaataagttaatgtccatgctcttaattctggttttggatgagaaattatctatagctacttaaagcaattaggcctcatagtaccagtattggttaagaatagtacatcaccaaggcaggagaatcacttaagtccaggagtctgagtctgcagtgatctatgctaatacctccatactccagcctgggtgacagagtgagaccctgtctctca

SEQ ID NO: 610577 - DNA, 838 bp, Homo sapiens
  misc_feature (16)..(16): n is a, c, g, or t
  misc_feature (20)..(20): n is a, c, g, or t
  misc_feature (23)..(23): n is a, c, g, or t
  misc_feature (25)..(25): n is a, c, g, or t
  misc_feature (33)..(33): n is a, c, g, or t
gggggcggggtggggntccnctngntttttgtnttttttttcgttgttgtaatatttttatactttgttaaaaagaaagagataagcccaaaaggaagaaactgacctacatattaatgatttctgtacattcatcaggaagaattttcatgtcccaaataaagtctgtgattgattggtcatttttaaatcctaaaacatccgaagaactggaagatcctgaagagttatttatttttaaatataaagggctttaaagacatatcgacaaaccacgtcggcttccaacagaagggaacatcacccctctccaaaccccaccacacccaaccactctaacaaaccgaaaaaaaactctcgtacattacaaatttctccccccgccccccctgtttctcatgtttgactgtctttgatcttctccttttcacgcgcctacttccccccctcttcccacccctcactatacggctcttaacgtctcccgccgtctccacaaattttcttctccctttcccccccgatcccattcacaacccatttctattacctctcacattttccatattcttccttccatatcacttcttccctcctcttcccttttgctatgatttttatatattcctctcccgccccccccacccgcatatcatttttttttgtgagcacatattccttcccccgcaccccaatctctgacgctctcctgatctatttccatattttctatctccctgtccccatacttcccccacccccctctccccaatatttaattttttctattatcccaccccagtaagtggccacccggtaaccgccgcctcaccccacg

SEQ ID NO: 610578 - DNA, 140 bp, Homo sapiens
ctccttcctatctgaattcagatgacaaaagtacaaggccatccgtctcatttagtcatcatagcggtctggattcagataggaggacggatggccttgtacttttcatctggattcagataggagggggtaccgagctc

SEQ ID NO: 610579 - DNA, 266 bp, Homo sapiens
ccaagagctattatagctaaagatagctcttaacgagagtccagctatatgactgccctaaagccctatgtctgaagcacccagcgctgggtcgttagtacttgccgcagtactcttaagactaggcggctatggtataatacgcctcacactcattctcaaccccctgacacaacacatagcctaccccttccttgtactatccctatgaggcataattataacaagctccatctgcctacgacaaacagacaggtgcagcgtag

SEQ ID NO: 610580 - DNA, 299 bp, Homo sapiens
catctgcacaaatatttacgtgttcattctttattattttttttggagaccgtctagtctatgtcccccaggctggagtgcagggggaagtatctcaactcactccaatgtctggctttccaggctcaagcacttctctatgcctcagccccccgagcagccgggaccagaggtgtgtgccaccacgccgggttattttgcttggatatttatagataaacgactgagttttggccagtgccgggaccaggcgggctctcgaacctcgcgggccttcaaagcgattggccagtgcctca

SEQ ID NO: 610581 - DNA, 1968 bp, Homo sapiens
  misc_feature (592)..(592): n is a, c, g, or t
gagtaatatggcgcaagctccacaactctcttgtccatgccttagatggacttcatggcttgtataattactgaatacagctaagagttataggatagtgaagctgtactgttgtgggatcttgtccattcggggttcttctcatatggaatgctagagagaaacaggaacactgctctcacagtcaccgtcatgttgcatgaccatgatctactggtatatagcgacacttgtgccaaaatgacgtccttagcacacatgtgtaccacggggatactatcaaatgtgctaagtcattgtagagacttgcctcagctcttagaaagtgggttacaaaagtctatctggtctccctgttttgtgctgaagtcccggggtgtaggacgtgttgctgatactctgagatgtctgctacttgctgcgtaattctgcagctgtctgctgctctaaagagtagcagtgcactacgagggaacgtgttcccttcagacaattgggaacaacgtgtcctggctggagaactctcagaaggcgtgaccagagatcttggttaagtcccctgctactgtccctttctcactaggctttcacngaaggcttccgatcacgaagggtttacgaacctcatgtttcttcgtccgggccccggtgtgttccgtgtcgcggacacataaggtcccaaatcggcggtgtggggcggtcccctcaaaaagtgcggctaaggggccctgccacaggtgggcctaccacaccggattctccacgaggagaactcggatacaggtcagagcgatgacaggcgaccacggcgcgtacaagagagaagatgacacctcataaacagcgcggccacctactaatacaagcagtcttctaccttggtttctctctatctacgtctcacatcacattacacacaaacacaacaccaagacacgaccacacccaagaaagcacacacgtacacacaataacgcacacgacacacacacaccaacagtcacaccaccacaaccagcacaccgcgaagcatacaccacaccgacaagccacagtaccaacctacaacaccccaccaccaccacgctacacccaaaccacaccaacacacaccagacaacagcaccacccaacacgcaagagagggagagcacagccacgacaggcgcacaccgacaaagaagaaacagaaggcgagaaaagaaacagacgatgcacgatgcagcaagacacgacgagacaagaagacgacccacgagccacgacggacgacgaacgagaaagcgcaacgacggacaaccagaccacgacagagcagacaacgacgaaacagaacgagaagagcagaacagagacaacaacacaggcgcgaaagaagagaaagagaagagggacaggaagacgagagaaaaacaagacaaggagcagagcgcagaacgaaccagacgaaaagagacagacaccaccaaccagacagacacacacacagcgacacaacgcaaaacacagacgaagcgcaggcgacgacgcgcgcacgtcgccacacactgcagagcgcagccgaagagaacgcaaaacgacggcgagctgacaagagagcagacgacagagcagagcatgacgagcaccaagcacgcaccgggcgcaggcacaacgcacacacgaagacagagcaaaccagaaagacgacgaaagacgcagaggaacggaggaagcagagcaacgcaaaacgcagaacagagcccaggaacaggaagaggaagagaacacaagcgacacgagagcacgatgcaagacagagagagccagagagcaacggaacgagaaagaggaggagagcaaagagaagacacacgacgacaggcagagacagacaggaagagagaagacacaagcacggaagcagcgagcaccacagcaaggagcaaagaccacgaccagaccagcacgcacgcacagccacaagcc

SEQ ID NO: 610582 - DNA, 756 bp, Homo sapiens
  misc_feature (8)..(8): n is a, c, g, or t
  misc_feature (94)..(94): n is a, c, g, or t
  misc_feature (143)..(143): n is a, c, g, or t
  misc_feature (147)..(147): n is a, c, g, or t
  misc_feature (159)..(160): n is a, c, g, or t
  misc_feature (184)..(184): n is a, c, g, or t
  misc_feature (191)..(191): n is a, c, g, or t
  misc_feature (208)..(208): n is a, c, g, or t
  misc_feature (273)..(273): n is a, c, g, or t
  misc_feature (282)..(282): n is a, c, g, or t
  misc_feature (297)..(297): n is a, c, g, or t
  misc_feature (372)..(372): n is a, c, g, or t
  misc_feature (483)..(483): n is a, c, g, or t
  misc_feature (489)..(489): n is a, c, g, or t
  misc_feature (532)..(532): n is a, c, g, or t
  misc_feature (569)..(569): n is a, c, g, or t
  misc_feature (588)..(588): n is a, c, g, or t
  misc_feature (599)..(599): n is a, c, g, or t
  misc_feature (603)..(603): n is a, c, g, or t
  misc_feature (607)..(607): n is a, c, g, or t
  misc_feature (648)..(648): n is a, c, g, or t
  misc_feature (664)..(664): n is a, c, g, or t
  misc_feature (672)..(672): n is a, c, g, or t
  misc_feature (681)..(681): n is a, c, g, or t
  misc_feature (683)..(683): n is a, c, g, or t
  misc_feature (685)..(685): n is a, c, g, or t
  misc_feature (747)..(747): n is a, c, g, or t
gctgaganacacaacggcctccacaagctgccttctcagcagcctgcgcaaggccagtaggctagaatagaggagctaacaaacaaacaaacanaagcaaacagagtttctgtgccagcgaggcgtggggagtttggagaagntcanagttggcatgtnnaaatctgacaaaattaaaagtgtncatagtncattacatgcataaaanactaataataatcctgtttactacgtagacttcagcagggcaggtccagctccaccactgccctnctgccacancacatcaagtgccanggtttagagggtttttcgatatgttattgcttttagttctgtgaaagaggtgaacaaaatatagcagaacaaaantttccctttttaaaactaatgttacaaatcgtgtattatcacttgtatataaatagtatatgagctgatcattaagtaaggtgtataagtacaatgtattctaaaactgtnaagcgnaaaaaaaaaaaaacaaaaaaaaaaatccaagtttcctcctccnccactcacgctggtgatcactgttctctctgccagcngcgtggagttacgggaggngggaatcactntttnttcnaaaattctttaaactcaatttccgaaataattttcaccccnctaagcatgtaaatanaaaaaaanggatccttnananaaattaaaaaatcaatttgagctcatttcgaatacagaacaagtatggcacaaatggaagtnctgccacgt

SEQ ID NO: 610583 - DNA, 88 bp, Homo sapiens
ttgcgaccacccaggaaggatgcaggcgctcggcctgcgggggccggtccaagaggcaacgcggcccagagtctggtgccgcacaggc

SEQ ID NO: 610584 - DNA, 1455 bp, Homo sapiens
  misc_feature (1293)..(1293): n is a, c, g, or t
  misc_feature (1300)..(1300): n is a, c, g, or t
  misc_feature (1316)..(1316): n is a, c, g, or t
  misc_feature (1318)..(1318): n is a, c, g, or t
  misc_feature (1335)..(1335): n is a, c, g, or t
  misc_feature (1351)..(1351): n is a, c, g, or t
  misc_feature (1353)..(1353): n is a, c, g, or t
  misc_feature (1356)..(1356): n is a, c, g, or t
  misc_feature (1361)..(1361): n is a, c, g, or t
  misc_feature (1364)..(1364): n is a, c, g, or t
  misc_feature (1369)..(1369): n is a, c, g, or t
  misc_feature (1372)..(1372): n is a, c, g, or t
  misc_feature (1375)..(1375): n is a, c, g, or t
  misc_feature (1378)..(1378): n is a, c, g, or t
  misc_feature (1386)..(1386): n is a, c, g, or t
  misc_feature (1420)..(1420): n is a, c, g, or t
  misc_feature (1428)..(1428): n is a, c, g, or t
ggcagtgagaccctgtctcaaattctggggttcaagcaatcctcccacctcaacccacaagtagctacgactgcaagcacctgccaccataaagggctgcattttgccaccataaagggctgcatttttttaaaaagcctaggcagctctaacatcatctgatatggacacaaggccaacagtttccttatttacatccttacctctaaaagatacttcaaagtgacaaaaacgtgttccttccccacttagagacaatgattaacagggccctatatgttcttaccacatacagaggatgcatttatttttgctctatgacacttgcaaaaatctctactgtaattaatttgggtctattattaactctctgttccatcatagaatgtggccaggccttacaatggagagccagagttaaaacttcaagttgcatctgtttttgggctgagtcaccacctttgcctcatgctcctttgtctgcaaaggcctaggattctttctttaaatgaaatgcttaggactttgtggcttgttacatttgtcatttaactgcagtgctattctttgaaagctgctatgtgtattttctctgaagtctgcattttactaaaatttacaacagtctgatgattgattgattactgtccaggtacattttagaaaaagtgttcttcttccagtttgttttactaagcaaactttgagtaaatcctttgtcctatattgaatccagtcccaaagtgttcaggtgagtttctctagttccataaacaaaacatacatagtgggaactccctggtatgccatagagcacacaagaaccccaatattaatgctaacaattataccagtccattttgtttattctgtggaattgacttgacaaagcatgaagatattcccagtgtctgtctgataatattttgcatctaagaatgggtttgactcaagatcttgggttaccaagatgtcttaaatgttcagtaaatatctttcttacagtccagtagcttagagcatgtttgctgattgatattacatttaaacttggggctacagcttgttacctagaattttgagatactaagagaatgcaattttaaatgcccactggttttatttgttttggagagagggtctcattctgtcacccaggctagagtacagtgggaacagtcatggctcactgcagcttaagctcactgcctgggctcaagtgatcttactccagcctcccaagcagctgggactacaccaccacaggtatgcaccaccatacctggctgattnttaaaantttttctagagatgangnctcactatgttgcccanctggtctcatactctnanttnacgcnttnctccnacntcnacntcccaaantgtggggatacaggtgtgagccaccatgcccaanacccacgntctttaactctcacatgttgggcataa

SEQ ID NO: 610585 - DNA, 839 bp, Homo sapiens
  misc_feature (779)..(779): n is a, c, g, or t
  misc_feature (790)..(790): n is a, c, g, or t
  misc_feature (792)..(792): n is a, c, g, or t
  misc_feature (805)..(806): n is a, c, g, or t
ccgtgaagatctagctctcaagaggcctttttttgagcgcccaggcccctacagcatgccgctttcggccagggacctgtttgccaatcctcttccaggccctatgcccgtcctggtgccccgtggcacctgatggcacgcgatcgttcaaggtcaggttccccctctaacccttcttccaccgtggtgccccgtgacaccaccaggtgccctggagcccttgtgtgactcagcctctgttagactgggtgggtgtcatcagcccctgcctcccaggcccgaacctgagtacgggcacccgggtcctatggagatccacttcaaaagagcttaccccttcccacactccacccacccacctacatttcctcgtgtgaaagtttacctcagagttgtaccctcagaaggacgggtatagcacggaggccacagggggtccccacgggctgaggtggggagcccttttacggcgataagcctgccacccccacccatgtatccacccctgctcccactgcgcgcctttcccacggtttcagctctgggtggggaacacgtggccgctatccgacagcgcatgtcccgctcttatcccactcttccaggccccacctccctgcacccctcccctctatagagcaggggactgaaggggtatgtcaggcggggaaggggccaaggacacgtcattgtaacctgagcgtccaccagggagtggaaatggggaagggggcctggagaggggaggcaggggcccctgtgctctctgaacaagttgnaagtccaaatnanacttacctgttcnnaaaaaataaaaaaaggacggccgctcgcgatct

SEQ ID NO: 610586 - DNA, 117 bp, Homo sapiens
ggaaaaacaatccagcagttaaaaaggtcctttacttgcaatccctacccctagctaacccaagagcatttaaaaataactctataagtagccatcacagataccatcaagttctac

SEQ ID NO: 610587 - DNA, 370 bp, Homo sapiens
ttaatttgactatggtaatcagtagacaatgtcatgtgtatattaaatcatgttatataccttggacacacactatttttatccaatattccccttttatggcctttttaaaatgaaatcccaatggaaattttggaaaattttttaattttttgctataattattcataaagggttatcccccactctgaaataatgaagggagacgttgtatggcccatttctattggaggatggttgagatgggtcttctttggtgatgagggtgctgtggaaacaagagccagagaatggagtttggggagaggtagagaatgggaaggttattttggaaagaattcccagctaatgaaggattcttgcgccctta

SEQ ID NO: 610588 - DNA, 764 bp, Homo sapiens
  misc_feature (34)..(35): n is a, c, g, or t
  misc_feature (167)..(167): n is a, c, g, or t
  misc_feature (170)..(171): n is a, c, g, or t
  misc_feature (176)..(177): n is a, c, g, or t
  misc_feature (189)..(190): n is a, c, g, or t
  misc_feature (211)..(212): n is a, c, g, or t
  misc_feature (230)..(230): n is a, c, g, or t
  misc_feature (249)..(250): n is a, c, g, or t
  misc_feature (253)..(254): n is a, c, g, or t
gctactttctaacacttgccatagctcagaccanntctcatcgttcagggatggactgcaaccttaatttacttgccggagtgtacattctagtgtggtgtatactggtggctgttgatgatgattttttttttttttttacacaattctctgtaaactaggagaanaanngctgnnggtttttcgggnngtgtgatgcttctcttggacnngccaaactcttttatggnaatatatctttatattaanngcnngtttgggtcatttgggttcgggggtcactatggagatatggctaagcatcttcaggggataaacagcggttgccagaggaaccaagggaatagggtagtgtagaccgttacagaaggagtggatggctacaaggcgagtccatggatccagaaaaattctgtgaccttaccatttcactggacgataactgttaaacacaagaacagacaaaactccgagaaaaggaccagcacccttcacaagatcgggccaccggatctagcaggggccacaggggccgacacaacgtgggaatcagagggtaaagccccgccgtaccaacagcgaaacaatggaaaaaacacctatacaacactcagcaacacggtcccaaagacgagagaaccactcggtacaaagggtaaatacagcggggcgcaaccacaatggagcagacaccacacctaagaggggagccaagacggcaacagacgcttgggggagcaaccggaccccccaaacgggggaac

SEQ ID NO: 610589 - DNA, 160 bp, Homo sapiens
cgtctagaggatccctgtgctaggtggagtacaatggcatcactcctgtcactgtagctcgactcccaggcttaagcaatcctcccacctcagcctcccgagtagttgggactacgggcatatgccacacgcctggtgatttttgtatttttggtagaga

SEQ ID NO: 610590 - DNA, 427 bp, Homo sapiens
ccagccgattctcgtctggcggaggtctgcgcgccccagcactacgggggcggctgtctgtctcatcctcccgttctcctctgggggagcctatgggttggggggcggccatggcggtggcttcagcagcagcagcagcagcctttggaagtggcttggggggaggatatggtggtggccttggtgctggcttgggtggtggctttggtggtggctttgctggtggtgatgggcttctggtgggcagtgagagggtgaccatgcagaacctcaaagaccgcctggcctcctacctggacaaggtgcgtgctcttggaagggaggccaatgccgacctggaagtgaagatccgtgattggtaccagaggcaagcggcctagttgagatcaacgactagagaccccatgccgccgggaaccgagctcgc

SEQ ID NO: 610591 - DNA, 856 bp, Homo sapiens
ctgtgctgtatctctgataaaggaaaataacctggtccctcctgaacagtgcttggaagcttgatgctaattttaatatacgcgtatgcacagacttgagccagacagtgccagtgacctatgtaagtctgtattctgcactatcccttgtacttttggttccttggtcagctgaaatgtggtctcccagacccatgaaacgatactcacgatggtgtagtctacagtcagcctgactcttagggtcttatctaccccccgtagtaggcaaggtggctagtgtccatctcttatgattatgaacatgcatgggtagacaatgaggcagctcgtcgcttgcacttggctattggttgtgcatttcccagcgtaacgatagtcatctagtgttttaatactgtttgctattacacctgtccttttgcgactgactgtaaagtagctaaggaaagtcacttacgcgtttaacaagcgcagtcgtgtattgatcgtatatttattttgacatgacttttataacatatccagaattaggtgcattgtgcaggtagaggtattggcggtgtgatgaactgctgtcgagatgtggaatgttcactataaagctttgtcttcttagaaagattattctatgtgaatgtctattaattactactatactttgtgtggaaaagttcttctcctaaggtatcaggtaattcctgggcccatagtggggtccttgtatgcgcattctagttttaccttttagtttgaacccctcaagaaattaacgcgttgggagtgtcgttaacgagggggattaaaccacgggcaaggtgcgggtcggaagaaatgcgtctcattacctcttttg

SEQ ID NO: 610592 - DNA, 358 bp, Homo sapiens
ccaaggtaaatggaatggattggaatggattggaatggaatggaatggaatggaatggtatagacttctaacgagtgaacggaatggaatggaatgaaccaacccgagtggaatggaatggaatcgaaataaatggaatggaatggaatggaatcgacccgagggaatggaacggaatgcaatggaatggaatggaatgcaatggaatggaatggaacggaatggaatcaacccgagtggaatggaatagaatggaatggaaagcaatcaacccgagtggaatggaatggagtggaatggaatggaatggaatgcattggaatggaatggaatcgaatgcattgaaccggatagcttg

SEQ ID NO: 610593 - DNA, 173 bp, Homo sapiens
ctagaggacccccggtgaagatggcgactttgctctcgtgaagatcggcgatttcggttgctcagtatggttcttcggcgtgtgcatgcacacgccgagtccccatactgcacacgccgagcctccaaactgacacacgccgagtatccaaagcaatatcgccgatcttcacg

SEQ ID NO: 610594 - DNA, 139 bp, Homo sapiens
caaggcagtgaatcgagctcggtaccagccctgtttcaccatgtgttccatgcgcgtcgtgatgcgcgcccagccttccgccgtgcgcagcggcacgccgaggaaatggctttcggtcttgtgcgcgcagcatcagggc

SEQ ID NO: 610595 - DNA, 1528 bp, Homo sapiens
  misc_feature (623)..(623): n is a, c, g, or t
  misc_feature (847)..(847): n is a, c, g, or t
  misc_feature (955)..(955): n is a, c, g, or t
attgccgtggggtgtgtgtgctcgctgtttgtgtggacttttctccattctcgtctctctgtgctggaggtgtctttcattgtggtgcttgttgggttggagagcccatcgctctctttcgagggggccgcctttggtgtgggcaactagcagtctgctttggggtatatccacacccaacgagacagcgccttggtcaccccggtggggggtggcgcccagcgactcgccggggggagcaacaggcccaccccggttctgaacggggtgactaagtgtgtgcccaccccctctgccgggggagaggggttacttttctttctggagacgagcgcatcgttcggggtgtttggcacccaccttgtcaggatttcacaccagaagtgcttctaccccccgtgggtcacaagcagcacaaacagaggggccccacggggggcacaccccagagggcttctcaaagaagcgcgccattcccccccccgggggggggagagcccagaagggttggggccgcgccaccacagcgcccagtcggcccccctttgtcgttgcaccgacgaccgtgtgtggacacagccctttagggccctcgtgtgttcgaatttcactggggggccaancggggaaaagggccgggcttttcccccgcttcaagggggtgtcccccggggcagactgggaaggagcgcaggcccccttccaacgcctgggatatgccccccagagttcgcggtggcgcccctcgccggggggcccccccagaccacacagatgtttgacccctgtcgtcccgccccccacacgggcgggttgcgcccaatggcgtagacttcccgtggagacntggttcccccccgtgtgccaccacgggagaatcttctttcgctgagggcgcctggggaccttgtatacgcggacacatggtgccacccgtgttatgcctcccacatgnctgtacacggccccccgttcccctttgaactttcgcgctgccagagcttctccccctccacaggtaattctggttttgcctgtgtgcgcgcctggggttccacaccacgatgcgcgcgcccccctctgtggttttttttgcacacgactgcgctctctctggggacaaggaggtgtacacggtggcacacgctgtctgtgtgtaattctcccacgagaaatgtcttcccacgagaacccccaccacgtttgtgagttcacacgctcaaccccacggagtgaaaagcccctcgtgtctaacttgttcttggaggtttcaaccacgccacgcacgatctcacgcttcttggctcgccgggcgaatgcccacgggcaccacgtgaaaggtgtggcacactgagcaccacgagttcaccgggaacaagggccccgggagaactgagggagcctggactgcctggcacgcacagaaggtggcggcctgacaggggttcccgggaggcgggtgcaagccttcgctgttccgagccttgtgtttttgacgcaagcccaatgaagaaaagccaagctttta

SEQ ID NO: 610596 - DNA, 671 bp, Homo sapiens
gacccaggagaactcagtgggcgacctgcgagtggctggacctactgcgtcggggtgcctcaaggtagcttacggatctgggattaccggccgattgccatgcaatcacttgtggaatatcaaggtggtcagtgctggtcaagccagagcacgagaaccggtatcagccatgtcagtagcgtccagatgtgaagaactggcatcggccaacatccctgggtgaacaagggggcttgtgggcgtcgtccttcatgttataatgggcagctcatttggctttggtgaattgtcacctcacctcgcggtaaatgaggaatgacggctcggagcgacaccaaaatttacttgtgactatccttgcgggtgtctctcgctgggcgaccgtgcagctcaatgcctttgacgatctctctgcgttctcacacacctcttctggtttggggaccgtcaactagcgcctggacactggatatccagggaggatcctgaagctacagtcagcacggagagagttttgaagcccctccgtcatgggttgggaccagctcaatgctggagcgggagaagacacaaggtacttccttcgacttcagtgaggaaggagatctccgttccagaaccaactaccgcgtatgagcgggggtcccggggacgccatatgcctgggcaca

SEQ ID NO: 610597 - DNA, 971 bp, Homo sapiens
  misc_feature (397)..(397): n is a, c, g, or t
  misc_feature (574)..(574): n is a, c, g, or t
ttagggaccaacgcccattgggggcccccacccccgggaattggcacaaaggggtgccttgagaaccccctctcacgttgtccccaccacaggggacttgtggcaaagccggcggccgttgggcccaccacgttgggggttccaagccccagcccccgggcgccccgtttatgagttctccgccaggacggttttattggcgccccgggctacaatacccacataggcgtcgcgttctctccctaatattgctcccccgcgggccaccccgcgttctggggtgctcacacatctccgggcgcccaccatttgttggccgctggcccccccacccggggtttctcgggtagcccccacccgccgaaagggtgtcgcccccctcggccccccggctgtntctactagccctgggagaggagagctttcacagggtgtgcccggcacatatctaccacacagagaaggtgggccccgggagccacatcggcacattttctgtgggaatccgaaggagaggctgggaacacaagtcccccggaggttccctcgcacaggcccaacgtgcacagcggcntgagaaggaggttcccgcgtcccacaacgctactcctgttttccccagggaagcccctcggcgccccacacagagaagggaggaccacagctgttctgctcgagagaaactgagaaactggccaccccacgctgagccgcgagaccggttcactggcccgctccgcgagaacgttctattataagaaaggaggaaaagtttcgaggtcactcacctcgagggagaagaagaaagagaatttcccaaagcctttgctatgttctccgtattggcccgtgcccacgcccggcttttcggcatacgggccaaaagagcccagggagacccccggaccggatgttgtaaaagagaaaaattaagcccttcctggggacttgggatccgtcggccagtccaa

SEQ ID NO: 610598 - DNA, 1306 bp, Homo sapiens
tccccattttttaaaaccgttttttacttacaaaagtgaattatttttcaaagaattgaataaaacctcatttctctatattctccagtataaaaagagggtctcacaggtttggccccgagggtctccaggaagccgcccgcggaagaggacagggtcccccagaggccatctattacacctctcgagccctgtgggccacctataatacactctgtaaggagaggacacccctgtgtgtgagagggggaggtaggggcgcaacgctctcgggggcggcacaacaaagacgcagtgcggggcacacactatatcggggcacaaagaagagagtgtgcgccggagctctcaagaccccaaagagagaagagaagtagcacagagtataagaggagtcgagagagagagaacaagagaggcgcgcccacagaaaaaaaacccgccgaagtgcacagaggagcccgtgtgtgaaaagaaatatatgcgagaggggagaaatcacacagagttccgcggcgcgcgaggagagtgagaggcgggaaaaaaaccccctccgcggtgaggcaacagagtgtagacacacagaggaggggaccaaactctatgagaagggacacacaaaactcatcaccaaagtagtgggatatatcaccccaggagagagacccctgtggtgtgtataaacacgaggagcgagacaaataatgggacaaagaagagacactgtggaggacagaaggggtagtagagaccagcaaccaaaagaggggccgacaaaaaaagagccatcaaccatggtaggagcgacccccaagagagggcgacatcctgggggggcgccaattcatagagggagtagttacccccccccacccaatcgtggaagaaataatttattgaggcggaggccaaaacaggacgcagaagagccgaggcggaggggacaaatcttcacacccacaaaaggcgtcgttgaggtagcccgccgagggtcgccctcgtcgaggcacactaagtggtggaggaagaaacgacccacaaagaacacaaaacaagacggcggagaagaaaatgtaaggacagaggagttggtttaataacaccaacaccccccttggtggggaaacggagggggagagaagaaggaaaaaggcatccaggagggggatgagccccccaaaaaagaggaagagagtaagaaacaccagcggaggagcaaaacacgaggggggacacccagagagagggtgaactacacacacggcccaggagagaggaacaagaagggggggagaaacccggacca

SEQ ID NO: 610599 - DNA, 192 bp, Homo sapiens
cattctttcacggcacattgtgtctaggattttggatgttgagaggttctcaattcatgagacttgtttcactgacgattggacagattgcctgttctgatttgctgctcttcatccatttcaggcagcctctgtcaggccttcagggttcagcagtacagccgagactcgactctttcctcctccccagtg

SEQ ID NO: 610600 - DNA, 316 bp, Homo sapiens
gtatcatttctcctattgctatgtgttggtttatttgcttcaggttgattcttgagctgttccgggatccatgtctttctgactctctgatcttacaacatctaagtggagtggaacccacttgtgcttattagctctcttacgttgattacttgactgagcctcatcctcattgacatcttcacaggagacaccatcatactgcagctggtatcccacgaagcaagagcagaccacctcgtcacccgtgtctcggcactgctgcttgcagggcccgccttctcggcagcggacattcagatatgggtccttttgt

SEQ ID NO: 610601 - DNA, 304 bp, Homo sapiens
  misc_feature (221)..(221): n is a, c, g, or t
tgactttgatatctctgtgggcggtgacgattatgggtgtcctggtgtctcaccagttctctagaacacatgagagagagactgggctaaagtggtggttgcattcacgctacgaaaggagagcccggtctgtgccgaaagatctgggggtgagtggtgctacatgacagtgcttatgaaggacgctatctaagtcccaggtctctatgcagacaccgganggcaatccagtgtttgtccatgctggcccgtttgccaacatcgcacatggcaattcctccatcattgcagaccagatcgcact

SEQ ID NO: 610602 - DNA, 113 bp, Homo sapiens
ggtcagactcttctggatttgtagtcagaaagagtgcggcatcttccagctgttgctgcagagataatgcctgtgggggggggggggaggctcctaatcttggatcttgggct

SEQ ID NO: 610603 - DNA, 671 bp, Homo sapiens
ccacacagggaacaaagaaaaaaccgaacacacgagaatacccgagcagggcgaatacggcgaaaccaaaagcagaccaacagacacaccaacggcacccacacgaccggacggatagcacacgacgaaggaaagggagacacaaacagcagcagaatgacagaggaacggaaacaaacgaagacaaaccggcgccgggacaaccagacaccaacacaaggaaacaggaccacaacaggacgaaacagacagagaaagacccacggacggagagaccgtgcacacagaaacaacagcacaaaacacaacaaaagccagagagcagacaacggacagcgacgcgcagcaggggaccagcggaagcccgacgaagcagaacctcagagagacgagaggaaaacagagagacaaagtaggaccagaaaggaagagaccagaaacgaagcgagaaagaacacacaccacagaaaaagcgaggaacagacagaaaacaggggacacggacaacaggaaaaccacggaaaggagaccaagacacacccggacacaggcagacgcaggcgcaagacgcccagacgccgacaccccgcaacagagaccgacgcgcacgacgaccccccgacgctgacacccatcagcgtgagaggggcacatgacaaggacgagacaaa

SEQ ID NO: 610604 - DNA, 527 bp, Homo sapiens
  misc_feature (237)..(237): n is a, c, g, or t
tagttaatttacttgtagatcaacttgaccctcaagtcttctctaaaagtttcgttagagaagatctcaagtaggctttattctatggataacttaggtctacacttgaggcatggcctttctgagttttccgctgaatggccagagttttcagcaatttttctgcaccctgactcgtcctgcgtgagctgaggtgactgttcaggtcagagctcctctgcagattttctttgcccnactttgtggagtctcactctacacatgcccagcttcatattcagccaaagactcaaggggacacctatgcagatttctgaagctcttttgctgtgtggctccttcttttttgcagtctgcccttcaaattctgcctcctttgttgccccaccttccaccctctgtcctgtaatctcagtaggaggattggacttcctttggtatcctcctcctcaggctgtggttagaaaattgttcctagagagccaggcaaggcaattgtgaacaaaaaaatgacattttaagagaaa

SEQ ID NO: 610605 - DNA, 951 bp, Homo sapiens
  misc_feature (550)..(550): n is a, c, g, or t
attgctctcccgcttcggcttcgctttgctgtgccgttttccgttgcaattcttcctctgtgccctctgttttgttctctcgtctctacccgcgccgtcggtgtcttcgtttttttccgtgccgctctttggtcttcctcttctctgtgtgccccacttgttccatccccctctggtctcctttcactgtcctgctcccttggctccccctggtttttgttggccttccttctcggtatggtttttctttgtctctctttgttttcccctcgctcttttgtgtgtcttggttggactctcccttctctgtgtcttactctcttttcgtttgtcgtgcccggttcctattgggtttctgatgctccccctcctcgtcgctttgttgttgattctcttctgtttggtttccacgtgccttaccttgtttgtcatatcatgggcccttgcgtatttcgtatcgttgcgcatttgttcccgttgtattgtatcccacctagtaccccccaccttcccaatccgcttacttcgtactacggcatttgacctctanagccgtagtgcttctgatggctacttgcatgatacgcacgcaagtggccacgtcagactgcacgccaatgctatcatgttcctgttgaagattccccctcttttcgagagtgcagatgacgagatgcgtgctgcgcatgtgcagcaagtcgattaggttgtggtagcttcatcacgttctcgtgattacttgtgcaccttgtatagtgtccccatgggctcccactgtcagcctcgagtgctccctgtcccacgtggctccccctgctggtcgtctagtgtttttttccctctcctgtcctagtgttgaaggcagtccactaaggctgtcaagccccattccctctcggactcttggacagcaggattggatgttgtgtattataaccacggggtttctac

SEQ ID NO: 610606 - DNA, 106 bp, Homo sapiens
agtaagggacagagaccactgtccaaacaaacctccttctccgccaatgatgccaacaccatccttccttcagcagtataaagaggagacagtaaacataattggc

SEQ ID NO: 610607 - DNA, 262 bp, Homo sapiens
gtcaaccggtccgcgtagttccacgtactgagccaccacgaacggagttgacggactcaattgctgcgcgaaccacagcgcgagctgagcccgagacaacggaaaagcactcaacccgtcacctcacatttcaccagccttgtttttcacgaacgttcggtggctgatcacgtgaatccatgggagcgaacaccacgaacggccgaaccgaaccctactgtgtcgtctaagttttcaccactgggccaacactgctaggcgt

SEQ ID NO: 610608 - DNA, 135 bp, Homo sapiens
tactatccacagggtaactgttttgataagctttattacctgatggattgctattttattggttatttctacacagtaaaggtgaatcttcaaaaacatacacaacttagaacctggaaagtactttagagatta

SEQ ID NO: 610609 - DNA, 223 bp, Homo sapiens
  misc_feature (223)..(223): n is a, c, g, or t
gcacgagatgggggtggtttcccctatgttgttatcataatagagagggagttctcacaagatctgctggttttaaagacagcagtttcccctgctgtcactgtctctctcctgctgccttgtgaagaaggtgcttgtttctccctctgccatgattgtaagtttcccgaggcctccccggccatgtggaactgagtcaattaaacttcttgtttataaagtn

SEQ ID NO: 610610 - DNA, 982 bp, Homo sapiens
gatagtaaccatggccgtgctcatgagggtatggtttgacctgcgtcgcgcgttctatcaggagttgactcgcaggataggcgagcatctgtactaggcgcgggcccttgcgcacacgcctcggatttgggggcttacctcacgtacgtgcgctttaccgagggctgctgcttcctgtttcgacacagttggagaccatgggaaaagactatttgtcatcagaccttcataagattctatgacgaggcgtatccgtgaagttattgagattctacgttcgcagttgactgggattccagctagcaacttttcataactctggtgaaatgtatccattaggtcaagctgaactagactagaagattccagaaggctatgtcccagaacgactgtggaatgattatacatgcgatcccaataatcaggacggatgtgcccgtagatttcgtactgataggtcctgaagagatatactgaagaggaaccaatggccgtccgttcagattgaacgctgaaatgggctgaataaccgggtaacaggagctggacagtgcgaaacatgtgatgcagtgtgcagaggagatggaccctggtattgactatgagacgattgacaaggagcttaattgatcattctccgaaagcaactcctgactaattaagcatttatggctccaaatacaaagtatattctacttgtattgcaaagctaatttcgtacatatattcctgtattatcgggctccgtgaaaaacataagaagtctctgacattactgtcctctcaagtgttagggctccgaattggaggggtacagctctgcaagagttgggcctcaacctcccccaccaggaaggcctaacatggtccttataagaattgggtcacactgcggaattggtgaactgcctagacatgggtgccacttggaagggtgcggtttgatataccgtggaagggaagtaaacaagccaaaattgag

SEQ ID NO: 610611 - DNA, 219 bp, Homo sapiens
tattttttttttaaaaacagaaaaaccattttttaatgggttttagagccctaatataaaccaatggaggggccttccatattgggcaaaacttaaactttggggttcatatggaattgaaaaaatggatttttttcccaatggttcatttttacccatctttatggttttaaataaggaatattttcaaccctggataaataagccatagataatgga

SEQ ID NO: 610612 - DNA, 253 bp, Homo sapiens
tcgacgcagaggcaggtggatcacttgacgtcaggagctcaagaccagcctggccaacatggtgaaacctgtctctactaaaaatacagaaattagccagacatggtggtgtatgcctataatcccagctacttgggaggctgaggcgcgagaatcacttgaacctgggaaggcgggaggttgcagtgagctgtgatcacgctactgcactccagcactccagcgcaggcaacagagggagactctttgtctc

SEQ ID NO: 610613 - DNA, 1648 bp, Homo sapiens
tgtaatcactctttcctggctcgcgtacgatagctgcttgtgtgtgggccccgcccttccctctgtttgctgtccccccccgtggttgttttttcgtttagtggaggatctgccttgcatgtgtttccacatcagtatggttgtctcaccagatccctgtgtgggtgtgttgttctctctacacaatgctgtgcagatctagtgagtaggggtggtggctggtcaatatgtccctcgcacttctgcgctagctgtgttgttgtcgtcgggtgggggaggtggttttttttcgcctcggggccgtgattattgtatccgcccctcgtctttgttgcgactccagctgggtgcgctcctcttttttagttagggggggggtgtgttttccatcaggtcggtgctcattaatacgcttctaatcacaccagcagtgtttgtggctcacttcccgtgtggggttagttctccctccggccccccctgttgtgttgttgtgggctgacaattacctatcagagggggtatgctactcatttttgtcgtttggcaaccccactcgtgtgttgggggtgtcacgctcaccactccacggggggcggtctctccttcttaaggggggggagcaacacaacaccgccgtgtttttttcgtcctccccagagggggggtgtgtgcaggggaaatatttcttctcccgtgggggggggggtttctttttttaattttttgtgggggctgcccctttgtccctgtctcttctctcttcaggtgatcctatatctgttgctcatgtttttgttcgccacatgataaccgccctctccttctgtttgccccacacgcgctcacccgggtgcgataccgcctcccacttctttcgcacactcggggcggagagtagtgttttggggggacttctgagggcacacacagcagggagatactttttttcccacacagaagtgtgttgagagcctcatcatagacttttctgtgtctcttgagagagagatatagtgctctctcagagaaagagtgtgtctcccagcacacgactctctcagcagtgcgtcgcacagtagtgtgtcgctctcctcgcccaccgcgtgtctcgcgagacctctctctctctgagagaggtgcgcacacacgcgccgcgcgtgtgtctctctctctcgagagtgtgtacacccgcacgcctccacaccctccgccgacacccctctctatttgtcttgtgtgttgttctctctcccccctctgtgctctcctcgatatataagtgatatcacacaaatactctttctctcctctcggtatattctccaaaaagagaggtgttttgcgagagagaataggtgatagaaagttttttagagaccgcggagggcgtggccacaccccatctctacacgccctcggagcgtgtctgagatgtttctgtgttttttctgaaaaagagaggtgttgtggacacctctagaggggcccacccgcgcctctcttttagaaggcccccctcggggcccacccgaggccccctctcggggaaagaagttttatgggataattttttggccccaaggttcccgaaagacctttggggaattatcccaatataaaaacaccccctttcttataaaaggga

SEQ ID NO: 610614 - DNA, 139 bp, Homo sapiens
accaaattgaaaaggaaaagacgacagatcagtaggagcagccagaagacgaagaaccatagctgtagcagtaggagtagtagaagtcgacgggcgaacgggcatcgactgagtcgaaggatagaaatagaggtaggag

SEQ ID NO: 610615 - DNA, 409 bp, Homo sapiens
  misc_feature (1)..(1): n is a, c, g, or t
  misc_feature (323)..(323): n is a, c, g, or t
  misc_feature (325)..(325): n is a, c, g, or t
ntgagcctctcagacgtggttaaagggaagccaggcaaaaagactgcacgctgttgggtttcatttattcaaaaaccctaaaacaggcagaatgagtcatctgtggtaaaccagcattggggttacctctgggggccgggagggaacccttggggtgccagtcacgtctggcgtctcggccgtgggtggtggggatggctcgccaagcctgtttgttgcacacgtggcatgtcagcagaaacacggggcaaatacacacgtgaacacaagaaccccgggtccctccctcatctacccagcgaccctcagtcaccccagccggntncctctcgccacccacgggctttctgtggagccccagcctgccctggaggccgtgacccaccccgcctcttgcctgaggtcagcc

SEQ ID NO: 610616 - DNA, 172 bp, Homo sapiens
ccagacatcacattggttcactctgctaagttgcatataaccaatatctgggtcctggcctcctttggtgaaccaacaacatcgtgacaacagaagcatattataatgtcacagttcagtgcagcaacctgtggtgaatttagcacccattatgaagtaactaaaagtggct

SEQ ID NO: 610617 - DNA, 726 bp, Homo sapiens
gccttctccaagatcactacctggtaccagtatggcttagtgcaggcccagggcccgaaggcctaacatcctcgtctcaggcaatgagatccggcagtgtgcgacggttacatgatcgagagaaagctgaacgtgagccgacacagtgagtccccgcgtaggcgaggaggtacattctggtgccttctagccggaacccagaacagagcgtcatgtctgagatgaggcagagcgtgctgtctggaacgtggccccaggagtttccagtatgaagacagtgactagtgatccctgggaggaccaacgacctttgctgatgatcggtgcggcgtggtcgagcgaatgccgtccagtgctgggtcagcagtgcatgggagcccaggcgtggatctacaagccatcttgctgggcccgttggggacaagctgtggctagagcgtcttccacatatggctgtcaatcccgatcattacagctccctagtaagaacgctggccatgctgtctggacatggacctaccagtatgtagtcgctggacggaacatgatgccagagaacacagtcacactaccctgagcggccctgggatcaggggggcatcaccgcatctggaccgtggctgagcaagcccgtatcctgcaaagccgtgaggtcccacggcatctctgttgccggaaccccgagtggctcttccgaatctaccaggacaccaaggtggacatccc

SEQ ID NO: 610618 - DNA, 206 bp, Homo sapiens
tcaaccgcctgtatgacctccctgcagtgtaaggacgggggtatacctcctcactaccgccagacaccccggtggaagcattatagaggggaccacgggagggacaaggcttctctgtccgcccttacacacctccagcctcacgctcacttaggcacatcacacacacactggcacacgcaggcatccatcctccatggtgctga

SEQ ID NO: 610619 - DNA, 172 bp, Homo sapiens
tctgatatggtatctgagtaagtcagagagtgtagattcaatcagtacatatgttacggaggtcaagaaaatcttccttttaggttaaaggaaatggtgggccaaagggggtatagagatggcgtttcaaagacccctgagatctcagttctggaacgtgcctgcgatgttt

SEQ ID NO: 610620 - DNA, 390 bp, Homo sapiens
tgttccctttgtctgaatcccagatggggtaaaaaaatccagctttaaaaggcattatcggctgggcacggtggctcatgcctgtaatcccagcacttggggaggccgaagccggcagatcacaaggtcaggagttcaagaccagcctgatcaacatggtgaaatcctatctctactaaaaatacaaaaaaattagccaggcatggtggcgcgcacctgtaatcccagcacttggggaggctgaggcgggcggaccgcgtgagctcagaggttcgagaatagcgtgggtaacatggcaaaacctgtggtcaaaaggtacaaaaatcagttgggcgtggtgacacatgcctgtggtcccagctgcttgggagggtgaggtgggaagatccc

SEQ ID NO: 610621 - DNA, 446 bp, Homo sapiens
  misc_feature (396)..(396): n is a, c, g, or t
  misc_feature (413)..(413): n is a, c, g, or t
gatttgttttatcctatttagtcttaaaaactataaagaaatctgcaggcttattaacatattactcagaatcatattgtctccaaagcacaaactgaattcagttacaagatattggactagagatcatggcaaatcagaggtacataagacctagttccgttgtggagctaaacaaactgcagagacctaaagggaagccttgcaccacactctaggtttggagctcaggttttgagtggtgtcagcactccagaacacatgggatccccgggaggtggaaattgagccgtctttggagaatcagctaatgagacagatgcatgttaaatgtctgttgtggcccaggcactctgctaggcagaggggtgaaccagaagaatgagattcatgggnccaaagaatttgccttntggtgtaagaaaagatggaggcagcttggcaga

SEQ ID NO: 610622 - DNA, 250 bp, Homo sapiens
  misc_feature (146)..(147): n is a, c, g, or t
  misc_feature (207)..(208): n is a, c, g, or t
caggaggggagcggccaccctctggagatcccctgcttcccgctcaagtgggcagtgggagccaactcttcgggcatctttgcgggcaaatccaccatcggtacgccatggccaaggctcacagctgttggagaacagcagccccnnccttgtgctccaccgggcccctctctgtctggctgccggtgcctccgactcctgtctcgnngctgttgggaagatcatacgtgggctggttgtggcgtgcaca

SEQ ID NO: 610623 - DNA, 145 bp, Homo sapiens
gggccttacgaaagggcggcaaaaaggggagccaataggaaggaaagtgggttgattccatttttctaaggaaggattgggtatgatggtgaaaagcacctccctatgtttcaatattaaggacatattgggagaggacggctcg

SEQ ID NO: 610624 - DNA, 327 bp, Homo sapiens
  misc_feature (216)..(216): n is a, c, g, or t
gagaggatttaggggaataagccatataaagactggtgccgacaaggcacagtgctcacacctgtaatcccagcacttctggaggctgggacaggaggatcacttgaggtcaggagttcaagaccagcctggccaacattgtgaaattccatctctactaaaaatacaaaaatgagtcaggcgtagtggtgggcacctgtaatcccaactacttgngaggctgaggcagaagaatagcttgaacccaggaggtggagatttcggtgagtgaagatcatgccactgcatcccagcctgggtgacagagtgagactctgtctcaaaaaa

SEQ ID NO: 610625 - DNA, 270 bp, Homo sapiens
  misc_feature (1)..(1): n is a, c, g, or t
  misc_feature (8)..(8): n is a, c, g, or t
  misc_feature (14)..(14): n is a, c, g, or t
  misc_feature (25)..(25): n is a, c, g, or t
  misc_feature (47)..(47): n is a, c, g, or t
  misc_feature (54)..(54): n is a, c, g, or t
  misc_feature (214)..(214): n is a, c, g, or t
ntaggagnctaggntgaccctcggnctgctgcagggatctgcagcgnactgcancccatgggggccccacctgggtccggcgctacctggggcgatgccttcggtggagcccgaccccctgcagatgccaaccttcccgccagactacgggcttccccgaacgcaaagaccgcgagatggtgggccacacagcaggagatgatggacgcggcantgaggctccagctgcggggactacttcgcccaccaccttatccgggctgctcaagt

SEQ ID NO: 610626 - DNA, 565 bp, Homo sapiens
aatctctgccagtttttattatcaggatggtgctagtctcataaaatgagttagggaggagtccttacttttcaattttttggaacagtttcagaagaaagggtatcagctcctctttgtaaatctggtaaaattcagttataaatctgtctgatcctgggcttttttttttttttttttggttggtatttattactgcctcaattatagaacttgttattggtctgttcaggaactcaacttcttcctggttcaatcttgggagggtgtatgtatccagaaatttattcatttcttctagatgttctagtttatttgcatagagggatttatagtattctctgatgggtgtttgtatttctgtggggatatcccctttatcattttattgtatctatctgattcttctctattttctttattagtctagctagcgatccatctattctattaattttttttcaaaaaaccaccctcctgcattcattttttttttgggaaaggggattttttgggggtcctcttattctccctttcagatttcctggcttcctggagaccttgg

SEQ ID NO: 610627 - DNA, 519 bp, Homo sapiens
gttcaacgaggatcccggcgctacggacgctcaccgcctgcccgcgttgatactgaacagcgcgatcagcaccaccttgaggttttcccatttgccgaaggactcgcgaatcgggccccgcaggccttgccttcatctttcatcttcaagaaagcgggcgattcgtgcaggctcatgcggatccaggtcgagatgcccagcagcacgatggaaaacaagaacggaatgcgccagccccacacttcgaactgatcgccgggcgtccgtagcggccggccgctacggacgctgagtgagtttgccccatccatgccccacgccgtgggatcggatggttattaattataaatatcattaggttagataacctaaacttgcatgcccatcacttcctgatacgccgacaccagtttatttcgcacctgaatccccatctggagggaacccgtggctttctgcaaatcggccatcacatcattcagcgccacgccgggctcaccgagggtgcgtccgtagcgg

SEQ ID NO: 610628 - DNA, 859 bp, Homo sapiens
ggggggagatgggtccttgaggcctgccagtgtgtaagggtgtccagataatgggctgtttctataaggtaatattagatgtgaactcaaccacttccagagtcttttaaatgggtgacatatgtgtatcagttgtaattagtgtgttacacacacaagttgcctcttcgtttgttcctatttactgtaacaatatatttgatgatagaggtttatgtgaatgttgtattatggaagagcagttagagttttagtgaagtcttggggtctagtgtaatctaagataagaagtatgagtagacatggtaaatgtgtacggattaactgccctggtgttatatgtggaacccagacaatcacagactgcccgttagagagacctaataaacgtgtagttagattaggagagcataagtctcctggtaaccgttttcatttcagcagctaagtcattcatggggtatcattggccacgttccactttttatacttctacgtaaagaaaaatgccaattggaggtgcaatttttattaattcctagttactcgcttctgttgtaagtcaatcgctggtgggttgtgtaattgaagagagctttgtttataaagaacttaggctttattaataaccaagacaaggagtaattgtttgggaaggcatgctgaagttggggaactcaacttttctcattcatgtgctatggttcaagaagataaaggtaggcacggcaccttgggataagaactatggtggaaccttctacacatattttggcggcttcttttcaaacggaaatgttaatcaaaatgcgggtttatgtggtaccttggtaatacgttgtttacataagtttcagag

SEQ ID NO: 610629 - DNA, 167 bp, Homo sapiens
acttgctttgggacggcggagtcagtgacctcagtctgtgtagataggcggcagcagtgacctcagtctgtgtggatcggcggcagtcagtgaccctcagtctggtgtaggatcgagggcagtcagtgagcctcagtactggtgtggaatccgaggcagtcagtgag

SEQ ID NO: 610630 - DNA, 219 bp, Homo sapiens
  misc_feature (57)..(57): n is a, c, g, or t
  misc_feature (125)..(125): n is a, c, g, or t
  misc_feature (185)..(185): n is a, c, g, or t
  misc_feature (208)..(208): n is a, c, g, or t
gaggcaagtcttgtaatttgcaatcctcactgctcatttctccttcaatattttctnctgtttcttccggaacaagtcctatattccagaacatacaatataaaggcagttatttaaaatggccnttaaaaagtttccttagatcagtagctccaacattttttggtctcaggaaacctttacantcttaaaaattattgaggacctnaaaggggttgt

SEQ ID NO: 610631 - DNA, 516 bp, Homo sapiens
tctccattgttaggcacacacagtgcctggtatggattagtctattggagttaattattgggttatacaaaatagaatcctgaaaggagtggtttaaagaaaatacagacttaataatacaagccttattcgtaagcagaaatcctcaaccctagggcacctaatgagttctgcggggctgttaaaaacatgcacttttgctgttctcaattagatctggaacatgtatttattctagatagtgtgtatagggatttacaaaaatcgtttatttattaaagtatacaatcttcccaagaacctgggggccccaagaaccaaaactcaaaatatccccagaatctttatcgccagccatcccattagttgaacctattattaatgaaagcgtgctttatatttctatactggggagatggtgtcaggatgtattcattgttacctctgatcaaggtgacacatttcaacaagtggtaaactacacctaatgaattgtcacatttgtttttccttgtg

SEQ ID NO: 610632 - DNA, 126 bp, Homo sapiens
tgttactgataactcaaatttcgataactcactgatcacgtagcgtgcttgcctggtttgataattcccatgccagagtctctgcaacgtgatcggaattaaccagacaaatcgctccaccaacta

SEQ ID NO: 610633 - DNA, 458 bp, Homo sapiens
gctagcctctaaagtgttgaaaggtaccaacgtcactcaatgatcagcagaattattttggctcccttctgtggacctgagaaattcaaaatgtcattcagaattgctttttgctcgttttggacacaaggtctcaccctgtcatccaggctggagtatggtggtgcaatcatagctcactgcaaccttgaacttctaggcttaacggatcttcttgcctcagcttcctgagtagctgggattataggtgcacaccattgcatgtggctaatttttttggttattttatagagacaggtttttgccatgttgcctaggctggtctggaactcatgagctcaggcaatctgcctgcctcggcctcccaaagtgctgggattacaggcatgagccaccgcgaccggcctctctctgttctttctattgaaatccaaagatgtggcttaagggacccttgg

SEQ ID NO: 610634 - DNA, 345 bp, Homo sapiens
tagtctgtacatacatgcagcttattttaatgaatgtttcccaaagattttctgatttgatttgtgcattgagttaattatataattgctaataatataataacaattgaggtgtacagtatttatagtagtattgctgatgcataatactatcagaggaagctactttcactattaaattatgcaaaacaaataatctcttgaaattttctccctgctttacaaatcctatagttttatttctttccattcagctgtaattttttaactgaggtcgtgactagtggacccctgcgcgtaaatttctttattgttaacatttcttttactattttaaaaatcatc

SEQ ID NO: 610635 - DNA, 889 bp, Homo sapiens
cacactcgcgtaggttaatgtgacttgctcctccttgccttctgccatgattgtagaggcctccccagccagcttggaactgaagcaaacactgctcttgccaccttttatgcagaggaaggtactgaggtgaagcgacttgcccaaatccctacaaaaaattggcacattttcaaaaacagacaacaaagagggagcaaagggaagcgaggacgagaagacggtgaaatttggcccgttgttgcacaagcgagtgtttgagcaaggaggtggctcatctacagtgcaatctcggggcttggccctatagggtccatctggaggaactgggataggggatttccgaccgaggcttcgacactattgttgacaaagactggggtagtggaacacaggagggacaagagggtaagggaagcgatctctacctctatagggaaggaggagagaaattaccggagtgagaagcgcatacgtgcaggagcagtagagacgagcgagaacgtggtgttgccgaagtgattggtgagagcaggttatgaagggggtgtattaagggggatatagccagcagagtgtggcagacgtatgatgtgggggagacgggtcagaaggagcgctgcacagacgcatgttacaggaggagatgtggacgcgacgcggagataggggatgtgggggagaggtagctaacgagtgtcggcgaagccctgttggagaggccaagatatgttggggatgtcgcctggcggatgagctgtgggttgtgggcgggaggggacggagaggcggggcgagaggatagaaaaagagggcagatcaaaggcagacaggtgggggagaaaagggtggggcgtacgagacacaggtgggcacaacgccctcgtga

SEQ ID NO: 610636 - DNA, 1345 bp, Homo sapiens
ggttttgctttagtgctgtttccacatttgtgggggttattattggtctttgtggatcctctctgtcgccccagttctttttggtggtgccctttgtttttaaagcccgagctgccgcgttgttgatgcgttttaaatcgtgtgtccatctcctttggggagcattttggtggggcggtacttttgtctttgagaccctcttgtgttgcgtgccccccggcggtaagcccccatgggtgtctctcgtgataggtcttttttgagttttaaccccgctttgttgctgttcacaatatgggggtcgcttttctgtttgaacaccccacgaagccactccctcaggggttattgtatgactgggggccccccgtgagccccaaaggtggttgctagcccctttgtgccgctgggttttaacaccccagagaaccactctgttgtgtagagccccccttgtgggtttccgctgccctttctaatgggagccataagaggggccacagcccccaggaagatgatgttcgcccccagggggggtcccccttggggtctttgaggccttgggcaaatcccccccacatgttcttttcgtggtggttcccgagaggggccaaagcacatgggtttatctctcgcgtcgcacagatgggttccaagagacacacacggccgtgtgcccctaatggtgtccctaataccccacggctttaaatcaagtccaaggacacactcttgggcttgtctcccctctggggcacgcgctaatatagggcgcacactgagcacatctcctccacgagggagatgtcacgctcctttctccgggggagtcccgagagctccacgaatgtgtccggttttttggtgttaaacaagggcctctcttgtcccgcgcgttgcccgcggtatattgagaggcacaccccacggggagaggctgtgttatactcggtgttggagaaaatatggtggaatgcgtggctaacctcgctgcttgctgcacactcaacacgccaccacaccttgaataacaccgattgagacaccctctgtctgtgttgtgtgagaaacaattctataaacacttctagtaagagtgaactttgtcacgggctgcttgtggctaaccacgtttcgctgttctgaaggtgtaataatgttaaacttcgtgatcacaggttgtaatgtttgggaactcttgtcctaatgtaaaagttaaaggtgggccgggggcacagtggctcacacgcctgtaaatcctaacactgggaggccgaggcgggtggatcacctgatggtgaaacctcattttttactgaaaataccaaaattagctgagtggtga

SEQ ID NO: 610637 - DNA, 169 bp, Homo sapiens
  misc_feature (102)..(102): n is a, c, g, or t
  misc_feature (163)..(163): n is a, c, g, or t
gccgagccatctgggcgtcccacggtggagagtgtggtgcttgtaacgcggtggtgctgggagccatcctggtggcaagattgtgggctcttaactttcaangtcaagttgtaagtccccaaggggccttttaagaagaacgtcccttgcttgcccccttctnttcttt

SEQ ID NO: 610638 - DNA, 158 bp, Homo sapiens
atgctcccgcgggcctcaacaagatgtttcgccaactgtgcaagcactgcccgtgtgcagcctgtgggttgattccactccccgcgccgtccccgcgtccggcgatgggcttttacaagcatgtcacagcacatgacggacggtcgtgaggcgctgct

SEQ ID NO: 610639 - DNA, 968 bp, Homo sapiens
tcgctttgggcccgatagaccctgggtccagacgccgggtcccgcgttgcccggggatgtgtgctcacacggcgcgacgccctgtagacctacgagggcctttcactgctcgtgattgacctccgcgcgtagcccaatgggtgtcgctgccgccgcttagcgctcctccattattggcctcgtttcccccaacacgatctcgatattcccctatgtggccgcgcattctttcaccccgagtggtgagcatctctcctggggtcccccccacacaccagctgtgtctcccgaagtccccttcatacacgggggggttatctcctttttgtgatcgccccgacgagtgtttttgtttcccaacggagtgtttgttggagccctttgtgacccctcccgctctttccccgatccccccccattgtgggggtcgttgtgtccccccctccgggcgtatccccccgctgttatcccctctatggagtcccccctccctctgaacaccaccccccgtgtttgttgcgcgctccagggggtgtactaatctacccgctcggggtcccccatgtgtgtattagtgaaaccacccccccggcccgcattgattgttctacggcccctggtgtattcaccacattttttcggggggtctgtgcttttgttgtcctcccctccctaagccccctcccgggtctttgcgagatgctcccccttccaccacatgttcgctgccggcacttttgcgggcgctccccactttttggtgacccccacggttccccgcggcttctctcgttccttattttggggccaacttgtcccgccatcattttttcttccccccccataattttttccctttcaacaccccacccatccctttgtggtttggaaaccccccccttttttggcctttttttaaaagggttttatttttttttttttttccctttttttttgggggtttttta

SEQ ID NO: 610640 - DNA, 84 bp, Homo sapiens
cccgaggacacggctgtttattactgtgcaagagatcgtgcgcgtattggtgagacctatggtcttgactactggggccaggga

SEQ ID NO: 610641 - DNA, 732 bp, Homo sapiens
  misc_feature (22)..(22): n is a, c, g, or t
  misc_feature (109)..(109): n is a, c, g, or t
  misc_feature (318)..(318): n is a, c, g, or t
  misc_feature (420)..(420): n is a, c, g, or t
  misc_feature (427)..(427): n is a, c, g, or t
  misc_feature (438)..(438): n is a, c, g, or t
  misc_feature (518)..(518): n is a, c, g, or t
  misc_feature (530)..(530): n is a, c, g, or t
  misc_feature (565)..(565): n is a, c, g, or t
  misc_feature (571)..(571): n is a, c, g, or t
  misc_feature (576)..(576): n is a, c, g, or t
  misc_feature (578)..(578): n is a, c, g, or t
  misc_feature (585)..(585): n is a, c, g, or t
  misc_feature (590)..(590): n is a, c, g, or t
  misc_feature (595)..(595): n is a, c, g, or t
  misc_feature (657)..(657): n is a, c, g, or t
  misc_feature (664)..(664): n is a, c, g, or t
  misc_feature (669)..(669): n is a, c, g, or t
  misc_feature (674)..(674): n is a, c, g, or t
  misc_feature (685)..(685): n is a, c, g, or t
  misc_feature (704)..(704): n is a, c, g, or t
  misc_feature (721)..(721): n is a, c, g, or t
agtcgctgacacccccccattncctgggcagaggagggcagtggggcccagaaaaaaggggggccagcctcccaggaggactggggcctgccctgctggggtcactgcngaccaggcctcagccttccttccagccccaccctctcccctgcagtttgtttaaaagtggagctgcaaaaattaaataaaaataaaaacaaacccctgagtggtaaaaaaccaaattaaaaacccccctccgtgtcaacaggtcctaaagccagtctggcgggacaggcaggcggggcaggcgggggaggcggctggtggagcgcagcnggtgctgcgagtgccgggctcaccgtcagactcctcctcctccttctcagggcccaggtggccctgggtgcctggtcgcttcaggatggcgctgtactcganggctgtngactctgcctncaggaccacctccaccaggctgaagacggtgatgactgtgcagagcgcagccgtgaggggacaaggatgggagggctgangtcgaggcgcantctgctccatccctgcagcaggaccctgggccctncttcgnctctngnagctctnctcgnctgtntgtaggggccctcagagatgcctggtagcagatggagtagagatctgagcgctccaggtatnaacacanctganggctnggtcgcgtcanggcaatgtggggaaacgtncagaaattctgggtgtnactcatagctt

SEQ ID NO: 610642 - DNA, 430 bp, Homo sapiens
aggagaagggcgccagatacaaccttgtccatcgaggcggcactgtacatttggggaccccatcgtttaaggccatgttactataatcgcattttatacgaaaaggcatggtgacccatgaccagaggtgattctatggttatgtgtgccaggctggctggctggaactggtgtggctatcattattggatggcgacgaccgcgtgctactggctgctagtgttcctgacagttgatagtgggatgacttatgacacttgcccagcctggctctgcctcacatttattcattccgtcccctgggttaacaatgttccctgcgacacctgatacgatgggacctctgtcttcttcaacagaggacttgatttttcgtatttcgcactgtggactctgggcactgtttggcctctgggccactgtttgcgct

SEQ ID NO: 610643 - DNA, 291 bp, Homo sapiens
ctggaatgggaatgattcacaagagtcatctgagtggggatctgcaccactgcactccgagcctgtgtgacagagtgagaccctgtcttaaaaaaaaaaaaaaaaaggttatcctaaggctttactacgacacgtctaagtgtgggatttctttttattgggccccattggggaattgggtctccccaaggtctggaaaatggatatttcatccccttcgtggaaacaacattcaggccatttatctcctttcagcattggtctttcccctatcattctaagggttggtcg

SEQ ID NO: 610644 - DNA, 415 bp, Homo sapiens
tgatgcacagcatcctcatctacctccatctggatctgcttcctcttgaatctagattgacattaggtgtatccacacggcatgattgatttatttcagtaaccggaaagcttccttcatatgtttaggttggacctcatcacagcagtgcatccgagccatagcttcagagagacgaatcatgctctcaagctgtcgccctgttttcctccatgaacacttgagtcactccagaaccatctctctggcggagatgtttatattgctccacaatgaagtcctctgactctttggaaatcttgggtttaaactgtcttgcaaagagaagatatcttctgatatcatcgagggaatagacacgatcaattgattcctcaattcttgaatgcaaatctactatgcgcctggcaatggc

SEQ ID NO: 610645 - DNA, 233 bp, Homo sapiens
  misc_feature (106)..(106): n is a, c, g, or t
ccatatattccaccttaggaaaatactggggcgtatattctattaaaactcaaaagagttgaacacaaaagagaaatacattggatccagacaagaggatatcctnatagaggagatagattaagggaattcctaaaaagaaagctatacatcaattaaacctggagaggaaccagtgcagttggtagcaagaaactagagatatttatctagtcatttataatgatgttagc

SEQ ID NO: 610646 - DNA, 431 bp, Homo sapiens
  misc_feature (18)..(18): n is a, c, g, or t
  misc_feature (161)..(161): n is a, c, g, or t
  misc_feature (163)..(164): n is a, c, g, or t
cattttgggataatgctngaaaatgtaagagcatccctggtccagagctcacatacactgcccagtccagcaaatgccctacagcttaatttccctctctggaagaccatccttcagcattgcttttaccaagagaactctgttttcctgggacagacaananngcacagccttagggcatccttggtctcattatgccagtgggaatgaatgtgaccctttggatgaagtcatttggcaacagcatctgggacataacattgactgtcatacccttccatttagacacacttttgggactcactataaagaaaagattcgaaatgcagaaaacatttgatatacaaagatattcagtgagatagtgcttaaaactgaaaacacacacaactgccaaagcaatagagaaataattaaatcaatcaacaatg

SEQ ID NO: 610647 - DNA, 457 bp, Homo sapiens
gatcactgcaagctccgcctcctaggttcagaccattctcctgcctcagcttcccaggtagctgggactgcaggcgcccgccactgcgcccggctaattttttgcatttttagtggagacagggtttcaccgtgttagccaggatggtctcgatctcctgatctgcccgcctcagcctcccaaagtgctgggattacaggcatgagccaccgcgcccggcccaggcacttaatttttgtgttgacttagtaacaagtgcaactattacgggacgatggagtcaattggcttcatgtgactgtagtgggaaatggtcaagagggaatatgtcaggaatgttggagttggaaacgggaagtgctatggtggagagacaagattactctggccgggctgtaaaggacggctacaatgggaggctgaaggcagaaccaagaaaatgggagtgagtatggaa

SEQ ID NO: 610648 - DNA, 529 bp, Homo sapiens
caaaatatctggattttgatgtaacacaatacaaagataattacatcctaattttatgttaacacatatgacaagttattacaggaaaatatttgacatgcatttgcaaataaaacaaagtttgttcatttatattttacttaagacctgtgaccagttttatcttgtcacaagaatgaatcaagggacaaaggtaagttccacgctccccaaccactgggtgccaatcccccttcaatgtactccttcttccccagagtgcagaagcgtctgaagacagttatgacatggacacatgcatgatctattatacgtaatcacaaaagctgattctgtcatcactgcatcttgtctcatcattaggagcgaatggctggggggacggtggcacagtcagcctccttcaaagttttgtcgattacgggtctatataccagagtgacctttccagtgccgacgtgcacataagacaaggtgtgcttcctccagtgcacctcagagggcttctctgttgcaccttgataggcct

SEQ ID NO: 610649 - DNA, 189 bp, Homo sapiens
cgcgattcggcttcatcttggagtcgcttgtgggttaattgagttaaaagatgagcctaagggaaccctttactcaaataacatgaaagtgaaaaaaaaaacaggggtcaaattagttttaaaaggcaaacctcaggaggtaaaaagtgaccaaattactacctttaaattccctgagtgaagcaggaa

SEQ ID NO: 610650 - DNA, 776 bp, Homo sapiens
actctttttaggtacagtaatctaatatccaaagtcttggactcagctaaagagggtatttaccttaaaaaaaaaaaaaaacaagattccatcttttgatccataatggctggctgggcggccggggaatcaagacaaccttagttcacttgggtattcccataatccttgtctttcagggttgacctgttacagctgcttaaacacatcactgtatgctaggtattgcctaccttcacttacttttctaaccttgccgatgtgctgccttcataaactgggtatatctccgccacacttctacgtaaggcccccaatgcagtcacacaactgtgtatcactgactaaacactcgccacttctgccatgtccagtcattcatctttcccagtcacgacgtgggtcatttaagcatatctgggccagcacctaaagtcaatccataaaccttctaccacgtccccaggggtcaacaatttcaccatcattgtgcccataggcacactccagttaaattagcacaccaaggctaacgtcttctcaaaaaatactatgctagcactattgcagaccccaacgatctcgaaggcattgaactcctaaagcaatagcgctgtagagggttcacccctaacatctggcgtcacatctggtagcaggtcctacattctcacgcaaaagcactaaggttctaaccgcgacattccttcagaaacggttgtgaagcccattaactctcataatccccgtgtgacactttagggcaaatcctcaaa

SEQ ID NO: 610651 - DNA, 195 bp, Homo sapiens
  misc_feature (42)..(42): n is a, c, g, or t
  misc_feature (108)..(108): n is a, c, g, or t
  misc_feature (116)..(116): n is a, c, g, or t
  misc_feature (129)..(129): n is a, c, g, or t
acctttgccgcggggcctgctgggacttgtagttgcctaganagggcaccaccctgcacttccggacccgccgctggaggcccgtgaggcgttggtgtcccctggatnttacatancccaacgccgggnttttgcaatggggcccaggggaggccttgagcttggatttacacttgtaataaagactcctgtgga

SEQ ID NO: 610652 - DNA, 326 bp, Homo sapiens
ggatatgtaccacattttatttattcattcatctgtcgatggacacttaagttgctttcaaatcttggctattttactcctgtaatcccagcactttgggaggctgaggtggtcagaagtttgagaacagcctggccaacatggtgaaacctcgtctctactaaaaatacaaaaattagccaggcattgtggcaggtgcctgtaatcccagctagtcaggagactgaggcaggagaatcactggaattcataaggtggaagttctactgggccattgattcaccactgcacaccagcctgagtgacaactccatctcaaaaaaaaa

SEQ ID NO: 610653 - DNA, 836 bp, Homo sapiens
  misc_feature (453)..(453): n is a, c, g, or t
  misc_feature (629)..(629): n is a, c, g, or t
caagtaggcggctatggtatatatacgcctcacactcattctcaaccccctgacaaaacacatagcctactcgttccttgtattatcccgtatgaggcatagttatgacgagctccatcgtgcctaggatgaacagacctagaatcgctcattgcatatcgtcttcaattcatgccagcataggccctcgtagttaaacaggccattctcattccagataccccgctgaagcttcaccgggcgcatgtccattctcactacactcgcgctcatcggatctgtacagtccctcagttactattctgccttaggcaaatttctgaactagtgatacgcgattctcgcatggtcggcactgagtagatccatgctctccaatgggactgtcatagagcgtacatacattcgctcgatctgaaatatggctgtgttctggagtgtactatactcagnctagagggcactcagcttaatccatgcgtaccttgaggccgcccgcgatgttattaacctctcacttggggagaaaactcctctgttggcttagtagaccagcgttactccctggatctaaatcatcgaacttcgtccgtactatgattcaggacgttcaagcgatagacttaggntcgatcatgtcccattattacggtccgcatctctacgagttattatactcatcgaagcgacaatagtggggggccacgattgcacctccaacaacgatttgaacatatcattaaagaggacccttcatttctagcacgtagaaaaaggaccgctgctattgttctatactgccgtattgccgccgagttctccctccttattacgtc

SEQ ID NO: 610654 - DNA, 548 bp, Homo sapiens
ggagagagagagagaactagtctcgagttatttttcatttaatgggcttggggagggaggtaggtgttactggtgttcactatttagtggggtaataaggaatatgtaaggagtatgggggtaattatggtggcaaccatacggtagttattcagtgggggcattttgtgtaagggcgcaaacggctgcaacacagagttggtgatagcgcctaagcatagtgtcagagttgggataagggggctatttctcgcatagggggtggaagcggatgagataaaaagatcccggactagccaccatattagcgccttgagtgggacgtagcggcctgaaaaccgggggatgagggcgcctgcaacacgtgcgcatagcagggagaattccaaggggtgcttggaagcaccgtaaatagggcgctcagcttcgcgccatagcctagaccgcataagacacgggacgcgccctaaagcagagggggcgaccgaaggctcagagcattaggcagtcaaaacacggggcaaacaactgaaagcagggcaccacaa

SEQ ID NO: 610655 - DNA, 246 bp, Homo sapiens
  misc_feature (124)..(124): n is a, c, g, or t
cagtcgaagcccaaagaccctgtcaaagacacaagctggatcgaaaccctgaacaacacggggcgattctggctattgttcctgggcatcatggccactctcgtcggtggcaccatggtagcgngctgggatgaatggaaggccgaagacgagcccgagaaatcgagcaatctggttggagccggcggtcgcggcggcagcggcaccacatcggtggaaacgcgggcagaagaccgcaaaaccttc

SEQ ID NO: 610656 - DNA, 173 bp, Homo sapiens
  misc_feature (150)..(150): n is a, c, g, or t
gacacagctcccaggaacctccacggccatggcactaggcagagggaatcctctatcacctcctgctgttcacctcgagctgcgacgagacgacgagggcgtgcgcgcacctgccgagatgcttccctgtgcaagaggtttgcagtaggnattggctactggcatgaccctac

SEQ ID NO: 610657 - DNA, 176 bp, Homo sapiens
ctagctcggtaccctggaaattaagggactcagaataaccaaaataatcttgacaaacagtcaagttggaatgctcacacttcctgatttcaaaacttactacaaagctacaataataaagacagtgtgctactggcatctgggtagacatacagatcaatggaatagaactgaga

SEQ ID NO: 610658 - DNA, 543 bp, Homo sapiens
  misc_feature (140)..(140): n is a, c, g, or t
  misc_feature (508)..(508): n is a, c, g, or t
  misc_feature (510)..(511): n is a, c, g, or t
agagacctgaagactacttgagactgttgcttgaaagcagtgtcggcagcacccggacctggacttgtgacgctgatggatttcagctctaaagagaaacccctgtctattcccagacagagagaaagagcagaagagcngattacctgcaaaggacagacttaggtgggcgcccctgtgccagagggcagcggggaggccgggtgcatgctgagcccgagtgtgtgtgtatgtgtacaggcaattgcaaaggcgtagaaaagctttagacaggtatccaaggaaaagctgagtgttgattccctctgggacccagacttctgctccttggctttccctgatcgtgactgtttttctcacggccacgttcctcctgctaacctgctgtgtttacataccaactagatattcgtgggttggagggtgggatagggaagatactttttctttctgtactaatgggaatacactgtctatagtacctgcagcttgtaagtttatttgaaanannctgaaatataaaagcgtaaatttcaaaaaaaa

SEQ ID NO: 610659 - DNA, 107 bp, Homo sapiens
ccggcatcagctggccagatggccggcggcgcggtgctgaccgaaaccgtgttcgcctggccgggcatcggccggctgatgttcgatgcgctgctgcagcgcgacta

SEQ ID NO: 610660 - DNA, 863 bp, Homo sapiens
catggtggctcacgcctgtaatcccagcacttgggaggctgaggcaggcggatcatgaggtcagaagatcgagaccatcgtggctaacatggtgaaaccccgtctctactaaaaatacaaaaaattagccagatgtggtggcgggcgcctgtagtcccagctacttggaggctgaggcaggagaatagcgtgaacccgggaggtggagcttgcagtgagccgagatcccgccactgcactccagcctgggcgacagagcaagacttgtctcaaaaaataaataaattaattaatcagagatgaatacgaagacattacaaccaaatactgcagaaatttaacaggactcattagaggctgctataagcaaatatatgccaataaatgggaaaacctagaggaaatgggtaaatttctaacttaacaacttaccaagactgaaccatgaagaaatccaaaacctgaacagaccaataacaagtaacgagattgaagccgtaataaaaagtctcccaaagaaagaaaagaaagagacacgaaattaaagaaaaggccaggacccagtgcttcactgctgagtttaaccagatacttaaagaagaactaatactaaattctactcatattattctgaaaataaggtggagagaatacttccaaatcattctaccaggtcagtgtcattctgtatcaaaacagaccaaggaccctcacagaccagagaacaaacaaaacaatgggggcggcccgccccagaagtttaaaacatcgttgggcgggccaggtagaaatggccaacggcccgagagaaccgcgacgccggggtgggttccaccaaaaacgccgggcgcggttgaaccagg

SEQ ID NO: 610661 - DNA, 319 bp, Homo sapiens
gtgagataggttcttgctctatcacccaggctgactgcagtggctctatcatggctcactgcagcctcaatcccccacccctgggctcaggtgatccccccacctcagcctcctaagtagctgtgactataagtgtgtgtcaccacactcgactaatttttttgttctttgtagagatggggtcttactatgttgccctggctggtgtcaaactcctgggcttgagtgatcctcctgtctcagcctcccaaagtgttgggattacaggcatgagcgatcacgtctggccaataatggaagttttttaaataagtaaatt

SEQ ID NO: 610662 - DNA, 820 bp, Homo sapiens
gctgtgaaaaaagaacaatgctgaacatgcatataacttatatgtaagaaatactgtacaaggacttgatgcatctgggtagctgtagggcatgaaggatgccaagaagtttaaggaatatgggagaaatagtgtggacattagaagaaactaggtctgatattcaaatggcaaactgccagtttgtctcctgtcactggccacagtgttggatgcattaaaagagaataaaaaaaaagaaaaacagagaaagcgaaaaaaaaagaaaaaagtggtaggcgaatcatttgttcaaagctgtgggctctgcaaaggaaataccagttctgggcaactcagtgtgaccgttcaccagtggcccatttgagggttcagagagcctttttctaggcctacatgcttgtgtgaacaagtcgcctgtaatggtggtcggtatgtataattcaaggagcaccacattaggacaagatgtggatctattcatcatgtttatacaaggccgacggtggcattaattcattgaagggtagtcttaaagaacggttcttccgtgtggtggtgaaaaattttccttctctctcaaattcgggttggattaactagattacttcagggggcgagaaaaaaaaacacatgaaaaaggacaacaagggggcgtctaaaagtgcccggaggaccacggcacggaccgggttgagaaaggggccccaaggggggaaaacaagagggggggtcaaacgcgggcggacacggccggcctgggagccccgggggcagggaccccaaaaagccgaaaataggatggcacatacgggggcga

SEQ ID NO: 610663 - DNA, 111 bp, Homo sapiens
cacaccacctgagtccagaatgtcttacagaatgtcctagaaccagattatcattaacataacatgcccctgactttattcctgaaaatacccacagactcaggtggtgtg

SEQ ID NO: 610664 - DNA, 1547 bp, Homo sapiens
  misc_feature (778)..(778): n is a, c, g, or t
tcacccggcgggcggcgggcggtcttctacatcgggcccccccccccgctgtgtggggcgccccccgggggggggcccccacgggggggtgtgtgggacacacaggtgggcgccccgcgggggggggggcgcccccccatgtgtgtgttctcctggggggacacacacacaccccccgcggggccccccctttgggggttcttctcttctctcttctcgatatggggcgcgcccccacactcgccacgccgcctgctgcgtctctctctctctctctcccccgcgcgggtgggtgcgccgcgcgcggtgtgggtgggcgcgcccgcgcggtggcgcgcgtctctctctctctctgtgggtggcggcctccgcccccacctgctgctgcccccgcgcgctgtgagggtcgtctcacacgcgtgttctgcgcgcgcgagagggtgtgtgggtgggtggtgtcgtcacacactatatctctctgcggcgcggcccacgtcggtgtgtctctcccctctcgcacgtgtgtgtgtgatgggcgtctctctctcgcgcgacagcgcgcgtgtgtgtgtgtgtggcggtggagtcgtcgtctcacctctccgcgcgcgctgtgtgtctctctctctctgtgctgctgtgagagggggggtgggactctatctcaccgcgctgtgtgtgtgctggctgtgtgtgtgtcgggcgacacacacacagtgtgttgtctcccacctccgcactcccctcgtgtggggggctctgtgtggtgcgtgcgagncgcgcgcgtcgatgaccactctctctctgtgtgttgcccacatccactcacaacacacacacaacactatatatcatcacacagcacgaggggggggggggcgcgcgcgcgtcccacatctccttctctctcggtctcccgcggaggggtggtcctctctttgaaccacactacttctgtgctgcgcggtgtggtggtggacgtcctcctcttcctcaccaacgcggtggggaggacacttctagctagtcatctttccgactcccccccctcctccccgcgcaagctagatctcttctgtgctgggcggtcggctcctacaacgtgcctccctgctcccctcccccgcagcgggggagggggggacccccccctcggggggtagttttacgtctttacaccaaccgggggggggccggcgcgcgtcccccctctcatctttactcgtgcggtgatttggcggcgggctgccccaacaccctatattgcggggggtgcatcgctactaatccccaccactgttgggcgttcgatactcagaggcgggccgcactgcttggtgtggcacccaccaccttcgttggggggggtattccctccaggacgtggcttccctacctataccatctggggggggggccccccacatacatattctgtattgtgtccgcagccgacctgacggggggtgtttctcctccatcactctacctgcctgctgcgcgacatagtatctgttttgtccacatccctctatgatagggtcttc

SEQ ID NO: 610665 - DNA, 167 bp, Homo sapiens
tctggacccccatctctatatgtgtccacacaaccacatctgccttttccacaatgcttttcacaaatgaatggtgagagagaaggaaaccttgggaggaggacattacttggttgttcttggctggtttgaaaatgcacaaataaacttgggatgtggttccttgc

SEQ ID NO: 610666 - DNA, 512 bp, Homo sapiens
gtgtaggcgttctaggaggatcccctgcagcccatgtcacaaggatgtctacaataaaaaagagacaataacatgtgctggtgaggacgcggagcaatgggaaccctcatacaaggctgggggggaatgtaaaagggcgcagtcccttgggaaaacagtctggcagttcctaaaaaggataaacatagagttaccatatgacccagcaattacactgtgagataaataccacgagaaagggaaataaaaacaaatgtccacggtacacaaatgttcacagcagcactatccataatagccaaaagacagaaagaacccagatgaccatcaactgaagaatgatatataaaatgtggtatattcatataatgaaatgttactcagcactagaaaggaatgaaatagtgatacatgctacaacatggataaaccttgaaaacattatgccaagtgaaagaatccagtcacaaaagaccacatatgcatgtttatatgaaacgtcccaaacagca

SEQ ID NO: 610667 - DNA, 345 bp, Homo sapiens
  misc_feature (204)..(204): n is a, c, g, or t
tagcaggatcacgtatatgtactattaatagtagacaacattagtgtaggaagatattacagatcaataaagttgcaggcatgtggtcacactgtatccagcacttggaaatcgagatgggaggatcacttgaggcaggagttcgagacagcctggcaacgcaacgagacccccatctctacaaaaattttaaaaattagctgngcatggtggtgggcgcctgtagtcccagctactccggaggctgaggcgggagaatcgcttgaacccggaaggtggaggttgcagtgagccgggatcgcaccattgcactccagcctgggcgacagagcgagactctgtctc

SEQ ID NO: 610668 - DNA, 449 bp, Homo sapiens
acggcctacggagcggcggcggcggttcgtcctacggtggagagcgactacggtaacggtttcggcggcttcggcagcttcagccagtcatcagtcctcctatgggcccataaagagcggcggcggtggcggtggtggaggcagtagctggggcggtcgcagtaatagtggaccttacagaggcggctatggcggtgggggtggctatggaggcagctccttctaaaagaaaatttaataatgcctgggagtggctataggggtagctctattccaatcagcccaagtggggtcaactcctaagccccagcccctcacacacaccgtcttccctgttttagcccttgggggagccacttctaaggctgcttacccttgggggtgttcctctatttgcctgccacctctcttgtctctccctctgaagatggcctcggcgcccccggccg

SEQ ID NO: 610669 - DNA, 405 bp, Homo sapiens
cagagccttcgtgtctttttgtgacctactagtgctagtaactcttttctattccagaatagtgacttacctgtgatatttcactttggaagatcccctccttcaatggacgaactttttcttcctgcaagggtataagctatcactttaatcataacagaatattatcctacgactataaagagacctcaaatgcgcactgatatgtatatgtgtgtattatataggtaagaaaggataagttccttatattctctaatacagtggttcttacactttgtcatgcatcagaatcatctggaggtactcactttgctgggcaaacccccagagtttccccgtaatgaggtcagggtgagatctaaaatattatatttccaatcagtacccaggaaccgcgaatgt

SEQ ID NO: 610670 - DNA, 811 bp, Homo sapiens
  misc_feature (1)..(1): n is a, c, g, or t
natggacaatctaacatggtcgtgacattacaaacgtgtcctcttaatcctcccccgagtaccatttcaacagcactcccttgataatattctctatgaaataatatacagctccacattggcaaccatgacgtttataatttattcaaaagactacttcacaacacactttaccatgccacgataatctttctccggcatgatcacccctcccccactgttggttgattgccccccacataactgtctccccaacaaaggttatttttatactgtggaccttccatttaacaggtactattttcccccccattacaactctttgtatttgtttttacgcacgcgcaatacacccctataatttgctcaagaatcactccctataaagttaacaacaagcagcacactcttatatctcttcaagtaataagccccccctctcttgtcgtaattctagcgataaagaaaaaatgtattttcagcaatgtcatataatataacagaaactacctcgcgctgtatattaaaaggggagtataaactcctctctacctcatgtcacctttgtgaggacaattatcccttcagagcgcttcaaaattttaaaaaacatgttttatttcgggcggaatataacataccccaaaggaaaatcaccactcttattacatttgagtactctgcgccgctgatatcaaaaagaaccacctatcccgcaaatatcctcttgaagaaagaccaaataacaaacatgatttcgacccacaatgtagtatgtaaaaaaactttcccacagacccacataacacaa

SEQ ID NO: 610671 - DNA, 120 bp, Homo sapiens
agggctcaatggaccctcggggacccaagtgggggttttaaccctttccccccccccccagccccctgccctgaaatgagacttttttttgaaatttttaaaaagaacagggaggctcca

SEQ ID NO: 610672 - DNA, 121 bp, Homo sapiens
agtcacacagcgaccatcacacgaatctaccaaatgcatgtagcatctgtaattcacgaacatggtcaacaaaatcatgttcacttacaagccccaatttcatttaacattaagagaaaaa

SEQ ID NO: 610673 - DNA, 101 bp, Homo sapiens
gaccccactccacccttaccaccagacaacctttagccaaaaccatttatcccaaaataaaggttagggcgatagaacattggccaacctgggcgcaataa

SEQ ID NO: 610674 - DNA, 391 bp, Homo sapiens
tggagatggagtctcacggtgccttccaggctggagtgcagtgatgcgatgaaggctcactgcaacctctgcctccggggttcaagtgattctcctgcctcagtctcgggagtagctggaataacaggcgcctaccaccatgccgggctaattttggtattttaactagagatgaggttcaccatgtgggccaggctgatctcgagctcttgacctcaagtgatccacctgcctcagtttcccaaagtgcggggatcacgggttggagccaccagggcgggcctcaatttctccattttaaaagggtcactcagatgccaggtggagggcaggagatctgcatgagaggtgaagatccgggggccagggggatgctgtggtctggctgcag

SEQ ID NO: 610675 - DNA, 168 bp, Homo sapiens
agacaaccttagccaaaccatttacccaaataaagtataggcgatagacattgacacctcgcgcaatagatatagtaccgcaggaatagtggccaatttttaaccaggcatattttgcagggactaacccctttacctctgcataatggattaactggattaacttgc

SEQ ID NO: 610676 - DNA, 378 bp, Homo sapiens
  misc_feature (368)..(368): n is a, c, g, or t
agaggctcacatgtgggccaggctgtcttgaactcgtggctagtgacttgcccacctcagcttcacaaatggctgggatacaggcatgagccactgcgcccggcctaacaaggctaattctacagcattttcataagtgtgggactatgggtcatcttttcaacaaaaccagatattaccaatcaaggtcagtgaaaggagagtggtagacttaaagtagggtcaatggtcctacatttccaggtggtggataacagcctaccatagaggtgtcaccagcttccaccaatttacacgggaggaaacagagctcagctcagagaggtggagtttcccaagaagccaagtcggggggccaagaatagggncggggtgcca

SEQ ID NO: 610677 - DNA, 664 bp, Homo sapiens
ggcggagactgcgaccctcttctctcagtctgccttactaccatgccgctctacgagggcctgggtgagcggcggggcagaagactggcggtgcgtgatctgacctgggagaggcctttaccaagtgtggatttgctggagaaactggtccaacgatgtactaagttcctagtgtgatatacaaagagctgggactgcctaatgcctgtcgagagcttgtatcagtataactactcaatacagcaacgtaattatgttgcctacctaaaggaattcatccgacagtactatattctcagcgctagtctactcggtgaatccgcagatgaccgccgagtccgtgagttatcgaatcggtattatgtccttcgtcacttcatgagagacactcactcgtgtgcttttcaaatattttgaggttccatctgtcttgcttgctccaagtcatctaatggctcttctgacgcttggaattaattctgccatggtcctagattgtggactatagggaaagcctggtgttacccatatatgaaggaatcccagttctaaattgtaggggagcactacccctaggaggaacaagctcttcacaaagagttggaaactcaactattggaacaatgtactgttgacacaagtgttgctaaagaacagagccttc

SEQ ID NO: 610678 - DNA, 297 bp, Homo sapiens
  misc_feature (267)..(267): n is a, c, g, or t
tgtgtcccttcatgcagtgcatggaaggagggaggggtttccagtggctgttctggcagcggtatcaatgatgtcccccccagaatattcagcaccgggatcatacgggggtggtgggggagagaggctccaccatatgtggtggaccagggggaatctggcccttggcgctgcaccggtggcaatgcttacttgtgtcccttcatgcagttcatggaaggagggaggcgtctccagtgctgtgttggcagctgtatcattgatgtncccccccagtatggctcagcgcgggtccgg

SEQ ID NO: 610679 - DNA, 782 bp, Homo sapiens
aggtatatgagcagctggccaaatagcttcaagtgagaaatgtcgatgagcgactccaggtaagctaagcacctcggagttatatagtgcagggctggcactttgggctgtacacgttcttcgattgacaacgagatggtcccagtatacttacactgcatctatgtggccctgggatatggtgtttttccctggagttgaacatctgtgcgagaagctctcaagtatcatcgatccgtacaggagctctctcctcacagagcgtcgagagaacagccgtcaccaaggatgtccatgaatgatcaatagccccatatccaaatgttggctagagggggtgagagaattacaaagggctgcaggatatgtgcccatgagaaggccgtcgagcattgaacttcttgccgcacccagtcctcagacattaaacgagcctggaatgtcagtaaacatgaagatagcaaaaacaaagaagatgttgggggggggcctgggcccacggaaaagcgttattacaaagcatgaccggattgggggggcggggtggaccccagtatggacgacgttgaacagccgtgcacattggccgcgtggcatgaggaggaaggctcgaggggaagagacacatagggggcttcgtgctttgcccccggattaaaaagcaccggccgggagcacaccagtatcttggtgacgataccatgtcagaagatcgggtcttgaaggaagaaacgggggcttacaccgaaagatcaaggcactgatattaattaggggcgagg

SEQ ID NO: 610680 - DNA, 559 bp, Homo sapiens
tcgaagatggcggtggcagggtatgtgttagaagaggaatgaacctctgactgtaaagttttaagttttatgcgattaccgggctctgccatcttaacaaaccctgttcttgggtgggtgtgggtataatactaagttgagatgatatcatttacgggggaaggcgctttgtgaagtaggccttatttctcttgtcctttcgtacagggaggaatttgaagtagatagaaaccgacctggattactccggtctgaactcagatcacgtaggactttaatcgttgaacaaacgaacctttaaaaacaaaaaaaaaaaaaaaaacaaaaaacaaacaacaaaacaaaaaaatagcggctgcaccatcgggatgtcctgatccaacatcgaggtcgtaaaccctattgttgatatggactctagaataggattgcgctgttatccctagggtaacttgttccgttggtcaagttattggatcaattgagtatagtagttcgctttgactggtgaagtcttagcatgtactgctcggaggttgggttctgctccgaggtcgcc

SEQ ID NO: 610681 - DNA, 332 bp, Homo sapiens
cgctctagagatccccaatgcggagtcatagtagtatatccaatgaaatatcaacgtcttcaggcgtggagctataagtcatacagctcagaattggcggggaggtacttcctggggcatcctcaatcaattggaacaggagccagcggataaatatttcagcctcctgttcagtcagacaattctgggaagcattatatatccaacctccgtaatacctttctatggatttttcttctgtctctctaccatctttcccactcctgcatcctggagccaaacgccaaataaactactgcactcaagttttttttctctcctgcaaatgtggg

SEQ ID NO: 610682 - DNA, 893 bp, Homo sapiens
tatctcgtgttcgatgtccacccctgccttggtatctacagggggctttcaaagagagttgtccatcaaagacgtgtgcccctgtaatgcccacccccaaaattcctccgacccggagattgatttcggggaccccacgtgaagatttttttcaccgcactgtattagtactaaacgtatcctggcaaatcggaaagggggctctgtcccacgccaggaatgcttttctcctgcaagaccccctttacaaggcaatggtaagggaaacccgttttgagaagtctataataatacttactctcggctgcagagatttatggtcaagttacctgcccgtggccaactaacccacaggccccgcactgtgaaactagctcgcctgaaatgcggggcagaattgggaaaattaaccgaaagggcaccctttaaaaaattggaatcagcttgttctaaacctactgaagcatttgtgatatttgttacaaaatcacaccgggcccaggccgataacatcactttcctttgcgaagtggcggcacatgcacaatgcttttttctgtaggccactagtatctaggggaaattgctcgtcttttgttggcatatacaatttctacagacaagctccctcccttgcacaaatcatatgcaaccttatgtttacacctattttgtcacagattcacactagtctctgggcgacattccgtatagacagatcatttctctaaggagtactacccttctgcattgtgcttcgaaaatattcctttgtacaacccccgagatggagtaaaatgtccctaattgtgccattctagtgattctctataacttcaccatcttacaccctaattttaaagggaattaaaatcttgtttaaaaaccatact

SEQ ID NO: 610683 - DNA, 194 bp, Homo sapiens
tggacgtatcacacccagaccttcgcgctgaccctgctgcgccgtggtgaccaggatgtgggcaccaactggaccatcggttacgatccgggtcagaacccgccgtacggtgaggccctcaaggctgcctacaagttcatcaacgtcggcaactaccagctcaacgtttcctgcggtgctctcacccaggaaga

SEQ ID NO: 610684 - DNA, 224 bp, Homo sapiens
tccgaccgtggggcggttctccccgtccttaggcacatcctggtggtcgcccgcgtcccgggaggtctccatattgatgcctgaagttagtgcggagcgccctatcggcttagctgcactacagcccattaactcctgggctcatgcgatcctcccacctcaggcctcccgcagtagctcggactacaggcacgcgccaccgcgcccggcacggtgcgttggcc

SEQ ID NO: 610685 - DNA, 780 bp, Homo sapiens
cccttttgttaaatcataagaaaggatttatgagcttcatagggttcagcatgcaagggtaaataaaagaacgtttattgtggtatcccaggtgaaccccatgcaatttctatccattatgcactaaaacttcagaagggccattccatgaatgtaggctctctatgctagagtgttcagtgttggccattgcgcgcttttgcctaatcgacgtgaaggcccccctagccaagcaagagtggtgactagccttctccctgtggcaaccagctgctgtcctcaggccggtaagaaagaggagagtttcttggccactggagcgatttccgttgggcaatgcccaggtagaccagaggccgtgccttgaggctgagctgagacacctcactggttttcccttcgcccattgaaccagtcacagtgtccccttgctcccaggctacacttctgtcttcgttagtcgtaagtttgcccacctgtaaagtagattcaggatatctgtagagggctgtacaacagacttcgaaggtttgctactgtatatactgccattgagaaggggaaatttttcaacattgtagaagcttcagaattagaggtgcctctttacctcagaccagggagtgaagtagagtgtatttagccaaaatacttgttcaattccttataaaaactacatctttcagatgcaagagtgtcgaacatgtgcttaaccgaggtgcttactagttggtgagcagtgttgagcttagaagtggtataacttaggggtgcgtactg

SEQ ID NO: 610686 - DNA, 104 bp, Homo sapiens
ggtggtgagtgaacctgagataatgccattgcactccaggctgggcaagagaggttcttttgaaattcagcagaatcttctctgtctggctgtagcctggtgtt

SEQ ID NO: 610687 - DNA, 816 bp, Homo sapiens
  misc_feature (6)..(6): n is a, c, g, or t
  misc_feature (79)..(79): n is a, c, g, or t
  misc_feature (102)..(102): n is a, c, g, or t
  misc_feature (107)..(107): n is a, c, g, or t
  misc_feature (116)..(116): n is a, c, g, or t
  misc_feature (180)..(180): n is a, c, g, or t
  misc_feature (218)..(218): n is a, c, g, or t
  misc_feature (240)..(240): n is a, c, g, or t
  misc_feature (386)..(386): n is a, c, g, or t
  misc_feature (549)..(549): n is a, c, g, or t
  misc_feature (574)..(574): n is a, c, g, or t
  misc_feature (588)..(588): n is a, c, g, or t
  misc_feature (591)..(591): n is a, c, g, or t
  misc_feature (663)..(663): n is a, c, g, or t
  misc_feature (746)..(746): n is a, c, g, or t
  misc_feature (800)..(800): n is a, c, g, or t
cccgtnccggccatccggcactctgtccttccctgccccggggtgggcacccagcgtgtgggggggttgctcttggggntgctctctgggcctcgttggggngggtnacctttgtnttgtgcggtgtctccttgtggggctcggttggggtggccccgtgggagctgccccgtgcgcccnggccggggccccgcacccgtgtttgggcctcgatgggngttgcgatgccctgcttcttgnggcccgggccgctgccctctttccagcccatggcctgcggcttccggctgccaatgttgtcactgcccagcccgtcccgggtgggctgctcggggtctacgggggctgtgggtatgccgccgtacttcctcctcttgggctctggnggctcgggggtgccgtacttttctctgcgttcggctgcacggtcccggtgcttcgtttgctccttgtcattcttctctggtgcttctggctcgttttctggcaagtgggctcgccggtggatctcagggttttgcttgtggggccctgggggctgctggtgcngggtgggcgcctctttgctgggggnctggcgtcggcggngcnggcaggccggcttctgccggtcggtgagcttctcctcccgctcagggcccccacgctcctgctcctcctcantgtcactctccccgctgtaggctgccaccagtcctcgcggagggcttgggcggtcgtcactggccaatttcgggagatccatnctggtgtgctgtctctcggctagtgctcccttcttctcgaggatggcatagcancatctgcagtggctga

SEQ ID NO: 610688 - DNA, 1395 bp, Homo sapiens
  misc_feature (1)..(1): n is a, c, g, or t
ntctcgtgttgtgtatatcgtgcggtattcattggttttgtctcgtagacacccgtttttgtggtggtattttgtttcgcctttctgctctgtacgcgccgccccctgtacacaagagaggttctcttgtgttcccccttggccctttgtgtccctggggcccgatgcttttggggcgcaacccatgttgtgggaattgtgtgcggggggcacttgggggcacgaaggggcaccattgttttaccgcctccctgatttccccggggtttttcctccgtgggccaaatctcgtttcttagcccccgtgatctccgtgtttcccgcggtttttttcctctttgggtgcccctatttccttttctccccagtgtttccctccggggtgacgccattctctgtggggcccctgtctttagagatgtctttggtgtggagttccctcctctgggcctatcttgggcgccccctccacgtggcgcacgttggacccgttgagttccctcgggcggagatttttgtatgccccccccccagttatcaccgggtttctcctcattggtagagcgcccctttcaaacgccccttcggcacagggtttctccgcccgttggcccacactgcgctttgtgttcaacacgggtgctcacaacctggggtgcaacccccagacccccctatcccacgggcgcccgccccccttggaaatggggagactccacgaaattttttggggggacacactctcacgggagccccgagaacgcctggaggtggacccactgtttctcccgagtatcaccgcccgcccctcggagaggaatttctcactttggggggagtccctcgggagattgggggcacccctctgcgggggttccgctgtcacacactgtcagacccccaccaggccccccgggacaacactttatgaggttgggtttacccccccctgtttcaccacaaactgtgacaccgcgttctatctttctcccagagaggtgtccccccaaggtctgtacatttttggtggccaacacaccccccggctcttgggctctcccaaattcattccgagggttcctcgagggagcccagacccgtggctcttttggtgagctcgtgtccctcgaactttcacagtggccaccgccacgagccgccctctgccctctgtgagaacctcggcgcacgccctcgggcctgccacgcccactcacagcttttcgggcttcggggcacagaaggacgatgagcctcgggaggcctcggggctgggcccctgagactccaaaaaagtggttttgagcccagaagagggcccacagaatggagggctgttcactttcctgcagtttcggccttgtttaattaagcctgggcccttgctgatgcgga

SEQ ID NO: 610689 - DNA, 177 bp, Homo sapiens
tgaagttgccagtggaatggagagaagggcctttcagcgtcaagcacacgtttgctgaatggacagacatgcctggcagctaggcagtacgggtttcttaaccgtggggttcatagacaaggagtctatcgatcaggacttcagctggaggcttgtggcacatggcgacgtgaggga

SEQ ID NO: 610690 - DNA, 142 bp, Homo sapiens
  misc_feature (91)..(91): n is a, c, g, or t
ttaccgcagaccttcgcgctgaatgccgaccgctggtaccagtacttaccaagaccgtgttcctgtcgggtctgccgccggccccagcganccgagcccgagccgaacccgaacctgaacctgcgctggacctcgcggcgct

SEQ ID NO: 610691 - DNA, 323 bp, Homo sapiens
  misc_feature (270)..(271): n is a, c, g, or t
tgggacaagagtctcgctctatcacccaggctggagtgcagtggcatgatctcggctcactgcaaactccgcctcccgggttcaagtgattctcctgcttcagccttctgagtagctgggactgcaggcgcgtaccaccaggcctggctaattttttatattttcagcagagatggggtttcaccatgctggccaggctggtcttgaactcctcacctcattatctgcctgccttggcctcccaaagtgctgggactacaggcgcgacannccaagcccagccgtaacttatattttaaagccaccaaaaagcagttgacgcc

SEQ ID NO: 610692 - DNA, 95 bp, Homo sapiens
ctgttgaggcgctgcttcagcctgcacccctcccctgtctcatagttgtacaatttgacattttcaaataaatatggatggcgggcacctaaaaa

SEQ ID NO: 610693 - DNA, 396 bp, Homo sapiens
accctattgtgtggtgttatgtgtaaagacatacgggtagtgactggttgattgtgactctcgactaccaagggctttcgtgcaataattgtaatatggatcatgcctaaaatacatctatgaacttgaactcagcaatatattgactttactttctccttgttattcaggttgctaaatgtgtaaaatcaaaaaaatcgccaaggtcaggatctattcttatcacgcttgacatagaaaagattgattatttacgcctagacataaattctcatactgtgaaagagtcgattttacgaacaccaaggattaagctgaagggagaggtaagctgactttcctcggttaaaggctgttgttatgggggcttctttctttgagaaacctaatccataa

SEQ ID NO: 610694 - DNA, 107 bp, Homo sapiens
gggtgtggctgataaaacctcccatcggtttggtgctcctcctaactgtgcagaagccaaatcacctgtgctccggcggcggcgggggccccggctgcgccggccgc

SEQ ID NO: 610695 - DNA, 381 bp, Homo sapiens
  misc_feature (228)..(228): n is a, c, g, or t
  misc_feature (355)..(355): n is a, c, g, or t
ctatgctgtacaagagatctccaggaacttactcctcctaacggaaattttctaccctttgaccaacatctcatttcccatctcctcctgcagctgctgataaccaccattctactctctgcttctttgagttcaacatttctgtatcccacatataagtgagattatgcatatttgtctgtctgtgcctggcttatttcacttaatataataatgccctccagggtnggctgggcgcagtggcttatgcctgtaattctgggcactttgggaagggccgaggcaggcgggattgcctgaggctcagggagtttgaggaccaccatgttgggccaggggtgggtcatggaacttnctggacctcagggtgatcccgtcccg

SEQ ID NO: 610696 - DNA, 127 bp, Homo sapiens
gactgctcttctcactgagaagtattgcccccatctcaatcatataccaaatctctccctcactaaacgtaagccttgctatgatggataagattgagagagtgaggagaaggcttacgtttagtga

SEQ ID NO: 610697 - DNA, 1401 bp, Homo sapiens
  misc_feature (1262)..(1262): n is a, c, g, or t
tgagccaagattgccccactgcactccagcctggcaacagagtgagactccatctcaacaacaaaaacaagaacttggaaaggtgaacttgaaacaataatcacaagtaatcaccctagcaatgaatcatagatgggaagattgataacagcaacttctggtccagtctgaatgagtggggagagcctagggtccaaggcagctagtgtaggaaatgctcccgagttaccagccattggcatgtgatagggtcaggcaggggccaggggacaccgcgctccatagctccaggaagagtttgggtgtgagggtctccataggtcctcaaactctctggagtccacgcttgggcctcgggtctggaactgctggtctgaaccacaaagccgcccccgctcggttccttccttggctgaccttcggcctcacgcctggcctaacttgctctcctggcccattaacctgtgttccccttttctcctctccccaaggatctggaaggagtgccaccctctaaaaagatgaaactggaggcctctcaacaaaactccgaagagatgtagacgatgctttaaagcctccgatccatgttccatggaaggtacatcagcaattaattctagagcaactttgccccagcgattcctcttgggtgcgaacagaactactaacgtttcaagtttaccaagtgcaaatccaagaagacccagaacggcgtcacttctcagacactgaagaactctgctgtgaagcaaaacactcaaacctttaagggactgtccttggggaggcaggcggggctgacagctcaggagtgtctgcacactgtctcggaagccaggattccatttgtgttgctgctgtattttccccccacttctctatgtaacgatataagctatcggagggtggtaccgatcaggaacgctttttggcggggctttccactgttcaaccgattccttccgctttctttttttgtgccttgtgcccttgaggtgacctctggcatgtatcctggtggttcttacatccccctctgcaaagtgccctcttggtttggttcgggcggcggctgccaccctactcaccgctctcctccctgccccaggacttcatcggagcaggcagggtggagcgaaggagctccttagcccacctggtttgcaggtgcagggggaccttaggcacgccccaagcaccaggcaccagggcccaaggacgcgcaggtgttggggcacagtccccaagggctcggcccnttggatcaggctgggcactcgctgtgctctcccctccttggggcgtttaagacttggcgtcttcaacccaccatggcccaaaaggacgtgcaaagcccttggaattttctggcactttccttttatttgccccaccacc

SEQ ID NO: 610698 - DNA, 494 bp, Homo sapiens
ggacctgcggtggtccctctactacctgctcagtgcctgcccatgccaaggccccaggatacatctgccatgtgctcagtccgtgggggcctctccaatgggagccgtgaggaatgctactgtggccacgtcttctgggaccaggtgagcactgtacacccagcaccatgtcacacagcaggctgacacatggaggtccacggtctctgccctcccttggaccatgggctaatggttggggaagcacagggactgtggcaaactgggctgaggccctggaaggttgttgcaggagtttggtagcaggagtgatctaggtacaggggaattggcatggtgcatagaccagaagcttgagagggcctgagggcactttccagagcgttgggatgtggcctccaccaatgcgagaagggctgcagggtccagatcaccagcgtttgtagaccgtactgtggcggcttggaggttaccttagggccagtgagctccgg

SEQ ID NO: 610699 - DNA, 162 bp, Homo sapiens
aaccaagaaatccccgggtgggggcccttttttaggttgggcccgccccccccggctttttatttttaatgggtttttccttggtttaaggggtgcctcccttggtttcttgggttgggcccggtttccgggggttttggggttcaagttattaaaaatttc

SEQ ID NO: 610700 - DNA, 344 bp, Homo sapiens
  misc_feature (34)..(34): n is a, c, g, or t
  misc_feature (41)..(41): n is a, c, g, or t
gaaaattgaagaccccaacatcatacatgtaggnagtgacnaaagtggggatcaaaccctaaggtctggaagttgccctagatagattagattcctttggtttttgtttttgtttgttgttgttggagacagggtctcactctgttgcccaagctggagtacagtgatgagatcatggctcactgcagccttgacctccctggggtgaaggaatcctcccacctcagcctctctagtagctgggaccacggatgcacaccaccacacccagctagttttcgtattttttgtacagatgaggtttagccaagttgcccagacaggagctcaagaccagcctgagc

SEQ ID NO: 610701 - DNA, 159 bp, Homo sapiens
caagactgtgtcatatgtttaaaacttttataatcctttgtggttcataagcttgaattgagtttttggtccacatgtcaatgtgcctccctgagccttgtcatggcacatacctgcctatgtgaacaataaaaataaaaaataaaaatgataagcaga

SEQ ID NO: 610702 - DNA, 202 bp, Homo sapiens
acgtgaaccagacccccggcttctccgcgcgtgcgctggcgctcgtggagcgcggcggcgtgtgggtgtccagcgtgctgcgcggcggcggagagctcggcgaggcatggcatcgcgcgggcatgctcgagcgcaagcagaacgtgttcgacgatttctatgcgtgcgcggagctcctcatccaggagaagctcacgcggcc

SEQ ID NO: 610703 - DNA, 122 bp, Homo sapiens
accagctcgggaccctctttttctgggtggttatgacagttgtgtttgctttataattatacattgagccattcacatgtgttgtggatatctttgtattttattattattattattattat

SEQ ID NO: 610704 - DNA, 739 bp, Homo sapiens
agagcagctgacaagcaggccccccggccagagggaggcccgggccgtgagaagggcccctggacccctgggccccatcaacaggccctccaagaccgcggggttctggggggctccccctggggggcaccctgagggatacgcacctgggatttccaccctgccacgagtctcagaaaaccctccttcgcgcttttcacaccagagttttaccctcgaaacggtgctgtccctgcaagagctcaaggccccactcccggacgtgaatctccgggggtttggttcgcggggaagctggaggccaccagccctggttttcctagtccttttgcgtcaatcttctcttgtaagtgagggtcctccacggagaaggaaatccggccacaggccacaacacgacgggctctgggagaaattatcgggcactatagaaggagatgccacacgctgtcacaggggttcaacctctccagaagacaatctcatccgtcccaattctctctgccatttgaaccaactgttctcccccaccccctcgaatacccgtttagagccagaagccccgccaatactatcttgtcagggaccagatagaaacatattttcggcttccatgggccccacacacagtcatccattgcagctcctcaaatttgctgttgtagcacagaaagaagccatataccctgggttaaccaatgagatatggctttgtgcccattaaactatttcccaacca

SEQ ID NO: 610705 - DNA, 276 bp, Homo sapiens
tgaagagtcgcagctgtgcacaccgagtgaccactaaggggcaaattgagctccgtcaggcactagtcgtccgggacctgcaaatggccgcggctcaggatagtggcgcaaaggcatccatcaccaaggccttgaaaccttatgctcacaaatcgctaggccgatgagcagccacgctcgagtgtgcataaccgcgggtcgcacctctggaataagccgaggtacacacagagagaagggaactgtaggtcccccactgcagaggccaaaaggcgt

SEQ ID NO: 610706 - DNA, 457 bp, Homo sapiens
  misc_feature (1)..(1): n is a, c, g, or t
ntcagtccatcgtcagaacggcccctcgacatgtgcgtggccaacgagcacacggaaaggcacgacgccagcaggcaccgggggctgcagaggaaagccacggcggccggactggctgaagcacccacgggcagcacgggcgagcctcggagcgccccaaaggcccacccgctgctggcggggtcacaaaaggccacgggcacttggagccaccatgggtcaccacctccctataaccaaaggtaactcacagcaccccggcccggcaatctcacacctggattcacccaaggggcatgaagacacgtccccaaagacttacagtaaaatactcacaccggccttattcacaatagtccagagccgcaagcagcccggtgcgtgagccctcaagtcaggggcagcctcggcggggcctgtgcctgaaccggcccttggcggagaggaggagcggccg

SEQ ID NO: 610707 - DNA, 391 bp, Homo sapiens
ctgttcctcaccccacccccatgtgtctcctccacgcttgcaccctctcgtcaccttgcagggacagcagcctcggattcagggcccaccctgctccagggtggcctcatcttaatgttccatcagctaaggccttctctttaaataggtctcattcgggggttctgggtggacgtgaattttggaaagacagcccatgaccttctcctattgcccaaataggcccagaaacttccccgagtcctccgaggtgcagagctgtgctgaggtaccggccttattcacaatagtccagagccgcaagcagcccggtgcgtgagccctcaagtcaggggcagcctcggcggggcctgtgcctgaaccggcccttggcggagaggaggagcggccg

SEQ ID NO: 610708 - DNA, 178 bp, Homo sapiens
gttaacacctgtgagcgcaacactgtgggagtgcacagacaggtagatcacttgaggccagggtacgagaccagcctggtcaacacggtaaaaccccgtctctactacaaagacgaaattagctagggtgtggtaggtgggtgcatccaactcccagtctactcggagtagctagtgg

SEQ ID NO: 610709 - DNA, 284 bp, Homo sapiens
taggctgtgtaagacggggtacaaccatcttccagctggctgttcccagagatgcagcacccccaaacccagggggccaagcttgcttctcccagatgtttgacttgctgtttgctgatttttcactcgacttttgtataaatgaggacactttaccattgagctgaatgccagtcaaagactccacctgttggacaattcacaatcatgctcactaattgtgttgaagagcgatttctgcctacagaatacatatatactcctggtttgagaaactccctcat

SEQ ID NO: 610710 - DNA, 165 bp, Homo sapiens
cgactcagaggatcccagggaatactgggttatttggtaactatgttttgtgtgtgtgtgtgtgtgtgggtgagagagagagtcttgctcctgtcagtcaggctggagtgcagtgacgcaatcatggctcaccgtggcctcgactttctgaactcaagttatcct

SEQ ID NO: 610711 - DNA, 557 bp, Homo sapiens
gcaagcgcgcgcgcgtatttgcagaagccagcgggccgcgtactgagtgtactcaaggtgcccaaaggcggggtagtgacctcgcgcgtgcgctgtgcccgcggcagcgcccgggtcctagtgtgtgggttgttgttcggcacctgcacgtgcgctgtgctccatgtgaggactggcgcgagggatttgcggccgtggacctcaccccctgctccaagtcgctatcggagggccgcgcggggtgggctagaggcagccggttctggtgcgctcgcccttagccggggcgacgtgcaacttcagcactggaccgatgagacgccccccctggaagttggaacgccccgaagccagggagtaggatagggtcgtgcatagaagggggggactttgcccgggcaaggccctgtccctgagtaagcccttcccgtagaacaagaacggcccaatgaagcgaacggcagtgcgcgcctaaccgcggaacatttggcacacagattgaccccaagtatccttgccgcggcccaaccttacttggcgccttcttttggccccca

SEQ ID NO: 610712 - DNA, 914 bp, Homo sapiens
  misc_feature (625)..(625): n is a, c, g, or t
ctttaccagctacgtgcgagacgatatatcgtgcgcgacatcaaggagaatctgtgctacgttgccctggacttcgagcaggagatgggccaccgacgcatcctcctcttgcctctggagaagagacttctatctgcccgttggccatgtcatcagcattgggcaatgagcggttcccggtgttcgtaggcgcctgttccagtctatccattccctggagtagtgtaatctgtgctggtatcccactgatgacctcgcttcaacttccatcattgataggtgtgatggtgaatcattccgcgacatatgaccatgtatccgccaaccagcgtgtgtctgtcgtggcggaagccaagcctagtggtatccggggcatttgcttgagcaggatgcgaagaatgtgagactcaccgtccgtggcgcctcagcatcggcagtgaagatcaaggatctatcggctacaccctccatgtaggcgtcaaaagtaacatccgcgcttgctgcggatcggtgttgcgcgtctccaatcgcctggctcctcagcgtgctcccacacttacacaagctaggatagtggggattagtcgaatgacatggagtgacgcacagacgtcgggtgggcccnttccatacgtgccatcgttaaaaatgcttcttaaagcggggactcagctagcattgcgtaagccattttggttgcagattggtgttcaattggcagaatgaggataattttggccctggtaatatgtacacatctccatgcttattctcaacgaaagtgttaatatgcctttcgaacatgcatgtttgttctttcgaagctgggtatctggatttcagcccttggatttgtagaagttgttagctgaatttggacttgtattgaggttacttgttcccctgggtatttg

SEQ ID NO: 610713 - DNA, 1596 bp, Homo sapiens
tgtgtggggggggcccccggggccccccgggcccccacagacagggggggggggggggacactggcacacacacacaccgcgggggcccacacacaagcaggaggagccggtgcgggccccacacaccccgcgggggcaacacacaccacacacagcacagagagaagcacacctgaggacacacacacaaggggcgccaccggacaagcagggggcaccacacaagcgagagaccaccccacagagaagtggcgcgcgcggagaggcgagagagcaccagcgggggcgcacaggtgtgtgacgccctcacacacgcgcgggggggagaagagagagagagagagggggagcgccccacacacagcactctctcgtgtgtgtgtcgccccacacagagtgcgcgccacagagagaggcgcacacagaggaggcgctctagggggccaccacacgcggggcgtgtgagcaccccgcgggcacacaacagactacacacacagcggggagggagacacacacagcgtgtgggcggtgtgagagacacactgctgtgagggagggaggcgctccgcggagtggcgcgcctctctctcatcacagagcaggggagagacgacactgtgtgtcgatcacacacagcagactctctccccacctacactctctctcgcgcgcgcgagcagaagagagcacacacacaaccgacgcgcgcagcagcagcaacgcgcggggggagagaagagcggtcgtctactcgcgcaggaggggggtggaccccgcggcaggagggggcgtgccacgcacggagaggagacccacaccgcagaaaacaacaccacaacctacgaagcagagcgcacactttgtggtgtgtgagagacgacacaacaacccgcagctggagaacaacaaaccacacacggaggggtgttgtcacaacagcgaccgtatgtgatgaagaacacaaggaagaagaacgaaccacaccgatgaggagaagaagacaacaccacccatcaccaaggagggagaagacagaagtgagggagagacagcaatcaccacaacccacagacgagacaaacaacgaacgaaccggtgaggaggagcacaataccaaaaacgacgaagatgggagacagcgtagagatcaaacacaaacacaacaaaaccacagacaccttgaaagagcaacacacaccacaggaaggggaggaagcaactagatgaagcaacaacacaccacatcacctggcggtgtggtgtagcagtcgacaacaccagcacaccactaccccccaggaatgatgaggcaggcccagaacgcaaacagtaggtggaagcaaacacacagacagacacgaagagaggaaataacaaagacagggagaggggagcaccacccaacaccaagcagagattaaccccagcgcgaagaggaggaggacacacaccacgcgcacgccctaggtagtggagagagcaacaacaagaaacagccacccgcgagatggaggaagacgacacacgaacagaaactactatgaataaaaacacaccaaccaagacaacgagaaaaggaggagaggcgtaac

SEQ ID NO: 610714 - DNA, 145 bp, Homo sapiens
gactctagaggagcttatgtgaattctcctcctactgtatgacgctacttagccttctctaccttgcagactaaacagtttatagtactgagatggaaagttgaaggggctagctcgaggcagggctggtggggctgaggcagtg

SEQ ID NO: 610715 - DNA, 116 bp, Homo sapiens
tgggcagagatttagatctcgctatcttctctggctggcctcaacatggaaggtccccatttttgaaagaaaaagcttgtgagccacagaacaggcgagagagtgagggcccgccc

SEQ ID NO: 610716 - DNA, 837 bp, Homo sapiens
tctaatgtctgcttggctgcccggctgcttgcagcccgcgacacagtgctcccttcgccttcgccctttccacctcgcggcaggtcgaaatgaaggctgtgtcatttctggaaggaaactggcccagcagatcaagcaggaagtgcggcaggaggtagaacgagtgggtggcctcacgcgcgaacaaacggccacaccgtgagtgtgatcctggttggcgagaatcctgccgaagtcacgtccatatgtcctctaacaaagaccagggcatgctgcagttgtgggaatcaacagtgagacaactgatgaaaccagcgttctaggatttcagaggaagaattgttagaatttaatcaaataagactgaataatgatgataatgtagatggcctccttgttccagtggcctcttccagaagcatattgatgagagaaggatctgcaagtgctgtttctccagacaaggtatgtttgagtggcttgtcatgtaagttaatgtaggacgaatgtgtgggatcagtattccatgtgaccggctactccatggggtgtgtgggaaataatcaagcgaactggcattccaaccctagggaatgaatgtggttgtggctggaaggtccatacaaacgtgtgaatgcccatgcaaggttacttgcacacaggatggggacgccctgaacgtccgggagggtgatgcccctgttaccattcatcgcaatcgatatactcccaaagacgccagttgaccaaacatccaaatctcgcacaattttggcacactcggcgacagtattcccactttcgtcaccggacatgtccaaggacaggccagacagg

SEQ ID NO: 610717 - DNA, 87 bp, Homo sapiens
  misc_feature (13)..(13): n is a, c, g, or t
taaacttttttcntttttttggttgttggtagttttggttttttacattaattaaacagcaaaaaacatggttacagtcaagcttca

SEQ ID NO: 610718 - DNA, 218 bp, Homo sapiens
tgaaaaaagtttttgaaaggtatttttgtgatgggctatgttgaggggaaaccaaatatttatgattttaaaccattggtatgaaaacattggccaatgtaatatgctcaactttttcaatttttttgctaatttttttaagatccattaaaaatgttttatatttttttttaagtaaaatgggcccagtaagaaaattaaaaatacccggacatcca

SEQ ID NO: 610719 - DNA, 434 bp, Homo sapiens
gggcaggatcagaccggtcttcgggtcggccacctggctcactgctgttctcagctgctgttgatggagacagtgtttgactttcgtagtgtggcctttattacgcaccagaatgtcctgagaagcggactgaggcccaactctgagaggtgcagtttgggcagaccgggaatttggggcagctgtgtttgtgcttggagaccttttttgcttggtgcttctggagggtcgaggtttctcaaatctgagtgccgaatcaaagttgagttgtactgagagagccgcagttaagtaaatgtatgcagacttcctgtcaggtccagccgcgggagcacattggttgaattattcatttggtttgcccttcaagtgtttagttctctttttttgggaaaaaaaacaactctgtggggacacttggatagagaggattt

SEQ ID NO: 610720 - DNA, 435 bp, Homo sapiens
tattagagagggtgtacgggagtcacttggtaactccagaatcaggatacaatgtctctttgctatctgaccttgtaaaatcctccggcatccaaggattccatagtgcatcaagctggcatgtagaagcgaaatagttttgcctcgtgtctttgaaaaatacttccaattccaagaggagggcaaggaaggagagaacagggcagttatccatcgtagggctgatgagaccatgtatgttgcgtctaaaaaggcacagcagtcacagtagtcttcagcacagtgtttaaggcatgacgacgatgtggtcattggacacaggtgtcatgcaggcagttcaaagaaggacgcagcgccagccacacagccccacaggtcctctttagccacagggcacctcctctggagctgaaagacacagccgccgctgtgggt

SEQ ID NO: 610721 - DNA, 427 bp, Homo sapiens
cgcattcttcaaagctatactctttatatgctctggctcaatcattcatagcctggcagacgaacaagacatccgaaaaataggaaacatcacaaaaatcataccattcacatcatcatgcctagtaatcggaagcctcgccctcacaggaataccattcctaacagggttctactcaaaagacctaattattgaagcaattaatacctgcaacaccaacgcctgagccctactaattacactaatcgccacttctataacagctatgtacagcatacgaatcatttacttcgtaacaataacaaaaccgcgttttccccccctaatctccattaacgaaaatgacccagacctcataaacccaatcaaacgcctagcattcggaagcatctttgcaggatttgtcatctcatataatattccacca

SEQ ID NO: 610722 - DNA, 159 bp, Homo sapiens
  misc_feature (32)..(32): n is a, c, g, or t
  misc_feature (34)..(34): n is a, c, g, or t
  misc_feature (36)..(36): n is a, c, g, or t
  misc_feature (118)..(118): n is a, c, g, or t
agcactgtccagagcttttttttctcattaantntnagcgggtctcaaaattctgtgacaaattttcggtcaagttgtttccattaaaaagtactgattttaaaaactaaaattaaancgccacacgcaaaaaagaaaaccaaagtgatccacaaaaca

SEQ ID NO: 610723 - DNA, 359 bp, Homo sapiens
  misc_feature (241)..(241): n is a, c, g, or t
tttggcctagggggggggaaggggggcccccttccttttttgggccccggaaacattggcctgggggtgtcccccaaaagggggccgtttttaaagggccggggcccctcccctggggttttttggcccaggtttgggcaacccgggcccaggaagccccggtggggtagcctagggcctagtttctgcttgggcccccaaatggggggggggggggattgggtttgggggtttccttttnccctttttaccccccccccccccccaatcccccccccccgtttcccccccaagggcttttcccctgtgggtttggaaagggccaacttaaaaaaaaaggggccgcggtgggttttcca

SEQ ID NO: 610724 - DNA, 284 bp, Homo sapiens
aaaaaaaccggggggggttccccccccgggttttttttttgggggggggggggggtaaaatttttccccggggaaaactttttcccttttggccttttttggggccccttttaacccagtttttcaaaaaaacggggtggggccggggggggattttccgggtttttttgccccccggggggggggggttttccccccaaaaaaaattgctttttgttctccccccccccccccccttcctggggccccccctggggggttttttaaaaggggttgggggggga

SEQ ID NO: 610725 - DNA, 309 bp, Homo sapiens
catccccgcccgcccttcccccggggtcgcccccgccgcctcctggcgcttcctcgctgcggcgactcctgcttggccgcccgagccttccttccagaagcccgcaagtctcccaaggtcactcgggacccttgtgtgcctggcctagcccagaggctgctcacctattcattttcatccgtactccaggaaataccaaaaagaaggggtcctggaggagagagatgggctgccgtgggtaggagaaaggagagggctaggagaccccgtaacacaataaaaagagactctccagcggaatcttaaaaa

SEQ ID NO: 610726 - DNA, 168 bp, Homo sapiens
  misc_feature (114)..(114): n is a, c, g, or t
  misc_feature (136)..(136): n is a, c, g, or t
  misc_feature (152)..(152): n is a, c, g, or t
agtactgggttcgagttctcattccatttcttggatgccactggacactgtatctgctttggtaaaaacctccaaaaagttatacatcaggtatctctgagtcagcttcctccnggtgcccaccctcttgccacangatgacgtgatcactngtgaactggtggtgac

SEQ ID NO: 610727 - DNA, 256 bp, Homo sapiens
  misc_feature (3)..(3): n is a, c, g, or t
tancagtgtgtcacatcttaagtggaacagacacgttcatcgggtttatagattccagtaaactaagttctgggtgttgagaaaaaaatggacatgtacataagaaatttaattccaaccagagtaacagaaactggtaaaaggaatgaacaggtaaatgaggcgaaagcccgatatctttaccagggaagtaaaagactatgtttattttccccatttttcttcacaccagcctgaaaagggggtaccgacgctc

SEQ ID NO: 610728 - DNA, 106 bp, Homo sapiens
  misc_feature (91)..(91): n is a, c, g, or t
ccccgcggcatacgcacagttaccggagggcatccagagtcttctgggtggagtgatggatggcgtgtggtcatgagtccttccacgatancaaagttgtcatgga

SEQ ID NO: 610729 - DNA, 329 bp, Homo sapiens
tggaatatgctaaaggtctacagaatagaagatggttcttttgctggagatatttggggagaaattgacacaagattctctttttgtacggtggcaactttggctttagttggggaagcttgatgctattaatgtggaaaaggcaatcgaagtttgtatttatcctgtatgaaactttgacacgtggatttggttgcagaccaggttctgaatcccatgctgggcagatctattgttgcacaggatgttctggctattacagagtcagttgacatcaagtaaattctgatcttaaattggctggtggcttagtgaacgacaatgaccct

SEQ ID NO: 610730 - DNA, 449 bp, Homo sapiens
  misc_feature (1)..(1): n is a, c, g, or t
ntgaccgttgccttcgtcctcgccaggcatttctggcagctcgggcactccactctgacagaggagagaggccatttcttttactgtctcctgtctctgaagagaaggatgaagtaaaagttgaaaaacaacaggaatgaagtttgtagcaagaccagcgcggcccaccgatgaccaggcctgaggttaaaagattaccccccctcccactctaaccacatgtgatctcaatttatcacgaccctttcacgtggaccccttaaaggagtaagttccctaaatggccaagaactctgctttcggggagctcggttgtggagacgccagtctgccgaagctccgggtcgaataaaaaaaaaacctttcttaaaaaaaaaaacatcggtctctttggccttagtggtggtaatttccggacgcttgtctgcattgaggtgtagtttaggata

SEQ ID NO: 610731 - DNA, 376 bp, Homo sapiens
gtcgtactgtacacaagccccatctccagtcccggctctagggcttccaatttaacacacctagaggctgggcatagtagctcatgcctgtaatcccaatactttgggaggctgaggcaagtgaagcacttgaggtcaggagttcgagaccagcctggccaacatggcaaaaccccatctctactaaaaatgcaaacattagctgggcatggtggcacatgcctgtaatcccagctactcgggaggctgagacaggagaatcacttgaacccaggaggtggaggttacagtgagccaagatcacaccactgtaccacagcctgagcaacgaaagaagactctgtctaaaaaaagtaaaaaaaagtcgacgcggccg

SEQ ID NO: 610732 - DNA, 306 bp, Homo sapiens
  misc_feature (17)..(18): n is a, c, g, or t
  misc_feature (102)..(102): n is a, c, g, or t
  misc_feature (189)..(189): n is a, c, g, or t
ggcacgagcgctcgcanngccgtgccacctgcccgccgccgctcgctcgctcgcccgccgcgccgcgctgccgaccgcagcatgctgccgagagtgggctgncccgcgctgccgctgccgccgccgccgctgctgccgctgctgccgctgctgctgctgctactgggcgcgagtggcggcggcggcggngcgcgcgcggaggtgctgttccgctgccgccctgacacccgagcgcctggccgctgcgggcccccgccggttgcgccgccgccgcggtggccgcagtggccggaggcgcccgcatgc

SEQ ID NO: 610733 - DNA, 395 bp, Homo sapiens
gcagaacatgatcgctgatagcactgatcctcgtgccactatttgtggctcccaaattatctaagacagtagagcagatagccagattcattgtgaaattcttacagcaaatcgtttatgtaaaaaaatgtttagtttatacctatacctttcctatacctaaccatactcctaacttcctaaccttccatacttctataccttccttaccaaccatctacctataatatcctataccatactacctaccctataccatctaacttacctaacactatccttaccatatatctaacctaaccttacctttcctatccatactaccgtaccctaccttaccttaccaatctactatcctatccttaccctactaccttaccttacttatccgtata

SEQ ID NO: 610734 - DNA, 383 bp, Homo sapiens
atattactagatataagataaggtctcactctgtcacccaggctggagtgcagtggcgcaacttcagctcactgcaaacccaacctcccgcactcaggtcatcctcccgcctcagcctccagagtagctatgaaccacaggcatgcaccaccacatccagttaacttttgtatctatttgtagagataggtcacgccatgttgcccaggctcacaaattaactatagctagtggccccctgaattagccgtcaagtcaggattcagcgccaggttcagaggctggactctaagattcacgctatcatatcacactgcctgacctgttaaaccagcagattcaattctggataagtgacaggccctctgagtgagtgagctcaa

SEQ ID NO: 610735 - DNA, 894 bp, Homo sapiens
  misc_feature (37)..(37): n is a, c, g, or t
aacacgacagcggctgccgagcgacccggaagtattnattttgcgttgtctgggctcggcggcagccgggctcggagtggacgtgccactatggggtcgtccaagaagcatcgcggagagaaggaggcggccgggacgacggcggcggccggcaccgggggtgccaccgagcagccgccgcggcaccgggaacacaaaaaacacaagcaccggagtggcggcagtggcggtagcggtggcgaacgacggaagcggagccgggaacgtgggggcgagcgcgggagcgggcggcgcggggccgaagctgaggcccggagcagcacgcacgggcgggagcgcagccaggcagagccctccgagcggcgcgtgaagcgggagaagcgcgatgacggctacgaggccgctgccagctccaaaactagctcaggcgatgcctcctcactcagcatcgaggagactaacaaactccgggcaaagttggggctgaaacccttgggaggttaatgccatcaagaagtgaggccgggcaccaatggtaggatgccctgtgacagctgatgtcatcaaccctattgcttgcgacaagcgagaggagctgcgggagaagctggcggctgccaaggagaagcgcctgtgaaccaaaagctggggaagataagaccctaggagaggatgaccgtggtttggaggagactgagctggatcgagaggagctggaggtgcagaaggagaaggcctggatagaagagggggaagttactggagggagatgacaagagttggggtgaaatctgttgaggaagagtcgggaaggggggggtgtaagtgagggatggggtatgtggatggcaggtacttcgaggggagagagttacatggatgtatgatagggga

SEQ ID NO: 610736 - DNA, 760 bp, Homo sapiens
gctgagcgcccggggcaaaaccgaagttggaagtgtctcttagcagcgcgcgcacaagaacgggaagccagcatcatggagacaacaggatgtggaaaacgcatctttaggattcacgatgaagaggaagagccccaggctcctcaagagagcacaccagctccccctaagacagacatcaagggatcctacgtttccatccacagctctggcttccgggaatttctgctgaagccggacgctcctgccgcgccatcgctggactcgtggatttagagcatccttctgaggtcccagcatgagtgcattccccaggccatccatgggacatggacagtctgatgccaaggccaacgtcccggggatggcgcaagacagaggaactacggtgcatgacacacccaataacagaaagattgagcactgtcaaaacggaacagggtgaaccgagatcacatggatcaatgtgccaacacgaaggcaggctgggacttaccagaactcagacaacggcaaatcatggagcggctttttccccaaagtaacaattgccgcaggccgatccaacggtggttcctggtgatacataacaggagtgatacatccacccaacaccaaagcaaggattgaacgaccgtgtagaaagacagcacagtgtccccaaatgtcggtgagacggagaacaccacggagcccggacatacatggcacgcacgatgcgaacatagcagaaccagcctcaagcaatgtgagaacaagg

SEQ ID NO: 610737 - DNA, 868 bp, Homo sapiens
  misc_feature (37)..(37): n is a, c, g, or t
aacacgacagcggctgccgagcgacccggaagtattnattttgcgttgtctgggctcggcggcagccgggctcggagtggacgtgccactatggggtcgtccaagaagcatcgcggagagaaggaggcggccgggacgacggcggcggccggcaccgggggtgccaccgagcagccgccgcggcaccgggaacacaaaaaacacaagcaccggagtggcggcagtggcggtagcggtggcgaacgacggaagcggagccgggaacgtgggggcgagcgcgggagcgggcggcgcggggccgaagctgaggcccggagcagcacgcacgggcgggagcgcagccaggcagagccctccgagcggcgcgtgaagcgggagaagcgcgatgacggctacgaggccgctgccagctccaaaactagctcaggcgatgcctcctcactcagcatcgaggagactaacaaactccgggcaaagttggggctgaaacccttgggaggttaatgccatcaagaaggcccagtgggcctggggcataggcctcacgtcttgggccccccttccagaaggcgggcaccaaggaggagcccgtggacagctgatgtcatcaaaccttaattgggcctttggcggaaatgcgaaagagggaggctagccgggagaaggctgggcgggttggccaacggaagaaagcgctggtgggaaacaccaagatgggcgggaggaaaaaaaagccctggggaagatgtaaccccccgttggtggcacaattcggcgtggagttaaagagggcccggatttggataatggaaaaggcttgggaaaaggggcagtttgggggaaggccaatgtgggtgattgggggaac

SEQ ID NO: 610738 - DNA, 225 bp, Homo sapiens
gagccaggccacagggaggaggcttctttgtgcgtctctcctgcagaggctcggggtctcagggtcttacggcgatacgggagacgaacgaacgtgccaggcaggaggccccctgaagtctgtgtactccgacgctggatctccatccccatccacctgtacggacatcttttccgttgtggtttcagaatgtccctataataaacccctccgctttgttcttaa

SEQ ID NO: 610739 - DNA, 103 bp, Homo sapiens
aggctcccccttctcaaggatgagaaattgagcagcatggtatggtgcgctctgagataagtagtactaggacatctgtgtcccagattcccttctacagttc

SEQ ID NO: 610740 - DNA, 692 bp, Homo sapiens
acccgggaggcggaggttgcagtgagccaagacagtgccagtgcactgcagcctcggtgacagcgcaaggctccgtctcaggtaattacagaaaaaaaaaaaacaaagggccggcggcagtgggccctccagaccggcaataatcccccgccacattgggagcaggacaggcagagcggcggcggcacaaccaccgcgaagcgcacacgcgagcattcggaagaatccaagccctgtggcaaaccgacgcgacgaacaagctccccgtcgctcaccacatcaacatatcaacaacgtgacgccgcaacacacgacacgcgcgcacaccagcctgccagacaccgccagcgcaatacatcccgcggtgcagctgcttcattgctggtttctaccaagaacatactggcccgtgagtaaccaccattgggtgatgcggctacacaacgtcgcacggccacttatagttccgccgcgcaatcaatactaagtcccagttgttggcgtcactccccagactctggtgcggtcgaacatcaataggacgttcgtagacataccggcgcatagttctactcacccgcagaacgccctcacatagctcggttagactacgcacgcaagcgatgtgccgctgcttctcgacaaatagggtcagacaccaaactaacgcgccacatagtctactgatgcga

SEQ ID NO: 610741 - DNA, 655 bp, Homo sapiens
tgggccccggggaaaaaccgttttaacggggggggcttttccccccccacaaaaatttttaaaaaggggggaaaagaggggggggggggggggggggggaggggaaccaccccaccacctgaaaggaccaggagagccctcctgtgcgagccggacctacgccgtcggagaacgagggtggaggggaggagggagcacgagcggcgcgcgcaacactacccgcgggcgcaacacagctctcccaccggggggagccgccgcactggtgagagcagcaaagtcctccccatacacatatatatatcacaagcgaaaacgcggtctaaaaaaaaaactatgtattctactttcttctccagaggagagaaaaaagaatctacgctcacaataattatgatggagcaaaagaagaccgccggcggtggtggtcggcgcaccgcgtggggatcattatgtagaggcgggggtagcgagaagaagagacgagtcaacgaagaaagaaggaagcggaggacaacgaagtcgttcgagcgcaccacccaactcttgcggtgtccacacggcgggggcatcaatggcgcgggggcccccctaacaggaaggcgcgtatcaatagaagaaaacgcgcagtaacgcgcgttagtagtacaccgaa

SEQ ID NO: 610742 - DNA, 354 bp, Homo sapiens
  misc_feature (47)..(47): n is a, c, g, or t
  misc_feature (152)..(152): n is a, c, g, or t
  misc_feature (248)..(248): n is a, c, g, or t
ctaaagagatcctttgatattttcaacgcagccctgctttgggtccnctggtgctgccacacttcaggctcttctcctttcacaaccttctgtggctcacagaacccttggagccaatggagactgtctcaagagggcactggtggcccgancagcctgggcacagggcagtgggacagggcatggccagggtggcacttccagacccctgggctttttcacttgctgggctgccttaggaacctttntttacattaggcagttttgcttttgttatggcacttttgttttttttctttggggtcttgtttttttttttccactttaggaaattgcatttcctggacaggaagg

SEQ ID NO: 610743 - DNA, 315 bp, Homo sapiens
gaggcatgaaggcggccatgacaacatggacatcgataagtgatgagttaatgcagggggtagctgaccagcaagaactcgcagaggagatacaacagcaataacgaaacctgtagggttaggagaagagtccgacgagaatgagctcatggcggaattagaagaactagaacaggaggaactagacaagaatttgctggaactcagtggacccgaaacagtccctctaccagatgttccctctatagccctaccatcaaaacccgccaagaagaaagaagaggaggacgacgacttgaaggaattggcgaactg

SEQ ID NO: 610744 - DNA, 120 bp, Homo sapiens
tgaaaagcactcagagtttcgtgtgtgcttccttcagccctaactacagcattagcatcacctcacgggtacatttgtaataaacctcagcaaaccttacctgaagagcacgtcgacgtt

SEQ ID NO: 610745 - DNA, 352 bp, Homo sapiens
gctcccacagaagagcaatccgcatccagaacaatccatcagaggttgaacataaatggctgtaacagacgctcgtgcaagcaccaccccgttgatcgaaaggcgttcgatcgactacatcccggaagcggaaagacacggccgtctattgagtcagttcaccctgtggttgggtgccaacctgcaaatcaccgcgattgtcaccggggccctggccgtggtgttgggcggtgatgtgttctggtcgttgatcggtctgttgatcggtcaactgctggggggcggcgtcatggcgctgcacgcagcccagggcccgtcgacccggccgcgaatttagtagtagtagtcgacc

SEQ ID NO: 610746 - DNA, 642 bp, Homo sapiens
agcggatgaaaaaacacattgcaaagatgtttttcagaatgttcctatctagtatttatgtgaagatatttccttttccaccataggcatcaaagtgctccaaatgtccacttgcaacttctactaaaggagggtttcaaaactactcaatcaacaagaatgttttaactctgtgagatgaatgcacacatcataaagaagtatctcagattgtttctttctagattttatgtgaaaatatttccttttctaacttaggctgcaaagtcctccaaatgtccacttgcagattctacaaaaagagtgtttccaaactggctcaatcaaaagaaacattcacctctgtgagatgaacgcacacatcacaaagatgtttctcagagttcttctatctagtttttatgtgaagatatttccttttccaccattgtcctcaaagcgctccaaatgtccacttgcagactctacaaaaagagagtttcaaaagtgctcaatcaaatcaaaggtttaactctgtgaggtgaatgctcacgtcacaaagaagtttctcagattgcttctgtctagattttatgtgacaatatttccttgtctaccatagtccgcagagaacacaaaaatgtcctcttgcagattctacta
